United States Patent Application Publication US 2011/0183924 A1 - sequence listing, part 134

SEQ ID NO: 363593 - DNA, 1898 bp, Homo sapiens
ttgagacagtgtctctcacccagtctggaatgcaacagcgtggtctcggctcactgcaacttccacctcccaggttcaaaggattctcgtgcctcagcctcctgagtagctgggactacaggcatgtgactctatgcctggctaattttttttgttatttttaagtagagacggggttttgccatgttggcccaggcaggcggatcacttgaggccagaatttgagaccagcctggccaacatggtgaaaccctgtatcactcttttagacccttctgagtgtttgcaggttgagtgttcacagggtgttagcctattgagctttcttttgcggttcttatgcaggtgatttctgcctttgcaggccggagccctcatgacttcagtgacctgcttctgcccctctaggtctatcagccacagtctctgcatgtttccaagagcagcagaaaatgaacacattgcaggggccagtgtcattcaaagatgtggctgtggatttcacccaggaggagtggcggcaactggaccctgatgagaagataacatacggggatgtgatgttggagaactacagccatctagtttccttggcttatgaggtggcaacatcttgtacttcggagattctgaagccgagcaacttgcccaagtccttcttcttttcccattaacaagatatgatatcaccaagccaaacgtcatcattaagttggagcagggagaggagctgtggataacgggaggtgaatttccatgtcaacatagtcctgggatcgtgggactttaccagatcggtttgtaataacacctcgaagacgctatccgatccatcagacccagtattcctgtccgggggtacttcccacagtgtgctggaatggttatcacaagaaggctgtgctgtcccctcgcaactccaggatggtgtgtagcccagtgactgtgaggatcgcccctcctgacagaagattttcacgttctgcgataccagagcagataatcagctcaacactgtcgtcaccatcaagtaatgccccagacccatgtgcaaaggagactgtactgagtgccctcaaagagaagaagaagaaaaggacagtggaggaagaagaccaaatattccttgatggccaggaaaataaaagaaggcgccatgatagcagtggcagtggacattcagcatttgagcccctggtggccagtggagtccccgcttcttttgtgcctaagcctgggtctctgaagagaggcctcaattctcagagctcagatgaccacttgaataagagatcccgaagctcttccatgagctccttgacaggcgcttacacaagtggcatccctagctccagccgcaatgccattaccagttacaacagctccactcgaggcatctcacagctctggaagagaaatggccccagttcatcacccttctctagcccagcctcatcccgctcccagacaccggagaggccagcaaagaaaataagagaagaagagctgtgtcatcattccagttcttcaactccattggcagcagacaaggagtcccagggagaaaaggctgcagatacaaccccaaggaagaaacaaaactcgaattctcagtctacacctggcagctctgggcagcgtaagcggaaagttcagctgctgccttctcggcgaggggaacagctgaccttggtatggtcttgtccatctactcctgccctccccggcttagctctcctaagtcttaggaacgctaaggacaagtttcttctggttttttttctaacttatttttgtttttgttttttgagacaacatccctctgtcacccaggctggagttcagtggctcgattttggctaaccgtaacctctgcctcctgagttcaagcaattctc

SEQ ID NO: 363594 - DNA, 850 bp, Homo sapiens
cccccaccttgggacacacccggaagcggcggcggcgcccctcggggaagatggcgccctcggggctgaaggcggtggtgggggaaaaaattctgagcggagttattcggagtgtcaagaaggatggggagtggaaggtgcttatcatggatcacccaagcatgcgcatcttgtcttcctgctgcaaaatgtcagatatcctggctgagggcatcaccattgttgaagacatcaacaaacggcgggaacccattcccagtctggaggccatttatttgctgagccccacggagaagtcggttcaggccctgatcaaagacttccaggggaccccgactttcacctacaaagcggcccatatcttcttcaccgacacctgccccgagcccctgttcagtgagctaggccgctctcgtctggcaaaggtggtgaagacgttgaaggagattcaccttgccttcctcccctacgaggcccaggtgttctccctcgatgctccccacagcacctacaacctctactgccccttccgggcagaggagcgcacgcggcagctcgaggtgctggcccagcagattgccacgctgtgcgccaccctgcaggagtacccggccatccgctaccgcaagggcccagaggacacagcccagttggcccacgccgtcctggccaagctgaacgccttcaaggcagacactcccagtctgggcgagggcccagagaaaacccgctcccagctgctgataatggaccgggcagctgaccccgtgtccccactactgcatgagctcacgttccaggccatggcgtatgatctggcttgggaccattagagccagggaaccatcgg

SEQ ID NO: 363595 - DNA, 359 bp, Homo sapiens
  misc_feature (20)..(20): n is a, c, g, or t
  misc_feature (28)..(29): n is a, c, g, or t
  misc_feature (33)..(33): n is a, c, g, or t
  misc_feature (37)..(37): n is a, c, g, or t
aattcgcggccgcgtcgacnggcgcggnngcgncgangggggaccgggagaaacgagatgggggtgaagctggagatatttcggatgataatctacctcactttccctgtggctatgttctgggtttccaatcaggccgagtggtttgaggacgatgtcatacagcgcaagagggagctgtggccacctgagaagcttcaagagatagaggaattcaaagagaggttacggaagcggcgggaggagaagctccttcgcgacgcccagcagaactcctgaggcctccaagtgggagtcctagcccctcccctgatgaaatatacatatactcagttccttgttaaaaaaaaaaaaaaaaa

SEQ ID NO: 363596 - DNA, 475 bp, Homo sapiens
ttaggctaggtacgaggctgggtggtctggctggaccccggtcatcaaggatgtaatggaggacgccgtggaggaccggctggacaggaacctgtggcccttcgtatccgaccccgcccccacggccagctcccaggccgctgtcagtgcccgcttcggtcactggcacaagaacaaggctggcgtagaagcccgggcgggcccccggctcatcgtgtatgtcatgggcggtgtggccatgtcagagatgagggccgcctacgaggtgaccagggccaccgagggcaagtgggaggtgctcattggctcctcacacatcctcaccccgacccgcttcctggatgacctgaaggcactggacaagaagctggaggacattgccctgccctgacccctggccccgccccctacccctccctttccagagaaataaactcttcccgtcgctctgccaccagtgcctacctcaccttct

SEQ ID NO: 363597 - DNA, 1344 bp, Homo sapiens
  misc_feature (1012)..(1012): n is a, c, g, or t
  misc_feature (1116)..(1116): n is a, c, g, or t
gcacattgcttggggggagctcacctcacccaccctctgccattccagatgataatctacctcactttccctgtggctatgttctgggtttccaatcaggccgagtggtttgaggacgatgtcatacagcgcaagagggagctgtggccacctgagaataagaggagtgtttgagggttcattccaggggtgggagagggtgtggggcagcagtctgctggggactaatgtctgcctcccataagccgaccctgccctgatgtggggctctggaggcctttggctcgtgtcccatttgtgacttttccttacagagggagctgtggccacctgagagcttcaagagatagaggaattcaaagagaggttacggaagcggcgggaggagaagctccttcgcgacgcccagcagaactcctgaggcctccaagtgggagtcctagcccctcccctgatgaaatatacatatactcagttccttgttaaaaaaaaaaaaaaaaattcaaaaaaaaaaaaaaaaaagcaaaaaaaaaaaaaaaaaaaaagaaaaaagaaaaaaagacgagaagagacccgaaccagaaaaacaaccaccaaaagggaacgacaccacaagaacaaacacacaaacaaagagggagaggggggcgcgcccaaaaatacaatcccccaggagggggcgccaacaacagccgcccacccccttcctaggcgacaggcggcgccccacacaggggccgcaccccataaaacaccacgaagggacgcgcgccgacccaaacaaccaccgacgcccgagaatggagaacacacaacgccgccacgcgcgggtcatacaggaacgacagaccgcccccacaactctgagggggggacgagcaacgacatcgtagggcggcagcaaccccccccccaacgcagaatattctcaccgaggtcgtccgcgcgggcacacaacatcccacacctaccactcgacggtgagacgaatacgttacgaggccgagaccanacacaacacccacacactcgctccacaacttcgtgcggcgctgaggtcaacaaaccacgcatcttacgccactcgccacgcgagcgtaagcgctcttactatcntagtcacaagacaacacatattattattaccaccacgccggcacggacgcgctgatctaaatgtacgaataccacgatctccagacccttagagcacactcaactaaccgagaccacagaccgtcaacaatcacactcgcactctgaacgacgcaagcaaatctcgcctatccgactcagcctaccgccagtcacaaccaagcctcacatccaaaatcaacccaacat

SEQ ID NO: 363598 - DNA, 269 bp, Homo sapiens
gagctggaattcgagaactacctacttccctgttctagtctggtccacagccgagggttggacgatgtcatacagcgcaagagggagctgtggccacctgagaagcttcaagagatagaggaattcaaagagaggttacggaagcggcgggaggagaagctccttcgcgacgcccagcagaactcctgaggcctccaagtgggagtcctagcccctcccctgatgaaatatacatatactcagttccttgttaaaaaaaaaaaaaaaaa

SEQ ID NO: 363599 - DNA, 687 bp, Homo sapiens
cttatttttttctgtagagaacgtctcccttggtctttactactaagctcaagcgatcttccacttcgcttctcaaagtactaggagtacaggcgtgagctgtttctctctctcgctttcttgctgtctctcgctctctctcgctctctgttccacttccccatctttgcctgccatcccccaccctaccagccacaccaggcgcagcccctctgtgaccagcctccttcccctcaatccccctgctgccctccctgccctgcctgtagggctcggggacctccagccggctggagccgagagaacgcatggagcccacctatcagctgtcccgctggaccccggtcatcaaggatgtaatggaggacgccgtggaggaccggctggacaggaacctgtggcccttcgtatccgaccccgcccccacggccagctcccaggccgctgtcagtgcccgcttcggtcactggcacaagaacaaggctggcgtagaagcccgggcgggcccccggctcatcgtgtatgtcatgggcggtgtggccatgtcagagatgagggccgcctacgaggtgaccagggccaccgagggcaagtgggaggtgctcattcgactccaacaacactagcactacaccccagagccgacttcctgggtagacctgaaggacactgacaagaagtgaggac

SEQ ID NO: 363600 - DNA, 350 bp, Homo sapiens
ggcacgagctcgtgccgaatcggcacgaggttgaccgggagaaacgagatgggggtgaagctggagatatttcggatgataatctacctcactttccctgtggctatgttctgggtttccaatcaggccgagtggtttgaggacgatgtcatacagcgcaagagggagctgtggccacctgagaagcttcaagagatagaggaattcaaagagaggttacggaagcggcgggaggagaagctccttcgcgacgcccagcagaactcctgaggcctccaagtgggagtcctagcccctcccctgatgaaatatacatatactcagttccttgttaaaaaaaaaaaaaaaaa

SEQ ID NO: 363601 - DNA, 2859 bp, Homo sapiens
cccccaccttgggacacacccggaagcggcggcggcgcccctcggggaagatggcgccctcggggctgaaggcggtggtgggggaaaaaattctgagcggagttattcggagtgtcaagaaggatggggagtggaaggtgcttatcatggatcacccaagcatgcgcatcttgtcttcctgctgcaaaatgtcagatatcctggctgagggcatcaccattgttgaagacatcaacaaacggcgggaacccattcccagtctggaggccatttatttgctgagccccacggagaagtcggttcaggccctgatcaaagacttccaggggaccccgactttcacctacaaagcggcccatatcttcttcaccgacacctgccccgagcccctgttcagtgagctaggccgctctcgtctggcaaaggtggtgaagacgttgaaggagattcaccttgccttcctcccctacgaggcccaggtgttctccctcgatgctccccacagcacctacaacctctactgccccttccgggcagaggagcgcacgcggcagctcgaggtgctggcccagcagattgccacgctgtgcgccaccctgcaggagtacccggccatccgctaccgcaagggcccagaggacacagcccagttggcccacgccgtcctggccaagctgaacgccttcaaggcagacactcccagtctgggcgagggcccagagaaaacccgctcccagctgctgataatggaccgggcagctgaccccgtgtccccactactgcatgagctcacgttccaggccatggcgtatgatctgctggacatagagcaggacacatacaggtatgagaccaccgggctgagcgaggcgcgggagaaggccgtcttgctggacgaggacgatgacttgtgggtggagcttcgccacatgcatatcgcagatgtgtccaagaaggtcacggagctcctgaggaccttctgtgagagcaagaggctgaccacggacaaggcgaacatcaaagacctatcccagatcctgaaaaagatgccgcagtaccagaaggagctgaataagtattctacgcacctgcatctagcagatgattgtatgaagcacttcaagggctcggtggagaagctgtgtagtgtggagcaggacctggccatgggctccgacgcagagggggagaagatcaaggactccatgaagctgatcgttccggtgctgctggacgcggcggtgcccgcctacgacaagatccgggtcctgctgctctacatcctccttcggaatggtgtgagtgaggagaacctggccaagctgatccagcatgccaatgtacaggcgcacagcagcctcatccgtaacctggagcagctgggaggcactgtcaccaaccccggggtacgccaggagcgggcatggggggaccctgggagagggtgcggatcacagccggggctctgcaaggcagacgggccatctgggcacaggcacggtgtggttcctggcgtggtgtggttgctgggaggccaaaagcagtgtttcgggtctggtctggggcccagaggacactggggcctctcccagtcccagcttacacaataggcaggggaagtgagacatggtcgctgccaggctggtcctggcagtggtgcagttgggagcgggtggtctgagtgctagaggcagggagtagggtccccagcatgggggctacaccacattgtctatctgggctcccaggggtctctgagggtcccccgcacccatccagcacccacacacagccatgtgtgtgcttgactcttgggtcagcctctcctgtctctctctggccctgtgcgtccccctccagggtgccctcaccccgtccccatctctcccccatccctcatccatctcgctgtgcactgtttctccatatctctctctctcacccttctctctgccttcccctttctctctgttctctgtcttgctcccctcccctctccgtcccccttctgtccccatcttcctctctctgtttcctgcttcatctcttgtctctctctttgccttcatactttgtctcactgcttcttatctctttgcctatctctgcctctgtctttgtctttctctggctcgctctctctccctttggctttctctctccgtctctctctggctcactgtttctctctctcgctttcttgctgtctctcgctctctctcgctctctgttccacttccccatctttgcctgccatcccccaccctaccagccacaccaggcgcagcccctctgtgaccagcctccttcccctcaatccccctgctgccctccctgccctgcctgtagggctcggggacctccagccggctggagccgagagaacgcatggagcccacctatcagctgtcccgctggaccccggtcatcaaggatgtaatggaggacgccgtggaggaccggctggacaggaacctgtggcccttcgtatccgaccccgcccccacggccagctcccaggccgctgtcagtgcccgcttcggtcactggcacaagaacaaggctggcgtagaagcccgggcgggcccccggctcatcgtgtatgtcatgggcggtgtggccatgtcagagatgagggccgcctacgaggtgaccagggccaccgagggcaagtgggaggtgctcattggctcctcacacatcctcaccccgacccgcttcctggatgacctgaaggcactggacaagaagctggaggacattgccctgccctgacccctggccccgccccctacccctccctttccagagaaataaactcttcccgtcgctctgccaccagtgcctacctcaccttct

SEQ ID NO: 363602 - DNA, 2022 bp, Homo sapiens
cccccaccttgggacacacccggaagcggcggcggcgcccctcggggaagatggcgccctcggggctgaaggcggtggtgggggaaaaaattctgagcggagttattcggagtgtcaagaaggatggggagtggaaggtgcttatcatggatcacccaagcatgcgcatcttgtcttcctgctgcaaaatgtcagatatcctggctgagggcatcaccattgttgaagacatcaacaaacggcgggaacccattcccagtctggaggccatttatttgctgagccccacggagaagtcggttcaggccctgatcaaagacttccaggggaccccgactttcacctacaaagcggcccatatcttcttcaccgacacctgccccgagcccctgttcagtgagctaggccgctctcgtctggcaaaggtggtgaagacgttgaaggagattcaccttgccttcctcccctacgaggcccaggtgttctccctcgatgctccccacagcacctacaacctctactgccccttccgggcagaggagcgcacgcggcagctcgaggtgctggcccagcagattgccacgctgtgcgccaccctgcaggagtacccggccatccgctaccgcaagggcccagaggacacagcccagttggcccacgccgtcctggccaagctgaacgccttcaaggcagacactcccagtctgggcgagggcccagagaaaacccgctcccagctgctgataatggaccgggcagctgaccccgtgtccccactactgcatgagctcacgttccaggccatggcgtatgatctgctggacatagagcaggacacatacaggtatgagaccaccgggctgagcgaggcgcgggagaaggccgtcttgctggacgaggacgatgacttgtgggtggagcttcgccacatgcatatcgcagatgtgtccaagaaggtcacggagctcctgaggaccttctgtgagagcaagaggctgaccacggacaaggcgaacatcaaagacctatcccagatcctgaaaaagatgccgcagtaccagaaggagctgaataagtattctacgcacctgcatctagcagatgattgtatgaagcacttcaagggctcggtggagaagctgtgtagtgtggagcaggacctggccatgggctccgacgcagagggggagaagatcaaggactccatgaagctgatcgttccggtgctgctggacgcggcggtgcccgcctacgacaagatccgggtcctgctgctctacatcctccttcggaatggtgtgagtgaggagaacctggccaagctgatccagcatgccaatgtacaggcgcacagcagcctcatccgtaacctggagcagctgggaggcactgtcaccaaccccgggggctcggggacctccagccggctggagccgagagaacgcatggagcccacctatcagctgtcccgctggaccccggtcatcaaggatgtaatggaggacgccgtggaggaccggctggacaggaacctgtggcccttcgtatccgaccccgcccccacggccagctcccaggccgctgtcaggtgaggccccggggccgcccccgcccacgcctgggtctgtgttaggtgggcggcctggcagcggtgagggcctcctgcctggactttctgcccctgccctgcacagtgcccgcttcggtcactggcacaagaacaaggctggcgtagaagcccgggcgggcccccggctcatcgtgtatgtcatgggcggtgtggccatgtcagagatgagggccgcctacgaggtgaccagggccaccgagggcaagtgggaggtgctcattggctcctcacacatcctcaccccgacccgcttcctggatgacctgaaggcactggacaagaagctggaggacattgccctgccctgacccctggccccgccccctacccctccctttccagagaaataaactcttcccgtcgctctgccaccagtgcctacctcaccttct

SEQ ID NO: 363603 - DNA, 2004 bp, Homo sapiens
gatgtcgagctcggccctactgtctcttagaaacgagatgggggtgaagctggagatatttcggatgataatctacctcactttccctgtggctatgttctgggtttccaatcaggccgagtggtttgaggacgatgtcatacagcgcaagagggagctgtggccacctgagaaaaaattctgagcggagttattcggagtgtcaagaaggatggggagtggaaggtgcttatcatggatcacccaagcatgcgcatcttgtcttcctgctgcaaaatgtcagatatcctggctgagggcatcaccattgttgaagacatcaacaaacggcgggaacccattcccagtctggaggccatttatttgctgagccccacggagaagtcggttcaggccctgatcaaagacttccaggggaccccgactttcacctacaaagcggcccatatcttcttcaccgacacctgccccgagcccctgttcagtgagctaggccgctctcgtctggcaaaggtggtgaagacgttgaaggagattcaccttgccttcctcccctacgaggcccaggtgttctccctcgatgctccccacagcacctacaacctctactgccccttccgggcagaggagcgcacgcggcagctcgaggtgctggcccagcagattgccacgctgtgcgccaccctgcaggagtacccggccatccgctaccgcaagggcccagaggacacagcccagttggcccacgccgtcctggccaagctgaacgccttcaaggcagacactcccagtctgggcgagggcccagagaaaacccgctcccagctgctgataatggaccgggcagctgaccccgtgtccccactactgcatgagctcacgttccaggccatggcgtatgatctgctggacatagagcaggacacatacaggtatgagaccaccgggctgagcgaggcgcgggagaaggccgtcttgctggacgaggacgatgacttgtgggtggagcttcgccacatgcatatcgcagatgtgtccaagaaggtcacggagctcctgaggaccttctgtgagagcaagaggctgaccacggacaaggcgaacatcaaagacctatcccagatcctgaaaaagatgccgcagtaccagaaggagctgaataagtattctacgcacctgcatctagcagatgattgtatgaagcacttcaagggctcggtggagaagctgtgtagtgtggagcaggacctggccatgggctccgacgcagagggggagaagatcaaggactccatgaagctgatcgttccggtgctgctggacgcggcggtgcccgcctacgacaagatccgggtcctgctgctctacatcctccttcggaatggtgtgagtgaggagaacctggccaagctgatccagcatgccaatgtacaggcgcacagcagcctcatccgtaacctggagcagctgggaggcactgtcaccaaccccgggggctcggggacctccagccggctggagccgagagaacgcatggagcccacctatcagctgtcccgctggaccccggtcatcaaggatgtaatggaggacgccgtggaggaccggctggacaggaacctgtggcccttcgtatccgaccccgcccccacggccagctcccaggccgctgtcagtgcccgcttcggtcactggcacaagaacaaggctggcgtagaagcccgggcgggcccccggctcatcgtgtatgtcatgggcggtgtggccatgtcagagatgagggccgcctacgaggtgaccagggccaccgagggcaagtgggaggtgctcattggctcctcacacatcctcaccccgacccgcttcctggatgacctgaaggcactggacaagaagctggaggacattgccctgccctgacccctggccccgccccctacccctccctttccagagaaataaactcttcccgtcgctctgccaccagtgcctacctcaccttct

SEQ ID NO: 363604 - DNA, 1801 bp, Homo sapiens
caccccccaaaagcaattgccgccaattcctttgttcctgtccccttggcctgccaaaattggttccagataattccttgggcctggaggggccatccaccaatttgttgaagacatcaacaaacggcgggaacccattcccagtctggaggccatttatttgctgagccccacggagaagtcggttcaggccctgatcaaagacttccaggggaccccgactttcacctacaaagcggcccatatcttcttcaccgacacctgccccgagcccctgttcagtgagctaggccgctctcgtctggcaaaggtggtgaagacgttgaaggagattcaccttgccttcctcccctacgaggcccaggtgttctccctcgatgctccccacagcacctacaacctctactgccccttccgggcagaggagcgcacgcggcagctcgaggtgctggcccagcagattgccacgctgtgcgccaccctgcaggagtacccggccatccgctaccgcaagggcccagaggacacagcccagttggcccacgccgtcctggccaagctgaacgccttcaaggcagacactcccagtctgggcgagggcccagagaaaacccgctcccagctgctgataatggaccgggcagctgaccccgtgtccccactactgcatgagctcacgttccaggccatggcgtatgatctgctggacatagagcaggacacatacaggtatgagaccaccgggctgagcgaggcgcgggagaaggccgtcttgctggacgaggacgatgacttgtgggtggagcttcgccacatgcatatcgcagatgtgtccaagaaggtcacggagctcctgaggaccttctgtgagagcaagaggctgaccacggacaaggcgaacatcaaagacctatcccagatcctgaaaaagatgccgcagtaccagaaggagctgaataagtattctacgcacctgcatctagcagatgattgtatgaagcacttcaagggctcggtggagaagctgtgtagtgtggagcaggacctggccatgggctccgacgcagagggggagaagatcaaggactccatgaagctgatcgttccggtgctgctggacgcggcggtgcccgcctacgacaagatccgggtcctgctgctctacatcctccttcggaatggtgtgagtgaggagaacctggccaagctgatccagcatgccaatgtacaggcgcacagcagcctcatccgtaacctggagcagctgggaggcactgtcaccaaccccgggggctcggggacctccagccggctggagccgagagaacgcatggagcccacctatcagctgtcccgctggaccccggtcatcaaggatgtaatggaggacgccgtggaggaccggctggacaggaacctgtggcccttcgtatccgaccccgcccccacggccagctcccaggccgctgtcagtgcccgcttcggtcactggcacaagaacaaggctggcgtagaagcccgggcgggcccccggctcatcgtgtatgtcatgggcggtgtggccatgtcagagatgagggccgcctacgaggtgaccagggccaccgagggcaagtgggaggtgctcattggctcctcacacatcctcaccccgacccgcttcctggatgacctgaaggcactggacaagaagctggaggacattgccctgccctgacccctggccccgccccctacccctccctttccagagaaataaactcttcccgtcgctctgccaccagtgcctacctcaccttct

SEQ ID NO: 363605 - DNA, 2108 bp, Homo sapiens
cccccaccttgggacacacccggaagcggcggcggcgcccctcggggaagatggcgccctcggggctgaaggcggtggtgggggaaaaaattctgagcggagttattcggagtgtcaagaaggatggggagtggaaggtgcttatcatggatcacccaagcatgcgcatcttgtcttcctgctgcaaaatgtcagatatcctggctgagggcatcaccattgttgaagacatcaacaaacggcgggaacccattcccagtctggaggccatttatttgctgagccccacggagaagtcggttcaggccctgatcaaagacttccaggggaccccgactttcacctacaaagcggcccatatcttcttcaccgacacctgccccgagcccctgttcagtgagctaggccgctctcgtctggcaaaggtggtgaagacgttgaaggagattcaccttgccttcctcccctacgaggcccaggtgttctccctcgatgctccccacagcacctacaacctctactgccccttccgggcagaggagcgcacgcggcagctcgaggtgctggcccagcagattgccacgctgtgcgccaccctgcaggagtacccggccatccgctaccgcaagggcccagaggacacagcccagttggcccacgccgtcctggccaagctgaacgccttcaaggcagacactcccagtctgggcgagggcccagagaaaacccgctcccagctgctgataatggaccgggcagctgaccccgtgtccccactactgcatgagctcacgttccaggccatggcgtatgatctgctggacatagagcaggacacatacaggtatgagaccaccgggctgagcgaggcgcgggagaaggccgtcttgctggacgaggacgatgacttgtgggtggagcttcgccacatgcatatcgcagatgtgtccaagaaggtcacggagctcctgaggaccttctgtgagagcaagaggctgaccacggacaaggcgaacatcaaagacctatcccagatcctgaaaaagatgccgcagtaccagaaggagctgaataagtattctacgcacctgcatctagcagatgattgtatgaagcacttcaagggctcggtggagaagctgtgtagtgtggagcaggacctggccatgggctccgacgcagagggggagaagatcaaggactccatgaagctgatcgttccggtgctgctggacgcggcggtgcccgcctacgacaagatccgggtcctgctgctctacatcctccttcggaatggtgtgagtgaggagaacctggccaagctgatccagcatgccaatgtacaggcgcacagcagcctcatccgtaacctggagcagctgggaggcactgtcaccaaccccggggtacgccaggagcgggcatggggggaccctgggagagggtgcggatcacagccggggctctgcaaggcagacgggccatctgggcacaggcacggtgtggttcctggcgtggtgtggttgctgggaggccaaaagcagtgtttcgggtctggtctggggcccagaggacactggggcctctcccagtcccagcttacacaataggcaggggaagtgagacatggtcgctgccaggctggtcctggcagtggtgcagttgggagcgggtggtctgagtgctagaggcagggagtagggtccccagcatgggggctacaccacattgtctatctgggctcccaggggtctctgagggtcccccgcacccatccagcacccacacacagccatgtgtgtgcttgactcttgggtcagcctctcctgtctctctctggccctgtgcgtccccctccagggtgccctcaccccgtccccatctctcccccatccctcatccatctcgctgtgcactgtttctccatatctctctctctcacccttctctccgaattcttcccttgctctggcccatgctttctaggtccagggaccccaggggagctctgcaacggcccacgggggcctccctccccgtgccaggtgcccctctgtcctcagccaaccctcctgggcactctcagggtaaaagaactccatgttact

SEQ ID NO: 363606 - DNA, 1780 bp, Homo sapiens
cccccaccttgggacacacccggaagcggcggcggcgcccctcggggaagatggcgccctcggggctgaaggcggtggtgggggaaaaaattctgagcggagttattcggagtgtcaagaaggatggggagtggaaggtgcttatcatggatcacccaagcatgcgcatcttgtcttcctgctgcaaaatgtcagatatcctggctgagggcatcaccattgttgaagacatcaacaaacggcgggaacccattcccagtctggaggccatttatttgctgagccccacggagaagtcggttcaggccctgatcaaagacttccaggggaccccgactttcacctacaaagcggcccatatcttcttcaccgacacctgccccgagcccctgttcagtgagctaggccgctctcgtctggcaaaggtggtgaagacgttgaaggagattcaccttgccttcctcccctacgaggcccaggtgttctccctcgatgctccccacagcacctacaacctctactgccccttccgggcagaggagcgcacgcggcagctcgaggtgctggcccagcagagggcccagagaaaacccgctcccagctgctgataatggaccgggcagctgaccccgtgtccccactactgcatgagctcacgttccaggccatggcgtatgatctgctggacatagagcaggacacatacaggtatgagaccaccgggctgagcgaggcgcgggagaaggccgtcttgctggacgaggacgatgacttgtgggtggagcttcgccacatgcatatcgcagatgtgtccaagaaggtcacggagctcctgaggaccttctgtgagagcaagaggctgaccacggacaaggcgaacatcaaagacctatcccagatcctgaaaaagatgccgcagtaccagaaggagctgaataagtattctacgcacctgcatctagcagatgattgtatgaagcacttcaagggctcggtggagaagctgtgtagtgtggagcaggacctggccatgggctccgacgcagagggggagaagatcaaggactccatgaagctgatcgttccggtgctgctggacgcggcggtgcccgcctacgacaagatccgggtcctgctgctctacatcctccttcggaatggtgtgagtgaggagaacctggccaagctgatccagcatgccaatgtacaggcgcacagcagcctcatccgtaacctggagcagctgggaggcactgtcaccaaccccgggggctcggggacctccagccggctggagccgagagaacgcatggagcccacctatcagctgtcccgctggaccccggtcatcaaggatgtaatggaggacgccgtggaggaccggctggacaggaacctgtggcccttcgtatccgaccccgcccccacggccagctcccaggccgctgtcagtgcccgcttcggtcactggcacaagaacaaggctggcgtagaagcccgggcgggcccccggctcatcgtgtatgtcatgggcggtgtggccatgtcagagatgagggccgcctacgaggtgaccagggccaccgagggcaagtgggaggtgctcattggctcctcacacatcctcaccccgacccgcttcctggatgacctgaaggcactggacaagaagctggaggacattgccctgccctgacccctggccccgccccctacccctccctttccagagaaataaactcttcccgtcgctctgccaccagtgcctacctcaccttct

SEQ ID NO: 363607 - DNA, 1125 bp, Homo sapiens
agcgttctagaggttccacggaaaggtgacatagagggaggacacgagtacaggtatgagaccaccgggctgagcgaggcgcgggagaaggccgtcttgctggacgaggacgatgacttgtgggtggagcttcgccacatgcatatcgcagatgtgtccaagaaggtcacggagctcctgaggaccttctgtgagagcaagaggctgaccacggacaaggcgaacatcaaagacctatcccagatcctgaaaaagatgccgcagtaccagaaggagctgaataagtattctacgcacctgcatctagcagatgattgtatgaagcacttcaagggctcggtggagaagctgtgtagtgtggagcaggacctggccatgggctccgacgcagagggggagaagatcaaggactccatgaagctgatcgttccggtgctgctggacgcggcggtgcccgcctacgacaagatccgggtcctgctgctctacatcctccttcggaatggtgtgagtgaggagaacctggccaagctgatccagcatgccaatgtacaggcgcacagcagcctcatccgtaacctggagcagctgggaggcactgtcaccaaccccgggggctcggggacctccagccggctggagccgagagaacgcatggagcccacctatcagctgtcccgctggaccccggtcatcaaggatgtaatggaggacgccgtggaggaccggctggacaggaacctgtggcccttcgtatccgaccccgcccccacggccagctcccaggccgctgtcagtgcccgcttcggtcactggcacaagaacaaggctggcgtagaagcccgggcgggcccccggctcatcgtgtatgtcatgggcggtgtggccatgtcagagatgagggccgcctacgaggtgaccagggccaccgagggcaagtgggaggtgctcattggctcctcacacatcctcaccccgacccgcttcctggatgacctgaaggcactggacaagaagctggaggacattgccctgccctgacccctggccccgccccctacccctccctttccagagaaataaactcttcccgtcgctctgccaccagtgcctacctcaccttct

SEQ ID NO: 363608 - DNA, 339 bp, Homo sapiens
gatgtcgagctcggccctactgtctcttagaaacgagatgggggtgaagctggagatatttcggatgataatctacctcactttccctgtggctatgttctgggtttccaatcaggccgagtggtttgaggacgatgtcatacagcgcaagagggagctgtggccacctgagaagcttcaagagatagaggaattcaaagagaggttacggaagcggcgggaggagaagctccttcgcgacgcccagcagaactcctgaggcctccaagtgggagtcctagcccctcccctgatgaaatatacatatactcagttccttgttaaaaaaaaaaaaaaaaa

SEQ ID NO: 363609 - DNA, 1968 bp, Homo sapiens
tggagccttggagaggtagtctcaggatagtggtgtgacctgtgtgtaggtgggtggggcactggaaaggtgggacctgggtgaggagcagggcctgtggagagactgtccctggacaggggtgggaccttgagagacctggtgctgagatgaggtaggacccaaatgtcctcttgccgaggatcctggggatgtccttggcccgcctctcccatccccttccctgacacatagcggccggtggacggctgaccccatgcccgcaggacctggccatgggctccgacgcagagggggagaagatcaaggactccatgaagctgatcgttccggtgctgctggacgcggcggtgcccgcctacgacaagatccgggtcctgctgctctacatcctccttcggaatggtgtgagtgaggagaacctggccaagctgatccagcatgccaatgtacaggcgcacagcagcctcatccgtaacctggagcagctgggaggcactgtcaccaaccccggggtacgccaggagcgggcatggggggaccctgggagagggtgcggatcacagccggggctctgcaaggcagacgggccatctgggcacaggcacggtgtggttcctggcgtggtgtggttgctgggaggccaaaagcagtgtttcgggtctggtctggggcccagaggacactggggcctctcccagtcccagcttacacaataggcaggggaagtgagacatggtcgctgccaggctggtcctggcagtggtgcagttgggagcgggtggtctgagtgctagaggcagggagtagggtccccagcatgggggctacaccacattgtctatctgggctcccaggggtctctgagggtcccccgcacccatccagcacccacacacagccatgtgtgtgcttgactcttgggtcagcctctcctgtctctctctggccctgtgcgtccccctccagggtgccctcaccccgtccccatctctcccccatccctcatccatctcgctgtgcactgtttctccatatctctctctctcacccttctctctgccttcccctttctctctgttctctgtcttgctcccctcccctctccgtcccccttctgtccccatcttcctctctctgtttcctgcttcatctcttgtctctctctttgccttcatactttgtctcactgcttcttatctctttgcctatctctgcctctgtctttgtctttctctggctcgctctctctccctttggctttctctctccgtctctctctggctcactgtttctctctctcgctttcttgctgtctctcgctctctctcgctctctgttccacttccccatctttgcctgccatcccccaccctaccagccacaccaggcgcagcccctctgtgaccagcctccttcccctcaatccccctgctgccctccctgccctgcctgtagggctcggggacctccagccggctggagccgagagaacgcatggagcccacctatcagctgtcccgctggaccccggtcatcaaggatgtaatggaggacgccgtggaggaccggctggacaggaacctgtggcccttcgtatccgaccccgcccccacggccagctcccaggccgctgtcagtgcccgcttcggtcactggcacaagaacaaggctggcgtagaagcccgggcgggcccccggctcatcgtgtatgtcatgggcggtgtggccatgtcagagatgagggccgcctacgaggtgaccagggccaccgagggcaagtgggaggtgctcattggctcctcacacatcctcaccccgacccgcttcctggatgacctgaaggcactggacaagaagctggaggacattgccctgccctgacccctggccccgccccctacccctccctttccagagaaataaactcttcccgtcgctctgccaccagtgcctacctcaccttct

SEQ ID NO: 363610 - DNA, 1194 bp, Homo sapiens
  misc_feature (862)..(862): n is a, c, g, or t
  misc_feature (966)..(966): n is a, c, g, or t
ggagggtcggctttgggcggaactggctttgttgaccgggagaaacgagatgggggtgaagctggagatatttcggatgataatctacctcactttccctgtggctatgttctgggtttccaatcaggccgagtggtttgaggacgatgtcatacagcgcaagagggagctgtggccacctgagaagcttcaagagatagaggaattcaaagagaggttacggaagcggcgggaggagaagctccttcgcgacgcccagcagaactcctgaggcctccaagtgggagtcctagcccctcccctgatgaaatatacatatactcagttccttgttaaaaaaaaaaaaaaaaattcaaaaaaaaaaaaaaaaaagcaaaaaaaaaaaaaaaaaaaaagaaaaaagaaaaaaagacgagaagagacccgaaccagaaaaacaaccaccaaaagggaacgacaccacaagaacaaacacacaaacaaagagggagaggggggcgcgcccaaaaatacaatcccccaggagggggcgccaacaacagccgcccacccccttcctaggcgacaggcggcgccccacacaggggccgcaccccataaaacaccacgaagggacgcgcgccgacccaaacaaccaccgacgcccgagaatggagaacacacaacgccgccacgcgcgggtcatacaggaacgacagaccgcccccacaactctgagggggggacgagcaacgacatcgtagggcggcagcaaccccccccccaacgcagaatattctcaccgaggtcgtccgcgcgggcacacaacatcccacacctaccactcgacggtgagacgaatacgttacgaggccgagaccanacacaacacccacacactcgctccacaacttcgtgcggcgctgaggtcaacaaaccacgcatcttacgccactcgccacgcgagcgtaagcgctcttactatcntagtcacaagacaacacatattattattaccaccacgccggcacggacgcgctgatctaaatgtacgaataccacgatctccagacccttagagcacactcaactaaccgagaccacagaccgtcaacaatcacactcgcactctgaacgacgcaagcaaatctcgcctatccgactcagcctaccgccagtcacaaccaagcctcacatccaaaatcaacccaacat

SEQ ID NO: 363611 - DNA, 430 bp, Homo sapiens
gatgtcgagctcggccctactgtctcttagaaacgagatgggggtgaagctggagatatttcggatgataatctacctcactttccctgtggctatgttctgggtttccaatcaggccgagtggtttgaggacgatgtcatacagcgcaagagggagctgtggccacctgagaagccatgagtaaggaaccgagagcagaggagtagatggtttccttattgccttctcctggaagagtgaagcggatcccacgcggacccctttgcttcaagagatagaggaattcaaagagaggttacggaagcggcgggaggagaagctccttcgcgacgcccagcagaactcctgaggcctccaagtgggagtcctagcccctcccctgatgaaatatacatatactcagttccttgttaaaaaaaaaaaaaaaaa

SEQ ID NO: 363612 - DNA, 252 bp, Homo sapiens
gatgtcgagctcggccctactgtctcttagaaacgagatgggggtgaagctggagatatttcggagggagctgtggccacctgagaagcttcaagagatagaggaattcaaagagaggttacggaagcggcgggaggagaagctccttcgcgacgcccagcagaactcctgaggcctccaagtgggagtcctagcccctcccctgatgaaatatacatatactcagttccttgttaaaaaaaaaaaaaaaaa

SEQ ID NO: 363613 - DNA, 360 bp, Homo sapiens
gatgtcgagctcggccctactgtctcttagaaacgagatgggggtgaagctggagatatttcggatgataatctacctcactttccctgtggctatgttctgggtttccaatcaggccgagtggtttgaggacgatgtcatacagcgcaagagggagctgtggccacctgagaaaggtaagtgatctcttcttcctgccagagggatggaggaggctggattcttgtatccgggatgggttttagatgaaaattttaggccaggcgcagtggctcatgcttgtaatcccagggcatgggaggctgaggtgggtagatcacttgaggtcaggagttcaaaaccagcctggccaacatggcg

SEQ ID NO: 363614 - DNA, 1916 bp, Homo sapiens
cccccaccttgggacacacccggaagcggcggcggcgcccctcggggaagatggcgccctcggggctgaaggcggtggtgggggaaaaaattctgagcggagttattcggagtgtcaagaaggatggggagtggaaggtgcttatcatggatcacccaagcatgcgcatcttgtcttcctgctgcaaaatgtcagatatcctggctgagggcatcaccattgttgaagacatcaacaaacggcgggaacccattcccagtctggaggccatttatttgctgagccccacggagaagtcggttcaggccctgatcaaagacttccaggggaccccgactttcacctacaaagcggcccatatcttcttcaccgacacctgccccgagcccctgttcagtgagctaggccgctctcgtctggcaaaggtggtgaagacgttgaaggagattcaccttgccttcctcccctacgaggcccaggtgttctccctcgatgctccccacagcacctacaacctctactgccccttccgggcagaggagcgcacgcggcagctcgaggtgctggcccagcagattgccacgctgtgcgccaccctgcaggagtacccggccatccgctaccgcaagggcccagaggacacagcccagttggcccacgccgtcctggccaagctgaacgccttcaaggcagacactcccagtctgggcgagggcccagagaaaacccgctcccagctgctgataatggaccgggcagctgaccccgtgtccccactactgcatgagctcacgttccaggccatggcgtatgatctgctggacatagagcaggacacatacaggtatgagaccaccgggctgagcgaggcgcgggagaaggccgtcttgctggacgaggacgatgacttgtgggtggagcttcgccacatgcatatcgcagatgtgtccaagaaggtcacggagctcctgaggaccttctgtgagagcaagaggctgaccacggacaaggcgaacatcaaagacctatcccagatcctgaaaaagatgccgcagtaccagaaggagctgaataagtattctacgcacctgcatctagcagatgattgtatgaagcacttcaagggctcggtggagaagctgtgtagtgtggagcaggacctggccatgggctccgacgcagagggggagaagatcaaggactccatgaagctgatcgttccggtgctgctggacgcggcggtgcccgcctacgacaagatccgggtcctgctgctctacatcctccttcggaatggtgtgagtgaggagaacctggccaagctgatccagcatgccaatgtacaggcgcacagcagcctcatccgtaacctggagcagctgggaggcactgtcaccaaccccgggggctcggggacctccagccggctggagccgagagaacgcatggagcccacctatcagctgtcccgctggaccccggtcatcaaggatgtaatggaggacgccgtggaggaccggctggacaggaacctgtggcccttcgtatccgaccccgcccccacggccagctcccaggccgctgtcagtgcccgcttcggtcactggcacaagaacaaggctggcgtagaagcccgggcgggcccccggctcatcgtgtatgtcatgggcggtgtggccatgtcagagatgagggccgcctacgaggtgaccagggccaccgagggcaagtgggaggtgctcattggctcctcacacatcctcaccccgacccgcttcctggatgacctgaaggcactggacaagaagctggaggacattgccctgccctgacccctggccccgccccctacccctccctttccagagaaataaactcttcccgtcgctctgccaccagtgcctacctcaccttct

SEQ ID NO: 363615 - DNA, 351 bp, Homo sapiens
ggagggtcggctttgggcggaactggctttgttgaccgggagaaacgagatgggggtgaagctggagatatttcggatgataatctacctcactttccctgtggctatgttctgggtttccaatcaggccgagtggtttgaggacgatgtcatacagcgcaagagggagctgtggccacctgagaagcttcaagagatagaggaattcaaagagaggttacggaagcggcgggaggagaagctccttcgcgacgcccagcagaactcctgaggcctccaagtgggagtcctagcccctcccctgatgaaatatacatatactcagttccttgttaaaaaaaaaaaaaaaaa

SEQ ID NO: 363616 - DNA, 776 bp, Homo sapiens
ggagggtcggctttgggcggaactggctttgttgaccgggagaaacgagatgggggtgaagctggagatatttcggatgataatctacctcactttccctgtggctatgttctgggtttccaatcaggccgagtggtttgaggacgatgtcatacagcgcaagagggagctgtggccacctgagaagcttcaagagatagaggaattcaaagagaggttacggaagcggcgggaggagaagctccttcgcgacgcccagcagaactcctgaggcctccaagtgggagtcctagcccctcccctgatgaaatatacatatactcagttccttgttaaaaaaaaaaaaaaaaaaaaaaaaaaaaaaaaaaaaaaaaaaaaaaaaaaaaaaaaaaaaaaaaaaaaaaaaaaaaaaaaaaaaaaaaaaaaaaaaagggaaaaaaaaaaaaaaaaaaaaaaaaaaaacctttgtggcccgcttggcccaagggatttttaaattggggaaggtttatgcttgggcccgaatttgggcctacttggcccatttccccttttggggggcggtttacaattcaatggcccggggtttaaaagggggggatgggaaaaccctggcggtacccaaattaaatcgctttgaaacaaatccctttttcccaagttggggaataagggaaaggcccccacccgttcgcctttccaaagtttgcccaccttaaatgggaatggaaatttgaaagcttaatattttgtaaaattcccggtaatatttggta

SEQ ID NO: 363617 - DNA, 426 bp, Homo sapiens
cccccaccttgggacacacccggaagcggcggcggcgcccctcggggaagatggcgccctcggggctgaaggcggtggtgggggaaaaaattctgagcggagttattcggagtgtcaagaaggatggggagtggaaggtgcttatcatggatcacccaagcatgcgcatcttgtcttcctgctgcaaaatgtcagatatcctggctgagggcatcaccattgttgaagacatcaacaaacggcgggaacccattcccagtctggaggccatttatttgctgagccccacggagaagtcggttcaggccctgatcaaagacttccaggggaccccgactttcacctacaaagccgccccctacccctccctttccagagaaataaactcttcccgtcgctctgccaccagtgcctacctcaccttct

SEQ ID NO: 363618 - DNA, 359 bp, Homo sapiens; identical to SEQ ID NO: 363595
  misc_feature (20)..(20): n is a, c, g, or t
  misc_feature (28)..(29): n is a, c, g, or t
  misc_feature (33)..(33): n is a, c, g, or t
  misc_feature (37)..(37): n is a, c, g, or t

SEQ ID NO: 363619 - DNA, 2129 bp, Homo sapiens
cccccaccttgggacacacccggaagcggcggcggcgcccctcggggaagatggcgccctcggggctgaaggcggtggtgggggaaaaaattctgagcggagttattcggagtgtcaagaaggatggggagtggaaggtgcttatcatggatcacccaagcatgcgcatcttgtcttcctgctgcaaaatgtcagatatcctggctgagggcatcaccattgttgaagacatcaacaaacggcgggaacccattcccagtctggaggccatttatttgctgagccccacggagaagtcggttcaggccctgatcaaagacttccaggggaccccgactttcacctacaaagcggcccatatcttcttcaccgacacctgccccgagcccctgttcagtgagctaggccgctctcgtctggcaaaggtggtgaagacgttgaaggagattcaccttgccttcctcccctacgaggcccaggtgttctccctcgatgctccccacagcacctacaacctctactgccccttccgggcagaggagcgcacgcggcagctcgaggtgctggcccagcagattgccacgctgtgcgccaccctgcaggagtacccggccatccgctaccgcaagggcccagaggacacagcccagttggcccacgccgtcctggccaagctgaacgccttcaaggcagacactcccagtctgggcgagggcccagagaaaacccgctcccagctgctgataatggaccgggcagctgaccccgtgtccccactactgcatgagctcacgttccaggccatggcgtatgatctgctggacatagagcaggacacatacaggtatgagaccaccgggctgagcgaggcgcgggagaaggccgtcttgctggacgaggacgatgacttgtgggtggagcttcgccacatgcatatcgcagatgtgtccaagaaggtcacggagctcctgaggaccttctgtgagagcaagaggctgaccacggacaaggcgaacatcaaagacctatcccagatcctgaaaaagatgccgcagtaccagaaggagctgaataagtattctacgcacctgcatctagcagatgattgtatgaagcacttcaagggctcggtggagaagctgtgtagtgtggagcaggacctggccatgggctccgacgcagagggggagaagatcaaggactccatgaagctgatcgttccggtgctgctggacgcggcggtgcccgcctacgacaagatccgggtcctgctgctctacatcctccttcggaatggtgtgagtgaggagaacctggccaagctgatccagcatgccaatgtacaggcgcacagcagcctcatccgtaacctggagcagctgggaggcactgtcaccaaccccgggggctcggggacctccagccggctggagccgagagaacgcatggagcccacctatcagctgtcccgctggaccccggtcatcaaggatgtaatggaggacgccgtggaggaccggctggacaggaacctgtggcccttcgtatccgaccccgcccccacggccagctcccaggccgctgtcagtgcccgcttcggtcactggcacaagaacaaggctggcgtagaagcccgggcgggcccccggctcatcgtgtatgtcatgggcggtgtggccatgtcagagatgagggccgcctacgaggtgaccagggccaccgagggcaagtgggaggtgctcattggtaagtcaccaggactgggaccctgggctctggggcttgggttcccggggcctgggcttgtaccttctaggtgtctggactccagagtccttggagtcagggacctggtttgctgagggacagggacagccccacaccagccgggaccgggagcctgtcaaagacgaaggcagcgccccccaacatcgtccccaaacctctgcccctgcacaggctcctcacacatcctcaccccgacccgcttcctggatgacctgaaggcactggacaagaagctggaggacattgccctgccctgacccctggccccgccccctacccctccctttccagagaaataaactcttcccgtcgctctgccaccagtgcctacctcaccttct

SEQ ID NO: 363620 - DNA, 1756 bp, Homo sapiens
cccccaccttgggacacacccggaagcggcggcggcgcccctcggggaagatggcgccctcggggctgaaggcggtggtgggggaaaaaattctgagcggagttattcggagtgtcaagaaggatggggagtggaaggtgcttatcatggatcacccaagcatgcgcatcttgtcttcctgctgcaaaatgtcagatatcctggctgagggcatcaccattgttgaagacatcaacaaacggcgggaacccattcccagtctggaggccatttatttgctgagccccacggagaagtcggttcaggccctgatcaaagacttccaggggaccccgactttcacctacaaagcggcccatatcttcttcaccgacacctgccccgagcccctgttcagtgagctaggccgctctcgtctggcaaaggtggtgaagacgttgaaggagattcaccttgccttcctcccctacgaggcccaggtgttctccctcgatgctccccacagcacctacaacctctactgccccttccgggcagaggagcgcacgcggcagctcgaggtgctggcccagcagattgccacgctgtgcgccaccctgcaggagtacccggccatccgctaccgcaagggcccagaggacacagcccagttggcccacgccgtcctggccaagctgaacgccttcaaggcagacactcccagtctgggcgagggcccagagaaaacccgctcccagctgctgataatggaccgggcagctgaccccgtgtccccactactgcatgagctcacgttccaggccatggcgtatgatctgctggacatagagcaggacacatacaggtatgagaccaccgggctgagcgaggcgcgggagaaggccgtcttgctggacgaggacgatgacttgtgggtggagcttcgccacatgcatatcgcagatgtgtccaagaaggtcacggagctcctgaggaccttctgtgagagcaagaggctgaccacggacaaggcgaacatcaaagacctatcccagatcctgaaaaagatgccgcagtaccagaaggagctgaataagtattctacgcacctgcatctagcagatgattgtatgaagcacttcaagggctcggtggagaagctgtgtagtgtggagcaggacctggccatgggctccgacgcagagggggagaagatcaaggactccatgaagctgatcgttccggtgctgctggacgcggcggtgcccgcctacgacaagatccgggtcctgctgctctacatcctccttcggaatggtgtgagtgaggagaacctggccaagctgatccagcatgccaatgtacaggcgcacagcagcctcatccgtaacctggagcagctgggaggcactgtcaccaaccccgggggctcggggacctccagccggctggagccgagagaacgcatggagcccacctatcagctgtcccgctggaccccggtcatcaaggatgtaatggaggacgccgtggaggaccggctggacaggaacctgtggcccttcgtatccgaccccgcccccacggccagctcccaggccgctgtggctcctcacacatcctcaccccgacccgcttcctggatgacctgaaggcactggacaagaagctggaggacattgccctgccctgacccctggccccgccccctacccctccctttccagagaaataaactcttcccgtcgctctgccaccagtgcctacctcaccttct

SEQ ID NO: 363621 - DNA, 2419 bp, Homo sapiens
tgagactccccacgtggccctgcctggatgccacccacctgtgtcccttcctctgttcctactagttgttgaagacatcaacaaacggcgggaacccattcccagtctggaggccatttatttgctgagccccacggagaaggtgcctacatgagtgagcgtgtgtgtatgcgcgtgcatgcgtgtacatgtgcatgtgtgtgtatgtctgcatgcatgtgattgcatgtgtgcatgtgtatacgtgtgcatgtgtccatgtgtatgtgtgtgcatgtgtgtgcatgtgtgtgtgcatctgtgtatgcatgtgtgtgcgtgtttgcatgtgtgtctatgtatgtgtctgtgtgcatgtgcatgtgtgtgcgtctgtgtgtgcatctgtgtgtgcgtgtgtatgcgtgtgtgtatgcgtctgtgcatgtgtgtatgcgtgtgtgtgcgcatcagtgtctgcatgtgtgtatatgtgtgtatgtatgtgtgcgcgcgcatctgtgtgtgtgcatgtgtgtatgtatgtgtgtgcatctctgtgtgtgcatgtgtgtatgtgtgtgtgcatctgtgtgtgtgtgcatgtgtgcatgcgtgtgtatgtgtgtgtgcgtgcgtgcatctgtgtgtgtgcgcgtgtgcccatgtgggtgcgacactagtgtgcatttgcacatatacatgtccccgtccgtccatgtttgcacatggtggcagatggggggtggctgggaggcctaggcagccaatgagcctaggtgtgcaggctcaggcccagagagtgatccaccttccccagtcggttcaggccctgatcaaagacttccaggggaccccgactttcacctacaaagcggcccatatcttcttcaccgacacctgccccgagcccctgttcagtgagctaggccgctctcgtctggcaaaggtggtgaagacgttgaaggagattcaccttgccttcctcccctacgaggcccaggtgttctccctcgatgctccccacagcacctacaacctctactgccccttccgggcagaggagcgcacgcggcagctcgaggtgctggcccagcagattgccacgctgtgcgccaccctgcaggagtacccggccatccgctaccgcaagggcccagaggacacagcccagttggcccacgccgtcctggccaagctgaacgccttcaaggcagacactcccagtctgggcgagggcccagagaaaacccgctcccagctgctgataatggaccgggcagctgaccccgtgtccccactactgcatgagctcacgttccaggccatggcgtatgatctgctggacatagagcaggacacatacaggtatgagaccaccgggctgagcgaggcgcgggagaaggccgtcttgctggacgaggacgatgacttgtgggtggagcttcgccacatgcatatcgcagatgtgtccaagaaggtcacggagctcctgaggaccttctgtgagagcaagaggctgaccacggacaaggcgaacatcaaagacctatcccagatcctgaaaaagatgccgcagtaccagaaggagctgaataagtattctacgcacctgcatctagcagatgattgtatgaagcacttcaagggctcggtggagaagctgtgtagtgtggagcaggacctggccatgggctccgacgcagagggggagaagatcaaggactccatgaagctgatcgttccggtgctgctggacgcggcggtgcccgcctacgacaagatccgggtcctgctgctctacatcctccttcggaatggtgtgagtgaggagaacctggccaagctgatccagcatgccaatgtacaggcgcacagcagcctcatccgtaacctggagcagctgggaggcactgtcaccaaccccgggggctcggggacctccagccggctggagccgagagaacgcatggagcccacctatcagctgtcccgctggaccccggtcatcaaggatgtaatggaggacgccgtggaggaccggctggacaggaacctgtggcccttcgtatccgaccccgcccccacggccagctcccaggccgctgtcagtgcccgcttcggtcactggcacaagaacaaggctggcgtagaagcccgggcgggcccccggctcatcgtgtatgtcatgggcggtgtggccatgtcagagatgagggccgcctacgaggtgaccagggccaccgagggcaagtgggaggtgctcattggctcctcacacatcctcaccccgacccgcttcctggatgacctgaaggcactggacaagaagctggaggacattgccctgccctgacccctggccccgccccctacccctccctttccagagaaataaactcttcccgtcgctctgccaccagtgcctacctcaccttct

SEQ ID NO: 363622 - DNA, 1522 bp, Homo sapiens
tgtataggctaggtacgaggctgtgtggtgaatcggccgagggttgaaggagattcaccttgccttcctcccctacgaggcccaggtgttctccctcgatgctccccacagcacctacaacctctactgccccttccgggcagaggagcgcacgcggcagctcgaggtgctggcccagcagattgccacgctgtgcgccaccctgcaggagtacccggccatccgctaccgcaagggcccagaggacacagcccagttggcccacgccgtcctggccaagctgaacgccttcaaggcagacactcccagtctgggcgagggcccagagaaaacccgctcccagctgctgataatggaccgggcagctgaccccgtgtccccactactgcatgagctcacgttccaggccatggcgtatgatctgctggacatagagcaggacacatacaggtatgagaccaccgggctgagcgaggcgcgggagaaggccgtcttgctggacgaggacgatgacttgtgggtggagcttcgccacatgcatatcgcagatgtgtccaagaaggtcacggagctcctgaggaccttctgtgagagcaagaggctgaccacggacaaggcgaacatcaaagacctatcccagatcctgaaaaagatgccgcagtaccagaaggagctgaataagtattctacgcacctgcatctagcagatgattgtatgaagcacttcaagggctcggtggagaagctgtgtagtgtggagcaggacctggccatgggctccgacgcagagggggagaagatcaaggactccatgaagctgatcgttccggtgctgctggacgcggcggtgcccgcctacgacaagatccgggtcctgctgctctacatcctccttcggaatggtgtgagtgaggagaacctggccaagctgatccagcatgccaatgtacaggcgcacagcagcctcatccgtaacctggagcagctgggaggcactgtcaccaaccccgggggctcggggacctccagccggctggagccgagagaacgcatggagcccacctatcagctgtcccgctggaccccggtcatcaaggatgtaatggaggacgccgtggaggaccggctggacaggaacctgtggcccttcgtatccgaccccgcccccacggccagctcccaggccgctgtcagtgcccgcttcggtcactggcacaagaacaaggctggcgtagaagcccgggcgggcccccggctcatcgtgtatgtcatgggcggtgtggccatgtcagagatgagggccgcctacgaggtgaccagggccaccgagggcaagtgggaggtgctcattggctcctcacacatcctcaccccgacccgcttcctggatgacctgaaggcactggacaagaagctggaggacattgccctgccctgacccctggccccgccccctacccctccctttccagagaaataaactcttcccgtcgctctgccaccagtgcctacctcaccttct

SEQ ID NO: 363623 - DNA, 1382 bp, Homo sapiens
agccccggccctaccctggccctgactctcaccttcaaacccatccttgaccccatcccctgatgatgtcccccgtgtctgacctccccgccaggggcccagaggacacagcccagttggcccacgccgtcctggccaagctgaacgccttcaaggcagacactcccagtctgggcgagggcccagagaaaacccgctcccagctgctgataatggaccgggcagctgaccccgtgtccccactactgcatgagctcacgttccaggccatggcgtatgatctgctggacatagagcaggacacatacaggtatgagaccaccgggctgagcgaggcgcgggagaaggccgtcttgctggacgaggacgatgacttgtgggtggagcttcgccacatgcatatcgcagatgtgtccaagaaggtcacggagctcctgaggaccttctgtgagagcaagaggctgaccacggacaaggcgaacatcaaagacctatcccagatcctgaaaaagatgccgcagtaccagaaggagctgaataagtattctacgcacctgcatctagcagatgattgtatgaagcacttcaagggctcggtggagaagctgtgtagtgtggagcaggacctggccatgggctccgacgcagagggggagaagatcaaggactccatgaagctgatcgttccggtgctgctggacgcggcggtgcccgcctacgacaagatccgggtcctgctgctctacatcctccttcggaatggtgtgagtgaggagaacctggccaagctgatccagcatgccaatgtacaggcgcacagcagcctcatccgtaacctggagcagctgggaggcactgtcaccaaccccgggggctcggggacctccagccggctggagccgagagaacgcatggagcccacctatcagctgtcccgctggaccccggtcatcaaggatgtaatggaggacgccgtggaggaccggctggacaggaacctgtggcccttcgtatccgaccccgcccccacggccagctcccaggccgctgtcagtgcccgcttcggtcactggcacaagaacaaggctggcgtagaagcccgggcgggcccccggctcatcgtgtatgtcatgggcggtgtggccatgtcagagatgagggccgcctacgaggtgaccagggccaccgagggcaagtgggaggtgctcattggctcctcacacatcctcaccccgacccgcttcctggatgacctgaaggcactggacaagaagctggaggacattgccctgccctgacccctggccccgccccctacccctccctttccagagaaataaactcttcccgtcgctctgccaccagtgcctacctcaccttct

SEQ ID NO: 363624 - DNA, 1025 bp, Homo sapiens
tggagccttggagaggtagtctcaggatagtggtgtgacctgtgtgtaggtgggtggggcactggaaaggtgggacctgggtgaggagcagggcctgtggagagactgtccctggacaggggtgggaccttgagagacctggtgctgagatgaggtaggacccaaatgtcctcttgccgaggatcctggggatgtccttggcccgcctctcccatccccttccctgacacatagcggccggtggacggctgaccccatgcccgcaggacctggccatgggctccgacgcagagggggagaagatcaaggactccatgaagctgatcgttccggtgctgctggacgcggcggtgcccgcctacgacaagatccgggtcctgctgctctacatcctccttcggaatggtgtgagtgaggagaacctggccaagctgatccagcatgccaatgtacaggcgcacagcagcctcatccgtaacctggagcagctgggaggcactgtcaccaaccccgggggctcggggacctccagccggctggagccgagagaacgcatggagcccacctatcagctgtcccgctggaccccggtcatcaaggatgtaatggaggacgccgtggaggaccggctggacaggaacctgtggcccttcgtatccgaccccgcccccacggccagctcccaggccgctgtcagtgcccgcttcggtcactggcacaagaacaaggctggcgtagaagcccgggcgggcccccggctcatcgtgtatgtcatgggcggtgtggccatgtcagagatgagggccgcctacgaggtgaccagggccaccgagggcaagtgggaggtgctcattggctcctcacacatcctcaccccgacccgcttcctggatgacctgaaggcactggacaagaagctggaggacattgccctgccctgacccctggccccgccccctacccctccctttccagagaaataaactcttcccgtcgctctgccaccagtgcctacctcaccttct

SEQ ID NO: 363625 - DNA, 521 bp, Homo sapiens
ggttcctgtctgccaggatcttggcccctgaataccccgtggggggcactcctgaccccggaccccatgcctggggttcctcccctaacctgcctctcggccgccaggacgccgtggaggaccggctggacaggaacctgtggcccttcgtatccgaccccgcccccacggccagctcccaggccgctgtcagtgcccgcttcggtcactggcacaagaacaaggctggcgtagaagcccgggcgggcccccggctcatcgtgtatgtcatgggcggtgtggccatgtcagagatgagggccgcctacgaggtgaccagggccaccgagggcaagtgggaggtgctcattggctcctcacacatcctcaccccgacccgcttcctggatgacctgaaggcactggacaagaagctggaggacattgccctgccctgacccctggccccgccccctacccctccctttccagagaaataaactcttcccgtcgctctgccaccagtgcctacctcaccttct

SEQ ID NO: 363626 - DNA, 670 bp, Homo sapiens
ggagggtcggctttgggcggaactggctttgttgaccgggagaaacgagatgggggtgaagctggagatatttcggatgataatctacctcactttccctgtggctatgttctgggtttccaatcaggccgagtggtttgaggacgatgtcatacagcgcaagagggagctgtggccacctgagaagcttcaagagatagaggaattcaaagagaggttacggaagcggcgggaggagaagctccttcgcgacgcccagcagaactcctgaggcctccaagtgggagtcctagcccctcccctgatgaaatatacatatactcagttccttgttaaaaaaaaaaaaaaaaacagaacaaaaaatgttttggggcggccgtgggcctgagaaaaagttttcttagcacacatccgttgggggcgcggggccgcgtgtgtggtaagatagacccttggcgccgaatacggtggtccccaaagaggagaactccgggcgcagagagacatagggcgcttggagttcctctcacccaatttaaaaaaagggccggggggacacccgcaggcgtgttggaccaccactccaagaggaggccgaggagggcaataagcgggatcattacacagggcgtcaagcgagccccggatataaattagcgcgccctgtgtg

SEQ ID NO: 363627 - DNA, 1336 bp, Homo sapiens
  misc_feature (1004)..(1004): n is a, c, g, or t
  misc_feature (1108)..(1108): n is a, c, g, or t
gatgtcgagctcggccctactgtctcttagaaacgagatgggggtgaagctggagatatttcggatgataatctacctcactttccctgtggctatgttctgggtttccaatcaggccgagtggtttgaggacgatgtcatacagcgcaataagaggagtgtttgagggttcattccaggggtgggagagggtgtggggcagcagtctgctggggactaatgtctgcctcccataagccgaccctgccctgatgtggggctctggaggcctttggctcgtgtcccatttgtgacttttccttacagagggagctgtggccacctgagagcttcaagagatagaggaattcaaagagaggttacggaagcggcgggaggagaagctccttcgcgacgcccagcagaactcctgaggcctccaagtgggagtcctagcccctcccctgatgaaatatacatatactcagttccttgttaaaaaaaaaaaaaaaaattcaaaaaaaaaaaaaaaaaagcaaaaaaaaaaaaaaaaaaaaagaaaaaagaaaaaaagacgagaagagacccgaaccagaaaaacaaccaccaaaagggaacgacaccacaagaacaaacacacaaacaaagagggagaggggggcgcgcccaaaaatacaatcccccaggagggggcgccaacaacagccgcccacccccttcctaggcgacaggcggcgccccacacaggggccgcaccccataaaacaccacgaagggacgcgcgccgacccaaacaaccaccgacgcccgagaatggagaacacacaacgccgccacgcgcgggtcatacaggaacgacagaccgcccccacaactctgagggggggacgagcaacgacatcgtagggcggcagcaaccccccccccaacgcagaatattctcaccgaggtcgtccgcgcgggcacacaacatcccacacctaccactcgacggtgagacgaatacgttacgaggccgagaccanacacaacacccacacactcgctccacaacttcgtgcggcgctgaggtcaacaaaccacgcatcttacgccactcgccacgcgagcgtaagcgctcttactatcntagtcacaagacaacacatattattattaccaccacgccggcacggacgcgctgatctaaatgtacgaataccacgatctccagacccttagagcacactcaactaaccgagaccacagaccgtcaacaatcacactcgcactctgaacgacgcaagcaaatctcgcctatccgactcagcctaccgccagtcacaaccaagcctcacatccaaaatcaacccaacat

SEQ ID NO: 363628 - DNA, 3107 bp, Homo sapiens
cacatgccaagcgggctgcgcgcgcccctgcccggcccgggagtccctgacgacgcgcgcgcggctgacgcggggggcggggaggggcggggcaggtgcgggactttaacccggagccccgcccctcgggcgtacaaaaccggagcctcgggccgggctgcgtgagggaggagggttcatcatgcctagtggcgtataagaagaccccgccaccggtccctccacgcaccacttcaaagccgttcatctcagtcacagtccagagcagtactgagtctgcccaggacacctacctggacagccaggaccacaagagcgaggtgactagccagtcgggcctgagcaactcgtcggacagcctggacagcagtacccgaccgcccagcgtgacacggggtggagtcgccccagcccctgaggccccagagccacccccaaaacatgcagctctgaaaagtgaacaagggacgctgaccagctctgagtcccaccccgaggccgcccccaaaaggaaactgtcatcgataggaatacaagttgactgcattcagccagtgccaaaagaggagcccagtcccgctaccaaattccagtccatcggggttcaggtagaggacgactggcgaagcagcgtcccctctcacagtatgtcctcccgacgggacacagactcggatacccaggatgccaatgactcaagctgtaagtcatctgagaggagcctcccggactgtacccctcaccccaactccatcagcatcgatgccggtccccggcaggcccccaagattgcccagatcaagcgcaacctctcctatggagacaacagcgaccctgccctagaggcgtcctcgctgcccccacccgacccctggctcgagacctcctccagctccccagcagagccggcacagccaggggcctgccgccgagacggctactggttcctaaagctactgcaggcagaaacagagcggctggaaggctggtgctgccagatggacaaggagaccaaagagaacaacctctctgaagaagtcttaggaaaagtcctcagtgctgtgggcagtgcccagctactgatgtcccagaaattccagcagttccggggcctctgtgagcaaaacttgaaccctgatgccaacccacgccccacagcccaggacctggcagggttctgggacctgctacagctgtccatcgaggatatcagcatgaagttcgatgaactctaccacctcaaggccaacagctggcagctggtggagacccccgagaagaggaaggaagagaagaaaccaccccctccggtcccaaagaagccagccaaatccaagccggcagtgagccgcgacaaggcctcagacgccagcgacaagcagcgccaggaggcccgcaagagactcctggcggccaagcgggcagcttctgtgcggcagaactcagccaccgagagcgcagacagcatcgagatttatgtcccggaggcccagaccaggctctgagaccatgcaggaggaaagaaacgattttaaatcattaaaaacacaaaaactaagtgcgaacggaacagagttttctcaacctttgctatggttattctgtctagagaccctgagccaactttcaaattgacgcatacaagggctcacaatttggcttttttgggtccctcccagctttaggttatgaagattttactcacaaaaaaaatcaacaaaaatcacgaaactagaaaactttttttttcctcttgctggccgtggtggactagatagatggacgtcggcaactcccggcccagcctccatactgcggtctttttactcgttctatctgatgagaactcacactagcttgtttacaagatgacgacagtccaagggcagccttgggcacctgccatgtccctcctttccccagctatccccgctctgaccttgattttcattcttatgtttttctcttttcccttcagagctcacacagtggtcaccattgtggcaagcggctttctgggtctcagccctctctgcggttgagggcccagaggacagagagatggacatgcgtcccctccctccccccgccaagtgctcacacacaacctcacgcgcacacacacacacgcagatggaggcgcctcactgggaggtgccccgccagccctgggcagtgtcaggcaggactcactcaccgctgagcagatgagagaagttttagtcttggcgggtggaaatgagacgaagccacagttatcacactccagactcctgcccttttattttctccagccccttcttccttcagcaaaatctaggactcccgagtggcttccagggggccgtcagtcctcagccgcgcctgtgtccggtgcccgaggggcgggcggcggtgtctgtatgtatgtgtacatatgcacatagaccttagagtgtatagttaacaaacgcccatctgctcacccatgcccacccagcgccgccgccgctggctctcggggcacctggcaggaggcgggtgtgtgaatagcatatatttttacatgtactatatctaggtgtgtgtacaagtgtgtgtaaaaatatataccttgtgtgtaagcagccctttttttttttggtctccacccccctccccccgccccgcactcctaagggcccatctgcccagcctctgagttttctgttctattttttttttaaccccaattatccttctctctctcctgcccccgcatcccactcccagggtgtcacgagccctgagctgcaatggcccgggcctgcagggcggggtaggggagggcaggggctcagccccgaagccagctcagtacctgaggggctgctctatgctgtgtatgcgcctctctggcatccgagacatcctcttggctggcgcttgctgcaggggggaccccccccccgtccccaggtgaaccaagggtctgctccggggcccatttccagcttggccgccgtctgtgaccttgggcaagtcacttgacctctgtgtgcctcaacttcctcctctgtaaaacggggacagtccctgcccctccctacctcacaggcatgttgtgagaataaatgaggtaacgtgta

SEQ ID NO: 363629 - DNA, 740 bp, Homo sapiens
acaaggccaagagactgaagagtccccagtttctgaggatgccctgaacccttggtgcctcatgccctagattgagtgtgggtttctccctcattcttgagtgatgataggaaagctggcctggctgccccatggcccgggacctttgtcccagagaagaaaggcaggcgcagggcatcactgttgtcctgttccacttcacaggagtggagggagtgacagctttccacttggccctgaccccagtccttcctactgctccccagggccacccagtgctaaaggtaacctcagccaagtgtgaataacgtccagggacttcggtggctcctgtgggtggcagtttctgaatctagaactgccgtccagggtttgcccttagtgcaggcgcctctggcctgccctccaggtttctgccacagggttcagggagtgatctttgcctcaagacagccgccagcttcaactacaccagataacggctgtggctttgtgtgtgtgtgtgtgttttctttctctttcgtcgtccttttttttttttctctctgatgcgtgtgaaggagaggactagaaggaacggttcccacctctcggaggacaacggacccaaagcgatcgatgtgatggcaccctcctcagagtagggaaagccagtcatctccaccccatcccacctcccgcccacccctgcccctccctacctcacaggcatgttgtgagaataaatgaggtaacgtgta

SEQ ID NO: 363630 - DNA, 312 bp, Homo sapiens
cacatgccaagcgggctgcgcgcgcccctgcccggcccgggagtccctgacgacgcgcgcgcggctgacgcggggggcggggaggggcggggcaggtgcgggactttaacccggagccccgcccctcgggcgtacaaaaccggagcctcgggccgggctgcgtgagggaggagggttcatcatgcctagtggcgtataagaagaccccgccaccggtccctccacgcaccacttcaaagccgttcatctcagtcacaccctgcccctccctacctcacaggcatgttgtgagaataaatgaggtaacgtgta

SEQ ID NO: 363631 - DNA, 3846 bp, Homo sapiens
gagcggagcgggggtgaggagagtcgagggaggtgacgcgcgctgccggggcgaggttgcgaggggcggtgttgaagaatgtgtgggcgaacatcctgtccagccgccagtcctccagcccgtgtccccgctccgcccgctttgtctctccccggctcgctgtctctttgtctctgccctcgcgctcctccgcagcccctccctcgctccccatctcgggtccccttctcagagcgctcttcagccctcagagccgccctttctgggcgaccccactcttcgggactccccctcagagcgcccccagatcttttggggttccccttgagaacaccttccactctccccaagggctccccgtgagtttcttgcacatcctttgggggttctgcaccccaagtcgctggggtctcgcctcctctgaacccccattgcccctgggctttccctcttctgggtgttccccatatccactgggagctcctaggtcccaagttggggtctttctccttgggaccccccaatatgtcctcagctccctgacttcaggagctcctctctgctttcccctggtttgtcccctgtcgctgtctctccttgttctctctcaggtctccgagcacccccacttctcgggatcggggtcccctgctttgctctccctgcccctctgtgcccccacatctgtctcggtggtctcgccactctgtgcctcttgcgctgaaggcccccctttgagcctgcttctttgcctggggcccttggcccccccttgctttttcagccctagccccctgtctccccttctctctgctccttgtctccctctccctttttctgtctttgccgggtctctgggtctctgacccccatccggccctcatggctttgtgtctggagctcttgaagcaatgttcatcatgcctagtggcgtataagaagaccccgccaccggtccctccacgcaccacttcaaagccgttcatctcagtcacagtccagagcagtactgagtctgcccaggacacctacctggacagccaggaccacaagagcgaggtgactagccagtcgggcctgagcaactcgtcggacagcctggacagcagtacccgaccgcccagcgtgacacggggtggagtcgccccagcccctgaggccccagagccacccccaaaacatgcagctctgaaaagtgaacaagggacgctgaccagctctgagtcccaccccgaggccgcccccaaaaggaaactgtcatcgataggaatacaagttgactgcattcagccagtgccaaaagaggagcccagtcccgctaccaaattccagtccatcggggttcaggtagaggacgactggcgaagcagcgtcccctctcacagtatgtcctcccgacgggacacagactcggatacccaggatgccaatgactcaagctgtaagtcatctgagaggagcctcccggactgtacccctcaccccaactccatcagcatcgatgccggtccccggcaggcccccaagattgcccagatcaagcgcaacctctcctatggagacaacagcgaccctgccctagaggcgtcctcgctgcccccacccgacccctggctcgagacctcctccagctccccagcagagccggcacagccaggggcctgccgccgagacggctactggttcctaaagctactgcaggcagaaacagagcggctggaaggctggtgctgccagatggacaaggagaccaaagagaacaacctctctgaagaagtcttaggaaaagtcctcagtgctgtgggcagtgcccagctactgatgtcccagaaattccagcagttccggggcctctgtgagcaaaacttgaaccctgatgccaacccacgccccacagcccaggacctggcagggttctgggacctgctacagctgtccatcgaggatatcagcatgaagttcgatgaactctaccacctcaaggccaacagctggcagctggtggagacccccgagaagaggaaggaagagaagaaaccaccccctccggtcccaaagaagccagccaaatccaagccggcagtgagccgcgacaaggcctcagacgccagcgacaagcagcgccaggaggcccgcaagagactcctggcggccaagcgggcagcttctgtgcggcagaactcagccaccgagagcgcagacagcatcgagatttatgtcccggaggcccagaccaggctctgagaccatgcaggaggaaagaaacgattttaaatcattaaaaacacaaaaactaagtgcgaacggaacagagttttctcaacctttgctatggttattctgtctagagaccctgagccaactttcaaattgacgcatacaagggctcacaatttggcttttttgggtccctcccagctttaggttatgaagattttactcacaaaaaaaatcaacaaaaatcacgaaactagaaaactttttttttcctcttgctggccgtggtggactagatagatggacgtcggcaactcccggcccagcctccatactgcggtctttttactcgttctatctgatgagaactcacactagcttgtttacaagatgacgacagtccaagggcagccttgggcacctgccatgtccctcctttccccagctatccccgctctgaccttgattttcattcttatgtttttctcttttcccttcagagctcacacagtggtcaccattgtggcaagcggctttctgggtctcagccctctctgcggttgagggcccagaggacagagagatggacatgcgtcccctccctccccccgccaagtgctcacacacaacctcacgcgcacacacacacacgcagatggaggcgcctcactgggaggtgccccgccagccctgggcagtgtcaggcaggactcactcaccgctgagcagatgagagaagttttagtcttggcgggtggaaatgagacgaagccacagttatcacactccagactcctgcccttttattttctccagccccttcttccttcagcaaaatctaggactcccgagtggcttccagggggccgtcagtcctcagccgcgcctgtgtccggtgcccgaggggcgggcggcggtgtctgtatgtatgtgtacatatgcacatagaccttagagtgtatagttaacaaacgcccatctgctcacccatgcccacccagcgccgccgccgctggctctcggggcacctggcaggaggcgggtgtgtgaatagcatatatttttacatgtactatatctaggtgtgtgtacaagtgtgtgtaaaaatatataccttgtgtgtaagcagccctttttttttttggtctccacccccctccccccgccccgcactcctaagggcccatctgcccagcctctgagttttctgttctattttttttttaaccccaattatccttctctctctcctgcccccgcatcccactcccagggtgtcacgagccctgagctgcaatggcccgggcctgcagggcggggtaggggagggcaggggctcagccccgaagccagctcagtacctgaggggctgctctatgctgtgtatgcgcctctctggcatccgagacatcctcttggctggcgcttgctgcaggggggaccccccccccgtccccaggtgaaccaagggtctgctccggggcccatttccagcttggccgccgtctgtgaccttgggcaagtcacttgacctctgtgtgcctcaacttcctcctctgtaaaacggggacagtccctgcccctccctacctcacaggcatgttgtgagaataaatgaggtaacgtgta

SEQ ID NO: 363632 - DNA, 3786 bp, Homo sapiens
gtccgcccgcccgcccgcccgcccgcgcttccgtcctgtccagccgccagtcctccagcccgtgtccccgctccgcccgctttgtctctccccggctcgctgtctctttgtctctgccctcgcgctcctccgcagcccctccctcgctccccatctcgggtccccttctcagagcgctcttcagccctcagagccgccctttctgggcgaccccactcttcgggactccccctcagagcgcccccagatcttttggggttccccttgagaacaccttccactctccccaagggctccccgtgagtttcttgcacatcctttgggggttctgcaccccaagtcgctggggtctcgcctcctctgaacccccattgcccctgggctttccctcttctgggtgttccccatatccactgggagctcctaggtcccaagttggggtctttctccttgggaccccccaatatgtcctcagctccctgacttcaggagctcctctctgctttcccctggtttgtcccctgtcgctgtctctccttgttctctctcaggtctccgagcacccccacttctcgggatcggggtcccctgctttgctctccctgcccctctgtgcccccacatctgtctcggtggtctcgccactctgtgcctcttgcgctgaaggcccccctttgagcctgcttctttgcctggggcccttggcccccccttgctttttcagccctagccccctgtctccccttctctctgctccttgtctccctctccctttttctgtctttgccgggtctctgggtctctgacccccatccggccctcatggctttgtgtctggagctcttgaagcaatgttcatcatgcctagtggcgtataagaagaccccgccaccggtccctccacgcaccacttcaaagccgttcatctcagtcacagtccagagcagtactgagtctgcccaggacacctacctggacagccaggaccacaagagcgaggtgactagccagtcgggcctgagcaactcgtcggacagcctggacagcagtacccgaccgcccagcgtgacacggggtggagtcgccccagcccctgaggccccagagccacccccaaaacatgcagctctgaaaagtgaacaagggacgctgaccagctctgagtcccaccccgaggccgcccccaaaaggaaactgtcatcgataggaatacaagttgactgcattcagccagtgccaaaagaggagcccagtcccgctaccaaattccagtccatcggggttcaggtagaggacgactggcgaagcagcgtcccctctcacagtatgtcctcccgacgggacacagactcggatacccaggatgccaatgactcaagctgtaagtcatctgagaggagcctcccggactgtacccctcaccccaactccatcagcatcgatgccggtccccggcaggcccccaagattgcccagatcaagcgcaacctctcctatggagacaacagcgaccctgccctagaggcgtcctcgctgcccccacccgacccctggctcgagacctcctccagctccccagcagagccggcacagccaggggcctgccgccgagacggctactggttcctaaagctactgcaggcagaaacagagcggctggaaggctggtgctgccagatggacaaggagaccaaagagaacaacctctctgaagaagtcttaggaaaagtcctcagtgctgtgggcagtgcccagctactgatgtcccagaaattccagcagttccggggcctctgtgagcaaaacttgaaccctgatgccaacccacgccccacagcccaggacctggcagggttctgggacctgctacagctgtccatcgaggatatcagcatgaagttcgatgaactctaccacctcaaggccaacagctggcagctggtggagacccccgagaagaggaaggaagagaagaaaccaccccctccggtcccaaagaagccagccaaatccaagccggcagtgagccgcgacaaggcctcagacgccagcgacaagcagcgccaggaggcccgcaagagactcctggcggccaagcgggcagcttctgtgcggcagaactcagccaccgagagcgcagacagcatcgagatttatgtcccggaggcccagaccaggctctgagaccatgcaggaggaaagaaacgattttaaatcattaaaaacacaaaaactaagtgcgaacggaacagagttttctcaacctttgctatggttattctgtctagagaccctgagccaactttcaaattgacgcatacaagggctcacaatttggcttttttgggtccctcccagctttaggttatgaagattttactcacaaaaaaaatcaacaaaaatcacgaaactagaaaactttttttttcctcttgctggccgtggtggactagatagatggacgtcggcaactcccggcccagcctccatactgcggtctttttactcgttctatctgatgagaactcacactagcttgtttacaagatgacgacagtccaagggcagccttgggcacctgccatgtccctcctttccccagctatccccgctctgaccttgattttcattcttatgtttttctcttttcccttcagagctcacacagtggtcaccattgtggcaagcggctttctgggtctcagccctctctgcggttgagggcccagaggacagagagatggacatgcgtcccctccctccccccgccaagtgctcacacacaacctcacgcgcacacacacacacgcagatggaggcgcctcactgggaggtgccccgccagccctgggcagtgtcaggcaggactcactcaccgctgagcagatgagagaagttttagtcttggcgggtggaaatgagacgaagccacagttatcacactccagactcctgcccttttattttctccagccccttcttccttcagcaaaatctaggactcccgagtggcttccagggggccgtcagtcctcagccgcgcctgtgtccggtgcccgaggggcgggcggcggtgtctgtatgtatgtgtacatatgcacatagaccttagagtgtatagttaacaaacgcccatctgctcacccatgcccacccagcgccgccgccgctggctctcggggcacctggcaggaggcgggtgtgtgaatagcatatatttttacatgtactatatctaggtgtgtgtacaagtgtgtgtaaaaatatataccttgtgtgtaagcagccctttttttttttggtctccacccccctccccccgccccgcactcctaagggcccatctgcccagcctctgagttttctgttctattttttttttaaccccaattatccttctctctctcctgcccccgcatcccactcccagggtgtcacgagccctgagctgcaatggcccgggcctgcagggcggggtaggggagggcaggggctcagccccgaagccagctcagtacctgaggggctgctctatgctgtgtatgcgcctctctggcatccgagacatcctcttggctggcgcttgctgcaggggggaccccccccccgtccccaggtgaaccaagggtctgctccggggcccatttccagcttggccgccgtctgtgaccttgggcaagtcacttgacctctgtgtgcctcaacttcctcctctgtaaaacggggacagtccctgcccctccctacctcacaggcatgttgtgagaataaatgaggtaacgtgta

SEQ ID NO: 363633 - DNA, 4310 bp, Homo sapiens
gtccgcccgcccgcccgcccgcccgcgcttccgtcctgtccagccgccagtcctccagcccgtgtccccgctccgcccgctttgtctctccccggctcgctgtctctttgtctctgccctcgcgctcctccgcagcccctccctcgctccccatctcgggtccccttctcagagcgctcttcagccctcagagccgccctttctgggcgaccccactcttcgggactccccctcagagcgcccccagatcttttggggttccccttgagaacaccttccactctccccaagggctccccgtgagtttcttgcacatcctttgggggttctgcaccccaagtcgctggggtctcgcctcctctgaacccccattgcccctgggctttccctcttctgggtgttccccatatccactgggagctcctaggtcccaagttggggtctttctccttgggaccccccaatatgtcctcagctccctgacttcaggagctcctctctgctttcccctggtttgtcccctgtcgctgtctctccttgttctctctcaggtctccgagcacccccacttctcgggatcggggtcccctgctttgctctccctgcccctctgtgcccccacatctgtctcggtggtctcgccactctgtgcctcttgcgctgaaggcccccctttgagcctgcttctttgcctggggcccttggcccccccttgctttttcagccctagccccctgtctccccttctctctgctccttgtctccctctccctttttctgtctttgccgggtctctgggtctctgacccccatccggccctcatggctttgtgtctggagctcttgaagcaatgttcatcatgcctagtggcgtataagaagaccccgccaccggtccctccacgcaccacttcaaagccgttcatctcagtcacagtccagagcagtactgagtctgcccaggacacctacctggacagccaggaccacaagagcgaggtgactagccagtcgggcctgagcaactcgtcggacagcctggacagcagtacccgaccgcccagcgtgacacggggtggagtcgccccagcccctgaggccccagagccacccccaaaacatgcagctctgaaaagtgaacaagggacgctgaccagctctgagtcccaccccgaggccgcccccaaaaggaaactgtcatcgataggaatacaagttgactgcattcagccagtgccaaaagaggagcccagtcccgctaccaaattccagtccatcggggttcaggtagaggacgactggcgggtaagtcggacagaggtggcggctgcttctcccctctcctctccctccctccgctctcacctctcctgctctccctaacccacttctccttgctggatttctaataaccaagctgggtttgggttgcgggtggtggcccaggcatgggaggctgggcaggggcgggcgggtggacagatgagcatttgctctgtgagaccagtcacccacgggggccatggctgggccaggaacatggcgtcagctgccctgatgctggtggtcttcctggccccactgcagtaaacaggcaaccttatgaccttgtcctcgtgtgtgtgtgcgtgtgggcttgggcgggatggggcaagggctgagccaagaatgagatgggggctgtgggacccgcttcaggcgcatggtgagcagatgatgcatccgtttctctgtctcccgtgtgtccgggtcaaggcggcctctggtctctggccctcttggtgactcactccttcctgtccccaccccatccaccccctacccacagaagcagcgtcccctctcacagtatgtcctcccgacgggacacagactcggatacccaggatgccaatgactcaagctgtaagtcatctgagaggagcctcccggactgtacccctcaccccaactccatcagcatcgatgccggtccccggcaggcccccaagattgcccagatcaagcgcaacctctcctatggagacaacagcgaccctgccctagaggcgtcctcgctgcccccacccgacccctggctcgagacctcctccagctccccagcagagccggcacagccaggggcctgccgccgagacggctactggttcctaaagctactgcaggcagaaacagagcggctggaaggctggtgctgccagatggacaaggagaccaaagagaacaacctctctgaagaagtcttaggaaaagtcctcagtgctgtgggcagtgcccagctactgatgtcccagaaattccagcagttccggggcctctgtgagcaaaacttgaaccctgatgccaacccacgccccacagcccaggacctggcagggttctgggacctgctacagctgtccatcgaggatatcagcatgaagttcgatgaactctaccacctcaaggccaacagctggcagctggtggagacccccgagaagaggaaggaagagaagaaaccaccccctccggtcccaaagaagccagccaaatccaagccggcagtgagccgcgacaaggcctcagacgccagcgacaagcagcgccaggaggcccgcaagagactcctggcggccaagcgggcagcttctgtgcggcagaactcagccaccgagagcgcagacagcatcgagatttatgtcccggaggcccagaccaggctctgagaccatgcaggaggaaagaaacgattttaaatcattaaaaacacaaaaactaagtgcgaacggaacagagttttctcaacctttgctatggttattctgtctagagaccctgagccaactttcaaattgacgcatacaagggctcacaatttggcttttttgggtccctcccagctttaggttatgaagattttactcacaaaaaaaatcaacaaaaatcacgaaactagaaaactttttttttcctcttgctggccgtggtggactagatagatggacgtcggcaactcccggcccagcctccatactgcggtctttttactcgttctatctgatgagaactcacactagcttgtttacaagatgacgacagtccaagggcagccttgggcacctgccatgtccctcctttccccagctatccccgctctgaccttgattttcattcttatgtttttctcttttcccttcagagctcacacagtggtcaccattgtggcaagcggctttctgggtctcagccctctctgcggttgagggcccagaggacagagagatggacatgcgtcccctccctccccccgccaagtgctcacacacaacctcacgcgcacacacacacacgcagatggaggcgcctcactgggaggtgccccgccagccctgggcagtgtcaggcaggactcactcaccgctgagcagatgagagaagttttagtcttggcgggtggaaatgagacgaagccacagttatcacactccagactcctgcccttttattttctccagccccttcttccttcagcaaaatctaggactcccgagtggcttccagggggccgtcagtcctcagccgcgcctgtgtccggtgcccgaggggcgggcggcggtgtctgtatgtatgtgtacatatgcacatagaccttagagtgtatagttaacaaacgcccatctgctcacccatgcccacccagcgccgccgccgctggctctcggggcacctggcaggaggcgggtgtgtgaatagcatatatttttacatgtactatatctaggtgtgtgtacaagtgtgtgtaaaaatatataccttgtgtgtaagcagccctttttttttttggtctccacccccctccccccgccccgcactcctaagggcccatctgcccagcctctgagttttctgttctattttttttttaaccccaattatccttctctctctcctgcccccgcatcccactcccagggtgtcacgagccctgagctgcaatggcccgggcctgcagggcggggtaggggagggcaggggctcagccccgaagccagctcagtacctgaggggctgctctatgctgtgtatgcgcctctctggcatccgagacatcctcttggctggcgcttgctgcaggggggaccccccccccgtccccaggtgaaccaagggtctgctccggggcccatttccagcttggccgccgtctgtgaccttgggcaagtcacttgacctctgtgtgcctcaacttcctcctctgtaaaacggggacagtccctgcccctccctacctcacaggcatgttgtgagaataaatgaggtaacgtgta

SEQ ID NO: 363634 - DNA, 5061 bp, Homo sapiens
cccgcagccgcatctggggcgccgcgccggccggaggagaggcatggggcgcccgcgggccggagccggggcgggggccggggcctaggcgcgcggacctgcgagcggacccgagaggcggcggcggcgcagcggaacggcagagcgggccggaggcggccgaggcgcccggcgcaggcacccgtgcctcccctctgccaggaaccttggggccttgtgtgtgaccaggacctggtggcccccgggcggtggcagagcccctgtcccaagctgcttcctgccggcacctctgatcaagtgcctagagggatgtgtgtgccagccctcggtccagtgcccgctcctgagctgactcctgctgggccccgacagcttgccgtgtttcctgtgcctgtagctccctggttggatagctgccgcccgggagaggtgacccgggcgccctgctagggtgaaggcccctgccctcggcccgggatcatgaaaggcctcggtgacagccgcccccgccacctctccgacagcctagacccaccccacgagcccctgtttgcagggaccgaccgcaacccctacctgctgtcgcccacggaggccttcgcccgcgaggcccgcttccccgggcagaacaccctgccaggagatggcctctttcccctcaacaaccagctgcccccgcccagcagcacctttccccgcatccactacaactcccacttcgaggtgccagaggagagccccttccccagccatgcccaagccaccaagatcaaccggctgcccgccaacctcctggaccagtttgagaagcagctgcccatccaccgtgatggcttcagcaccctccaatttccccgtggcgaggccaaggcccgtggtgagagccctggccgcatccgccacctggtccactcagtccagcggcttttcttcaccaaggcaccctcactggagggcacagcgggcaaggtcggtggcaatggcagcaagaagggtggcatggaggacggcaagggccggagggccaaaagcaaggagcgggccaaggctggggagcccaaacggcgcagccgctccaacatctcaggctggtggagctccgatgacaacttggacggcgaggccggcgccttccgcagcagtggcccagcctctgggctgatgatactaggccgccaggcagaacgcagccagccacgctacttcatgcacgcctacaacaccatcagtgggcacatgctcaaaaccaccaagaacaacactactgagctgactgccccaccacccccgcccgcacccccagccacctgccccagccttggggtgggcactgacaccaactacgtcaaacggggctcctggtccactctgaccctcagccacgcccacgaggtctgccagaagacctcagccaccttggataagagcctgctcaagtccaaatcctgccaccagggtctagcctaccattacctgcaggtgcccggcggcggcggcgagtggagcaccacgctgctgtccccacgcgagacggatgccgcggccgagggccctatcccgtgccggcgcatgcgcagcggcagctacatcaaggccatgggcgacgaggacagcgacgagtccggcggcagccccaagccctcacccaagaccgcggcgcggcgccagagctatctgagggccacgcagcagtcgctgggagagcagagcaacccccgcaggagtctggaccgcctggattcagtggacatgctgctgccctccaagtgtccgagctgggaagaggactacacccccgtcagcgacagcctcaacgactccagctgcatcagccagatttttggacaggcctccctgatcccccagttgtttggccatgagcagcaggtacgggaggcagagctgagtgaccagtatgaggcggcctgcgagtcagcctgcagtgaagcggagtccacagcggcagagacgcttgacttgccactgcccagctacttccgctcccgcagccacagctacctgcgtgccatccaggcaggctgctcgcaggaggaggacagtgtctccctgcagtccctctccccaccgcccagtaccggcagcctcagcaatagtcgcacgcttccgagttcatcatgcctagtggcgtataagaagaccccgccaccggtccctccacgcaccacttcaaagccgttcatctcagtcacagtccagagcagtactgagtctgcccaggacacctacctggacagccaggaccacaagagcgaggtgactagccagtcgggcctgagcaactcgtcggacagcctggacagcagtacccgaccgcccagcgtgacacggggtggagtcgccccagcccctgaggccccagagccacccccaaaacatgcagctctgaaaagtgaacaagggacgctgaccagctctgagtcccaccccgaggccgcccccaaaaggaaactgtcatcgataggaatacaagttgactgcattcagccagtgccaaaagaggagcccagtcccgctaccaaattccagtccatcggggttcaggtagaggacgactggcgaagcagcgtcccctctcacagtatgtcctcccgacgggacacagactcggatacccaggatgccaatgactcaagctgtaagtcatctgagaggagcctcccggactgtacccctcaccccaactccatcagcatcgatgccggtccccggcaggcccccaagattgcccagatcaagcgcaacctctcctatggagacaacagcgaccctgccctagaggcgtcctcgctgcccccacccgacccctggctcgagacctcctccagctccccagcagagccggcacagccaggggcctgccgccgagacggctactggttcctaaagctactgcaggcagaaacagagcggctggaaggctggtgctgccagatggacaaggagaccaaagagaacaacctctctgaagaagtcttaggaaaagtcctcagtgctgtgggcagtgcccagctactgatgtcccagaaattccagcagttccggggcctctgtgagcaaaacttgaaccctgatgccaacccacgccccacagcccaggacctggcagggttctgggacctgctacagctgtccatcgaggatatcagcatgaagttcgatgaactctaccacctcaaggccaacagctggcagctggtggagacccccgagaagaggaaggaagagaagaaaccaccccctccggtcccaaagaagccagccaaatccaagccggcagtgagccgcgacaaggcctcagacgccagcgacaagcagcgccaggaggcccgcaagagactcctggcggccaagcgggcagcttctgtgcggcagaactcagccaccgagagcgcagacagcatcgagatttatgtcccggaggcccagaccaggctctgagaccatgcaggaggaaagaaacgattttaaatcattaaaaacacaaaaactaagtgcgaacggaacagagttttctcaacctttgctatggttattctgtctagagaccctgagccaactttcaaattgacgcatacaagggctcacaatttggcttttttgggtccctcccagctttaggttatgaagattttactcacaaaaaaaatcaacaaaaatcacgaaactagaaaactttttttttcctcttgctggccgtggtggactagatagatggacgtcggcaactcccggcccagcctccatactgcggtctttttactcgttctatctgatgagaactcacactagcttgtttacaagatgacgacagtccaagggcagccttgggcacctgccatgtccctcctttccccagctatccccgctctgaccttgattttcattcttatgtttttctcttttcccttcagagctcacacagtggtcaccattgtggcaagcggctttctgggtctcagccctctctgcggttgagggcccagaggacagagagatggacatgcgtcccctccctccccccgccaagtgctcacacacaacctcacgcgcacacacacacacgcagatggaggcgcctcactgggaggtgccccgccagccctgggcagtgtcaggcaggactcactcaccgctgagcagatgagagaagttttagtcttggcgggtggaaatgagacgaagccacagttatcacactccagactcctgcccttttattttctccagccccttcttccttcagcaaaatctaggactcccgagtggcttccagggggccgtcagtcctcagccgcgcctgtgtccggtgcccgaggggcgggcggcggtgtctgtatgtatgtgtacatatgcacatagaccttagagtgtatagttaacaaacgcccatctgctcacccatgcccacccagcgccgccgccgctggctctcggggcacctggcaggaggcgggtgtgtgaatagcatatatttttacatgtactatatctaggtgtgtgtacaagtgtgtgtaaaaatatataccttgtgtgtaagcagccctttttttttttggtctccacccccctccccccgccccgcactcctaagggcccatctgcccagcctctgagttttctgttctattttttttttaaccccaattatccttctctctctcctgcccccgcatcccactcccagggtgtcacgagccctgagctgcaatggcccgggcctgcagggcggggtaggggagggcaggggctcagccccgaagccagctcagtacctgaggggctgctctatgctgtgtatgcgcctctctggcatccgagacatcctcttggctggcgcttgctgcaggggggaccccccccccgtccccaggtgaaccaagggtctgctccggggcccatttccagcttggccgccgtctgtgaccttgggcaagtcacttgacctctgtgtgcctcaacttcctcctctgtaaaacggggacagtccctgcccctccctacctcacaggcatgttgtgagaataaatgaggtaacgtgta

SEQ ID NO: 363635 - DNA, 2959 bp, Homo sapiens
ccagtggagttctccctgtttcacaggttcatcatgcctagtggcgtataagaagaccccgccaccggtccctccacgcaccacttcaaagccgttcatctcagtcacagtccagagcagtactgagtctgcccaggacacctacctggacagccaggaccacaagagcgaggtgactagccagtcgggcctgagcaactcgtcggacagcctggacagcagtacccgaccgcccagcgtgacacggggtggagtcgccccagcccctgaggccccagagccacccccaaaacatgcagctctgaaaagtgaacaagggacgctgaccagctctgagtcccaccccgaggccgcccccaaaaggaaactgtcatcgataggaatacaagttgactgcattcagccagtgccaaaagaggagcccagtcccgctaccaaattccagtccatcggggttcaggtagaggacgactggcgaagcagcgtcccctctcacagtatgtcctcccgacgggacacagactcggatacccaggatgccaatgactcaagctgtaagtcatctgagaggagcctcccggactgtacccctcaccccaactccatcagcatcgatgccggtccccggcaggcccccaagattgcccagatcaagcgcaacctctcctatggagacaacagcgaccctgccctagaggcgtcctcgctgcccccacccgacccctggctcgagacctcctccagctccccagcagagccggcacagccaggggcctgccgccgagacggctactggttcctaaagctactgcaggcagaaacagagcggctggaaggctggtgctgccagatggacaaggagaccaaagagaacaacctctctgaagaagtcttaggaaaagtcctcagtgctgtgggcagtgcccagctactgatgtcccagaaattccagcagttccggggcctctgtgagcaaaacttgaaccctgatgccaacccacgccccacagcccaggacctggcagggttctgggacctgctacagctgtccatcgaggatatcagcatgaagttcgatgaactctaccacctcaaggccaacagctggcagctggtggagacccccgagaagaggaaggaagagaagaaaccaccccctccggtcccaaagaagccagccaaatccaagccggcagtgagccgcgacaaggcctcagacgccagcgacaagcagcgccaggaggcccgcaagagactcctggcggccaagcgggcagcttctgtgcggcagaactcagccaccgagagcgcagacagcatcgagatttatgtcccggaggcccagaccaggctctgagaccatgcaggaggaaagaaacgattttaaatcattaaaaacacaaaaactaagtgcgaacggaacagagttttctcaacctttgctatggttattctgtctagagaccctgagccaactttcaaattgacgcatacaagggctcacaatttggcttttttgggtccctcccagctttaggttatgaagattttactcacaaaaaaaatcaacaaaaatcacgaaactagaaaactttttttttcctcttgctggccgtggtggactagatagatggacgtcggcaactcccggcccagcctccatactgcggtctttttactcgttctatctgatgagaactcacactagcttgtttacaagatgacgacagtccaagggcagccttgggcacctgccatgtccctcctttccccagctatccccgctctgaccttgattttcattcttatgtttttctcttttcccttcagagctcacacagtggtcaccattgtggcaagcggctttctgggtctcagccctctctgcggttgagggcccagaggacagagagatggacatgcgtcccctccctccccccgccaagtgctcacacacaacctcacgcgcacacacacacacgcagatggaggcgcctcactgggaggtgccccgccagccctgggcagtgtcaggcaggactcactcaccgctgagcagatgagagaagttttagtcttggcgggtggaaatgagacgaagccacagttatcacactccagactcctgcccttttattttctccagccccttcttccttcagcaaaatctaggactcccgagtggcttccagggggccgtcagtcctcagccgcgcctgtgtccggtgcccgaggggcgggcggcggtgtctgtatgtatgtgtacatatgcacatagaccttagagtgtatagttaacaaacgcccatctgctcacccatgcccacccagcgccgccgccgctggctctcggggcacctggcaggaggcgggtgtgtgaatagcatatatttttacatgtactatatctaggtgtgtgtacaagtgtgtgtaaaaatatataccttgtgtgtaagcagccctttttttttttggtctccacccccctccccccgccccgcactcctaagggcccatctgcccagcctctgagttttctgttctattttttttttaaccccaattatccttctctctctcctgcccccgcatcccactcccagggtgtcacgagccctgagctgcaatggcccgggcctgcagggcggggtaggggagggcaggggctcagccccgaagccagctcagtacctgaggggctgctctatgctgtgtatgcgcctctctggcatccgagacatcctcttggctggcgcttgctgcaggggggaccccccccccgtccccaggtgaaccaagggtctgctccggggcccatttccagcttggccgccgtctgtgaccttgggcaagtcacttgacctctgtgtgcctcaacttcctcctctgtaaaacggggacagtccctgcccctccctacctcacaggcatgttgtgagaataaatgaggtaacgtgta

SEQ ID NO: 363636 - DNA, 3585 bp, Homo sapiens
gcccagttgtgtctgtaccagaaatgaggagtgatgccaagcctaggcctggcccagccttagcttctgcaatgcaacctatgtaatcacacccattttacaaggaggaaactggggccatacaacaggttcatcatgcctagtggcgtataagaagaccccgccaccggtccctccacgcaccacttcaaagccgttcatctcagtcacagtccagagcagtactgagtctgcccaggacacctacctggacagccaggaccacaagagcgaggtgactagccagtcgggcctgagcaactcgtcggacagcctggacagcagtacccgaccgcccagcgtgacacggggtggagtcgccccagcccctgaggccccagagccacccccaaaacatgcagctctgaaaagtgaacaagggacgctgaccagctctgagtcccaccccgaggccgcccccaaaaggaaactgtcatcgataggaatacaagttgactgcattcagccagtgccaaaagaggagcccagtcccgctaccaaattccagtccatcggggttcaggtagaggacgactggcgggtaagtcggacagaggtggcggctgcttctcccctctcctctccctccctccgctctcacctctcctgctctccctaacccacttctccttgctggatttctaataaccaagctgggtttgggttgcgggtggtggcccaggcatgggaggctgggcaggggcgggcgggtggacagatgagcatttgctctgtgagaccagtcacccacgggggccatggctgggccaggaacatggcgtcagctgccctgatgctggtggtcttcctggccccactgcagtaaacaggcaaccttatgaccttgtcctcgtgtgtgtgtgcgtgtgggcttgggcgggatggggcaagggctgagccaagaatgagatgggggctgtgggacccgcttcaggcgcatggtgagcagatgatgcatccgtttctctgtctcccgtgtgtccgggtcaaggcggcctctggtctctggccctcttggtgactcactccttcctgtccccaccccatccaccccctacccacagaagcagcgtcccctctcacagtatgtcctcccgacgggacacagactcggatacccaggatgccaatgactcaagctgtaagtcatctgagaggagcctcccggactgtacccctcaccccaactccatcagcatcgatgccggtccccggcaggcccccaagattgcccagatcaagcgcaacctctcctatggagacaacagcgaccctgccctagaggcgtcctcgctgcccccacccgacccctggctcgagacctcctccagctccccagcagagccggcacagccaggggcctgccgccgagacggctactggttcctaaagctactgcaggcagaaacagagcggctggaaggctggtgctgccagatggacaaggagaccaaagagaacaacctctctgaagaagtcttaggaaaagtcctcagtgctgtgggcagtgcccagctactgatgtcccagaaattccagcagttccggggcctctgtgagcaaaacttgaaccctgatgccaacccacgccccacagcccaggacctggcagggttctgggacctgctacagctgtccatcgaggatatcagcatgaagttcgatgaactctaccacctcaaggccaacagctggcagctggtggagacccccgagaagaggaaggaagagaagaaaccaccccctccggtcccaaagaagccagccaaatccaagccggcagtgagccgcgacaaggcctcagacgccagcgacaagcagcgccaggaggcccgcaagagactcctggcggccaagcgggcagcttctgtgcggcagaactcagccaccgagagcgcagacagcatcgagatttatgtcccggaggcccagaccaggctctgagaccatgcaggaggaaagaaacgattttaaatcattaaaaacacaaaaactaagtgcgaacggaacagagttttctcaacctttgctatggttattctgtctagagaccctgagccaactttcaaattgacgcatacaagggctcacaatttggcttttttgggtccctcccagctttaggttatgaagattttactcacaaaaaaaatcaacaaaaatcacgaaactagaaaactttttttttcctcttgctggccgtggtggactagatagatggacgtcggcaactcccggcccagcctccatactgcggtctttttactcgttctatctgatgagaactcacactagcttgtttacaagatgacgacagtccaagggcagccttgggcacctgccatgtccctcctttccccagctatccccgctctgaccttgattttcattcttatgtttttctcttttcccttcagagctcacacagtggtcaccattgtggcaagcggctttctgggtctcagccctctctgcggttgagggcccagaggacagagagatggacatgcgtcccctccctccccccgccaagtgctcacacacaacctcacgcgcacacacacacacgcagatggaggcgcctcactgggaggtgccccgccagccctgggcagtgtcaggcaggactcactcaccgctgagcagatgagagaagttttagtcttggcgggtggaaatgagacgaagccacagttatcacactccagactcctgcccttttattttctccagccccttcttccttcagcaaaatctaggactcccgagtggcttccagggggccgtcagtcctcagccgcgcctgtgtccggtgcccgaggggcgggcggcggtgtctgtatgtatgtgtacatatgcacatagaccttagagtgtatagttaacaaacgcccatctgctcacccatgcccacccagcgccgccgccgctggctctcggggcacctggcaggaggcgggtgtgtgaatagcatatatttttacatgtactatatctaggtgtgtgtacaagtgtgtgtaaaaatatataccttgtgtgtaagcagccctttttttttttggtctccacccccctccccccgccccgcactcctaagggcccatctgcccagcctctgagttttctgttctattttttttttaaccccaattatccttctctctctcctgcccccgcatcccactcccagggtgtcacgagccctgagctgcaatggcccgggcctgcagggcggggtaggggagggcaggggctcagccccgaagccagctcagtacctgaggggctgctctatgctgtgtatgcgcctctctggcatccgagacatcctcttggctggcgcttgctgcaggggggaccccccccccgtccccaggtgaaccaagggtctgctccggggcccatttccagcttggccgccgtctgtgaccttgggcaagtcacttgacctctgtgtgcctcaacttcctcctctgtaaaacggggacagtccctgcccctccctacctcacaggcatgttgtgagaataaatgaggtaacgtgta

SEQ ID NO: 363637 - DNA, 3122 bp, Homo sapiens
acaaggccaagagactgaagagtccccagtttctgaggatgccctgaacccttggtgcctcatgccctagattgagtgtgggtttctccctcattcttgagtgatgataggaaagctggcctggctgccccatggcccgggacctttgtcccagagaagaaaggcaggcgcagggcatcactgttgtcctgttccacttcacaggagtggagggagtgacagctttccacttggccctgaccccagtccttcctactgctccccagggccacccagtgctaaaggtaacctcagccaagtgtgaataacgtccagggacttcggtggctcctgtgggtggcagtttctgaatctagaactgccgtccagggtttgcccttagtgcaggcgcctctggcctgccctccaggtttctgccacagggttcagggagtgatctttgcctcaagacagccgccagcttcaactacaccagataacggctgtggctttgtgtgtgtgtgtgtgttttctttctctttcgtcgtccttttttttttttctctctgatgcgtgtgaaggagaggactagaaggaacggttcccacctctcggaggacaacggacccaaagcgatcgatgtgatggcaccctcctcagaaagcagcgtcccctctcacagtatgtcctcccgacgggacacagactcggatacccaggatgccaatgactcaagctgtaagtcatctgagaggagcctcccggactgtacccctcaccccaactccatcagcatcgatgccggtccccggcaggcccccaagattgcccagatcaagcgcaacctctcctatggagacaacagcgaccctgccctagaggcgtcctcgctgcccccacccgacccctggctcgagacctcctccagctccccagcagagccggcacagccaggggcctgccgccgagacggctactggttcctaaagctactgcaggcagaaacagagcggctggaaggctggtgctgccagatggacaaggagaccaaagagaacaacctctctgaagaagtcttaggaaaagtcctcagtgctgtgggcagtgcccagctactgatgtcccagaaattccagcagttccggggcctctgtgagcaaaacttgaaccctgatgccaacccacgccccacagcccaggacctggcagggttctgggacctgctacagctgtccatcgaggatatcagcatgaagttcgatgaactctaccacctcaaggccaacagctggcagctggtggagacccccgagaagaggaaggaagagaagaaaccaccccctccggtcccaaagaagccagccaaatccaagccggcagtgagccgcgacaaggcctcagacgccagcgacaagcagcgccaggaggcccgcaagagactcctggcggccaagcgggcagcttctgtgcggcagaactcagccaccgagagcgcagacagcatcgagatttatgtcccggaggcccagaccaggctctgagaccatgcaggaggaaagaaacgattttaaatcattaaaaacacaaaaactaagtgcgaacggaacagagttttctcaacctttgctatggttattctgtctagagaccctgagccaactttcaaattgacgcatacaagggctcacaatttggcttttttgggtccctcccagctttaggttatgaagattttactcacaaaaaaaatcaacaaaaatcacgaaactagaaaactttttttttcctcttgctggccgtggtggactagatagatggacgtcggcaactcccggcccagcctccatactgcggtctttttactcgttctatctgatgagaactcacactagcttgtttacaagatgacgacagtccaagggcagccttgggcacctgccatgtccctcctttccccagctatccccgctctgaccttgattttcattcttatgtttttctcttttcccttcagagctcacacagtggtcaccattgtggcaagcggctttctgggtctcagccctctctgcggttgagggcccagaggacagagagatggacatgcgtcccctccctccccccgccaagtgctcacacacaacctcacgcgcacacacacacacgcagatggaggcgcctcactgggaggtgccccgccagccctgggcagtgtcaggcaggactcactcaccgctgagcagatgagagaagttttagtcttggcgggtggaaatgagacgaagccacagttatcacactccagactcctgcccttttattttctccagccccttcttccttcagcaaaatctaggactcccgagtggcttccagggggccgtcagtcctcagccgcgcctgtgtccggtgcccgaggggcgggcggcggtgtctgtatgtatgtgtacatatgcacatagaccttagagtgtatagttaacaaacgcccatctgctcacccatgcccacccagcgccgccgccgctggctctcggggcacctggcaggaggcgggtgtgtgaatagcatatatttttacatgtactatatctaggtgtgtgtacaagtgtgtgtaaaaatatataccttgtgtgtaagcagccctttttttttttggtctccacccccctccccccgccccgcactcctaagggcccatctgcccagcctctgagttttctgttctattttttttttaaccccaattatccttctctctctcctgcccccgcatcccactcccagggtgtcacgagccctgagctgcaatggcccgggcctgcagggcggggtaggggagggcaggggctcagccccgaagccagctcagtacctgaggggctgctctatgctgtgtatgcgcctctctggcatccgagacatcctcttggctggcgcttgctgcaggggggaccccccccccgtccccaggtgaaccaagggtctgctccggggcccatttccagcttggccgccgtctgtgaccttgggcaagtcacttgacctctgtgtgcctcaacttcctcctctgtaaaacggggacagtccctgcccctccctacctcacaggcatgttgtgagaataaatgaggtaacgtgta

SEQ ID NO: 363638 - DNA, 2450 bp, Homo sapiens
ggttgaaatttcatgtacggggcctgggttcagttgtacactcgctgtacctggtcgtcgattacctcccggactgtacccctcaccccaactccatcagcatcgatgccggtccccggcaggcccccaagattgcccagatcaagcgcaacctctcctatggagacaacagcgaccctgccctagaggcgtcctcgctgcccccacccgacccctggctcgagacctcctccagctccccagcagagccggcacagccaggggcctgccgccgagacggctactggttcctaaagctactgcaggcagaaacagagcggctggaaggctggtgctgccagatggacaaggagaccaaagagaacaacctctctgaagaagtcttaggaaaagtcctcagtgctgtgggcagtgcccagctactgatgtcccagaaattccagcagttccggggcctctgtgagcaaaacttgaaccctgatgccaacccacgccccacagcccaggacctggcagggttctgggacctgctacagctgtccatcgaggatatcagcatgaagttcgatgaactctaccacctcaaggccaacagctggcagctggtggagacccccgagaagaggaaggaagagaagaaaccaccccctccggtcccaaagaagccagccaaatccaagccggcagtgagccgcgacaaggcctcagacgccagcgacaagcagcgccaggaggcccgcaagagactcctggcggccaagcgggcagcttctgtgcggcagaactcagccaccgagagcgcagacagcatcgagatttatgtcccggaggcccagaccaggctctgagaccatgcaggaggaaagaaacgattttaaatcattaaaaacacaaaaactaagtgcgaacggaacagagttttctcaacctttgctatggttattctgtctagagaccctgagccaactttcaaattgacgcatacaagggctcacaatttggcttttttgggtccctcccagctttaggttatgaagattttactcacaaaaaaaatcaacaaaaatcacgaaactagaaaactttttttttcctcttgctggccgtggtggactagatagatggacgtcggcaactcccggcccagcctccatactgcggtctttttactcgttctatctgatgagaactcacactagcttgtttacaagatgacgacagtccaagggcagccttgggcacctgccatgtccctcctttccccagctatccccgctctgaccttgattttcattcttatgtttttctcttttcccttcagagctcacacagtggtcaccattgtggcaagcggctttctgggtctcagccctctctgcggttgagggcccagaggacagagagatggacatgcgtcccctccctccccccgccaagtgctcacacacaacctcacgcgcacacacacacacgcagatggaggcgcctcactgggaggtgccccgccagccctgggcagtgtcaggcaggactcactcaccgctgagcagatgagagaagttttagtcttggcgggtggaaatgagacgaagccacagttatcacactccagactcctgcccttttattttctccagccccttcttccttcagcaaaatctaggactcccgagtggcttccagggggccgtcagtcctcagccgcgcctgtgtccggtgcccgaggggcgggcggcggtgtctgtatgtatgtgtacatatgcacatagaccttagagtgtatagttaacaaacgcccatctgctcacccatgcccacccagcgccgccgccgctggctctcggggcacctggcaggaggcgggtgtgtgaatagcatatatttttacatgtactatatctaggtgtgtgtacaagtgtgtgtaaaaatatataccttgtgtgtaagcagccctttttttttttggtctccacccccctccccccgccccgcactcctaagggcccatctgcccagcctctgagttttctgttctattttttttttaaccccaattatccttctctctctcctgcccccgcatcccactcccagggtgtcacgagccctgagctgcaatggcccgggcctgcagggcggggtaggggagggcaggggctcagccccgaagccagctcagtacctgaggggctgctctatgctgtgtatgcgcctctctggcatccgagacatcctcttggctggcgcttgctgcaggggggaccccccccccgtccccaggtgaaccaagggtctgctccggggcccatttccagcttggccgccgtctgtgaccttgggcaagtcacttgacctctgtgtgcctcaacttcctcctctgtaaaacggggacagtccctgcccctccctacctcacaggcatgttgtgagaataaatgaggtaacgtgta

SEQ ID NO: 363639 - DNA, 2854 bp, Homo sapiens
gagcggagcgggggtgaggagagtcgagggaggtgacgcgcgctgccggggcgaggttgcgaggggcggtgttgaagaatgtgtgggcgaacatcctgtccagccgccagtcctccagcccgtgtccccgctccgcccgctttgtctctccccggctcgctgtctctttgtctctgccctcgcgctcctccgcagcccctccctcgctccccatctcgggtccccttctcagagcgctcttcagccctcagagccgccctttctgggcgaccccactcttcgggactccccctcagagcgcccccagatcttttggggttccccttgagaacaccttccactctccccaagggctccccgtgagtttcttgcacatcctttgggggttctgcaccccaagtcgctggggtctcgcctcctctgaacccccattgcccctgggctttccctcttctgggtgttccccatatccactgggagctcctaggtcccaagttggggtctttctccttgggaccccccaatatgtcctcagctccctgacttcaggagctcctctctgctttcccctggtttgtcccctgtcgctgtctctccttgttctctctcaggtctccgagcacccccacttctcgggatcggggtcccctgctttgctctccctgcccctctgtgcccccacatctgtctcggtggtctcgccactctgtgcctcttgcgctgaaggcccccctttgagcctgcttctttgcctggggcccttggcccccccttgctttttcagccctagccccctgtctccccttctctctgctccttgtctccctctccctttttctgtctttgccgggtctctgggtctctgacccccatccggccctcatggctttgtgtctggagctcttgaagcaatgttcatcatgcctagtggcgtataagaagaccccgccaccggtccctccacgcaccacttcaaagccgttcatctcagtcacagtccagagcagtactgagtctgcccaggacacctacctggacagccaggaccacaagagcgaggtgactagccagtcgggcctgagcaactcgtcggacagcctggacagcagtacccgaccgcccagcgtgacacggggtggagtcgccccagcccctgaggccccagagccacccccaaaacatgcagctctgaaaagtgaacaagggacgctgaccagctctgagtcccaccccgaggccgcccccaaaaggaaactgtcatcgataggaatacaagttgactgcattcagccagtgccaaaagaggagcccagtcccgctaccaaattccagtccatcggggttcaggtagaggacgactggcgaagcagcgtcccctctcacagtatgtcctcccgacgggacacagactcggatacccaggatgccaatgactcaagctgtaagtcatctgagaggagcctcccggactgtacccctcaccccaactccatcagcatcgatgccggtccccggcaggcccccaagattgcccagatcaagcgcaacctctcctatggagacaacagcgaccctgccctagaggcgtcctcgctgcccccacccgacccctggctcgagacctcctccagctccccagcagagccggcacagccaggggcctgccgccgagacggctactggttcctaaagctactgcaggcagaaacagagcggctggaaggctggtgctgccagatggacaaggagaccaaagagaacaacctctctgaagaagtcttaggaaaagtcctcagtgctgtgggcagtgcccagctactgatgtcccagaaattccagcagttccggggcctctgtgagcaaaacttgaaccctgatgccaacccacgccccacagcccaggacctggcagggttctgggacctgctacagctgtccatcgaggatatcagcatgaagttcgatgaactctaccacctcaaggccaacagctggcagctggtggagacccccgagaagaggaaggaagagaagaaaccaccccctccggtcccaaagaagccagccaaatccaagccggcagtgagccgcgacaaggcctcagacgccagcgacaagcagcgccaggaggcccgcaagagactcctggcggccaagcgggcagcttctgtgcggcagaactcagccaccgagagcgcagacagcatcgagatttatgtcccggaggcccagaccaggctctgagaccatgcaggaggaaagaaacgattttaaatcattaaaaacacaaaaactaagtgcgaacggaacagagttttctcaacctttgctatggttattctgtctagagaccctgagccaactttcaaattgacgcatacaagggctcacaatttggcttttttgggtccctcccagctttaggttatgaagattttactcacaaaaaaaatcaacaaaaatcacgaaactagaaaactttttttttcctcttgctggccgtggtggactagatagatggacgtcggcaactcccggcccagcctccatactgcggtctttttactcgttctatctgatgagaactcacactagcttgtttacaagatgacgacagtccaagggcagccttgggcacctgccatgtccctcctttccccagctatccccgctctgaccttgattttcattcttatgtttttctcttttcccttcagagctcacacagtggtcaccattgtggcaagcggctttctgggtctcagccctcaacttcctcctctgtaaaacggggacagtccctgcccctccctacctcacaggcatgttgtgagaataaatgaggtaacgtgta

SEQ ID NO: 363640 - DNA, 2629 bp, Homo sapiens
gtccgcccgcccgcccgcccgcccgcgcttccgtcctgtccagccgccagtcctccagcccgtgtccccgctccgcccgctttgtctctccccggctcgctgtctctttgtctctgccctcgcgctcctccgcagcccctccctcgctccccatctcgggtccccttctcagagcgctcttcagccctcagagccgccctttctgggcgaccccactcttcgggactccccctcagagcgcccccagatcttttggggttccccttgagaacaccttccactctccccaagggctccccgtgagtttcttgcacatcctttgggggttctgcaccccaagtcgctggggtctcgcctcctctgaacccccattgcccctgggctttccctcttctgggtgttccccatatccactgggagctcctaggtcccaagttggggtctttctccttgggaccccccaatatgtcctcagctccctgacttcaggagctcctctctgctttcccctggtttgtcccctgtcgctgtctctccttgttctctctcaggtctccgagcacccccacttctcgggatcggggtcccctgctttgctctccctgcccctctgtgcccccacatctgtctcggtggtctcgccactctgtgcaaccctgatgccaacccacgccccacagcccaggacctggcagggttctgggacctgctacagctgtccatcgaggatatcagcatgaagttcgatgaactctaccacctcaaggccaacagctggcagctggtggagacccccgagaagaggaaggaagagaagaaaccaccccctccggtcccaaagaagccagccaaatccaagccggcagtgagccgcgacaaggcctcagacgccagcgacaagcagcgccaggaggcccgcaagagactcctggcggccaagcgggcagcttctgtgcggcagaactcagccaccgagagcgcagacagcatcgagatttatgtcccggaggcccagaccaggctctgagaccatgcaggaggaaagaaacgattttaaatcattaaaaacacaaaaactaagtgcgaacggaacagagttttctcaacctttgctatggttattctgtctagagaccctgagccaactttcaaattgacgcatacaagggctcacaatttggcttttttgggtccctcccagctttaggttatgaagattttactcacaaaaaaaatcaacaaaaatcacgaaactagaaaactttttttttcctcttgctggccgtggtggactagatagatggacgtcggcaactcccggcccagcctccatactgcggtctttttactcgttctatctgatgagaactcacactagcttgtttacaagatgacgacagtccaagggcagccttgggcacctgccatgtccctcctttccccagctatccccgctctgaccttgattttcattcttatgtttttctcttttcccttcagagctcacacagtggtcaccattgtggcaagcggctttctgggtctcagccctctctgcggttgagggcccagaggacagagagatggacatgcgtcccctccctccccccgccaagtgctcacacacaacctcacgcgcacacacacacacgcagatggaggcgcctcactgggaggtgccccgccagccctgggcagtgtcaggcaggactcactcaccgctgagcagatgagagaagttttagtcttggcgggtggaaatgagacgaagccacagttatcacactccagactcctgcccttttattttctccagccccttcttccttcagcaaaatctaggactcccgagtggcttccagggggccgtcagtcctcagccgcgcctgtgtccggtgcccgaggggcgggcggcggtgtctgtatgtatgtgtacatatgcacatagaccttagagtgtatagttaacaaacgcccatctgctcacccatgcccacccagcgccgccgccgctggctctcggggcacctggcaggaggcgggtgtgtgaatagcatatatttttacatgtactatatctaggtgtgtgtacaagtgtgtgtaaaaatatataccttgtgtgtaagcagccctttttttttttggtctccacccccctccccccgccccgcactcctaagggcccatctgcccagcctctgagttttctgttctattttttttttaaccccaattatccttctctctctcctgcccccgcatcccactcccagggtgtcacgagccctgagctgcaatggcccgggcctgcagggcggggtaggggagggcaggggctcagccccgaagccagctcagtacctgaggggctgctctatgctgtgtatgcgcctctctggcatccgagacatcctcttggctggcgcttgctgcaggggggaccccccccccgtccccaggtgaaccaagggtctgctccggggcccatttccagcttggccgccgtctgtgaccttgggcaagtcacttgacctctgtgtgcctcaacttcctcctctgtaaaacggggacagtccctgcccctccctacctcacaggcatgttgtgagaataaatgaggtaacgtgta

SEQ ID NO: 363641 - DNA, 2472 bp, Homo sapiens
gtccgcccgcccgcccgcccgcccgcgcttccgtcctgtccagccgccagtcctccagcccgtgtccccgctccgcccgctttgtctctccccggctcgctgtctctttgtctctgccctcgcgctcctccgcagcccctccctcgctccccatctcgggtccccttctcagagcgctcttcagccctcagagccgccctttctgggcgaccccactcttcgggactccccctcagagcgcccccagatcttttggggttccccttgagaacaccttccactctccccaagggctccccgtgagtttcttgcacatcctttgggggttctgcaccccaagtcgctggggtctcgcctcctctgaacccccattgcccctgggctttccctcttctgggtgttccccatatccactgggagctcctaggtcccaagttggggtctttctccttgggaccccccaatatgtcctcagctccctgacttcaggagctcctctctgctttcccctggtttgtcccctgtcgctgtctctccttgttctctctcaggtctccgagcacccccacttctcgggatcggggtcccctgctttgctctccctgcccctctgtgcccccacatctgtctcggtggtctcgccactctgtgcaaccctgatgccaacccacgccccacagcccaggacctggcagggttctgggacctgctacagctgtccatcgaggatatcagcatgaagttcgatgaactctaccacctcaaggccaacagctggcagctggtggagacccccgagaagaggaaggaagagaagaaaccaccccctccggtcccaaagaagccagccaaatccaagccggcagtgagccgcgacaaggaggaaagaaacgattttaaatcattaaaaacacaaaaactaagtgcgaacggaacagagttttctcaacctttgctatggttattctgtctagagaccctgagccaactttcaaattgacgcatacaagggctcacaatttggcttttttgggtccctcccagctttaggttatgaagattttactcacaaaaaaaatcaacaaaaatcacgaaactagaaaactttttttttcctcttgctggccgtggtggactagatagatggacgtcggcaactcccggcccagcctccatactgcggtctttttactcgttctatctgatgagaactcacactagcttgtttacaagatgacgacagtccaagggcagccttgggcacctgccatgtccctcctttccccagctatccccgctctgaccttgattttcattcttatgtttttctcttttcccttcagagctcacacagtggtcaccattgtggcaagcggctttctgggtctcagccctctctgcggttgagggcccagaggacagagagatggacatgcgtcccctccctccccccgccaagtgctcacacacaacctcacgcgcacacacacacacgcagatggaggcgcctcactgggaggtgccccgccagccctgggcagtgtcaggcaggactcactcaccgctgagcagatgagagaagttttagtcttggcgggtggaaatgagacgaagccacagttatcacactccagactcctgcccttttattttctccagccccttcttccttcagcaaaatctaggactcccgagtggcttccagggggccgtcagtcctcagccgcgcctgtgtccggtgcccgaggggcgggcggcggtgtctgtatgtatgtgtacatatgcacatagaccttagagtgtatagttaacaaacgcccatctgctcacccatgcccacccagcgccgccgccgctggctctcggggcacctggcaggaggcgggtgtgtgaatagcatatatttttacatgtactatatctaggtgtgtgtacaagtgtgtgtaaaaatatataccttgtgtgtaagcagccctttttttttttggtctccacccccctccccccgccccgcactcctaagggcccatctgcccagcctctgagttttctgttctattttttttttaaccccaattatccttctctctctcctgcccccgcatcccactcccagggtgtcacgagccctgagctgcaatggcccgggcctgcagggcggggtaggggagggcaggggctcagccccgaagccagctcagtacctgaggggctgctctatgctgtgtatgcgcctctctggcatccgagacatcctcttggctggcgcttgctgcaggggggaccccccccccgtccccaggtgaaccaagggtctgctccggggcccatttccagcttggccgccgtctgtgaccttgggcaagtcacttgacctctgtgtgcctcaacttcctcctctgtaaaacggggacagtccctgcccctccctacctcacaggcatgttgtgagaataaatgaggtaacgtgta

SEQ ID NO: 363642 - DNA, 1161 bp, Homo sapiens
  misc_feature (90)..(90): n is a, c, g, or t
ccagaaccctcgagcctaggagagactgctccaggcgacatgacctgtggtagctggaagtgggacagggaggcgcagccacactcctgncctggtccgagggagatctcaggaaaccgactggggaaatcaccccccacagggacccccacccctcccagcctcacgcgcacacacacacacgcagatggaggcgcctcactgggaggtgccccgccagccctgggcagtgtcaggcaggactcactcaccgctgagcagatgagagaagttttagtcttggcgggtggaaatgagacgaagccacagttatcacactccagactcctgcccttttattttctccagccccttcttccttcagcaaaatctaggactcccgagtggcttccagggggccgtcagtcctcagccgcgcctgtgtccggtgcccgaggggcgggcggcggtgtctgtatgtatgtgtacatatgcacatagaccttagagtgtatagttaacaaacgcccatctgctcacccatgcccacccagcgccgccgccgctggctctcggggcacctggcaggaggcgggtgtgtgaatagcatatatttttacatgtactatatctaggtgtgtgtacaagtgtgtgtaaaaatatataccttgtgtgtaagcagccctttttttttttggtctccacccccctccccccgccccgcactcctaagggcccatctgcccagcctctgagttttctgttctattttttttttaaccccaattatccttctctctctcctgcccccgcatcccactcccagggtgtcacgagccctgagctgcaatggcccgggcctgcagggcggggtaggggagggcaggggctcagccccgaagccagctcagtacctgaggggctgctctatgctgtgtatgcgcctctctggcatccgagacatcctcttggctggcgcttgctgcaggggggaccccccccccgtccccaggtgaaccaagggtctgctccggggcccatttccagcttggccgccgtctgtgaccttgggcaagtcacttgacctctgtgtgcctcaacttcctcctctgtaaaacggggacagtccctgcccctccctacctcacaggcatgttgtgagaataaatgaggtaacgtgta

SEQ ID NO: 363643 - DNA, 2202 bp, Homo sapiens
gtccgcccgcccgcccgcccgcccgcgcttccgtcctgtccagccgccagtcctccagcccgtgtccccgctccgcccgctttgtctctccccggctcgctgtctctttgtctctgccctcgcgctcctccgcagcccctccctcgctccccatctcgggtccccttctcagagcgctcttcagccctcagagccgccctttctgggcgaccccactcttcgggactccccctcagagcgcccccagatcttttggggttccccttgagaacaccttccactctccccaagggctccccgtgagtttcttgcacatcctttgggggttctgcaccccaagtcgctggggtctcgcctcctctgaacccccattgcccctgggctttccctcttctgggtgttccccatatccactgggagctcctaggtcccaagttggggtctttctccttgggaccccccaatatgtcctcagctccctgacttcaggagctcctctctgctttcccctggtttgtcccctgtcgctgtctctccttgttctctctcaggtctccgagcacccccacttctcgggatcggggtcccctgctttgctctccctgcccctctgtgcccccacatctgtctcggtggtctcgccactctgtgcctcttgcgctgaaggcccccctttgagcctgcttctttgcctggggcccttggcccccccttgctttttcagccctagccccctgtctccccttctctctgctccttgtctccctctccctttttctgtctttgccgggtctctgggtctctgacccccatccggccctcatggctttgtgtctggagctcttgaagcaatgttcatcatgcctagtggcgtataagaagaccccgccaccggtccctccacgcaccacttcaaagccgttcatctcagtcacagtccagagcagtactgagtctgcccaggacacctacctggacagccaggaccacaagagcgaggtgactagccagtcgggcctgagcaactcgtcggacagcctggacagcagtacccgaccgcccagcgtgacacggggtggagtcgccccagcccctgaggccccagagccacccccaaaacatgcagctctgaaaagtgaacaagggacgctgaccagctctgagtcccaccccgaggccgcccccaaaaggaaactgtcatcgataggaatacaagttgactgcattcagccagtgccaaaagaggagcccagtcccgctaccaaattccagtccatcggggttcaggtagaggacgactggcgggtaagtcggacagaggtggcggctgcttctcccctctcctctccctccctccgctctcacctctcctgctctccctaacccacttctccttgctggatttctaataaccaagctgggtttgggttgcgggtggtggcccaggcatgggaggctgggcaggggcgggcgggtggacagatgagcatttgctctgtgagaccagtcacccacgggggccatggctgggccaggaacatggcgtcagctgccctgatgctggtggtcttcctggccccactgcagtaaacaggcaaccttatgaccttgtcctcgtgtgtgtgtgcgtgtgggcttgggcgggatggggcaagggctgagccaagaatgagatgggggctgtgggacccgcttcaggcgcatggtgagcagatgatgcatccgtttctctgtctcccgtgtgtccgggtcaaggcggcctctggtctctggccctcttggtgactcactccttcctgtccccaccccatccaccccctacccacagaagcagcgtcccctctcacagtatgtcctcccgacgggacacagactcggatacccaggatgccaatgactcaagctgtaagtcatctgagaggagcctcccggactgtacccctcaccctccctccgctctcacctctcctgctctccctaacccacttctccttgctggatttctaataaccaagagtgggaacggaggcacgtacactgaaatttaagtcatccaagttgggacttaagatagcaggttaatattgtctcaggcgagacttagaacgtcttttctggtatcccagtctgcagtgggcaaatctattgtctttatttctcatttaagggcagaatggagggatgacatatttttacttttta

SEQ ID NO: 363644 - DNA, 1406 bp, Homo sapiens
  misc_feature (1364)..(1364): n is a, c, g, or t
  misc_feature (1367)..(1367): n is a, c, g, or t
  misc_feature (1380)..(1380): n is a, c, g, or t
  misc_feature (1390)..(1390): n is a, c, g, or t
  misc_feature (1392)..(1392): n is a, c, g, or t
  misc_feature (1403)..(1403): n is a, c, g, or t
gtccgcccgcccgcccgcccgcccgcgcttccgtcctgtccagccgccagtcctccagcccgtgtccccgctccgcccgctttgtctctccccggctcgctgtctctttgtctctgccctcgcgctcctccgcagcccctccctcgctccccatctcgggtccccttctcagagcgctcttcagccctcagagccgccctttctgggcgaccccactcttcgggactccccctcagagcgcccccagatcttttggggttccccttgagaacaccttccactctccccaagggctccccgtgagtttcttgcacatcctttgggggttctgcaccccaagtcgctggggtctcgcctcctctgaacccccattgcccctgggctttccctcttctgggtgttccccatatccactgggagctcctaggtcccaagttggggtctttctccttgggaccccccaatatgtcctcagctccctgacttcaggagctcctctctgctttcccctggtttgtcccctgtcgctgtctctccttgttctctctcaggtctccgagcacccccacttctcgggatcggggtcccctgctttgctctccctgcccctctgtgcccccacatctgtctcggtggtctcgccactctgtgcctcttgcgctgaaggcccccctttgagcctgcttctttgcctggggcccttggcccccccttgctttttcagccctagccccctgtctccccttctctctgctccttgtctccctctccctttttctgtctttgccgggtctctgggtctctgacccccatccggccctcatggctttgtgtctggagctcttgaagcaatgttcatcatgcctagtggcgtataagaagaccccgccaccggtccctccacgcaccacttcaaagccgttcatctcagtcacagtccagagcagtactgagtctgcccaggacacctacctggacagccaggaccacaagagcgaggtgactagccagtcgggcctgagcaactcgtcggacagcctggacagcagtacccgaccgcccagcgtgacacggggtggagtcgccccagcccctgaggccccagagccacccccaaaacatgcagctctgaaaagtgaacaagggacgctgaccagctctgagtcccaccccgaggccgcccccaaaaggaaactgtcatcgataggaatacaagttgactgcattcagccagtgccaaaagaggagcccagtcccgctaccaaattccagtccatcggggttcaggtagaggacgactggcgtgggaagcagggtccctcttcaaagatgttctccggagggaccagactcggatacccagngcnaagatcaagggancactgaaggncncggaggacctnacc

SEQ ID NO: 363645 - DNA, 5052 bp, Homo sapiens
cccgcagccgcatctggggcgccgcgccggccggaggagaggcatggggcgcccgcgggccggagccggggcgggggccggggcctaggcgcgcggacctgcgagcggacccgagaggcggcggcggcgcagcggaacggcagagcgggccggaggcggccgaggcgcccggcgcaggcacccgtgcctcccctctgccaggaaccttggggccttgtgtgtgaccaggacctggtggcccccgggcggtggcagagcccctgtcccaagctgcttcctgccggcacctctgatcaagtgcctagagggatgtgtgtgccagccctcggtccagtgcccgctcctgagctgactcctgctgggccccgacagcttgccgtgtttcctgtgcctgtagctccctggttggatagctgccgcccgggagaggtgacccgggcgccctgctagggtgaaggcccctgccctcggcccgggatcatgaaaggcctcggtgacagccgcccccgccacctctccgacagcctagacccaccccacgagcccctgtttgcagggaccgaccgcaacccctacctgctgtcgcccacggaggccttcgcccgcgaggcccgcttccccgggcagaacaccctgccaggagatggcctctttcccctcaacaaccagctgcccccgcccagcagcacctttccccgcatccactacaactcccacttcgaggtgccagaggagagccccttccccagccatgcccaagccaccaagatcaaccggctgcccgccaacctcctggaccagtttgagaagcagctgcccatccaccgtgatggcttcagcaccctccaatttccccgtggcgaggccaaggcccgtggtgagagccctggccgcatccgccacctggtccactcagtccagcggcttttcttcaccaaggcaccctcactggagggcacagcgggcaaggtcggtggcaatggcagcaagaagggtggcatggaggacggcaagggccggagggccaaaagcaaggagcgggccaaggctggggagcccaaacggcgcagccgctccaacatctcaggctggtggagctccgatgacaacttggacggcgaggccggcgccttccgcagcagtggcccagcctctgggctgatgatactaggccgccaggcagaacgcagccagccacgctacttcatgcacgcctacaacaccatcagtgggcacatgctcaaaaccaccaagaacaacactactgagctgactgccccaccacccccgcccgcacccccagccacctgccccagccttggggtgggcactgacaccaactacgtcaaacggggctcctggtccactctgaccctcagccacgcccacgaggtctgccagaagacctcagccaccttggataagagcctgctcaagtccaaatcctgccaccagggtctagcctaccattacctgcaggtgcccggcggcggcggcgagtggagcaccacgctgctgtccccacgcgagacggatgccgcggccgagggccctatcccgtgccggcgcatgcgcagcggcagctacatcaaggccatgggcgacgaggacagcgacgagtccggcggcagccccaagccctcacccaagaccgcggcgcggcgccagagctatctgagggccacgcagcagtcgctgggagagcagagcaacccccgcaggagtctggaccgcctggattcagtggacatgctgctgccctccaagtgtccgagctgggaagaggactacacccccgtcagcgacagcctcaacgactccagctgcatcagccagatttttggacaggcctccctgatcccccagttgtttggccatgagcagcaggtacgggaggcagagctgagtgaccagtatgaggcggcctgcgagtcagcctgcagtgaagcggagtccacagcggcagagacgcttgacttgccactgcccagctacttccgctcccgcagccacagctacctgcgtgccatccaggcaggctgctcgcaggaggaggacagtgtctccctgcagtccctctccccaccgcccagtaccggcagcctcagcaatagtcgcacgcttccgagttcatcatgcctagtggcgtataagaagaccccgccaccggtccctccacgcaccacttcaaagccgttcatctcagtcacagtccagagcagtactgagtctgcccaggacacctacctggacagccaggaccacaagagcgaggtgactagccagtcgggcctgagcaactcgtcggacagcctggacagcagtacccgaccgcccagcgtgacacggggtggagtcgccccagcccctgaggccccagagccacccccaaaacatgcagctctgaaaagtgaacaagggacgctgaccagctctgagtcccaccccgaggccgcccccaaaaggaaactgtcatcgataggaatacaagagaggactagaaggaacggttcccacctctcggaggacaacggacccaaagcgatcgatgtgatggcaccctcctcagaaagcagcgtcccctctcacagtatgtcctcccgacgggacacagactcggatacccaggatgccaatgactcaagctgtaagtcatctgagaggagcctcccggactgtacccctcaccccaactccatcagcatcgatgccggtccccggcaggcccccaagattgcccagatcaagcgcaacctctcctatggagacaacagcgaccctgccctagaggcgtcctcgctgcccccacccgacccctggctcgagacctcctccagctccccagcagagccggcacagccaggggcctgccgccgagacggctactggttcctaaagctactgcaggcagaaacagagcggctggaaggctggtgctgccagatggacaaggagaccaaagagaacaacctctctgaagaagtcttaggaaaagtcctcagtgctgtgggcagtgcccagctactgatgtcccagaaattccagcagttccggggcctctgtgagcaaaacttgaaccctgatgccaacccacgccccacagcccaggacctggcagggttctgggacctgctacagctgtccatcgaggatatcagcatgaagttcgatgaactctaccacctcaaggccaacagctggcagctggtggagacccccgagaagaggaaggaagagaagaaaccaccccctccggtcccaaagaagccagccaaatccaagccggcagtgagccgcgacaaggcctcagacgccagcgacaagcagcgccaggaggcccgcaagagactcctggcggccaagcgggcagcttctgtgcggcagaactcagccaccgagagcgcagacagcatcgagatttatgtcccggaggcccagaccaggctctgagaccatgcaggaggaaagaaacgattttaaatcattaaaaacacaaaaactaagtgcgaacggaacagagttttctcaacctttgctatggttattctgtctagagaccctgagccaactttcaaattgacgcatacaagggctcacaatttggcttttttgggtccctcccagctttaggttatgaagattttactcacaaaaaaaatcaacaaaaatcacgaaactagaaaactttttttttcctcttgctggccgtggtggactagatagatggacgtcggcaactcccggcccagcctccatactgcggtctttttactcgttctatctgatgagaactcacactagcttgtttacaagatgacgacagtccaagggcagccttgggcacctgccatgtccctcctttccccagctatccccgctctgaccttgattttcattcttatgtttttctcttttcccttcagagctcacacagtggtcaccattgtggcaagcggctttctgggtctcagccctctctgcggttgagggcccagaggacagagagatggacatgcgtcccctccctccccccgccaagtgctcacacacaacctcacgcgcacacacacacacgcagatggaggcgcctcactgggaggtgccccgccagccctgggcagtgtcaggcaggactcactcaccgctgagcagatgagagaagttttagtcttggcgggtggaaatgagacgaagccacagttatcacactccagactcctgcccttttattttctccagccccttcttccttcagcaaaatctaggactcccgagtggcttccagggggccgtcagtcctcagccgcgcctgtgtccggtgcccgaggggcgggcggcggtgtctgtatgtatgtgtacatatgcacatagaccttagagtgtatagttaacaaacgcccatctgctcacccatgcccacccagcgccgccgccgctggctctcggggcacctggcaggaggcgggtgtgtgaatagcatatatttttacatgtactatatctaggtgtgtgtacaagtgtgtgtaaaaatatataccttgtgtgtaagcagccctttttttttttggtctccacccccctccccccgccccgcactcctaagggcccatctgcccagcctctgagttttctgttctattttttttttaaccccaattatccttctctctctcctgcccccgcatcccactcccagggtgtcacgagccctgagctgcaatggcccgggcctgcagggcggggtaggggagggcaggggctcagccccgaagccagctcagtacctgaggggctgctctatgctgtgtatgcgcctctctggcatccgagacatcctcttggctggcgcttgctgcaggggggaccccccccccgtccccaggtgaaccaagggtctgctccggggcccatttccagcttggccgccgtctgtgaccttgggcaagtcacttgacctctgtgtgcctcaacttcctcctctgtaaaacggggacagtccctgcccctccctacctcacaggcatgttgtgagaataaatgaggtaacgtgta

SEQ ID NO: 363646 - DNA, 4453 bp, Homo sapiens
  misc_feature (4453)..(4453): n is a, c, g, or t
gagcggagcgggggtgaggagagtcgagggaggtgacgcgcgctgccggggcgaggttgcgaggggcggtgttgaagaatgtgtgggcgaacatcctgtccagccgccagtcctccagcccgtgtccccgctccgcccgctttgtctctccccggctcgctgtctctttgtctctgccctcgcgctcctccgcagcccctccctcgctccccatctcgggtccccttctcagagcgctcttcagccctcagagccgccctttctgggcgaccccactcttcgggactccccctcagagcgcccccagatcttttggggttccccttgagaacaccttccactctccccaagggctccccgtgagtttcttgcacatcctttgggggttctgcaccccaagtcgctggggtctcgcctcctctgaacccccattgcccctgggctttccctcttctgggtgttccccatatccactgggagctcctaggtcccaagttggggtctttctccttgggaccccccaatatgtcctcagctccctgacttcaggagctcctctctgctttcccctggtttgtcccctgtcgctgtctctccttgttctctctcaggtctccgagcacccccacttctcgggatcggggtcccctgctttgctctccctgcccctctgtgcccccacatctgtctcggtggtctcgccactctgtgcctcttgcgctgaaggcccccctttgagcctgcttctttgcctggggcccttggcccccccttgctttttcagccctagccccctgtctccccttctctctgctccttgtctccctctccctttttctgtctttgccgggtctctgggtctctgacccccatccggccctcatggctttgtgtctggagctcttgaagcaatgttcatcatgcctagtggcgtataagaagaccccgccaccggtccctccacgcaccacttcaaagccgttcatctcagtcacagtccagagcagtactgagtctgcccaggacacctacctggacagccaggaccacaagagcgaggtgactagccagtcgggcctgagcaactcgtcggacagcctggacagcagtacccgaccgcccagcgtgacacggggtggagtcgccccagcccctgaggccccagagccacccccaaaacatgcagctctgaaaagtgaacaagggacgctgaccagctctgagtcccaccccgaggccgcccccaaaaggaaactgtcatcgataggaatacaagttgactgcattcagccagtgccaaaagaggagcccagtcccgctaccaaattccagtccatcggggttcaggtagaggacgactggcgaagcagcgtcccctctcacagtatgtcctcccgacgggacacagactcggatacccaggatgccaatgactcaagctgtaagtcatctgagaggagcctcccggactgtacccctcaccccaactccatcagcatcgatgccggtccccggcaggcccccaagattgcccagatcaagcgcaacctctcctatggagacaacagcgaccctgccctagaggcgtcctcgctgcccccacccgacccctggctcgagacctcctccagctccccagcagagccggcacagccaggggcctgccgccgagacggctactggttcctaaagctactgcaggcagaaacagagcggctggaaggctggtgctgccagatggacaaggagaccaaagagaacaacctctctgaagaagtcttaggaaaagtcctcagtgctgtgggcagtgcccagctactgatgtcccagaaattccagcagttccggggcctctgtgagcaaaacttgaaccctgatgccaacccacgccccacagcccaggacctggcagggttctgggacctgctacagctgtccatcgaggatatcagcatgaagttcgatgaactctaccacctcaaggccaacagctggcagctggtggagacccccgagaagaggaaggaagagaagaaaccaccccctccggtcccaaagaagccagccaaatccaagccggcagtgagccgcgacaaggcctcagacgccagcgacaagcagcgccaggaggcccgcaagagactcctggcggccaagcgggcagcttctgtgcggcagaactcagccaccgagagcgcagacagcatcgagatttatgtcccggaggcccagaccaggctctgagaccatgcaggaggaaagaaacgattttaaatcattaaaaacacaaaaactaagtgcgaacggaacagagttttctcaacctttgctatggttattctgtctagagaccctgagccaactttcaaattgacgcatacaagggctcacaatttggcttttttgggtccctcccagctttaggttatgaagattttactcacaaaaaaaatcaacaaaaatcacgaaactagaaaactttttttttcctcttgctggccgtggtggactagatagatggacgtcggcaactcccggcccagcctccatactgcggtctttttactcgttctatctgatgagaactcacactagcttgtttacaagatgacgacagtccaagggcagccttgggcacctgccatgtccctcctttccccagctatccccgctctgaccttgattttcattcttatgtttttctcttttcccttcagagctcacacagtggtcaccattgtggcaagcggctttctgggtctcagccctctctgcggttgagggcccagaggacagagagatggacatgcgtcccctccctccccccgccaagtgctcacacacaacctcacgcgcacacacacacacgcagatggaggcgcctcactgggaggtgccccgccagccctgggcagtgtcaggcaggactcactcaccgctgagcagatgagagaagttttagtcttggcgggtggaaatgagacgaagccacagttatcacactccagactcctgcccttttattttctccagccccttcttccttcagcaaaatctaggactcccgagtggcttccagggggccgtcagtcctcagccgcgcctgtgtccggtgcccgaggggcgggcggcggtgtctgtatgtatgtgtacatatgcacatagaccttagagtgtatagttaacaaacgcccatctgctcacccatgcccacccagcgccgccgccgctggctctcggggcacctggcaggaggcgggtgtgtgaatagcatatatttttacatgtactatatctaggtgtgtgtacaagtgtgtgtaaaaatatataccttgtgtgtaagcagccctttttttttttggtctccacccccctccccccgccccgcactcctaagggcccatctgcccagcctctgagttttctgttctattttttttttaaccccaattatccttctctctctcctgcccccgcatcccactcccagggtgtcacgagccctgagctgcaatggcccgggcctgcagggcggggtaggggagggcaggggctcagccccgaagccagctcagtacctgaggggctgctctatgctgtgtatgcgcctctctggcatccgagacatcctcttggctggcgcttgctgcaggggggaccccccccccgtccccaggtgaaccaagggtctgctccggggcccatttccagcttggccgccgtctgtgaccttgggcaagtcacttgacctctgtgtgcctcaacttcctcctctgtaaaacggggacagtccctgcccctccctacctcacaggcatgttgtgagaataaatgaggtaacgtgtaaaaaaaaaaaaaaaaaaaaaaaaaaaaaaaaaaaaaaaaaaaaaaaaaaaaaaaaaaaaaaaaaaaaaaaaaaaaaaaaaaaaaaaaacaaaaaaaaaaaaaaaaaaaaaaaaaaaaaacaaaaacaaaaagaaaaaaaaaaaaggaagacggggcggggggggcgagcccacggaaacacaacagagagggaggggaggccgagcacccccgcaagccacacagcagcgagtggacgcgaaccggacgctcgcccgcgacaagagtgcacaagacgaggcacgccgggcgcggggagacgacgcagaacgcagcaccaaggaggggaaaagcggcggacggtgggggggtgcatcgtcagtataagatagaaagagacgaaattagtcgttgagttagggaagggcgaagaagaatcggaccttgcaacgaaggaagatgtagttatcggtataggggtcacaaaatagcatcaaagaggtagtagaggtagggacgacagagaagagagagagattagagagagaaagcagaagagaaggggagagagagagagagagtagagaaagaaataagacggaggaggaggatgaagagaaagcgagan

SEQ ID NO: 363647 - DNA, 3522 bp, Homo sapiens
gagcggagcgggggtgaggagagtcgagggaggtgacgcgcgctgccggggcgaggttgcgaggggcggtgttgaagaatgtgtgggcgaacatcctgtccagccgccagtcctccagcccgtgtccccgctccgcccgctttgtctctccccggctcgctgtctctttgtctctgccctcgcgctcctccgcagcccctccctcgctccccatctcgggtccccttctcagagcgctcttcagccctcagagccgccctttctgggcgaccccactcttcgggactccccctcagagcgcccccagatcttttggggttccccttgagaacaccttccactctccccaagggctccccgtgagtttcttgcacatcctttgggggttctgcaccccaagtcgctggggtctcgcctcctctgaacccccattgcccctgggctttccctcttctgggtgttccccatatccactgggagctcctaggtcccaagttggggtctttctccttgggaccccccaatatgtcctcagctccctgacttcaggagctcctctctgctttcccctggtttgtcccctgtcgctgtctctccttgttctctctcaggtctccgagcacccccacttctcgggatcggggtcccctgctttgctctccctgcccctctgtgcccccacatctgtctcggtggtctcgccactctgtgcctcttgcgctgaaggcccccctttgagcctgcttctttgcctggggcccttggcccccccttgctttttcagccctagccccctgtctccccttctctctgctccttgtctccctctccctttttctgtctttgccgggtctctgggtctctgacccccatccggccctcatggctttgtgtctggagctcttgaagcaatgttcatcatgcctagtggcgtataagaagaccccgccaccggtccctccacgcaccacttcaaagccgttcatctcagtcacagtccagagcagtactgagtctgcccaggacacctacctggacagccaggaccacaagagcgaggtgactagccagtcgggcctgagcaactcgtcggacagcctggacagcagtacccgaccgcccagcgtgacacggggtggagtcgccccagcccctgaggccccagagccacccccaaaacatgcagctctgaaaagtgaacaagggacgctgaccagctctgagtcccaccccgaggccgcccccaaaaggaaactgtcatcgataggaatacaagttgactgcattcagccagtgccaaaagaggagcccagtcccgctaccaaattccagtccatcggggttcaggtagaggacgactggcgaagcagcgtcccctctcacagtatgtcctcccgacgggacacagactcggatacccaggatgccaatgactcaagctgtaagtcatctgagaggagcctcccggactgtacccctcaccccaactccatcagcatcgatgccggtccccggcaggcccccaagattgcccagatcaagcgcaacctctcctatggagacaacagcgaccctgccctagaggcgtcctcgctgcccccacccgacccctggctcgagacctcctccagctccccagcagagccggcacagccaggggcctgccgccgagacggctactggttcctaaagctactgcaggcagaaacagagcggctggaaggctggtgctgccagatggacaaggagaccaaagagaacaacctctctgaagaagtcttaggaaaagtcctcagtgctgtgggcagtgcccagctactgatgtcccagaaattccagcagttccggggcctctgtgagcaaaacttgaaccctgatgccaacccacgccccacagcccaggacctggcagggttctgggacctgctacagctgtccatcgaggatatcagcatgaagttcgatgaactctaccacctcaaggccaacagctggcagctggtggagacccccgagaagaggaaggaagagaagaaaccaccccctccggtcccaaagaagccagccaaatccaagccggcagtgagccgcgacaaggcctcagacgccagcgacaagcagcgccaggaggcccgcaagagactcctggcggccaagcgggcagcttctgtgcggcagaactcagccaccgagagcgcagacagcatcgagatttatgtcccggaggcccagaccaggctctgagaccatgcaggaggaaagaaacgattttaaatcattaaaaacacaaaaactaagtgcgaacggaacagagttttctcaacctttgctatggttattctgtctagagaccctgagccaactttcaaattgacgcatacaagggctcacaatttggcttttttgggtccctcccagctttaggttatgaagattttactcacaaaaaaaatcaacaaaaatcacgaaactagaaaactttttttttcctcttgctggccgtggtggactagatagatggacgtcggcaactcccggcccagcctccatactgcggtctttttactcgttctatctgatgagaactcacactagcttgtttacaagatgacgacagtccaagggcagccttgggcacctgccatgtccctcctttccccagctatccccgctctgaccttgattttcattcttatgtttttctcttttcccttcagagctcacacagtggtcaccattgtggcaagcggctttctgggtctcagccctctctgcggttgagggcccagaggacagagagatggacatgcgtcccctccctccccccgccaagtgctcacacacaacctcacgcgcacacacacacacgcagatggaggcgcctcactgggaggtgccccgccagccctgggcagtgtcaggcaggactcactcaccgctgagcagatgagagaagttttagtcttggcgggtggaaatgagacgaagccacagttatcacactccagactcctgcccttttattttctccagccccttcttccttcagcaaaatctaggactcccgagtggcttccagggggccgtcagtcctcagccgcgcctgtgtccggtgcccgaggggcgggcggcggtgtctgtatgtatgtgtacatatgcacatagaccttagagtgtatagttaacaaacgcccatctgctcacccatgcccacccagcgccgccgccgctggctctcggggcacctggcaggaggcgggtgtgtgaatagcatatatttttacatgtactatatctaggtgtgtgtacaagtgtgtgtaaaaatatataccttgtgtgtaagcagccctttttttttttggtctccacccccctccccccgccccgcactcctaagggcccatctgcccagcctctgagttttctgttctattttttttttaaccccaattatccttctctctctcccctgcccctccctacctcacaggcatgttgtgagaataaatgaggtaacgtgta

SEQ ID NO: 363648 - DNA, 3818 bp, Homo sapiens
gtccgcccgcccgcccgcccgcccgcgcttccgtcctgtccagccgccagtcctccagcccgtgtccccgctccgcccgctttgtctctccccggctcgctgtctctttgtctctgccctcgcgctcctccgcagcccctccctcgctccccatctcgggtccccttctcagagcgctcttcagccctcagagccgccctttctgggcgaccccactcttcgggactccccctcagagcgcccccagatcttttggggttccccttgagaacaccttccactctccccaagggctccccgtgagtttcttgcacatcctttgggggttctgcaccccaagtcgctggggtctcgcctcctctgaacccccattgcccctgggctttccctcttctgggtgttccccatatccactgggagctcctaggtcccaagttggggtctttctccttgggaccccccaatatgtcctcagctccctgacttcaggagctcctctctgctttcccctggtttgtcccctgtcgctgtctctccttgttctctctcaggtctccgagcacccccacttctcgggatcggggtcccctgctttgctctccctgcccctctgtgcccccacatctgtctcggtggtctcgccactctgtgcctcttgcgctgaaggcccccctttgagcctgcttctttgcctggggcccttggcccccccttgctttttcagccctagccccctgtctccccttctctctgctccttgtctccctctccctttttctgtctttgccgggtctctgggtctctgacccccatccggccctcatggctttgtgtctggagctcttgaagcaatgttcatcatgcctagtggcgtataagaagaccccgccaccggtccctccacgcaccacttcaaagccgttcatctcagtcacagtccagagcagtactgagtctgcccaggacacctacctggacagccaggaccacaagagcgaggtgactagccagtcgggcctgagcaactcgtcggacagcctggacagcagtacccgaccgcccagcgtgacacggggtggagtcgccccagcccctgaggccccagagccacccccaaaacatgcagctctgaaaagtgaacaagggacgctgaccagctctgagtcccaccccgaggccgcccccaaaaggaaactgtcatcgataggaatacaagttgactgcattcagccagtgccaaaagaggagcccagtcccgctaccaaattccagtccatcggggttcaggtagaggacgactggcgaagcagcgtcccctctcacagtatgtcctcccgacgggacacagactcggatacccaggatgccaatgactcaagctgtaagtcatctgagaggagcctcccggactgtacccctcaccccaactccatcagcatcgatgccggtccccggcaggcccccaagattgcccagatcaagcgcaacctctcctatggagacaacagcgaccctgccctagaggcgtcctcgctgcccccacccgacccctggctcgagacctcctccagctccccagcagagccggcacagccaggggcctgccgccgagacggctactggttcctaaagctactgcaggcagaaacagagcggctgggtgcccgggaggggggcccctttttgggggcgaaggctggtgctgccagatggacaaggagaccaaagagaacaacctctctgaagaagtcttaggaaaagtcctcagtgctgtgggcagtgcccagctactgatgtcccagaaattccagcagttccggggcctctgtgagcaaaacttgaaccctgatgccaacccacgccccacagcccaggacctggcagggttctgggacctgctacagctgtccatcgaggatatcagcatgaagttcgatgaactctaccacctcaaggccaacagctggcagctggtggagacccccgagaagaggaaggaagagaagaaaccaccccctccggtcccaaagaagccagccaaatccaagccggcagtgagccgcgacaaggcctcagacgccagcgacaagcagcgccaggaggcccgcaagagactcctggcggccaagcgggcagcttctgtgcggcagaactcagccaccgagagcgcagacagcatcgagatttatgtcccggaggcccagaccaggctctgagaccatgcaggaggaaagaaacgattttaaatcattaaaaacacaaaaactaagtgcgaacggaacagagttttctcaacctttgctatggttattctgtctagagaccctgagccaactttcaaattgacgcatacaagggctcacaatttggcttttttgggtccctcccagctttaggttatgaagattttactcacaaaaaaaatcaacaaaaatcacgaaactagaaaactttttttttcctcttgctggccgtggtggactagatagatggacgtcggcaactcccggcccagcctccatactgcggtctttttactcgttctatctgatgagaactcacactagcttgtttacaagatgacgacagtccaagggcagccttgggcacctgccatgtccctcctttccccagctatccccgctctgaccttgattttcattcttatgtttttctcttttcccttcagagctcacacagtggtcaccattgtggcaagcggctttctgggtctcagccctctctgcggttgagggcccagaggacagagagatggacatgcgtcccctccctccccccgccaagtgctcacacacaacctcacgcgcacacacacacacgcagatggaggcgcctcactgggaggtgccccgccagccctgggcagtgtcaggcaggactcactcaccgctgagcagatgagagaagttttagtcttggcgggtggaaatgagacgaagccacagttatcacactccagactcctgcccttttattttctccagccccttcttccttcagcaaaatctaggactcccgagtggcttccagggggccgtcagtcctcagccgcgcctgtgtccggtgcccgaggggcgggcggcggtgtctgtatgtatgtgtacatatgcacatagaccttagagtgtatagttaacaaacgcccatctgctcacccatgcccacccagcgccgccgccgctggctctcggggcacctggcaggaggcgggtgtgtgaatagcatatatttttacatgtactatatctaggtgtgtgtacaagtgtgtgtaaaaatatataccttgtgtgtaagcagccctttttttttttggtctccacccccctccccccgccccgcactcctaagggcccatctgcccagcctctgagttttctgttctattttttttttaaccccaattatccttctctctctcctgcccccgcatcccactcccagggtgtcacgagccctgagctgcaatggcccgggcctgcagggcggggtaggggagggcaggggctcagccccgaagccagctcagtacctgaggggctgctctatgctgtgtatgcgcctctctggcatccgagacatcctcttggctggcgcttgctgcaggggggaccccccccccgtccccaggtgaaccaagggtctgctccggggcccatttccagcttggccgccgtctgtgaccttgggcaagtcacttgacctctgtgtgcctcaacttcctcctctgtaaaacggggacagtccctgcccctccctacctcacaggcatgttgtgagaataaatgaggtaacgtgta

SEQ ID NO: 363649 - DNA, 3018 bp, Homo sapiens
cacatgccaagcgggctgcgcgcgcccctgcccggcccgggagtccctgacgacgcgcgcgcggctgacgcggggggcggggaggggcggggcaggtgcgggactttaacccggagccccgcccctcgggcgtacaaaaccggagcctcgggccgggctgcgtgagggaggagggttcatcatgcctagtggcgtataagaagaccccgccaccggtccctccacgcaccacttcaaagccgttcatctcagtcacagtccagagcagtactgagtctgcccaggacacctacctggacagccaggaccacaagagcgaggtgactagccagtcgggcctgagcaactcgtcggacagcctggacagcagtacccgaccgcccagcgtgacacggggtggagtcgccccagcccctgaggccccagagccacccccaaaacatgcagctctgaaaagtgaacaagggacgctgaccagctctgagtcccaccccgaggccgcccccaaaaggaaactgtcatcgataggaatacaaaagcagcgtcccctctcacagtatgtcctcccgacgggacacagactcggatacccaggatgccaatgactcaagctgtaagtcatctgagaggagcctcccggactgtacccctcaccccaactccatcagcatcgatgccggtccccggcaggcccccaagattgcccagatcaagcgcaacctctcctatggagacaacagcgaccctgccctagaggcgtcctcgctgcccccacccgacccctggctcgagacctcctccagctccccagcagagccggcacagccaggggcctgccgccgagacggctactggttcctaaagctactgcaggcagaaacagagcggctggaaggctggtgctgccagatggacaaggagaccaaagagaacaacctctctgaagaagtcttaggaaaagtcctcagtgctgtgggcagtgcccagctactgatgtcccagaaattccagcagttccggggcctctgtgagcaaaacttgaaccctgatgccaacccacgccccacagcccaggacctggcagggttctgggacctgctacagctgtccatcgaggatatcagcatgaagttcgatgaactctaccacctcaaggccaacagctggcagctggtggagacccccgagaagaggaaggaagagaagaaaccaccccctccggtcccaaagaagccagccaaatccaagccggcagtgagccgcgacaaggcctcagacgccagcgacaagcagcgccaggaggcccgcaagagactcctggcggccaagcgggcagcttctgtgcggcagaactcagccaccgagagcgcagacagcatcgagatttatgtcccggaggcccagaccaggctctgagaccatgcaggaggaaagaaacgattttaaatcattaaaaacacaaaaactaagtgcgaacggaacagagttttctcaacctttgctatggttattctgtctagagaccctgagccaactttcaaattgacgcatacaagggctcacaatttggcttttttgggtccctcccagctttaggttatgaagattttactcacaaaaaaaatcaacaaaaatcacgaaactagaaaactttttttttcctcttgctggccgtggtggactagatagatggacgtcggcaactcccggcccagcctccatactgcggtctttttactcgttctatctgatgagaactcacactagcttgtttacaagatgacgacagtccaagggcagccttgggcacctgccatgtccctcctttccccagctatccccgctctgaccttgattttcattcttatgtttttctcttttcccttcagagctcacacagtggtcaccattgtggcaagcggctttctgggtctcagccctctctgcggttgagggcccagaggacagagagatggacatgcgtcccctccctccccccgccaagtgctcacacacaacctcacgcgcacacacacacacgcagatggaggcgcctcactgggaggtgccccgccagccctgggcagtgtcaggcaggactcactcaccgctgagcagatgagagaagttttagtcttggcgggtggaaatgagacgaagccacagttatcacactccagactcctgcccttttattttctccagccccttcttccttcagcaaaatctaggactcccgagtggcttccagggggccgtcagtcctcagccgcgcctgtgtccggtgcccgaggggcgggcggcggtgtctgtatgtatgtgtacatatgcacatagaccttagagtgtatagttaacaaacgcccatctgctcacccatgcccacccagcgccgccgccgctggctctcggggcacctggcaggaggcgggtgtgtgaatagcatatatttttacatgtactatatctaggtgtgtgtacaagtgtgtgtaaaaatatataccttgtgtgtaagcagccctttttttttttggtctccacccccctccccccgccccgcactcctaagggcccatctgcccagcctctgagttttctgttctattttttttttaaccccaattatccttctctctctcctgcccccgcatcccactcccagggtgtcacgagccctgagctgcaatggcccgggcctgcagggcggggtaggggagggcaggggctcagccccgaagccagctcagtacctgaggggctgctctatgctgtgtatgcgcctctctggcatccgagacatcctcttggctggcgcttgctgcaggggggaccccccccccgtccccaggtgaaccaagggtctgctccggggcccatttccagcttggccgccgtctgtgaccttgggcaagtcacttgacctctgtgtgcctcaacttcctcctctgtaaaacggggacagtccctgcccctccctacctcacaggcatgttgtgagaataaatgaggtaacgtgta

SEQ ID NO: 363650 - DNA, 2906 bp, Homo sapiens
cgccgctggagatcctttcctgctttggtttccctggcagggttgaactgtggagtgtgtgggttcatcatgcctagtggcgtataagaagaccccgccaccggtccctccacgcaccacttcaaagccgttcatctcagtcacagtccagagcagtactgagtctgcccaggacacctacctggacagccaggaccacaagagcgaggtgactagccagtcgggcctgagcaactcgtcggacagcctggacagcagtacccgaccgcccagcgtgacacggggtggagtcgccccagcccctgaggccccagagccacccccaaaacatgcagctctgaaaagtgaacaagggacgctgaccagctctgagtcccaccccgaggccgcccccaaaaggaaactgtcatcgataggaatacaaaagcagcgtcccctctcacagtatgtcctcccgacgggacacagactcggatacccaggatgccaatgactcaagctgtaagtcatctgagaggagcctcccggactgtacccctcaccccaactccatcagcatcgatgccggtccccggcaggcccccaagattgcccagatcaagcgcaacctctcctatggagacaacagcgaccctgccctagaggcgtcctcgctgcccccacccgacccctggctcgagacctcctccagctccccagcagagccggcacagccaggggcctgccgccgagacggctactggttcctaaagctactgcaggcagaaacagagcggctggaaggctggtgctgccagatggacaaggagaccaaagagaacaacctctctgaagaagtcttaggaaaagtcctcagtgctgtgggcagtgcccagctactgatgtcccagaaattccagcagttccggggcctctgtgagcaaaacttgaaccctgatgccaacccacgccccacagcccaggacctggcagggttctgggacctgctacagctgtccatcgaggatatcagcatgaagttcgatgaactctaccacctcaaggccaacagctggcagctggtggagacccccgagaagaggaaggaagagaagaaaccaccccctccggtcccaaagaagccagccaaatccaagccggcagtgagccgcgacaaggcctcagacgccagcgacaagcagcgccaggaggcccgcaagagactcctggcggccaagcgggcagcttctgtgcggcagaactcagccaccgagagcgcagacagcatcgagatttatgtcccggaggcccagaccaggctctgagaccatgcaggaggaaagaaacgattttaaatcattaaaaacacaaaaactaagtgcgaacggaacagagttttctcaacctttgctatggttattctgtctagagaccctgagccaactttcaaattgacgcatacaagggctcacaatttggcttttttgggtccctcccagctttaggttatgaagattttactcacaaaaaaaatcaacaaaaatcacgaaactagaaaactttttttttcctcttgctggccgtggtggactagatagatggacgtcggcaactcccggcccagcctccatactgcggtctttttactcgttctatctgatgagaactcacactagcttgtttacaagatgacgacagtccaagggcagccttgggcacctgccatgtccctcctttccccagctatccccgctctgaccttgattttcattcttatgtttttctcttttcccttcagagctcacacagtggtcaccattgtggcaagcggctttctgggtctcagccctctctgcggttgagggcccagaggacagagagatggacatgcgtcccctccctccccccgccaagtgctcacacacaacctcacgcgcacacacacacacgcagatggaggcgcctcactgggaggtgccccgccagccctgggcagtgtcaggcaggactcactcaccgctgagcagatgagagaagttttagtcttggcgggtggaaatgagacgaagccacagttatcacactccagactcctgcccttttattttctccagccccttcttccttcagcaaaatctaggactcccgagtggcttccagggggccgtcagtcctcagccgcgcctgtgtccggtgcccgaggggcgggcggcggtgtctgtatgtatgtgtacatatgcacatagaccttagagtgtatagttaacaaacgcccatctgctcacccatgcccacccagcgccgccgccgctggctctcggggcacctggcaggaggcgggtgtgtgaatagcatatatttttacatgtactatatctaggtgtgtgtacaagtgtgtgtaaaaatatataccttgtgtgtaagcagccctttttttttttggtctccacccccctccccccgccccgcactcctaagggcccatctgcccagcctctgagttttctgttctattttttttttaaccccaattatccttctctctctcctgcccccgcatcccactcccagggtgtcacgagccctgagctgcaatggcccgggcctgcagggcggggtaggggagggcaggggctcagccccgaagccagctcagtacctgaggggctgctctatgctgtgtatgcgcctctctggcatccgagacatcctcttggctggcgcttgctgcaggggggaccccccccccgtccccaggtgaaccaagggtctgctccggggcccatttccagcttggccgccgtctgtgaccttgggcaagtcacttgacctctgtgtgcctcaacttcctcctctgtaaaacggggacagtccctgcccctccctacctcacaggcatgttgtgagaataaatgaggtaacgtgta

SEQ ID NO: 363651 - DNA, 2547 bp, Homo sapiens
tattcctatcgatgacagtttccttttgggggcggcctcggggttcaggtagaggacgactggcgaagcagcgtcccctctcacagtatgtcctcccgacgggacacagactcggatacccaggatgccaatgactcaagctgtaagtcatctgagaggagcctcccggactgtacccctcaccccaactccatcagcatcgatgccggtccccggcaggcccccaagattgcccagatcaagcgcaacctctcctatggagacaacagcgaccctgccctagaggcgtcctcgctgcccccacccgacccctggctcgagacctcctccagctccccagcagagccggcacagccaggggcctgccgccgagacggctactggttcctaaagctactgcaggcagaaacagagcggctggaaggctggtgctgccagatggacaaggagaccaaagagaacaacctctctgaagaagtcttaggaaaagtcctcagtgctgtgggcagtgcccagctactgatgtcccagaaattccagcagttccggggcctctgtgagcaaaacttgaaccctgatgccaacccacgccccacagcccaggacctggcagggttctgggacctgctacagctgtccatcgaggatatcagcatgaagttcgatgaactctaccacctcaaggccaacagctggcagctggtggagacccccgagaagaggaaggaagagaagaaaccaccccctccggtcccaaagaagccagccaaatccaagccggcagtgagccgcgacaaggcctcagacgccagcgacaagcagcgccaggaggcccgcaagagactcctggcggccaagcgggcagcttctgtgcggcagaactcagccaccgagagcgcagacagcatcgagatttatgtcccggaggcccagaccaggctctgagaccatgcaggaggaaagaaacgattttaaatcattaaaaacacaaaaactaagtgcgaacggaacagagttttctcaacctttgctatggttattctgtctagagaccctgagccaactttcaaattgacgcatacaagggctcacaatttggcttttttgggtccctcccagctttaggttatgaagattttactcacaaaaaaaatcaacaaaaatcacgaaactagaaaactttttttttcctcttgctggccgtggtggactagatagatggacgtcggcaactcccggcccagcctccatactgcggtctttttactcgttctatctgatgagaactcacactagcttgtttacaagatgacgacagtccaagggcagccttgggcacctgccatgtccctcctttccccagctatccccgctctgaccttgattttcattcttatgtttttctcttttcccttcagagctcacacagtggtcaccattgtggcaagcggctttctgggtctcagccctctctgcggttgagggcccagaggacagagagatggacatgcgtcccctccctccccccgccaagtgctcacacacaacctcacgcgcacacacacacacgcagatggaggcgcctcactgggaggtgccccgccagccctgggcagtgtcaggcaggactcactcaccgctgagcagatgagagaagttttagtcttggcgggtggaaatgagacgaagccacagttatcacactccagactcctgcccttttattttctccagccccttcttccttcagcaaaatctaggactcccgagtggcttccagggggccgtcagtcctcagccgcgcctgtgtccggtgcccgaggggcgggcggcggtgtctgtatgtatgtgtacatatgcacatagaccttagagtgtatagttaacaaacgcccatctgctcacccatgcccacccagcgccgccgccgctggctctcggggcacctggcaggaggcgggtgtgtgaatagcatatatttttacatgtactatatctaggtgtgtgtacaagtgtgtgtaaaaatatataccttgtgtgtaagcagccctttttttttttggtctccacccccctccccccgccccgcactcctaagggcccatctgcccagcctctgagttttctgttctattttttttttaaccccaattatccttctctctctcctgcccccgcatcccactcccagggtgtcacgagccctgagctgcaatggcccgggcctgcagggcggggtaggggagggcaggggctcagccccgaagccagctcagtacctgaggggctgctctatgctgtgtatgcgcctctctggcatccgagacatcctcttggctggcgcttgctgcaggggggaccccccccccgtccccaggtgaaccaagggtctgctccggggcccatttccagcttggccgccgtctgtgaccttgggcaagtcacttgacctctgtgtgcctcaacttcctcctctgtaaaacggggacagtccctgcccctccctacctcacaggcatgttgtgagaataaatgaggtaacgtgta

SEQ ID NO: 363652 - DNA, 2599 bp, Homo sapiens
ccagtggagttctccctgtttcacaggttcatcatgcctagtggcgtataagaagaccccgccaccggtccctccacgcaccacttcaaagccgttcatctcagtcacagtccagagcagtactgagtctgcccaggacacctacctggacagccaggaccacaagagcgaggtgactagccagtcgggcctgagcaactcgtcggacagcctggacagcagtacccgaccgcccagcaactccatcagcatcgatgccggtccccggcaggcccccaagattgcccagatcaagcgcaacctctcctatggagacaacagcgaccctgccctagaggcgtcctcgctgcccccacccgacccctggctcgagacctcctccagctccccagcagagccggcacagccaggggcctgccgccgagacggctactggttcctaaagctactgcaggcagaaacagagcggctggaaggctggtgctgccagatggacaaggagaccaaagagaacaacctctctgaagaagtcttaggaaaagtcctcagtgctgtgggcagtgcccagctactgatgtcccagaaattccagcagttccggggcctctgtgagcaaaacttgaaccctgatgccaacccacgccccacagcccaggacctggcagggttctgggacctgctacagctgtccatcgaggatatcagcatgaagttcgatgaactctaccacctcaaggccaacagctggcagctggtggagacccccgagaagaggaaggaagagaagaaaccaccccctccggtcccaaagaagccagccaaatccaagccggcagtgagccgcgacaaggcctcagacgccagcgacaagcagcgccaggaggcccgcaagagactcctggcggccaagcgggcagcttctgtgcggcagaactcagccaccgagagcgcagacagcatcgagatttatgtcccggaggcccagaccaggctctgagaccatgcaggaggaaagaaacgattttaaatcattaaaaacacaaaaactaagtgcgaacggaacagagttttctcaacctttgctatggttattctgtctagagaccctgagccaactttcaaattgacgcatacaagggctcacaatttggcttttttgggtccctcccagctttaggttatgaagattttactcacaaaaaaaatcaacaaaaatcacgaaactagaaaactttttttttcctcttgctggccgtggtggactagatagatggacgtcggcaactcccggcccagcctccatactgcggtctttttactcgttctatctgatgagaactcacactagcttgtttacaagatgacgacagtccaagggcagccttgggcacctgccatgtccctcctttccccagctatccccgctctgaccttgattttcattcttatgtttttctcttttcccttcagagctcacacagtggtcaccattgtggcaagcggctttctgggtctcagccctctctgcggttgagggcccagaggacagagagatggacatgcgtcccctccctccccccgccaagtgctcacacacaacctcacgcgcacacacacacacgcagatggaggcgcctcactgggaggtgccccgccagccctgggcagtgtcaggcaggactcactcaccgctgagcagatgagagaagttttagtcttggcgggtggaaatgagacgaagccacagttatcacactccagactcctgcccttttattttctccagccccttcttccttcagcaaaatctaggactcccgagtggcttccagggggccgtcagtcctcagccgcgcctgtgtccggtgcccgaggggcgggcggcggtgtctgtatgtatgtgtacatatgcacatagaccttagagtgtatagttaacaaacgcccatctgctcacccatgcccacccagcgccgccgccgctggctctcggggcacctggcaggaggcgggtgtgtgaatagcatatatttttacatgtactatatctaggtgtgtgtacaagtgtgtgtaaaaatatataccttgtgtgtaagcagccctttttttttttggtctccacccccctccccccgccccgcactcctaagggcccatctgcccagcctctgagttttctgttctattttttttttaaccccaattatccttctctctctcctgcccccgcatcccactcccagggtgtcacgagccctgagctgcaatggcccgggcctgcagggcggggtaggggagggcaggggctcagccccgaagccagctcagtacctgaggggctgctctatgctgtgtatgcgcctctctggcatccgagacatcctcttggctggcgcttgctgcaggggggaccccccccccgtccccaggtgaaccaagggtctgctccggggcccatttccagcttggccgccgtctgtgaccttgggcaagtcacttgacctctgtgtgcctcaacttcctcctctgtaaaacggggacagtccctgcccctccctacctcacaggcatgttgtgagaataaatgaggtaacgtgta

SEQ ID NO: 363653 - DNA, 2074 bp, Homo sapiens
caatgggatctgcccgtccccgctgctcgagcgctctcggagtctaggcttgctttctgctccagtgccttgagctcttcccactgtcagtcatcgcttctcgtggcttcctgattccaagtgtgtgttgcttgtgcccgatgcggggaggctggggtggagactccagctgccggcatatggtgggggtagtgccacacaaaacgtggcacctttattttatttttgttctctcctcactgtctcactaaaggaagagaagaaaccaccccctccggtcccaaagaagccagccaaatccaagccggcagtgagccgcgacaaggcctcagacgccagcgacaagcagcgccaggaggcccgcaagagactcctggcggccaagcgggcagcttctgtgcggcagaactcagccaccgagagcgcagacagcatcgagatttatgtcccggaggcccagaccaggctctgagaccatgcaggaggaaagaaacgattttaaatcattaaaaacacaaaaactaagtgcgaacggaacagagttttctcaacctttgctatggttattctgtctagagaccctgagccaactttcaaattgacgcatacaagggctcacaatttggcttttttgggtccctcccagctttaggttatgaagattttactcacaaaaaaaatcaacaaaaatcacgaaactagaaaactttttttttcctcttgctggccgtggtggactagatagatggacgtcggcaactcccggcccagcctccatactgcggtctttttactcgttctatctgatgagaactcacactagcttgtttacaagatgacgacagtccaagggcagccttgggcacctgccatgtccctcctttccccagctatccccgctctgaccttgattttcattcttatgtttttctcttttcccttcagagctcacacagtggtcaccattgtggcaagcggctttctgggtctcagccctctctgcggttgagggcccagaggacagagagatggacatgcgtcccctccctccccccgccaagtgctcacacacaacctcacgcgcacacacacacacgcagatggaggcgcctcactgggaggtgccccgccagccctgggcagtgtcaggcaggactcactcaccgctgagcagatgagagaagttttagtcttggcgggtggaaatgagacgaagccacagttatcacactccagactcctgcccttttattttctccagccccttcttccttcagcaaaatctaggactcccgagtggcttccagggggccgtcagtcctcagccgcgcctgtgtccggtgcccgaggggcgggcggcggtgtctgtatgtatgtgtacatatgcacatagaccttagagtgtatagttaacaaacgcccatctgctcacccatgcccacccagcgccgccgccgctggctctcggggcacctggcaggaggcgggtgtgtgaatagcatatatttttacatgtactatatctaggtgtgtgtacaagtgtgtgtaaaaatatataccttgtgtgtaagcagccctttttttttttggtctccacccccctccccccgccccgcactcctaagggcccatctgcccagcctctgagttttctgttctattttttttttaaccccaattatccttctctctctcctgcccccgcatcccactcccagggtgtcacgagccctgagctgcaatggcccgggcctgcagggcggggtaggggagggcaggggctcagccccgaagccagctcagtacctgaggggctgctctatgctgtgtatgcgcctctctggcatccgagacatcctcttggctggcgcttgctgcaggggggaccccccccccgtccccaggtgaaccaagggtctgctccggggcccatttccagcttggccgccgtctgtgaccttgggcaagtcacttgacctctgtgtgcctcaacttcctcctctgtaaaacggggacagtccctgcccctccctacctcacaggcatgttgtgagaataaatgaggtaacgtgta

SEQ ID NO: 363654 - DNA, 1202 bp, Homo sapiens
  misc_feature (21)..(22): n is a, c, g, or t
  misc_feature (37)..(37): n is a, c, g, or t
  misc_feature (46)..(46): n is a, c, g, or t
tttttcttttgcactgtagcnnttgagaaacctctgntccgttcgnacttagttttttctcttttcccttcagagctcacacagtggtcaccattgtggcaagcggctttctgggtctcagccctctctgcggttgagggcccagaggacagagagatggacatgcgtcccctccctccccccgccaagtgctcacacacaacctcacgcgcacacacacacacgcagatggaggcgcctcactgggaggtgccccgccagccctgggcagtgtcaggcaggactcactcaccgctgagcagatgagagaagttttagtcttggcgggtggaaatgagacgaagccacagttatcacactccagactcctgcccttttattttctccagccccttcttccttcagcaaaatctaggactcccgagtggcttccagggggccgtcagtcctcagccgcgcctgtgtccggtgcccgaggggcgggcggcggtgtctgtatgtatgtgtacatatgcacatagaccttagagtgtatagttaacaaacgcccatctgctcacccatgcccacccagcgccgccgccgctggctctcggggcacctggcaggaggcgggtgtgtgaatagcatatatttttacatgtactatatctaggtgtgtgtacaagtgtgtgtaaaaatatataccttgtgtgtaagcagccctttttttttttggtctccacccccctccccccgccccgcactcctaagggcccatctgcccagcctctgagttttctgttctattttttttttaaccccaattatccttctctctctcctgcccccgcatcccactcccagggtgtcacgagccctgagctgcaatggcccgggcctgcagggcggggtaggggagggcaggggctcagccccgaagccagctcagtacctgaggggctgctctatgctgtgtatgcgcctctctggcatccgagacatcctcttggctggcgcttgctgcaggggggaccccccccccgtccccaggtgaaccaagggtctgctccggggcccatttccagcttggccgccgtctgtgaccttgggcaagtcacttgacctctgtgtgcctcaacttcctcctctgtaaaacggggacagtccctgcccctccctacctcacaggcatgttgtgagaataaatgaggtaacgtgta

SEQ ID NO: 363655 - DNA, 1904 bp, Homo sapiens
  misc_feature (1722)..(1722): n is a, c, g, or t
  misc_feature (1740)..(1740): n is a, c, g, or t
  misc_feature (1742)..(1742): n is a, c, g, or t
  misc_feature (1747)..(1747): n is a, c, g, or t
  misc_feature (1751)..(1752): n is a, c, g, or t
  misc_feature (1769)..(1769): n is a, c, g, or t
  misc_feature (1772)..(1772): n is a, c, g, or t
  misc_feature (1778)..(1778): n is a, c, g, or t
  misc_feature (1783)..(1783): n is a, c, g, or t
  misc_feature (1790)..(1790): n is a, c, g, or t
  misc_feature (1804)..(1804): n is a, c, g, or t
  misc_feature (1810)..(1810): n is a, c, g, or t
gtccgcccgcccgcccgcccgcccgcgcttccgtcctgtccagccgccagtcctccagcccgtgtccccgctccgcccgctttgtctctccccggctcgctgtctctttgtctctgccctcgcgctcctccgcagcccctccctcgctccccatctcgggtccccttctcagagcgctcttcagccctcagagccgccctttctgggcgaccccactcttcgggactccccctcagagcgcccccagatcttttggggttccccttgagaacaccttccactctccccaagggctccccgtgagtttcttgcacatcctttgggggttctgcaccccaagtcgctggggtctcgcctcctctgaacccccattgcccctgggctttccctcttctgggtgttccccatatccactgggagctcctaggtcccaagttggggtctttctccttgggaccccccaatatgtcctcagctccctgacttcaggagctcctctctgctttcccctggtttgtcccctgtcgctgtctctccttgttctctctcaggtctccgagcacccccacttctcgggatcggggtcccctgctttgctctccctgcccctctgtgcccccacatctgtctcggtggtctcgccactctgtgcctcttgcgctgaaggcccccctttgagcctgcttctttgcctggggcccttggcccccccttgctttttcagccctagccccctgtctccccttctctctgctccttgtctccctctccctttttctgtctttgccgggtctctgggtctctgacccccatccggccctcatggctttgtgtctggagctcttgaagcaatgttcatcatgcctagtggcgtataagaagaccccgccaccggtccctccacgcaccacttcaaagccgttcatctcagtcacagtccagagcagtactgagtctgcccaggacacctacctggacagccaggaccacaagagcgaggtgactagccagtcgggcctgagcaactcgtcggacagcctggacagcagtacccgaccgcccagcgtgacacggggtggagtcgccccagcccctgaggccccagagccacccccaaaacatgcagctctgaaaagtgaacaagggacgctgaccagctctgagtcccaccccgaggccgcccccaaaaggaaactgtcatcgataggaatacaagttgactgcattcagccagtgccaaaagaggagcccagtcccgctaccaaattccagtccatcggggttcaggtagaggacgactggcgaagcagcgtcccctctcacagtatgtcctcccgacgggacacagactcggatacccaggatgccaatgactcaagctgtaagtcatctgagaggagcctcccggactgtacccctcaccccaactccatcagcatcgatgccggtccccggcaggcccccaagattgcccagatcaagcgcaacctctcctatggagacaacagcgaccctgccctagaggcgtcctcgctgcccccacccgacccctggctcgagacctcctccagctccccagcagagccggcacagccaggggcctgccgccgagacggctactggttcctaaagctactgcaggcagaaacagagcggctggaaggctggtgctgccagatggacaaggagaccaaagagaacaacctctctgaagaagtctangaaaagtctcagtgctgngngcagngccnngtatggagtcccagaantcncgcagnccggncctcggnacaaaattgaaccngatgcnaacaagcgcactaggccaggacctggacggggtctgggactgcacacacgcggcccccggctttacgggaaagtctcatcaactccccctccgg

SEQ ID NO: 363656 - DNA, 1389 bp, Homo sapiens
  misc_feature (1347)..(1347): n is a, c, g, or t
  misc_feature (1350)..(1350): n is a, c, g, or t
  misc_feature (1363)..(1363): n is a, c, g, or t
  misc_feature (1373)..(1373): n is a, c, g, or t
  misc_feature (1375)..(1375): n is a, c, g, or t
  misc_feature (1386)..(1386): n is a, c, g, or t
gtccgcccgcccgcccgcccgcccgcgcttccgtcctgtccagccgccagtcctccagcccgtgtccccgctccgcccgctttgtctctccccggctcgctgtctctttgtctctgccctcgcgctcctccgcagcccctccctcgctccccatctcgggtccccttctcagagcgctcttcagccctcagagccgccctttctgggcgaccccactcttcgggactccccctcagagcgcccccagatcttttggggttccccttgagaacaccttccactctccccaagggctccccgtgagtttcttgcacatcctttgggggttctgcaccccaagtcgctggggtctcgcctcctctgaacccccattgcccctgggctttccctcttctgggtgttccccatatccactgggagctcctaggtcccaagttggggtctttctccttgggaccccccaatatgtcctcagctccctgacttcaggagctcctctctgctttcccctggtttgtcccctgtcgctgtctctccttgttctctctcaggtctccgagcacccccacttctcgggatcggggtcccctgctttgctctccctgcccctctgtgcccccacatctgtctcggtggtctcgccactctgtgcctcttgcgctgaaggcccccctttgagcctgcttctttgcctggggcccttggcccccccttgctttttcagccctagccccctgtctccccttctctctgctccttgtctccctctccctttttctgtctttgccgggtctctgggtctctgacccccatccggccctcatggctttgtgtctggagctcttgaagcaatgttcatcatgcctagtggcgtataagaagaccccgccaccggtccctccacgcaccacttcaaagccgttcatctcagtcacagtccagagcagtactgagtctgcccaggacacctacctggacagccaggaccacaagagcgaggtgactagccagtcgggcctgagcaactcgtcggacagcctggacagcagtacccgaccgcccagcgtgacacggggtggagtcgccccagcccctgaggccccagagccacccccaaaacatgcagctctgaaaagtgaacaagggacgctgaccagctctgagtcccaccccgaggccgcccccaaaaggaaactgtcatcgataggaatacaagacggattcagcaggggccaaaagaggaggccagccgttaacaatccaggcacgggtccagtagaggccgactgggaagcagggtccctcttcaaagatgttctccggagggaccagactcggatacccagngcnaagatcaagggancactgaaggncncggaggacctnacc

SEQ ID NO: 363657 - DNA, 486 bp, Homo sapiens
acaccaaatacatgatgccttttctgataccatgtgggtgtccagtagttcagttcaattctgacactatctgtagttagcaaagaccccacagattaaggacccagttccacaagattgcctccatttctgatgctagtggcaagtcccagtacttctgaccatttatagccagtatttataactggctataaatttaggggtttccaccaccccctcctaagttgcgataattgctagaatgcatcacagaactcagtttctgtgagttacatttaccagtttgttgtaaaggatatggctctggaatagccacatggaagtattatgaagggtaaggtgtgtgggaagaggcacagagctcccataccctctccaggcctggcaccctcccagcacctccctgtgttcttcaaccaagaatctccctgaaccctgtcgtttaggggtttttatggaggtttcattatgtagagatgattgatt

SEQ ID NO: 363658 - DNA, 390 bp, Homo sapiens
aataaagcttgtgtaatagacccagaataaatggagatctatgaaatgactgacaaagaatttagaataatcctctaaaagaagttcagggaactacaagaaaatacagatagagaattaagtgaagtttagaaaacagtttataaacaaaatgaaaagtttgacagagaaatggaagaaacaaataaaaaaatcaaatgaaagtcatagtgataaaggatataataactgaaccctaaaagtcaatagaaagcttcaaagaagactggatatggtggcacgtgcctgaaatcccagtactttggggggctgaggcaggctaatcatttgagtccaggagttcaagaccagactaagcaatatggagaaaacctgcctctaccaaaaaaa

SEQ ID NO: 363659 - DNA, 776 bp, Homo sapiens
ctgtttctagaggcattttcctgatcttgcctaacaggatttctttcctaggctgtaaaaatccctgcacatttcaatcagagaaagagtaagacgccacagatagagaaggaagaagagttttgcaacggtatagttgagggttctctgccacacacccagaacaggctattggaggctgggtctggtccagaggcctttgaatcatgccagtatgtcccctggccagaaattctcagttacctcagaacttttcccagcctcaagcgatgaaaagaaactagttcaaaacatggccaacattcccagtactcatgggtattggggggttctccatgttctcaccagcaagcctcacatctgagtctttagtacagcagccaacgctgtgtatgtactaggctgatgcatgcccgttcctaaagaaatacagatgcttgctcatgactttttggatgaatatatctttttggctgtaggcagagtaggctctgcatctgagaatatcacacagaaagtagtttgggtttatctatctaattttattttaatatagaggccaagagcaccttgtgaatgatgcaacagattttaagctcgctcccatacttaccgctccaacaaaggctgtacctcagtttcctggccaatggatcaaaatgatatggctccgatgactggaggaacaccagcgtccttagtcttgtgtcaatttagataaaatgacacagacacatgtggagtcgttttaaggagcagagagtttaatagacaag

SEQ ID NO: 363660 - DNA, 363 bp, Homo sapiens
cattcttttgttcaaattcttccagtgtatccccatcatttttacttcatagaagaagccactgttcaggctgggcatggtggctcacgcctgtaatctcagcactttgtgggaggccgaggcgggtggataatttgaggccaggagtcccagactaggctggccaatatggtgaaaccctgtctttactaaaaatacaaaaaattagctgggcatggtggcgcgcacctgtaatcccagctgctcaagaggctgaggcgtgagaatcacttgaacacagaaggtggaggttgcagtgagctgagattgcactactgcactccagcctgggtgacagagcaagactccgtctcaaaaaaaaaa

SEQ ID NO: 363661 - DNA, 2949 bp, Homo sapiens
aggtaatgattaatctgtcaggcacaaaagggattgttttggggatttcgggttctaagtcgcagattcaaacaaatagcagcgaacagggaatgacagttccaccagaagacgattaagccacagcctctaattggaacggcatttgtacagtcagagactcttaccagacatctccaggaatctgtgagccattgtcaaaacgtccattttcatctggctgtgaaagtgaggaccacaacaggtaggtattggtagaaacaggagtcctcagagaagccccaagatgcagcctgagggagcagaaaagggaaaaagcttcaagcagagactggtcttgaagagcagcttagcgaaagaaaccctctctgagttcttgggcacgttcatcttgattgtccttggatgtggctgtgttgcccaagctattctcagtcgaggacgttttggaggggtcatcactatcaatgttggattttcaatggcagttgcaatggccatttatgtggctggcggtgtctctggtggtcacatcaacccagctgtgtctttagcaatgtgtctctttggacggatgaaatggttcaaattgccattttatgtgggagcccagttcttgggagcctttgtgggggctgcaaccgtctttggcatttactatgatggacttatgtcctttgctggtggaaaactgctgatcgtgggagaaaatgcaacagcacacatttttgcaacatacccagctccgtatctatctctggcgaacgcatttgcagatcaagtggtggccaccatgatactcctcataatcgtctttgccatttttgactccagaaacttgggagcccccagaggcctagagcccattgccatcggcctcctgattattgtcattgcttcctccctgggactgaacagtggctgtgccatgaacccagctcgagacctgagtcccagacttttcactgccttggcaggctgggggtttgaagtcttcagagctggaaacaacttctggtggattcctgtagtgggccctttggttggtgctgtcattggaggcctcatctatgttcttgtcattgaaatccaccatccagagcctgactcagtctttaaggcagaacaatctgaggacaaaccagagaaatatgaactcagtgtcatcatgtagtggcatgctcagctctggatttgcagtcagtttgggattctcttcagaaagatggcatctaagtgtctgtgttcttgtaagcctgaggtggaatccacccagttttgtctgctagccatatgggacatctaattggaaaagcatctgcataaaagtttggaaacaatgaccacttctctaccattgtcccccacccccaccccccagaataacgctgactgtcccctgaaacagccttctctcctgccctgtttatttcatcctcgatgggaattcttgctaggtaagcactaataactcggcatcttgacgatagtcccatttgggtggtttcagctgcactatctgtatgaaatggtgtcaccaaaacccttttcttcagtatcgacaaagattacattctgagtaccaaccaaaccctaaattgaaagacaaaactatggtttcagtcaacatattcatgaattagggagctaatgggttaagcttccagttcccgctatgctactggatttgtataaatactgatattctccaaacctagtggtgtagggagcaagagaatgcagctggaaggcacaaggggaggacattgtggcattcagaaactgcaggagacaagatgaatttgagaagccaaatggaatttttaatggaaaccatttatcagattaatctcttgctctcctgcattttagaggacaccaattaatttcctggtctttagtatataataacctaaaataccattgtaacctcagtcatgaaaaatacatcactctgtctttttagctcaaatgtattttcctaattgcccacttgagaacagacatttgacaagttatatcaacgactgtgcttgtccattattttacacatgccctagaagccaaaactgaaagccactggatcctggtctagctgaatcttcagagtgggaggtctccaaaaagatattaccttattgggcttaacaattcacaaggcactttcacacccattatctaatttaatcctcataatgactatgtgaggcaaatgccacattgcccatttttcagataaagaaacaaaatcttagggaagataagttgagttgtccaagagcacactgaaagttgaatgttatctaatgcattcctctacctttcagaagatcagtagctggctgagaatctttgccaaatcttccttgctagccagaagtggaattggcagcttctagaatatgtacacctctggacaaaatgttcctcaatcttaagatacaaagaccctcattgtctgggtctattcccacacttactgagtacagatgaaggaaagtggtagcaatttaatcataactttcatttgctgaaaaacattatgagaaggcctcccttcctaagccacctctggtcttgctaagtcttgatcttgcttcctgccagcaccaaacattacattcaggggatttcctctggctcagtcttttccccttgaagttctctaatagatgttacttttgacaaaagatcgcctatgagttacaagcaccaggggatgctctacatcaagggatgcaccttcagtcaaactgtcaaaaagcccagaattcccaaaggcattaggtttcccaactgctttgtgctgatatcagaacagcagaaattaaatgtgaaatgtttctgatgacttatgttctacaatctatggacatacgggatttttttttcttgctttgaagctacctggatatttcctatttgaaataaaattgttcggtcattgtt

SEQ ID NO: 363662 - DNA, 2842 bp, Homo sapiens
aggtaatgattaatctgtcaggcacaaaagggattgttttggggatttcgggttctaagtcgcagattcaaacaaatagcagcgaacagggaatgacagttccaccagaagacgattaagccacagcctctaattggaacggcatttgtacagtcagagactcttaccagacatctccaggaatctgtgagccattgtcaaaacgtccattttcatctggctgtgaaagtgaggaccacaacaggtaggtattggtagaaacaggagtcctcagagaagccccaagatgcagcctgagggagcagaaaagggaaaaagcttcaagcagagactggtcttgaagagcagcttagcgaaagaaaccctctctgagttcttgggcacgttcatcttgattgtccttggatgtggctgtgttgcccaagctattctcagtcgaggacgttttggaggggtcatcactatcaatgttggattttcaatggcagttgcaatggccatttatgtggctggcggtgtctctggtggtcacatcaacccagctgtgtctttagcaatgtgtctctttggacggatgaaatggttcaaattgccattttatgtgggagcccagttcttgggagcctttgtgggggctgcaaccgtctttggcatttactatgatggacttatgtcctttgctggtggaaaactgctgatcgtgggagaaaatgcaacagcacacatttttgcaacatacccagctccgtatctatctctggcgaacgcatttgcagatcaaaaacttgggagcccccagaggcctagagcccattgccatcggcctcctgattattgtcattgcttcctccctgggactgaacagtggctgtgccatgaacccagctcgagacctgagtcccagacttttcactgccttggcaggctgggggtttgaagtcttcagagctggaaacaacttctggtggattcctgtagtgggccctttggttggtgctgtcattggaggcctcatctatgttcttgtcattgaaatccaccatccagagcctgactcagtctttaaggcagaacaatctgaggacaaaccagagaaatatgaactcagtgtcatcatgtagtggcatgctcagctctggatttgcagtcagtttgggattctcttcagaaagatggcatctaagtgtctgtgttcttgtaagcctgaggtggaatccacccagttttgtctgctagccatatgggacatctaattggaaaagcatctgcataaaagtttggaaacaatgaccacttctctaccattgtcccccacccccaccccccagaataacgctgactgtcccctgaaacagccttctctcctgccctgtttatttcatcctcgatgggaattcttgctaggtaagcactaataactcggcatcttgacgatagtcccatttgggtggtttcagctgcactatctgtatgaaatggtgtcaccaaaacccttttcttcagtatcgacaaagattacattctgagtaccaaccaaaccctaaattgaaagacttccagttcccgctatgctactggatttgtataaatactgatattctccaaacctagtggtgtagggagcaagagaatgcagctggaaggcacaaggggaggacattgtggcattcagaaactgcaggagacaagatgaatttgagaagccaaatggaatttttaatggaaaccatttatcagattaatctcttgctctcctgcattttagaggacaccaattaatttcctggtctttagtatataataacctaaaataccattgtaacctcagtcatgaaaaatacatcactctgtctttttagctcaaatgtattttcctaattgcccacttgagaacagacatttgacaagttatatcaacgactgtgcttgtccattattttacacatgccctagaagccaaaactgaaagccactggatcctggtctagctgaatcttcagagtgggaggtctccaaaaagatattaccttattgggcttaacaattcacaaggcactttcacacccattatctaatttaatcctcataatgactatgtgaggcaaatgccacattgcccatttttcagataaagaaacaaaatcttagggaagataagttgagttgtccaagagcacactgaaagttgaatgttatctaatgcattcctctacctttcagaagatcagtagctggctgagaatctttgccaaatcttccttgctagccagaagtggaattggcagcttctagaatatgtacacctctggacaaaatgttcctcaatcttaagatacaaagaccctcattgtctgggtctattcccacacttactgagtacagatgaaggaaagtggtagcaatttaatcataactttcatttgctgaaaaacattatgagaaggcctcccttcctaagccacctctggtcttgctaagtcttgatcttgcttcctgccagcaccaaacattacattcaggggatttcctctggctcagtcttttccccttgaagttctctaatagatgttacttttgacaaaagatcgcctatgagttacaagcaccaggggatgctctacatcaagggatgcaccttcagtcaaactgtcaaaaagcccagaattcccaaaggcattaggtttcccaactgctttgtgctgatatcagaacagcagaaattaaatgtgaaatgtttctgatgacttatgttctacaatctatggacatacgggatttttttttcttgctttgaagctacctggatatttcctatttgaaataaaattgttcggtcattgtt

SEQ ID NO: 363663 - DNA, 2842 bp, Homo sapiens
aggtaatgattaatctgtcaggcacaaaagggattgttttggggatttcgggttctaagtcgcagattcaaacaaatagcagcgaacagggaatgacagttccaccagaagacgattaagccacagcctctaattggaacggcatttgtacagtcagagactcttaccagacatctccaggaatctgtgagccattgtcaaaacgtccattttcatctggctgtgaaagtgaggaccacaacaggtaggtattggtagaaacaggagtcctcagagaagccccaagatgcagcctgagggagcagaaaagggaaaaagcttcaagcagagactggtcttgaagagcagcttagcgaaagaaaccctctctgagttcttgggcacgttcatcttgattgtccttggatgtggctgtgttgcccaagctattctcagtcgaggacgttttggaggggtcatcactatcaatgttggattttcaatggcagttgcaatggccatttatgtggctggcggtgtctctggtggtcacatcaacccagctgtgtctttagcaatgtgtctctttggacggatgaaatggttcaaattgccattttatgtgggagcccagttcttgggagcctttgtgggggctgcaaccgtctttggcatttactatgatggacttatgtcctttgctggtggaaaactgctgatcgtgggagaaaatgcaacagcacacatttttgcaacatacccagctccgtatctatctctggcgaacgcatttgcagatcaaaaacttgggagcccccagaggcctagagcccattgccatcggcctcctgattattgtcattgcttcctccctgggactgaacagtggctgtgccatgaacccagctcgagacctgagtcccagacttttcactgccttggcaggctgggggtttgaagtcttcagagctggaaacaacttctggtggattcctgtagtgggccctttggttggtgctgtcattggaggcctcatctatgttcttgtcattgaaatccaccatccagagcctgactcagtctttaaggcagaacaatctgaggacaaaccagagaaatatgaactcagtgtcatcatgtagtggcatgctcagctctggatttgcagtcagtttgggattctcttcagaaagatggcatctaagtgtctgtgttcttgtaagcctgaggtggaatccacccagttttgtctgctagccatatgggacatctaattggaaaagcatctgcataaaagtttggaaacaatgaccacttctctaccattgtcccccacccccaccccccagaataacgctgactgtcccctgaaacagccttctctcctgccctgtttatttcatcctcgatgggaattcttgctaggtaagcactaataactcggcatcttgacgatagtcccatttgggtggtttcagctgcactatctgtatgaaatggtgtcaccaaaacccttttcttcagtatcgacaaagattacattctgagtaccaaccaaaccctaaattgaaagacaaaactatggtttcagtcaacatattcatgaattagggagctaatgggttaagcttccagttcccgctatgctactggatttgtataaatactgatattctccaaacctagtggtgtagggagcaagagaatgcagctggaaggcacaaggggaggacattgtggcattcagaaactgcaggagacaagatgaatttgagaagccaaatggaatttttaatggaaaccatttatcagattaatctcttgctctcctgcattttagaggacaccaattaatttcctggtctttagtatataataacctaaaataccattgtaacctcagtcatgaaaaatacatcactctgtctttttagctcaaatgtattttcctaattgcccacttgagaacagacatttgacaagttatatcaacgactgtgcttgtccattattttacacatgccctagaagccaaaactgaaagccactggatcctggtctagctgaatcttcagagtgggaggtctccaaaaagatattaccttattgggcttaacaattcacaaggcactttcacacccattatctaatttaatcctcataatgactatgtgaggcaaatgccacattgcccatttttcagataaagaaacaaaatcttagggaagataagttgagttgtccaagagcacactgaaagttgaatgttatctaatgcattcctctacctttcagaagatcagtagctggctgagaatctttgccaaatcttccttgctagccagaagtggaattggcagcttctagaatatgtacacctctggacaaaatgttcctcaatcttaagatacaaagaccctcattgtctgggtctattcccacacttactgagtacagatgaaggaaagtggtagcaatttaatcataactttcatttgctgatgatcttgcttcctgccagcaccaaacattacattcaggggatttcctctggctcagtcttttccccttgaagttctctaatagatgttacttttgacaaaagatcgcctatgagttacaagcaccaggggatgctctacatcaagggatgcaccttcagtcaaactgtcaaaaagcccagaattcccaaaggcattaggtttcccaactgctttgtgctgatatcagaacagcagaaattaaatgtgaaatgtttctgatgacttatgttctacaatctatggacatacgggatttttttttcttgctttgaagctacctggatatttcctatttgaaataaaattgttcggtcattgtt

SEQ ID NO: 363664 - DNA, 522 bp, Homo sapiens
agagaaaaaagtaccttgagaataaaggtaatgattaatctgtcaggcacaaaagggattgttttggggatttcgggttctaagtcgcagattcaaacaaatagcagcgaacagggaatgacagttccaccagaagacgattaagccacagcctctaattggaacggcatttgtacagtcagagactcttaccagacatctccaggaatctgtgagccattgtcaaaacgtccattttcatctggctgtgaaagtgaggaccacaacaggtaggtattggtagaaacaggagtcctcagagaagccccaagatgcagcctgagggagcagaaaagggaaaaagcttcaagcagagactggtcttgaagagcagcttagcgaaagaaaccctctctgagttcttgggcacgttcatcttgattgtaagtatttcctgatttcctacattcagacccaataatgcctccctagctgccaggctggtagtggagagttttgtttggtttgttttatttaagttaa

SEQ ID NO: 363665 - DNA, 2896 bp, Homo sapiens
aggtaatgattaatctgtcaggcacaaaagggattgttttggggatttcgggttctaagtcgcagattcaaacaaatagcagcgaacagggaatgacagttccaccagaagacgattaagccacagcctctaattggaacggcatttgtacagtcagagactcttaccagacatctccaggaatctgtgagccattgtcaaaacgtccattttcatctggctgtgaaagtgaggaccacaacaggtaggtattggtagaaacaggagtcctcagagaagccccaagatgcagcctgagggagcagaaaagggaaaaagcttcaagcagagactggtcttgaagagcagcttagcgaaagaaaccctctctgagttcttgggcacgttcatcttgattgtccttggatgtggctgtgttgcccaagctattctcagtcgaggacgttttggaggggtcatcactatcaatgttggattttcaatggcagttgcaatggccatttatgtggctggcggtgtctctggtggtcacatcaacccagctgtgtctttagcaatgtgtctctttggacggatgaaatggttcaaattgccattttatgtgggagcccagttcttgggagcctttgtgggggctgcaaccgtctttggcatttactatgatggacttatgtcctttgctggtggaaaactgctgatcgtgggagaaaatgcaacagcacacatttttgcaacatacccagctccgtatctatctctggcgaacgcatttgcagatcaaaaacttgggagcccccagaggcctagagcccattgccatcggcctcctgattattgtcattgcttcctccctgggactgaacagtggctgtgccatgaacccagctcgagacctgagtcccagacttttcactgccttggcaggctgggggtttgaagtcttcagagctggaaacaacttctggtggattcctgtagtgggccctttggttggtgctgtcattggaggcctcatctatgttcttgtcattgaaatccaccatccagagcctgactcagtctttaaggcagaacaatctgaggacaaaccagagaaatatgaactcagtgtcatcatgtagtggcatgctcagctctggatttgcagtcagtttgggattctcttcagaaagatggcatctaagtgtctgtgttcttgtaagcctgaggtggaatccacccagttttgtctgctagccatatgggacatctaattggaaaagcatctgcataaaagtttggaaacaatgaccacttctctaccattgtcccccacccccaccccccagaataacgctgactgtcccctgaaacagccttctctcctgccctgtttatttcatcctcgatgggaattcttgctaggtaagcactaataactcggcatcttgacgatagtcccatttgggtggtttcagctgcactatctgtatgaaatggtgtcaccaaaacccttttcttcagtatcgacaaagattacattctgagtaccaaccaaaccctaaattgaaagacaaaactatggtttcagtcaacatattcatgaattagggagctaatgggttaagcttccagttcccgctatgctactggatttgtataaatactgatattctccaaacctagtggtgtagggagcaagagaatgcagctggaaggcacaaggggaggacattgtggcattcagaaactgcaggagacaagatgaatttgagaagccaaatggaatttttaatggaaaccatttatcagattaatctcttgctctcctgcattttagaggacaccaattaatttcctggtctttagtatataataacctaaaataccattgtaacctcagtcatgaaaaatacatcactctgtctttttagctcaaatgtattttcctaattgcccacttgagaacagacatttgacaagttatatcaacgactgtgcttgtccattattttacacatgccctagaagccaaaactgaaagccactggatcctggtctagctgaatcttcagagtgggaggtctccaaaaagatattaccttattgggcttaacaattcacaaggcactttcacacccattatctaatttaatcctcataatgactatgtgaggcaaatgccacattgcccatttttcagataaagaaacaaaatcttagggaagataagttgagttgtccaagagcacactgaaagttgaatgttatctaatgcattcctctacctttcagaagatcagtagctggctgagaatctttgccaaatcttccttgctagccagaagtggaattggcagcttctagaatatgtacacctctggacaaaatgttcctcaatcttaagatacaaagaccctcattgtctgggtctattcccacacttactgagtacagatgaaggaaagtggtagcaatttaatcataactttcatttgctgaaaaacattatgagaaggcctcccttcctaagccacctctggtcttgctaagtcttgatcttgcttcctgccagcaccaaacattacattcaggggatttcctctggctcagtcttttccccttgaagttctctaatagatgttacttttgacaaaagatcgcctatgagttacaagcaccaggggatgctctacatcaagggatgcaccttcagtcaaactgtcaaaaagcccagaattcccaaaggcattaggtttcccaactgctttgtgctgatatcagaacagcagaaattaaatgtgaaatgtttctgatgacttatgttctacaatctatggacatacgggatttttttttcttgctttgaagctacctggatatttcctatttgaaataaaattgttcggtcattgtt

SEQ ID NO: 363666 - DNA, 2916 bp, Homo sapiens
aggtaatgattaatctgtcaggcacaaaagggattgttttggggatttcgggttctaagtcgcagattcaaacaaatagcagcgaacagggaatgacagttccaccagaagacgattaagccacagcctctaattggaacggcatttgtacagtcagagactcttaccagacatctccaggaatctgtgagccattgtcaaaacgtccattttcatctggctgtgaaagtgaggaccacaacaggtaggtattggtagaaacaggagtcctcagagaagccccaagatgcagcctgagggagcagaaaagggaaaaagcttcaagcagagactggtcttgaagagcagcttagcgaaagaaaccctctctgagttcttgggcacgttcatcttgattgtccttggatgtggctgtgttgcccaagctattctcagtcgaggacgttttggaggggtcatcactatcaatgttggattttcaatggcagttgcaatggccatttatgtggctggcggtgtctctggtggtcacatcaacccagctgtgtctttagcaatgtgtctctttggacggatgaaatggttcaaattgccattttatgtgggagcccagttcttgggagcctttgtgggggctgcaaccgtctttggcatttactatgatggacttatgtcctttgctggtggaaaactgctgatcgtgggagaaaatgcaacagcacacatttttgcaacatacccagctccgtatctatctctggcgaacgcatttgcagatcaaaaacttgggagcccccagaggcctagagcccattgccatcggcctcctgattattgtcattgcttcctccctgggactgaacagtggctgtgccatgaacccagctcgagacctgagtcccagacttttcactgccttggcaggctgggggtttgaagtcttcagagctggaaacaacttctggtggattcctgtagtgggccctttggttggtgctgtcattggaggcctcatctatgttcttgtcattgaaatccaccatccagagcctgactcagtctttaaggcagaacaatctgaggacaaaccagagaaatatgaactcagtgtcatcatgtagtggcatgctcagctctggatttgcagtcagtttgggattctcttcagaaagatggcatctaagtgtctgtgttcttgtaagcctgaggtggaatccacccagttttgtctgctagccatatgggacatctaattggaaaagcatctgcataaaagtttggaaacaatgaccacttctctaccattgtcccccacccccaccccccagaataacgctgactgtcccctgaaacagccttctctcctgccctgtttatttcatcctcgatgggaattcttgctaggtaagcactaataactcggcatcttgacgatagtcccatttgggtggtttcagctgcactatctgtatgaaatggtgtcaccaaaacccttttcttcagtatcgacaaagattacattctgagtaccaaccaaaccctaaattgaaagacaaaactatggtttcagtcaacatattcatgaattagggagctaatgggttaagcttccagttcccgctatgctactggatttgtataaatactgatattctccaaacctagtggtgtagggagcaagagaatgcagctggaaggcacaaggggaggacattgtggcattcagaaactgcaggagacaagatgaatttgagaagccaaatggaatttttaatggaaaccatttatcagattaatctcttgctctcctgcattttagaggacaccaattaatttcctggtctttagtatataataacctaaaataccattgtaacctcagtcatgaaaaatacatcactctgtctttttagctcaaatgtattttcctaattgcccacttgagaacagacatttgacaagttatatcaacgactgtgcttgtccattattttacacatgccctagaagccaaaactgaaagccactggatcctggtctagctgaatcttcagagtgggaggtctccaaaaagatattaccttattgggcttaacaattcacaaggcactttcacacccattatctaatttaatcctcataatgactatgtgaggcaaatgccacattgcccatttttcagataaagaaacaaaatcttagggaagataagttgagttgtccaagagcacactgaaagttgaatgttatctaatgcattcctctacctttcagaagatcagtagctggctgagaatctttgccaaatcttccttgctagccagaagtggaattggcagcttctagaatatgtacacctctggacaaaatgttcctcaatcttaagatacaaagaccctcattgtctgggtctattcccacacttactgagtacagatgaaggaaagtggtagcaatttaatcataactttcatttgctgaaaaacattatgagaaggcctcccttcctaagccacctctggtcttgctaagtcttgatcttgcttcctgccagcaccaaacattacattcaggggatttcctctggctcagtcttttccccttgaagttctctaatagatgttacttttgacaaaagatcgcctatgagttacaagcaccaggggatgctctacatcaagggatgcaccttcagtcaaactgtcaaaaagcccagaattcccaaaggcattaggtttcccaactgctttgtgctgatatcagaacagcagaaattaaatgtgaaatgtttctgatgacttatgttctacaatctatggacatacgggatttttttttcttgctttgaagctacctggatatttcctatttgaaataaaattgttcggtcattgttaaaaaacaaaaaaaaagggc

SEQ ID NO: 363667 - DNA, 495 bp, Homo sapiens
ctctccaagatattcccactttgtggatgaggaacctggggctctgaggaattaaggaacttgccaaagaccataaaactcctaagtgacagagccaggattctgccagctgtctggttgcccagtggagtctctgtccatcttgtcaccagcccccgcactgtgtacaggaatggaatcagcattcattgctataaactgcagtaaggtcaaggaggcagaatttgctgcaaggaagtaaagagtcccttctacctttgccagtgctacttaccagttaaaaaaagacatcgttttttgtgatccatactcctgaaggccaaaagcacccagtggacagacgatggctcttacgcctccaatgccaaggcaaatggtcagcagtgctacataaaacagcctgtgctgctctgtttttgctggatgggagcttctttgccacaaacagagttgagaaagctggggacagaggagtgtgagtggaaggagagggga

SEQ ID NO: 363668 - DNA, 1899 bp, Homo sapiens
  misc_feature (2)..(2): n is a, c, g, or t
cngtttttgttcttctaagcaaaagatctccctctctctagccgatgctccccactcagttcatcccgggaatgggccagggaggaaggttctcatgcatcgccccgagctgccaggcgagcttcgggctccttaaattcacaggccaacagcccgcgtcctctccgcgcaggctcccggttgcccgcggtccccggcccagctccttggcctcctcctcgtcggtccgcccctggtggtcttggcgcccgctcgtccagctcggcgcgccggggaccgccggctgcccggggcagtccgcacgccctcggggatctcggctcccggatccgccgcgccggcaggagccggccgggcctggagggagcaagcggatgcgcccacgcccccggcacggggatggcgcgacagggcccgggctccggggtggggctcggcagagctcctgacagctccggggtcggcagcgcgggaggggggagctccgccgctcgccgctcattcccggctcggggctcccctccactcgctcgggcggcgcggggcccgttcgggccgcccgtcgccgcccccgccccccgcgcgcccgcccgccagcccgcctgcgccctcgctcgccccgcgcgcgttcctagggcgccacctctttgcgactagctcacttctccggcaggtttgcctcggagcgtgtgaacattcctccgctcggttttcaactcgcctccaacctgcgccgcccggccagcatgtctccccgcccgtgaagcggggctgccgcctccctgccgctccggctgccactaacgacccgccctcgccgccacctggccctcctgatcgacgacacacgcacttgaaacttgttctcagggtgtgtggaatcaactttccggaagcaaccagcccaccagaggaggtcccgagcgcgagcggagacgatgcagcggagactggttcagcagtggagcgtcgcggtgttcctgctgagctacgcggtgccctcctgcgggcgctcggtggagggtctcagccgccgcctcaaaagagctgtgtctgaacatcagctcctccatgacaaggggaagtccatccaagatttacggcgacgattcttccttcaccatctgatcgcagaaatccacacagctgaaatccaccccgtccgatttgggtctgatgatgagggcagatacctaactcaggaaactaacaaggtggagacgtacaaagagcagccgctcaagacacctgggaagaaaaagaaaggcaagcccgggaaacgcaaggagcaggaaaagaaaaaacggcgaactcgctctgcctggttagactctggagtgactgggagtgggctagaaggggaccacctgtctgacacctccacaacgtcgctggagctcgattcacggaggcattgaaattttcagcagagaccttccaaggacatattgcaggattctgtaatagtgaacatatggaaagtattagaaatatttattgtctgtaaatactgtaaatgcattggaataaaactgtctcccccattgctctatgaaactgcacattggtcattgtgaatatttttttttttgccaaggctaatccaattattattatcacatttaccataatttattttgtccattgatgtatttattttgtaaatgtatcttggtgctgctgaatttctatattttttgtaacataatgcactttagatatacatatcaagtatgttgataaatgacacaatgaagtgtctctattttgtggttgattttaatgaatgcctaaatataattatccaaattgattttcctttgtgcatgtaaaaataacagtattttaaatttgtaaagaatgtctaataaaatataatctaattacatcatgaaaaaa

SEQ ID NO: 363669 - DNA, 1109 bp, Homo sapiens
agctggagccttccaactgccagctctttccttcccactggttacccttccctgcgcaatgagcttgctacccatccagcttgtgtcttacggtggaccaactagaaaactaaagagatttactcatgtctttgttgtctctatcagcaactaaaatttaactgttttcttcccctctaatattttctttcaaagcaaaagagctgtgtctgaacatcagctcctccatgacaaggggaagtccatccaagatttacggcgacgattcttccttcaccatctgatcgcagaaatccacacagctgaaatcagagctacctcggaggtgtcccctaactccaagccctctcccaacacaaagaaccaccccgtccgatttgggtctgatgatgagggcagatacctaactcaggaaactaacaaggtggagacgtacaaagagcagccgctcaagacacctgggaagaaaaagaaaggcaagcccgggaaacgcaaggagcaggaaaagaaaaaacggcgaactcgctctgcctggttagactctggagtgactgggagtgggctagaaggggaccacctgtctgacacctccacaacgtcgctggagctcgattcacggaggcattgaaattttcagcagagaccttccaaggacatattgcaggattctgtaatagtgaacatatggaaagtattagaaatatttattgtctgtaaatactgtaaatgcattggaataaaactgtctcccccattgctctatgaaactgcacattggtcattgtgaatatttttttttttgccaaggctaatccaattattattatcacatttaccataatttattttgtccattgatgtatttattttgtaaatgtatcttggtgctgctgaatttctatattttttgtaacataatgcactttagatatacatatcaagtatgttgataaatgacacaatgaagtgtctctattttgtggttgattttaatgaatgcctaaatataattatccaaattgattttcctttgtgcatgtaaaaataacagtattttaaatttgtaaagaatgtctaataaaatataatctaattacatcatgaaaaaa

SEQ ID NO: 363670 - DNA, 1865 bp, Homo sapiens
gaaagggcctggttcgcaaagaagctgacttcagagggggaaactttcttcttttaggaggcggttagccctgttccacgaacccaggagaactgctggccagattaattagacattgctatgggagacgtgtaaacacactacttatcattgatgcatatataaaaccattttattttcgctattatttcagaggaagcgcctctgatttgtttcttttttccctttttgctctttctggctgtgtggtttggagaaagcacagttggagtagccggttgctaaataagtcccgagcgcgagcggagacgatgcagcggagactggttcagcagtggagcgtcgcggtgttcctgctgagctacgcggtgccctcctgcgggcgctcggtggagggtctcagccgccgcctcaaaagagctgtgtctgaacatcagctcctccatgacaaggggaagtccatccaagatttacggcgacgattcttccttcaccatctgatcgcagaaatccacacagctgaaatcagagctacctcggaggtgtcccctaactccaagccctctcccaacacaaagaaccaccccgtccgatttgggtctgatgatgagggcagatacctaactcaggaaactaacaaggtggagacgtacaaagagcagccgctcaagacacctgggaagaaaaagaaaggcaagcccgggaaacgcaaggagcaggaaaagaaaaaacggcgaactcgctctgcctggttagactctggagtgactgggagtgggctagaaggggaccacctgtctgacacctccacaacgtcgctggagctcgattcacggtaacaggcttctctggcccgtagcctcagcggggtgctctcagctgggttttggagcctcccttctgccttggcttggacaaacctagaattttctccctttatgtatctctatcgattgtgtagcaattgacagagaataactcagaatattgtctgccttaaagcagtacccccctaccacacacacccctgtcctccagcaccatagagaggcgctagagcccattcctctttctccaccgtcacccaacatcaatcctttaccactctaccaaataatttcatattcaagcttcagaagctagtgaccatcttcataatttgctggagaagtgtgtttcttccccttactctcacacctgggcaaactttcttcagtgtttttcatttcttacgttctttcacttcaagggagaatatagaagcatttgatattatctacaaacactgcagaacagcatcatgtcataaacgattctgagccattcacactttttatttaattaaatgtatttaattaaatctcaaatttattttaatgtaaagaacttaaattatgttttaaacacatgccttaaatttgtttaattaaatttaactctggtttctaccagctcatacaaaataaatggtttctgaaaatgtttaagtattaacttacaaggatataggtttttctcatgtatctttttgttcattggcaagatgaaataatttttctagggtaatgccgtaggaaaaataaaacttcacatttatgtggcttgtttatccttagctcacagattgaggtaataatgacactcctagactttgggatcaaataacttagggccaagtcttgggtctgaatttatttaagttcacaacctagggcaagttactctgcctttctaagactcacttacatcttctgtgaaatataattgtaccaacctcatagagtttggtgtcaactaaatgagattatatgtggactaaatatctgtcatatagtaaacactcaataaattgcaacatattattt

SEQ ID NO: 363671 - DNA, 2492 bp, Homo sapiens
  misc_feature (2)..(2): n is a, c, g, or t
cngtttttgttcttctaagcaaaagatctccctctctctagccgatgctccccactcagttcatcccgggaatgggccagggaggaaggttctcatgcatcgccccgagctgccaggcgagcttcgggctccttaaattcacaggccaacagcccgcgtcctctccgcgcaggctcccggttgcccgcggtccccggcccagctccttggcctcctcctcgtcggtccgcccctggtggtcttggcgcccgctcgtccagctcggcgcgccggggaccgccggctgcccggggcagtccgcacgccctcggggatctcggctcccggatccgccgcgccggcaggagccggccgggcctggagggagcaagcggatgcgcccacgcccccggcacggggatggcgcgacagggcccgggctccggggtggggctcggcagagctcctgacagctccggggtcggcagcgcgggaggggggagctccgccgctcgccgctcattcccggctcggggctcccctccactcgctcgggcggcgcggggcccgttcgggccgcccgtcgccgcccccgccccccgcgcgcccgcccgccagcccgcctgcgccctcgctcgccccgcgcgcgttcctagggcgccacctctttgcgactagctcacttctccggcaggtttgcctcggagcgtgtgaacattcctccgctcggttttcaactcgcctccaacctgcgccgcccggccagcatgtctccccgcccgtgaagcggggctgccgcctccctgccgctccggctgccactaacgacccgccctcgccgccacctggccctcctgatcgacgacacacgcacttgaaacttgttctcagggtgtgtggaatcaactttccggaagcaaccagcccaccagaggaggtcccgagcgcgagcggagacgatgcagcggagactggttcagcagtggagcgtcgcggtgttcctgctgagctacgcggtgccctcctgcgggcgctcggtggagggtctcagccgccgcctcaaaagagctgtgtctgaacatcagctcctccatgacaaggggaagtccatccaagatttacggcgacgattcttccttcaccatctgatcgcagaaatccacacagctgaaatcagagctacctcggaggtgtcccctaactccaagccctctcccaacacaaagaaccaccccgtccgatttgggtctgatgatgagggcagatacctaactcaggaaactaacaaggtggagacgtacaaagagcagccgctcaagacacctgggaagaaaaagaaaggcaagcccgggaaacgcaaggagcaggaaaagaaaaaacggcgaactcgctctgcctggttagactctggagtgactgggagtgggctagaaggggaccacctgtctgacacctccacaacgtcgctggagctcgattcacggtaacaggcttctctggcccgtagcctcagcggggtgctctcagctgggttttggagcctcccttctgccttggcttggacaaacctagaattttctccctttatgtatctctatcgattgtgtagcaattgacagagaataactcagaatattgtctgccttaaagcagtacccccctaccacacacacccctgtcctccagcaccatagagaggcgctagagcccattcctctttctccaccgtcacccaacatcaatcctttaccactctaccaaataatttcatattcaagcttcagaagctagtgaccatcttcataatttgctggagaagtgtgtttcttccccttactctcacacctgggcaaactttcttcagtgtttttcatttcttacgttctttcacttcaagggagaatatagaagcatttgatattatctacaaacactgcagaacagcatcatgtcataaacgattctgagccattcacactttttatttaattaaatgtatttaattaaatctcaaatttattttaatgtaaagaacttaaattatgttttaaacacatgccttaaatttgtttaattaaatttaactctggtttctaccagctcatacaaaataaatggtttctgaaaatgtttaagtattaacttacaaggatataggtttttctcatgtatctttttgttcattggcaagatgaaataatttttctagggtaatgccgtaggaaaaataaaacttcacatttatgtggcttgtttatccttagctcacagattgaggtaataatgacactcctagactttgggatcaaataacttagggccaagtcttgggtctgaatttatttaagttcacaacctagggcaagttactctgcctttctaagactcacttacatcttctgtgaaatataattgtaccaacctcatagagtttggtgtcaactaaatgagattatatgtggactaaatatctgtcatatagtaaacactcaataaattgcaacatattattt

SEQ ID NO: 363672 - DNA, 1556 bp, Homo sapiens
ctgctttctaataattgcctttagtgggaacagaagtctcctttcaagaagcttttaattcattttaagatttaattttatgttttctgaagaacaacaaaaaatatttctggaaaagactgctgagaagatttccctctttcagccagaagagcagagagaagattgtaaatcaaggaaaagatttcccccttcagatctaacgattacattagggctcctgcatctttttggaaggattctttttataaatcagaaagtgttcgaggttcaaaggtttgcctcggagcgtgtgaacattcctccgctcggttttcaactcgcctccaacctgcgccgcccggccagcatgtctccccgcccgtgaagcggggctgccgcctccctgccgctccggctgccactaacgacccgccctcgccgccacctggccctcctgatcgacgacacacgcacttgaaacttgttctcagggtgtgtggaatcaactttccggaagcaaccagcccaccagaggaggtcccgagcgcgagcggagacgatgcagcggagactggttcagcagtggagcgtcgcggtgttcctgctgagctacgcggtgccctcctgcgggcgctcggtggagggtctcagccgccgcctcaaaagagctgtgtctgaacatcagctcctccatgacaaggggaagtccatccaagatttacggcgacgattcttccttcaccatctgatcgcagaaatccacacagctgaaatcagagctacctcggaggtgtcccctaactccaagccctctcccaacacaaagaaccaccccgtccgatttgggtctgatgatgagggcagatacctaactcaggaaactaacaaggtggagacgtacaaagagcagccgctcaagacacctgggaagaaaaagaaaggcaagcccgggaaacgcaaggagcaggaaaagaaaaaacggcgaactcgctctgcctggttagactctggagtgactgggagtgggctagaaggggaccacctgtctgacacctccacaacgtcgctggagctcgattcacggaggcattgaaattttcagcagagaccttccaaggacatattgcaggattctgtaatagtgaacatatggaaagtattagaaatatttattgtctgtaaatactgtaaatgcattggaataaaactgtctcccccattgctctatgaaactgcacattggtcattgtgaatatttttttttttgccaaggctaatccaattattattatcacatttaccataatttattttgtccattgatgtatttattttgtaaatgtatcttggtgctgctgaatttctatattttttgtaacataatgcactttagatatacatatcaagtatgttgataaatgacacaatgaagtgtctctattttgtggttgattttaatgaatgcctaaatataattatccaaattgattttcctttgtgcatgtaaaaataacagtattttaaatttgtaaagaatgtctaataaaatataatctaattacatcatgaaaaaa

SEQ ID NO: 363673 - DNA, 1296 bp, Homo sapiens
gaaagggcctggttcgcaaagaagctgacttcagagggggaaactttcttcttttaggaggcggttagccctgttccacgaacccaggagaactgctggccagattaattagacattgctatgggagacgtgtaaacacactacttatcattgatgcatatataaaaccattttattttcgctattatttcagaggttttgctctttctggctgtgtggtttggagaaagcacagttggagtagccggttgctaaataagtcccgagcgcgagcggagacgatgcagcggagactggttcagcagtggagcgtcgcggtgttcctgctgagctacgcggtgccctcctgcgggcgctcggtggagggtctcagccgccgcctcaaaagagctgtgtctgaacatcagctcctccatgacaaggggaagtccatccaagatttacggcgacgattcttccttcaccatctgatcgcagaaatccacacagctgaaatcagagctacctcggaggtgtcccctaactccaagccctctcccaacacaaagaaccaccccgtccgatttgggtctgatgatgagggcagatacctaactcaggaaactaacaaggtggagacgtacaaagagcagccgctcaagacacctgggaagaaaaagaaaggcaagcccgggaaacgcaaggagcaggaaaagaaaaaacggcgaactcgctctgcctggttagactctggagtgactgggagtgggctagaaggggaccacctgtctgacacctccacaacgtcgctggagctcgattcacggaggcattgaaattttcagcagagaccttccaaggacatattgcaggattctgtaatagtgaacatatggaaagtattagaaatatttattgtctgtaaatactgtaaatgcattggaataaaactgtctcccccattgctctatgaaactgcacattggtcattgtgaatatttttttttttgccaaggctaatccaattattattatcacatttaccataatttattttgtccattgatgtatttattttgtaaatgtatcttggtgctgctgaatttctatattttttgtaacataatgcactttagatatacatatcaagtatgttgataaatgacacaatgaagtgtctctattttgtggttgattttaatgaatgcctaaatataattatccaaattgattttcctttgtgcatgtaaaaataacagtattttaaatttgtaaagaatgtctaataaaatataatctaattacatcatgaaaaaa

SEQ ID NO: 363674 - DNA, 1326 bp, Homo sapiens
gaaagggcctggttcgcaaagaagctgacttcagagggggaaactttcttcttttaggaggcggttagccctgttccacgaacccaggagaactgctggccagattaattagacattgctatgggagacgtgtaaacacactacttatcattgatgcatatataaaaccattttattttcgctattatttcagaggaagcgcctctgatttgtttcttttttccctttttgctctttctggctgtgtggtttggagaaagcacagttggagtagccggttgctaaataagtcccgagcgcgagcggagacgatgcagcggagactggttcagcagtggagcgtcgcggtgttcctgctgagctacgcggtgccctcctgcgggcgctcggtggagggtctcagccgccgcctcaaaagagctgtgtctgaacatcagctcctccatgacaaggggaagtccatccaagatttacggcgacgattcttccttcaccatctgatcgcagaaatccacacagctgaaatcagagctacctcggaggtgtcccctaactccaagccctctcccaacacaaagaaccaccccgtccgatttgggtctgatgatgagggcagatacctaactcaggaaactaacaaggtggagacgtacaaagagcagccgctcaagacacctgggaagaaaaagaaaggcaagcccgggaaacgcaaggagcaggaaaagaaaaaacggcgaactcgctctgcctggttagactctggagtgactgggagtgggctagaaggggaccacctgtctgacacctccacaacgtcgctggagctcgattcacggaggcattgaaattttcagcagagaccttccaaggacatattgcaggattctgtaatagtgaacatatggaaagtattagaaatatttattgtctgtaaatactgtaaatgcattggaataaaactgtctcccccattgctctatgaaactgcacattggtcattgtgaatatttttttttttgccaaggctaatccaattattattatcacatttaccataatttattttgtccattgatgtatttattttgtaaatgtatcttggtgctgctgaatttctatattttttgtaacataatgcactttagatatacatatcaagtatgttgataaatgacacaatgaagtgtctctattttgtggttgattttaatgaatgcctaaatataattatccaaattgattttcctttgtgcatgtaaaaataacagtattttaaatttgtaaagaatgtctaataaaatataatctaattacatcatgaaaaaa

SEQ ID NO: 363675 - DNA, 2095 bp, Homo sapiens
ctgctttctaataattgcctttagtgggaacagaagtctcctttcaagaagcttttaattcattttaagatttaattttatgttttctgaagaacaacaaaaaatatttctggaaaagactgctgagaagatttccctctttcagccagaagagcagagagaagattgtaaatcaaggaaaagatttcccccttcagatctaacgattacattagggctcctgcatctttttggaaggattctttttataaatcagaaagtgttcgaggttcaaaggtttgcctcggagcgtgtgaacattcctccgctcggttttcaactcgcctccaacctgcgccgcccggccagcatgtctccccgcccgtgaagcggggctgccgcctccctgccgctccggctgccactaacgacccgccctcgccgccacctggccctcctgatcgacgacacacgcacttgaaacttgttctcagggtgtgtggaatcaactttccggaagcaaccagcccaccagaggaggtcccgagcgcgagcggagacgatgcagcggagactggttcagcagtggagcgtcgcggtgttcctgctgagctacgcggtgccctcctgcgggcgctcggtggagggtctcagccgccgcctcaaaagagctgtgtctgaacatcagctcctccatgacaaggggaagtccatccaagatttacggcgacgattcttccttcaccatctgatcgcagaaatccacacagctgaaatcagagctacctcggaggtgtcccctaactccaagccctctcccaacacaaagaaccaccccgtccgatttgggtctgatgatgagggcagatacctaactcaggaaactaacaaggtggagacgtacaaagagcagccgctcaagacacctgggaagaaaaagaaaggcaagcccgggaaacgcaaggagcaggaaaagaaaaaacggcgaactcgctctgcctggttagactctggagtgactgggagtgggctagaaggggaccacctgtctgacacctccacaacgtcgctggagctcgattcacggtaacaggcttctctggcccgtagcctcagcggggtgctctcagctgggttttggagcctcccttctgccttggcttggacaaacctagaattttctccctttatgtatctctatcgattgtgtagcaattgacagagaataactcagaatattgtctgccttaaagcagtacccccctaccacacacacccctgtcctccagcaccatagagaggcgctagagcccattcctctttctccaccgtcacccaacatcaatcctttaccactctaccaaataatttcatattcaagcttcagaagctagtgaccatcttcataatttgctggagaagtgtgtttcttccccttactctcacacctgggcaaactttcttcagtgtttttcatttcttacgttctttcacttcaagggagaatatagaagcatttgatattatctacaaacactgcagaacagcatcatgtcataaacgattctgagccattcacactttttatttaattaaatgtatttaattaaatctcaaatttattttaatgtaaagaacttaaattatgttttaaacacatgccttaaatttgtttaattaaatttaactctggtttctaccagctcatacaaaataaatggtttctgaaaatgtttaagtattaacttacaaggatataggtttttctcatgtatctttttgttcattggcaagatgaaataatttttctagggtaatgccgtaggaaaaataaaacttcacatttatgtggcttgtttatccttagctcacagattgaggtaataatgacactcctagactttgggatcaaataacttagggccaagtcttgggtctgaatttatttaagttcacaacctagggcaagttactctgcctttctaagactcacttacatcttctgtgaaatataattgtaccaacctcatagagtttggtgtcaactaaatgagattatatgtggactaaatatctgtcatatagtaaacactcaataaattgcaacatattattt

SEQ ID NO: 363676 - DNA, 1397 bp, Homo sapiens
gaaagggcctggttcgcaaagaagctgacttcagagggggaaactttcttcttttaggaggcggttagccctgttccacgaacccaggagaactgctggccagattaattagacattgctatgggagacgtgtaaacacactacttatcattgatgcatatataaaaccattttattttcgctattatttcagaggaagcgcctctgatttgtttcttttttccctttttgctctttctggctgtgtggtttggagaaagcacagttggagtagccggttgctaaataagtcccgagcgcgagcggagacgatgcagcggagactggttcagcagtggagcgtcgcggtgttcctgctgagctacgcggtgccctcctgcgggcgctcggtggagggtctcagccgccgcctcaaaagagctgtgtctgaacatcagctcctccatgacaaggggaagtccatccaagatttacggcgacgattcttccttcaccatctgatcgcagaaatccacacagctgaaatcagagctacctcggaggtgtcccctaactccaagccctctcccaacacaaagaaccaccccgtccgatttgggtctgatgatgagggcagatacctaactcaggaaactaacaaggtggagacgtacaaagagcagccgctcaagacacctgggaagaaaaagaaaggcaagcccgggaaacgcaaggagcaggaaaagaaaaaacggcgaactcgctctgcctggttagactctggagtgactgggagtgggctagaaggggaccacctgtctgacacctccacaacgtcgctggagctcgattcacgtacagcacttctgtggggtttgaaaaaaaaaaaggaaaacaacagaagaacacatcatatgcaactaatgatctcattatttaagagtcccctgttacttctttagtcatttcctttgactctgctacagataggattataggatgatgcttcaaaggggaccttgaacctattcaccattatttgtctctttaagctggcaaacccatcattaaatagcacataaaatagcaatcatatgggataagtagtacagcttcagtaatcaatgggcagtggcactagaaaaatcttgagcacagtgaatgacctatcctgcaaacatctaatggatctctaaagggtaacaaaccctataaattctggcttactgcacatatttagtgtgttttaagataggatcctaactgtatatatttataactaatgtaaggaccctactttattgccaaaacctatttttatccattgtctcatatatataaacatgtcatatatataaacatatatatataaacatatatgtatatagtaaacattcaataaattgcaacatattatt

SEQ ID NO: 363677 - DNA, 1776 bp, Homo sapiens
agcggaaaacgccagagggatgcgggcggcagagctcgagaggcggctgccgggctgcggggcgccttgactctccctccaccctgcctcctcgggctccactcgtctgcccctggactcccgtctcctcctgtcctccggcttcccagagctccctccttatggcagcagcttcccgcgtctccggcgcagcttctcagcggacgaccctctcgctccggggctgagcccagtccctggatgttgctgaaactctcgagatcatgcgcgggtttggctgctgcttccccgccgggtgccactgccaccgccgccgcctctgctgccgccgtccgcgggatgctcagtagcccgctgcccggcccccgcgatcctgtgttcctcggaagccgtttgctgctgcagagttgcacgaactagtcatggtgctgtgggagtccccgcggcagtgcagcagctggacactttgcgagggcttttgctggctgctgctgctgcccgtcatgctactcatcgtagcccgcccggtgaagctcgctgctttccctacctccttaagtgactgccaaacgcccaccggctggaattgctctggttatgatgacagagaaaatgatctcttcctctgtgacaccaacacctgtaaatttgatggggaatgtttaagaattggagacactgtgacttgcgtctgtcagttcaagtgcaacaatgactatgtgcctgtgtgtggctccaatggggagagctaccagaatgagtgttacctgcgacaggctgcatgcaaacagcagagtgagatacttgtggtgtcagaaggatcatgtgccacagatgcaggatcaggatctggagatggagtccatgaaggctctggagaaactagtcaaaaggagacatccacctgtgatatttgccagtttggtgcagaatgtgacgaagatgccgaggatgtctggtgtgtgtgtaatattgactgttctcaaaccaacttcaatcccctctgcgcttctgatgggaaatcttatgataatgcatgccaaatcaaagaagcatcgtgtcagaaacaggagaaaattgaagtcatgtctttgggtcgatgtcaagataacacaactacaactactaagtctgaagatgggcattatgcaagaacagattatgcagagaatgctaacaaattagaagaaagtgccagagaacaccacataccttgtccggaacattacaatggcttctgcatgcatgggaagtgtgagcattctatcaatatgcaggagccatcttgcaggtgtgatgctggttatactggacaacactgtgaaaaaaaggactacagtgttctatacgttgttcccggtcctgtacgatttcagtatgtcttaatcgcagctgtgattggaacaattcagattgctgtcatctgtgtggtggtcctctgcatcacaaggaaatgccccagaagcaacagaattcacagacagaagcaaaatacagggcactacagttcagacaatacaacaagagcgtccacgaggttaatctaaagggagcatgtttcacagtggctggactaccgagagcttggactacacaatacagtattatagacaaaagaataagacaagagatctacacatgttgccttgcatttgtggtaatctacaccaatgaaaacatgtactacagctatatttgattatgtatggatatatttgaaatagtatacattgtcttgatgttttttctgtaatgtaaataaactatttatatcac

SEQ ID NO: 363678 - DNA, 1835 bp, Homo sapiens
agcggaaaacgccagagggatgcgggcggcagagctcgagaggcggctgccgggctgcggggcgccttgactctccctccaccctgcctcctcgggctccactcgtctgcccctggactcccgtctcctcctgtcctccggcttcccagagctccctccttatggcagcagcttcccgcgtctccggcgcagcttctcagcggacgaccctctcgctccggggctgagcccagtccctggatgttgctgaaactctcgagatcatgcgcgggtttggctgctgcttccccgccgggtgccactgccaccgccgccgcctctgctgccgccgtccgcgggatgctcagtagcccgctgcccggcccccgcgatcctgtgttcctcggaagccgtttgctgctgcagagttgcacgaactagtcatggtgctgtgggagtccccgcggcagtgcagcagctggacactttgcgagggcttttgctggctgctgctgctgcccgtcatgctactcatcgtagcccgcccggtgaagctcgctgctttccctacctccttaagtgactgccaaacgcccaccggctggaattgctctggttatgatgacagagaaaatgatctcttcctctgtgacaccaacacctgtaaatttgatggggaatgtttaagaattggagacactgtgacttgcgtctgtcagttcaagtgcaacaatgactatgtgcctgtgtgtggctccaatggggagagctaccagaatgagtgttacctgcgacaggctgcatgcaaacagcagagtgagatacttgtggtgtcagaaggatcatgtgccacagatgcaggatcaggatctggagatggagtccatgaaggctctggagaaactagtcaaaaggagacatccacctgtgatatttgccagtttggtgcagaatgtgacgaagatgccgaggatgtctggtgtgtgtgtaatattgactgttctcaaaccaacttcaatcccctctgcgcttctgatgggaaatcttatgataatgcatgccaaatcaaagaagcatcgtgtcagaaacaggagaaaattgaagtcatgtctttgggtcgatgtcaagataacacaactacaactactaagtctgaagatgggcattatgcaagaacagattatgcagagaatgctaacaaattagaagaaagtgccagagaacaccacataccttgtccggaacattacaatggcttctgcatgcatgggaagtgtgagcattctatcaatatgcaggagccatcttgcaggtgtgatgctggttatactggacaacactgtgaaaaaaaggactacagtgttctatacgttgttcccggtcctgtacgatttcagtatgtcttaatcgcagctgtgattggaacaattcagattgctgtcatctgtgtggtggtcctctgcatcacaaggaaatgccccagaagcaacagaattcacagacagaagcaaaatacagggcactacagttcagacaatacaacaagagcgtccacgaggttaatctaaagggagcatgtttcacagtggctggactaccgagagcttggactacacaatacagtattatagacaaaagaataagacaagagatctacacatgttgccttgcatttgtggtaatctacaccaatgaaaacatgtactacagctatatttgattatgtatggatatatttgaaatagtatacattgtcttgatgttttttctgtaatgtaaataaactatttatatcacacaatatagttttttctttcccatgtatttgttatatataataaatactcagtgatgag

SEQ ID NO: 363679 - DNA, 1971 bp, Homo sapiens
agcggaaaacgccagagggatgcgggcggcagagctcgagaggcggctgccgggctgcggggcgccttgactctccctccaccctgcctcctcgggctccactcgtctgcccctggactcccgtctcctcctgtcctccggcttcccagagctccctccttatggcagcagcttcccgcgtctccggcgcagcttctcagcggacgaccctctcgctccggggctgagcccagtccctggatgttgctgaaactctcgagatcatgcgcgggtttggctgctgcttccccgccgggtgccactgccaccgccgccgcctctgctgccgccgtccgcgggatgctcagtagcccgctgcccggcccccgcgatcctgtgttcctcggaagccgtttgctgctgcagagttgcacgaactagtcatggtgctgtgggagtccccgcggcagtgcagcagctggacactttgcgagggcttttgctggctgctgctgctgcccgtcatgctactcatcgtagcccgcccggtgaagctcgctgctttccctacctccttaagtgactgccaaacgcccaccggctggaattgctctggttatgatgacagagaaaatgatctcttcctctgtgacaccaacacctgtaaatttgatggggaatgtttaagaattggagacactgtgacttgcgtctgtcagttcaagtgcaacaatgactatgtgcctgtgtgtggctccaatggggagagctaccagaatgagtgttacctgcgacaggctgcatgcaaacagcagagtgagatacttgtggtgtcagaaggatcatgtgccacagatgcaggatcaggatctggagatggagtccatgaaggctctggagaaactagtcaaaaggagacatccacctgtgatatttgccagtttggtgcagaatgtgacgaagatgccgaggatgtctggtgtgtgtgtaatattgactgttctcaaaccaacttcaatcccctctgcgcttctgatgggaaatcttatgataatgcatgccaaatcaaagaagcatcgtgtcagaaacaggagaaaattgaagtcatgtctttgggtcgatgtcaagataacacaactacaactactaagtctgaagatgggcattatgcaagaacagattatgcagagaatgctaacaaattagaagaaagtgccagagaacaccacataccttgtccggaacattacaatggcttctgcatgcatgggaagtgtgagcattctatcaatatgcaggagccatcttgcaggtgtgatgctggttatactggacaacactgtgaaaaaaaggactacagtgttctatacgttgttcccggtcctgtacgatttcagtatgtcttaatcgcagctgtgattggaacaattcagattgctgtcatctgtgtggtggtcctctgcatcacaaggaaatgccccagaagcaacagaattcacagacagaagcaaaatacagggcactgtgggtataatactaagttgagatgatatcatttacgggggaaggcgctttgtgaagtaggccttatttctcttgtcctttcgtacagggaggaatttgaagtagatagaaaccgacctggattactccggtctgaactcagatcacgtaggactttaatcgttgaacaaacgaacctttaatagcggctgcaccatcgggatgtcctgatccaacatcgaggtcgtaaaccctattgttgatatggactctagaataggattgcgctgttatccctagggtaacttgttccgttggtcaagttattggatcaattgagtatagtagttcgctttgactggtgaagtcttagcatgtactgctcggaggttgggttctgctccgaggtcgccccaaccgaaatttttaatgcaggtttggtagtttaggacctgtgggtttgttaggtactgtttgcattaataaatt

SEQ ID NO: 363680 - DNA, 2784 bp, Homo sapiens
agcggaaaacgccagagggatgcgggcggcagagctcgagaggcggctgccgggctgcggggcgccttgactctccctccaccctgcctcctcgggctccactcgtctgcccctggactcccgtctcctcctgtcctccggcttcccagagctccctccttatggcagcagcttcccgcgtctccggcgcagcttctcagcggacgaccctctcgctccggggctgagcccagtccctggatgttgctgaaactctcgagatcatgcgcgggtttggctgctgcttccccgccgggtgccactgccaccgccgccgcctctgctgccgccgtccgcgggatgctcagtagcccgctgcccggcccccgcgatcctgtgttcctcggaagccgtttgctgctgcagagttgcacgaactagtcatggtgctgtgggagtccccgcggcagtgcagcagctggacactttgcgagggcttttgctggctgctgctgctgcccgtcatgctactcatcgtagcccgcccggtgaagctcgctgctttccctacctccttaagtgactgccaaacgcccaccggctggaattgctctggttatgatgacagagaaaatgatctcttcctctgtgacaccaacacctgtaaatttgatggggaatgtttaagaattggagacactgtgacttgcgtctgtcagttcaagtgcaacaatgactatgtgcctgtgtgtggctccaatggggagagctaccagaatgagtgttacctgcgacaggctgcatgcaaacagcagagtgagatacttgtggtgtcagaaggatcatgtgccacagagtccatgaaggctctggagaaactagtcaaaaggagacatccacctgtgatatttgccagtttggtgcagaatgtgacgaagatgccgaggatgtctggtgtgtgtgtaatattgactgttctcaaaccaacttcaatcccctctgcgcttctgatgggaaatcttatgataatgcatgccaaatcaaagaagcatcgtgtcagaaacaggagaaaattgaagtcatgtctttgggtcgatgtcaagataacacaactacaactactaagtctgaagatgggcattatgcaagaacagattatgcagagaatgctaacaaattagaagaaagtgccagagaacaccacataccttgtccggaacattacaatggcttctgcatgcatgggaagtgtgagcattctatcaatatgcaggagccatcttgcaggtgtgatgctggttatactggacaacactgtgaaaaaaaggactacagtgttctatacgttgttcccggtcctgtacgatttcagtatgtcttaatcgcagctgtgattggaacaattcagattgctgtcatctgtgtggtggtcctctgcatcacaaggaaatgccccagaagcaacagaattcacagacagaagcaaaatacagggcactacagttcagacaatacaacaagagcgtccacgaggttaatctaaagggagcatgtttcacagtggctggactaccgagagcttggactacacaatacagtattatagacaaaagaataagacaagagatctacacatgttgccttgcatttgtggtaatctacaccaatgaaaacatgtactacagctatatttgattatgtatggatatatttgaaatagtatacattgtcttgatgttttttctgtaatgtaaataaactatttatatcacacaatatagttttttctttcccatgtatttgttatatataataaatactcagtgatgagaaaaaaatggcattcttaaatttgcggtatctcataactgtaaatataatcagactagtacaatctgtacagctaccaatatttcatgtttcttctcatcttgagacagcacattagtttgtacaggactcagtggctaggttttgaatgattccaagatcaagggaaatgatggttattggaaaagagaaaaaataatttactttatatcgagtgaggataaaatatttccgatctttgaatcatctctatttcatcaactttcttccctggtcttccattttcatccctagagcagaaaaatctctggcatataaactaaataaaagaagaaggggagggaaagtgttttataactcataaaggagagggaaagaaaatattggtttttattggggaagtagcttagaatcccccagttaagtgcatatatctgaacttactgaacaagttacatactaggtatacacagagtggcaaaatatattccatttaggtgggtggaattaccaggggaaaaatgtaataacaccactagatgtgaaacaccaaaatcgtgaattctcaaaagcaccatacaatatgtatagtatatagttctttgaaaagaagttagaatcacaaccaataccccatgaatagctttgtggctaatgcagcaccataatttgtaatggaactaagatgatgatgacgatatttcatgaaaacagagagatgttttgagcatatttatgtggtgaggtaagaaagaaaattaatcctatagcatctgaaagacctcactgggaagttggtatggatttttgtttgatttgtgcatacaaataggtatcacaacttgatctggaaaaaataagctgtgaaaattctcaaggaataagatgaaaataaatcaattattatcatttagctctgcaaagctttccatggctaacacagtaaatttaaataaagctctctttgtctccttc

SEQ ID NO: 363681 - DNA, 2866 bp, Homo sapiens
agcggaaaacgccagagggatgcgggcggcagagctcgagaggcggctgccgggctgcggggcgccttgactctccctccaccctgcctcctcgggctccactcgtctgcccctggactcccgtctcctcctgtcctccggcttcccagagctccctccttatggcagcagcttcccgcgtctccggcgcagcttctcagcggacgaccctctcgctccggggctgagcccagtccctggatgttgctgaaactctcgagatcatgcgcgggtttggctgctgcttccccgccgggtgccactgccaccgccgccgcctctgctgccgccgtccgcgggatgctcagtagcccgctgcccggcccccgcgatcctgtgttcctcggaagccgtttgctgctgcagagttgcacgaactagtcatggtgctgtgggagtccccgcggcagtgcagcagctggacactttgcgagggcttttgctggctgctgctgctgcccgtcatgctactcatcgtagcccgcccggtgaagctcgctgctttccctacctccttaagtgactgccaaacgcccaccggctggaattgctctggttatgatgacagagaaaatgatctcttcctctgtgacaccaacacctgtaaatttgatggggaatgtttaagaattggagacactgtgacttgcgtctgtcagttcaagtgcaacaatgactatgtgcctgtgtgtggctccaatggggagagctaccagaatgagtgttacctgcgacaggctgcatgcaaacagcagagtgagatacttgtggtgtcagaaggatcatgtgccacagatgcaggatcaggatctggagatggagtccatgaaggctctggagaaactagtcaaaaggagacatccacctgtgatatttgccagtttggtgcagaatgtgacgaagatgccgaggatgtctggtgtgtgtgtaatattgactgttctcaaaccaacttcaatcccctctgcgcttctgatgggaaatcttatgataatgcatgccaaatcaaagaagcatcgtgtcagaaacaggagaaaattgaagtcatgtctttgggtcgatgtcaagataacacaactacaactactaagtctgaagatgggcattatgcaagaacagattatgcagagaatgctaacaaattagaagaaagtgccagagaacaccacataccttgtccggaacattacaatggcttctgcatgcatgggaagtgtgagcattctatcaatatgcaggagccatcttgcaggtgtgatgctggttatactggacaacactgtgaaaaaaaggactacagtgttctatacgttgttcccggtcctgtacgatttcagtatgtcttaatcgcagctgtgattggaacaattcagattgctgtcatctgtgtggtggtcctctgcatcacaagggccaaactttaggtaatagcattggactgagatttgtaaactttccaaccttccaggaaatgccccagaagcaacagaattcacagacagaagcaaaatacagggcactacagttcagacaatacaacaagagcgtccacgaggttaatctaaagggagcatgtttcacagtggctggactaccgagagcttggactacacaatacagtattatagacaaaagaataagacaagagatctacacatgttgccttgcatttgtggtaatctacaccaatgaaaacatgtactacagctatatttgattatgtatggatatatttgaaatagtatacattgtcttgatgttttttctgtaatgtaaataaactatttatatcacacaatatagttttttctttcccatgtatttgttatatataataaatactcagtgatgagaaaaaaatggcattcttaaatttgcggtatctcataactgtaaatataatcagactagtacaatctgtacagctaccaatatttcatgtttcttctcatcttgagacagcacattagtttgtacaggactcagtggctaggttttgaatgattccaagatcaagggaaatgatggttattggaaaagagaaaaaataatttactttatatcgagtgaggataaaatatttccgatctttgaatcatctctatttcatcaactttcttccctggtcttccattttcatccctagagcagaaaaatctctggcatataaactaaataaaagaagaaggggagggaaagtgttttataactcataaaggagagggaaagaaaatattggtttttattggggaagtagcttagaatcccccagttaagtgcatatatctgaacttactgaacaagttacatactaggtatacacagagtggcaaaatatattccatttaggtgggtggaattaccaggggaaaaatgtaataacaccactagatgtgaaacaccaaaatcgtgaattctcaaaagcaccatacaatatgtatagtatatagttctttgaaaagaagttagaatcacaaccaataccccatgaatagctttgtggctaatgcagcaccataatttgtaatggaactaagatgatgatgacgatatttcatgaaaacagagagatgttttgagcatatttatgtggtgaggtaagaaagaaaattaatcctatagcatctgaaagacctcactgggaagttggtatggatttttgtttgatttgtgcatacaaataggtatcacaacttgatctggaaaaaataagctgtgaaaattctcaaggaataagatgaaaataaatcaattattatcatttagctctgcaaagctttccatggctaacacagtaaatttaaataaagctctctttgtctccttc

SEQ ID NO: 363682 - DNA, 2809 bp, Homo sapiens
agcggaaaacgccagagggatgcgggcggcagagctcgagaggcggctgccgggctgcggggcgccttgactctccctccaccctgcctcctcgggctccactcgtctgcccctggactcccgtctcctcctgtcctccggcttcccagagctccctccttatggcagcagcttcccgcgtctccggcgcagcttctcagcggacgaccctctcgctccggggctgagcccagtccctggatgttgctgaaactctcgagatcatgcgcgggtttggctgctgcttccccgccgggtgccactgccaccgccgccgcctctgctgccgccgtccgcgggatgctcagtagcccgctgcccggcccccgcgatcctgtgttcctcggaagccgtttgctgctgcagagttgcacgaactagtcatggtgctgtgggagtccccgcggcagtgcagcagctggacactttgcgagggcttttgctggctgctgctgctgcccgtcatgctactcatcgtagcccgcccggtgaagctcgctgctttccctacctccttaagtgactgccaaacgcccaccggctggaattgctctggttatgatgacagagaaaatgatctcttcctctgtgacaccaacacctgtaaatttgatggggaatgtttaagaattggagacactgtgacttgcgtctgtcagttcaagtgcaacaatgactatgtgcctgtgtgtggctccaatggggagagctaccagaatgagtgttacctgcgacaggctgcatgcaaacagcagagtgagatacttgtggtgtcagaaggatcatgtgccacagatgcaggatcaggatctggagatggagtccatgaaggctctggagaaactagtcaaaaggagacatccacctgtgatatttgccagtttggtgcagaatgtgacgaagatgccgaggatgtctggtgtgtgtgtaatattgactgttctcaaaccaacttcaatcccctctgcgcttctgatgggaaatcttatgataatgcatgccaaatcaaagaagcatcgtgtcagaaacaggagaaaattgaagtcatgtctttgggtcgatgtcaagataacacaactacaactactaagtctgaagatgggcattatgcaagaacagattatgcagagaatgctaacaaattagaagaaagtgccagagaacaccacataccttgtccggaacattacaatggcttctgcatgcatgggaagtgtgagcattctatcaatatgcaggagccatcttgcaggtgtgatgctggttatactggacaacactgtgaaaaaaaggactacagtgttctatacgttgttcccggtcctgtacgatttcagtatgtcttaatcgcagctgtgattggaacaattcagattgctgtcatctgtgtggtggtcctctgcatcacaaggaaatgccccagaagcaacagaattcacagacagaagcaaaatacagggcactacagttcagacaatacaacaagagcgtccacgaggttaatctaaagggagcatgtttcacagtggctggactaccgagagcttggactacacaatacagtattatagacaaaagaataagacaagagatctacacatgttgccttgcatttgtggtaatctacaccaatgaaaacatgtactacagctatatttgattatgtatggatatatttgaaatagtatacattgtcttgatgttttttctgtaatgtaaataaactatttatatcacacaatatagttttttctttcccatgtatttgttatatataataaatactcagtgatgagaaaaaaatggcattcttaaatttgcggtatctcataactgtaaatataatcagactagtacaatctgtacagctaccaatatttcatgtttcttctcatcttgagacagcacattagtttgtacaggactcagtggctaggttttgaatgattccaagatcaagggaaatgatggttattggaaaagagaaaaaataatttactttatatcgagtgaggataaaatatttccgatctttgaatcatctctatttcatcaactttcttccctggtcttccattttcatccctagagcagaaaaatctctggcatataaactaaataaaagaagaaggggagggaaagtgttttataactcataaaggagagggaaagaaaatattggtttttattggggaagtagcttagaatcccccagttaagtgcatatatctgaacttactgaacaagttacatactaggtatacacagagtggcaaaatatattccatttaggtgggtggaattaccaggggaaaaatgtaataacaccactagatgtgaaacaccaaaatcgtgaattctcaaaagcaccatacaatatgtatagtatatagttctttgaaaagaagttagaatcacaaccaataccccatgaatagctttgtggctaatgcagcaccataatttgtaatggaactaagatgatgatgacgatatttcatgaaaacagagagatgttttgagcatatttatgtggtgaggtaagaaagaaaattaatcctatagcatctgaaagacctcactgggaagttggtatggatttttgtttgatttgtgcatacaaataggtatcacaacttgatctggaaaaaataagctgtgaaaattctcaaggaataagatgaaaataaatcaattattatcatttagctctgcaaagctttccatggctaacacagtaaatttaaataaagctctctttgtctccttc

SEQ ID NO: 363683 - DNA, 1393 bp, Homo sapiens
agcggaaaacgccagagggatgcgggcggcagagctcgagaggcggctgccgggctgcggggcgccttgactctccctccaccctgcctcctcgggctccactcgtctgcccctggactcccgtctcctcctgtcctccggcttcccagactcgctgctttccctacctccttaagtgactgccaaacgcccaccggctggaattgctctggttatgatgacagagaaaatgatctcttcctctgtgacaccaacacctgtaaatttgatggggaatgtttaagaattggagacactgtgacttgcgtctgtcagttcaagtgcaacaatgactatgtgcctgtgtgtggctccaatggggagagctaccagaatgagtgttacctgcgacaggctgcatgcaaacagcagagtgagatacttgtggtgtcagaaggatcatgtgccacagatgcaggatcaggatctggagatggagtccatgaaggctctggagaaactagtcaaaaggagacatccacctgtgatatttgccagtttggtgcagaatgtgacgaagatgccgaggatgtctggtgtgtgtgtaatattgactgttctcaaaccaacttcaatcccctctgcgcttctgatgggaaatcttatgataatgcatgccaaatcaaagaagcatcgtgtcagaaacaggagaaaattgaagtcatgtctttgggtcgatgtcaagataacacaactacaactactaagtctgaagatgggcattatgcaagaacagattatgcagagaatgctaacaaattagaagaaagtgccagagaacaccacataccttgtccggaacattacaatggcttctgcatgcatgggaagtgtgagcattctatcaatatgcaggagccatcttgcaggtgtgatgctggttatactggacaacactgtgaaaaaaaggactacagtgttctatacgttgttcccggtcctgtacgatttcagtatgtcttaatcgcagctgtgattggaacaattcagattgctgtcatctgtgtggtggtcctctgcatcacaaggaaatgccccagaagcaacagaattcacagacagaagcaaaatacagggcactacagttcagacaatacaacaagagcgtccacgaggttaatctaaagggagcatgtttcacagtggctggactaccgagagcttggactacacaatacagtattatagacaaaagaataagacaagagatctacacatgttgccttgcatttgtggtaatctacaccaatgaaaacatgtactacagctatatttgattatgtatggatatatttgaaatagtatacattgtcttgatgttttttctgtaatgtaaataaactatttatatcac

SEQ ID NO: 363684 - DNA, 357 bp, Homo sapiens
atgtttgctcttataaagcttgtgaatcatagaagattaggacacttttaagattatacaccgagaaagaccttatcaaaatgagttactactcctttataatacacttagaattcatttataatatggtgttagttatccaacatttattgagcagtgggtgttttcaaaagctatccagaataagttaattctattcctttgttacactgtacttttaaaatatatattttctaattttgaaacattcaagctgcgcataatggttcacacctgtaatcttggctacttgagaggctgaggcaggaggatggcttgaggccaggagttcaagaccagcatgtgcaatacagtgag

SEQ ID NO: 363685 - DNA, 442 bp, Homo sapiens
ggtcttgagccagtaatctttgtactgggtttcaagaaaatctttgttgaagtttgaaccacaactttgtcatggttcttaaatgtttatactgtatttcaaagaagttgtttgaggcaaattaagtgtatgtgtgtaggttatctttttaaaaactcttcagtgcaaattgtatcttgttataaaatggacacaaatctgcaaaacaaatttacacttcatatagcattgataatcttcaggtgaacagttagtaatcatttaaaaagctcactgctgatggtagaaaatttgccttaatgaattaagtatctgggattattctttgaaaacagatgaccataatttttttttaaagcagagtgacttattttgtcttatttttaagtaaagtgtgccaattaaacctgtgtggcctatataaatgaaattaataacttca

SEQ ID NO: 363686 - DNA, 499 bp, Homo sapiens
tctatcacccagatcagattgttagcatacaggttgataaaatgcttattttacaacttaagatgtgtccattaattctcattttcactgtctgaagtaattggcaatgactaagttcttttgaatacatagattaatacagtttcataatctaatgactgtttatctactaataagcccattgctgctgtagatattatataagaacaaaggattctttgatgggaattaccttcccctccatcttcaaagagtacattcctcttttactcttaaatgacatttaacaatgtagagaccagataattagggaagatgaaataagagataattggaacagtttttttgaaatttgtcagttaaagaaggagcaaaatggattaacagtttgaaggaatagttgagtcaaaggagtgtgtgtgtgtgtgtgtgtgtgtgtgtgtctttgtatttactggagtttgattatacttgttgtatcagtggaaaagaggtagga

SEQ ID NO: 363687 - DNA, 991 bp, Homo sapiens
ggaaccagctggacttagccaatgatgagattttcaccaatgaccgccgatgggagtctgctgaccttcaagaagtcatgtttacggctctcataaaggacagacccaagtttgtccgcctctttctggagaatggcttgaacctacggaagtttctcacccatgatgtcctcactgaactcttctccaaccacttcagcacgcttgtgtaccggaatctgcagatcgccaagaattcctataatgatgccctcctcacgtttgtctggaaactggttgcgaacttccgaagaggcttccggaaggaagacagaaatggccgggacgagatggacatagaactccacgacgtgtctcctattactcggcaccccctgcaagctctcttcatctgggccattcttcagaataagaaggaactctccaaagtcatttgggagcagaccaggggctgcactctggcagccctgggagccagcaagcttctgaagactctggccaaagtgaagaacgacatcaatgctgctggggagtccgaggagctggctaatgagtacgagacccgggctgttgagctgttcactgagtgttacagcagcgatgaagacttggcagaacagctgctggtctattcctgtgaagcttggggtggaagcaactgtctggagctggcggtggaggccacagaccagcatttcatcgcccagcctggggtccagaattttctttctaagcaatggtatggagagatttcccgagacaccaagaactggaagattatcctgtgtctgtttattatacccttggtgggctgtggctttgtatcatttaggaagaaacctgtcgacaagcacaagaagctgctttggtactatgtggcgttcttcacctcccccttcgtggtcttctcctggaatgtggtcttctacatcgccttcctcctgctgtttgcctacgtgctgctcatggatttccattcggtgccacaccc

SEQ ID NO: 363688 - DNA, 982 bp, Homo sapiens
ggaaccagctggacttagccaatgatgagattttcaccaatgaccgccgatgggagtctgctgaccttcaagaagtcatgtttacggctctcataaaggacagacccaagtttgtccgcctctttctggagaatggcttgaacctacggaagtttctcacccatgatgtcctcactgaactcttctccaaccacttcagcacgcttgtgtaccggaatctgcagatcgccaagaattcctataatgatgccctcctcacgtttgtctggaaactggttgcgaacttccgaagaggcttccggaaggaagacagaaatggccgggacgagatggacatagaactccacgacgtgtctcctattactcggcaccccctgcaagctctcttcatctgggccattcttcagaataagaaggaactctccaaagtcatttgggagcagaccaggggctgcactctggcagccctgggagccagcaagcttctgaagactctggccaaagtgaagaacgacatcaatgctgctggggagtccgaggagctggctaatgagtacgagacccgggctgttgagctgttcactgagtgttacagcagcgatgaagacttggcagaacagctgctggtctattcctgtgaagcttggggtggaagcaactgtctggagctggcggtggaggccacagaccagcatttcatcgcccagcctggggtccagaactttctttctaagcatggttggcgagatttccgagaacaggaatggaagattcctgggtgtggttattataccttgggggtgggtcgctccttagagaactgtggcagccagacccggtggctcttggggttcccccctcggggttcgaaggggtctcagctcccgggtggcgggctcgatcttcggcgcccccggttctcggtgctctagacacccgggcatcacgggaggggtccgggcctgcctcgcggtttctgcca

SEQ ID NO: 363689 - DNA, 942 bp, Homo sapiens
ggaaccagctggacttagccaatgatgagattttcaccaatgaccgccgatgggagtctgctgaccttcaagaagtcatgtttacggctctcataaaggacagacccaagtttgtccgcctctttctggagaatggcttgaacctacggaagtttctcacccatgatgtcctcactgaactcttctccaaccacttcagcacgcttgtgtaccggaatctgcagatcgccaagaattcctataatgatgccctcctcacgtttgtctggaaactggttgcgaacttccgaagaggcttccggaaggaagacagaaatggccgggacgagatggacatagaactccacgacgtgtctcctattactcggcaccccctgcaagctctcttcatctgggccattcttcagaataagaaggaactctccaaagtcatttgggagcagaccaggggctgcactctggcagccctgggagccagcaagcttctgaagactctggccaaagtgaagaacgacatcaatgctgctggggagtccgaggagctggctaatgagtacgagacccgggctgttgagctgttcactgagtgttacagcagcgatgaagacttggcagaacagctgctggtctattcctgtgaagcttggggtggaagcaactgtctggagctggcggtggaggccacagaccagcatttcatcgcccagcctggggtccagaattttctttctaagcaatggtatggagagatttcccgagacaccaagaactggaagattatcctgtgtctgtttattatacccttggtgggctgtggctttgtatcatttaggtacaaaccaaggcacataatcgtgtgtgagtgtgtgtgccagtgtgtgtacatgcatccacatatgtgtgctctcatgtaaatgattaaaaagcctggaacttatgatg

SEQ ID NO: 363690 - DNA, 1177 bp, Homo sapiens
gggggaaacagaaaatatgtttctttatatagatataaaaataattatataatttccatttgggttgagtgctgtgaaggaagagaacaacctgctatgtgagaaaagggaaaattagatgagtttgtcaggaggtgttttatttacaggcagcatttaaacagacaggttaacaccagccaggtgaggaattagaggaagcttgcctcagaaacagcttcatgtgggaaggagcttgctgtgacggaggagctaaaggaagggtattatagctagaacataggcatctaaggggatatttgtcttgatttgaagccctggagatagatcaggaggtatggagccctgtagggcatataaaagacttattttatcctaaatgtattgggaaattttcaggggcttaagcattatcttcttcatgttttaaaggaaaaacctgttaatatttgtggaatactgattacaggctaggcacaccttagccatttttcatgcaaaatgatctttggcataagataattgtgattttacagataaggaaaatgaagtttagagatcttgagtaacttgtctaaagccacataacacgtaactaacagtggtagatgctactgtttatcagaaataaaaagttaacttagcaaaggagacttttagagtgagtggccaaaaaggtcagagggatacaggtgaatgttgtgtcactaaagtcaaaataaaaaatattttaagaaggaaagataggtgagtttttctaatgtagctagagaactcatgccgatatttacaagaacttatttcttaacatcctagtagtgtaggttgtgtgttatgatagagtcatttacaaaatcacatggctgtatcttttgtagctgagagtgaagcaaaagtaaaaaccaaagttcgctttgaagaattgcttaagacccacagtgatctaatgcgtgaaaagaaaaaactgaagaaaaaacttgtcaggtctgaagaaaacatctcagtaagtaaatgatcattgggtaatagtgatttacatatgcgcataaaatgcagatatggctgcattttatgttaaaattctaaggaattttgaaaattaaaaacagtaacactatgtcatggtcaataacatgtggtaaaaataaagtttatattagaatcaaaaacactgtga

SEQ ID NO: 363691 - DNA, 450 bp, Homo sapiens
tacaatggcatgatcttgtgtgaagaacgttttataatttttatttggaagttccatattacaaatacatctcctttgtttcgataggatcctgattgagtcaatgctttgcattctcagtcctctgcataaagctgagagatgcctacagctgagagtgaagcaaaagtaaaaaccaaagttcgctttgaagaattgcttaagacccacagtgatctaatgcgtgaaaagaaaaaactgaagaaaaaacttgtcaggtctgaagaaaacatctcagtaagtaaatgatcattgggtaatagtgatttacatatgcgcataaaatgcagatatggctgcattttatgttaaaattctaaggaattttgaaaattaaaaacagtaacactatgtcatggtcaataacatgtggtaaaaataaagtttatattagaatcaaaaacactgtga

SEQ ID NO: 363692 - DNA, 5615 bp, Homo sapiens
tgcggcacagagccgcggcttgctttcaggacacgggtcgctggcgggttaggtggctgcgtggccgcctcacttcgcgcacgcgccgctaggctgggggagttgatttgcactgctccgggtgtcggctccggcgggacgggcggttctgcgtacccctctccagtgtcaacctggggctgaatcttcaacctgtcaaagccttcttaattatgtctgagaaaagtactaaaataggtgccattttaaattcccagacaaggaaaaaccaaggattagaaattaagtagcttgcccaaggccacacatcagatcctgattgagtcaatgctttgcattctcagtcctctgcataaagctgagagatgcctacagctgagagtgaagcaaaagtaaaaaccaaagttcgctttgaagaattgcttaagacccacagtgatctaatgcgtgaaaagaaaaaactgaagaaaaaacttgtcaggtctgaagaaaacatctcacctgacactattagaagcaatcttcactatatgaaagaaactacaagtgatgatcccgacactattagaagcaatcttccccatattaaagaaactacaagtgatgatgtaagtgctgctaacactaacaacctgaagaagagcacgagagtcactaaaaacaaattgaggaacacacagttagcaactgaaaatcctaatggtgatgctagtgtagaggaagacaaacaaggaaagccaaataaaaaggtgataaagacggtgccccagttgactacacaagacctgaaaccggaaactcctgagaataaggttgattctacacaccagaaaacacatacaaagccacagccaggcgttgatcatcagaaaagtgagaaggcaaatgagggaagagaagagactgatttagaagaggatgaagaattgatgcaagcatatcagtgccatgtaactgaagaaatggcaaaggagattaagaggaaaataagaaagaaactgaaagaacagttgacttactttccctcagatactttattccatgatgacaaactaagcagtgaaaaaaggaaaaagaaaaaggaagttccagtcttctctaaagctgaaacaagtacattgaccatctctggtgacacagttgaaggtgaacaaaagaaagaatcttcagttagatcagtttcttcagattctcatcaagatgatgaaataagctcaatggaacaaagcacagaagacagcatgcaagatgatacaaaacctaaaccaaaaaaaacaaaaaagaagactaaagcagttgcagataataatgaagatgttgatggtgatggtgttcatgaaataacaagccgagatagcccggtttatcccaaatgtttgcttgatgatgaccttgtcttgggagtttacattcaccgaactgatagacttaagtcagattttatgatttctcacccaatggtaaaaattcatgtggttgatgagcatactggtcaatatgtcaagaaagatgatagtggacggcctgtttcatcttactatgaaaaagagaatgtggattatattcttcctattatgacccagccatatgattttaaacagttaaaatcaagacttccagagtgggaagaacaaattgtatttaatgaaaattttccctatttgcttcgaggctctgatgagagtcctaaagtcatcctgttctttgagattcttgatttcttaagcgtggatgaaattaagaataattctgaggttcaaaaccaagaatgtggctttcggaaaattgcctgggcatttcttaagcttctgggagccaatggaaatgcaaacatcaactcaaaacttcgcttgcagctatattacccacctactaagcctcgatccccattaagtgttgttgaggcatttgaatggtggtcaaaatgtccaagaaatcattacccatcaacactgtacgtaactgtaagaggactgaaagttccagactgtataaagccatcttaccgctctatgatggctcttcaggaggaaaaaggtaaaccagtgcattgtgaacgtcaccatgagtcaagctcagtagacacagaacctggattagaagagtcaaaggaagtaataaagtggaaacgactccctgggcaggcttgccgtatcccaaacaaacacctcttctcactaaatgcaggagaacgaggatgtttttgtcttgatttctcccacaatggaagaatattagcagcagcttgtgccagccgggatggatatccaattattttatatgaaattccttctggacgtttcatgagagaattgtgtggccacctcaatatcatttatgatctttcctggtcaaaagatgatcactacatccttacttcatcatctgatggcactgccaggatatggaaaaatgaaataaacaatacaaatactttcagagttttacctcatccttcttttgtttacacggctaaattccatccagctgtaagagagctagtagttacaggatgctatgattccatgatacggatatggaaagttgagatgagagaagattctgccatattggtccgacagtttgatgttcacaaaagttttatcaactcactttgttttgatactgaaggtcatcatatgtattcaggagattgtacaggggtgattgttgtttggaatacctatgtcaagattaatgatttggaacattcagtgcaccactggactataaataaggaaattaaagaaactgagtttaagggaattccaataagttatttggagattcatcccaatggaaaacgtttgttaatccataccaaagacagtactttgagaattatggatctccggatattagtagcaaggaagtttgtaggagcagcaaattatcgggagaagattcatagtactttgactccatgtgggacttttctgtttgctggaagtgaggatggtatagtgtatgtttggaacccagaaacaggagaacaagtagccatgtattctgacttgccattcaagtcacccattcgagacatttcttatcatccatttgaaaatatggttgcattctgtgcatttgggcaaaatgagccaattcttctgtatatttacgatttccatgttgcccagcaggaggctgaaatgttcaaacgctacaatggaacatttccattacctggaatacaccaaagtcaagatgccctatgtacctgtccaaaactaccccatcaaggctcttttcagattgatgaatttgtccacactgaaagttcttcaacgaagatgcagctagtaaaacagaggcttgaaactgtcacagaggtgatacgttcctgtgctgcaaaagtcaacaaaaatctctcatttacttcaccaccagcagtttcctcacaacagtctaagttaaagcagtcaaacatgctgaccgctcaagagattctacatcagtttggtttcactcagaccgggattatcagcatagaaagaaagccttgtaaccatcaggtagatacagcaccaacggtagtggctctttatgactacacagcgaatcgatcagatgaactaaccatccatcgcggagacattatccgagtgtttttcaaagataatgaagactggtggtatggcagcataggaaagggacaggaaggttattttccagctaatcatgtggctagtgaaacactgtatcaagaactgcctcctgagataaaggagcgatcccctcctttaagccctgaggaaaaaactaaaatagaaaaatctccagctcctcaaaagcaatcaatcaataagaacaagtcccaggacttcagactaggctcagaatctatgacacattctgaaatgagaaaagaacagagccatgaggaccaaggacacataatggatacacggatgaggaagaacaagcaagcaggcagaaaagtcactctaatagagtaaagaattgaagaaaagttaagagctgccgaaatgcacagaggtgaaaatgacaaaccaaatggaatttctcttcagagttcagaattttcagatactaaggaggaagaaaggatccactacttcttgttcttatgaatgactctagaaaaatcagaatcaagttgtgggtggaaaaatcaacgtggcctttgagttcagttgttataaaccattgtgactattgttggtcaaagtattggtacttatattgttagtaattgcatcataattacattaccagtgttggaaaactaatgaagaaaacactgtaattgctactcagcaaatgtgaataaaaggtgtttgcgttattaggatgtctgttaagtaatcatttaatattattatattggtaatggttgtatgtgtgatgctatgcccagaatatgaagtatctgtttttgaaattcactttatttaaaagataagcagctgactgggcacggtgcctcatgcctgtaatcctagcaccttgggaggctgaggcaggtggatcacctaaggtcaggagttcaacaacaccagcctgaccaacatggtgaaaccccatctctactaaaaatacaaaaatcagccgggtctcatggcaggcacctgtaatcccatctactgaggcaggagaattgcttgacccaggaggcagaggttgcagtgagccaagatcacgccattgcactccagcctgggggacagagcaagactctatctccaaaaaacaaaaaagataagcagctttagaatatggcgcattcaaaacagtctcagtaacaaagacattaaaagaaaacaatttactttctaattaaaattttgtgtttcttaagatcaaatcatataggtaacttcatagacctaaattaaaagtgatttttggctggactggcaacaatgttcccaatgtctttactttttaaaaaaggcttttcatatttaagcacatacctattttgtagacttacattgtttaatatttattttaatcttaatatttttacattattatattgcattatttattttttctaagttccagaataatagtgtcattattatagactatatgttttgaagtttgatattataatgggatattcattttttgttcttttcttgactcctttctcaagtgtgtgataaggtctgctgataaaatatttaaccccaagaaagtgaaaactaatataaaattagaaagacctatccaaattagacagtcaattccattaaaataagaagtgagaaaaacaatgttgggcattgaggtgtaaattttgcccagatgtatacccagtgtgaaatatcttctaataaaaatatatttggctcttatccctgcacatgtagaggcataaaaattggtaaacatgtcccgctgtgtagaactttaaaaaaaaggcatttttgaaagtgttgagtggcactgataactggtgaagcctacagccatccgcccaaaagtctgttctgatggcactgagttttcattgttctggatgtataagtctgtgtgtcaggtacagctgggcccagccagcttgagtcactcttgtacaagcttgtttttttctgtcttgtgaatgcacttgataatttaaaaataaaaatatctgtttctctgca

SEQ ID NO: 363693 - DNA, 5379 bp, Homo sapiens
gcctactactactactaaattcgcggccgcgtcgaccggctccggcgggacgggcggttctgcgtacccctctccgatcctgattgagtcaatgctttgcattctcagtcctctgcataaagctgagagatgcctacagctgagagtgaagcaaaagtaaaaaccaaagttcgctttgaagaattgcttaagacccacagtgatctaatgcgtgaaaagaaaaaactgaagaaaaaacttgtcaggtctgaagaaaacatctcacctgacactattagaagcaatcttcactatatgaaagaaactacaagtgatgatcccgacactattagaagcaatcttccccatattaaagaaactacaagtgatgatgtaagtgctgctaacactaacaacctgaagaagagcacgagagtcactaaaaacaaattgaggaacacacagttagcaactgaaaatcctaatggtgatgctagtgtagaggaagacaaacaaggaaagccaaataaaaaggtgataaagacggtgccccagttgactacacaagacctgaaaccggaaactcctgagaataaggttgattctacacaccagaaaacacatacaaagccacagccaggcgttgatcatcagaaaagtgagaaggcaaatgagggaagagaagagactgatttagaagaggatgaagaattgatgcaagcatatcagtgccatgtaactgaagaaatggcaaaggagattaagaggaaaataagaaagaaactgaaagaacagttgacttactttccctcagatactttattccatgatgacaaactaagcagtgaaaaaaggaaaaagaaaaaggaagttccagtcttctctaaagctgaaacaagtacattgaccatctctggtgacacagttgaaggtgaacaaaagaaagaatcttcagttagatcagtttcttcagattctcatcaagatgatgaaataagctcaatggaacaaagcacagaagacagcatgcaagatgatacaaaacctaaaccaaaaaaaacaaaaaagaagactaaagcagttgcagataataatgaagatgttgatggtgatggtgttcatgaaataacaagccgagatagcccggtttatcccaaatgtttgcttgatgatgaccttgtcttgggagtttacattcaccgaactgatagacttaagtcagattttatgatttctcacccaatggtaaaaattcatgtggttgatgagcatactggtcaatatgtcaagaaagatgatagtggacggcctgtttcatcttactatgaaaaagagaatgtggattatattcttcctattatgacccagccatatgattttaaacagttaaaatcaagacttccagagtgggaagaacaaattgtatttaatgaaaattttccctatttgcttcgaggctctgatgagagtcctaaagtcatcctgttctttgagattcttgatttcttaagcgtggatgaaattaagaataattctgaggttcaaaaccaagaatgtggctttcggaaaattgcctgggcatttcttaagcttctgggagccaatggaaatgcaaacatcaactcaaaacttcgcttgcagctatattacccacctactaagcctcgatccccattaagtgttgttgaggcatttgaatggtggtcaaaatgtccaagaaatcattacccatcaacactgtacgtaactgtaagaggactgaaagttccagactgtataaagccatcttaccgctctatgatggctcttcaggaggaaaaaggtaaaccagtgcattgtgaacgtcaccatgagtcaagctcagtagacacagaacctggattagaagagtcaaaggaagtaataaagtggaaacgactccctgggcaggcttgccgtatcccaaacaaacacctcttctcactaaatgcaggagaacgaggatgtttttgtcttgatttctcccacaatggaagaatattagcagcagcttgtgccagccgggatggatatccaattattttatatgaaattccttctggacgtttcatgagagaattgtgtggccacctcaatatcatttatgatctttcctggtcaaaagatgatcactacatccttacttcatcatctgatggcactgccaggatatggaaaaatgaaataaacaatacaaatactttcagagttttacctcatccttcttttgtttacacggctaaattccatccagctgtaagagagctagtagttacaggatgctatgattccatgatacggatatggaaagttgagatgagagaagattctgccatattggtccgacagtttgatgttcacaaaagttttatcaactcactttgttttgatactgaaggtcatcatatgtattcaggagattgtacaggggtgattgttgtttggaatacctatgtcaagattaatgatttggaacattcagtgcaccactggactataaataaggaaattaaagaaactgagtttaagggaattccaataagttatttggagattcatcccaatggaaaacgtttgttaatccataccaaagacagtactttgagaattatggatctccggatattagtagcaaggaagtttgtaggagcagcaaattatcgggagaagattcatagtactttgactccatgtgggacttttctgtttgctggaagtgaggatggtatagtgtatgtttggaacccagaaacaggagaacaagtagccatgtattctgacttgccattcaagtcacccattcgagacatttcttatcatccatttgaaaatatggttgcattctgtgcatttgggcaaaatgagccaattcttctgtatatttacgatttccatgttgcccagcaggaggctgaaatgttcaaacgctacaatggaacatttccattacctggaatacaccaaagtcaagatgccctatgtacctgtccaaaactaccccatcaaggctcttttcagattgatgaatttgtccacactgaaagttcttcaacgaagatgcagctagtaaaacagaggcttgaaactgtcacagaggtgatacgttcctgtgctgcaaaagtcaacaaaaatctctcatttacttcaccaccagcagtttcctcacaacagtctaagttaaagcagtcaaacatgctgaccgctcaagagattctacatcagtttggtttcactcagaccgggattatcagcatagaaagaaagccttgtaaccatcaggtagatacagcaccaacggtagtggctctttatgactacacagcgaatcgatcagatgaactaaccatccatcgcggagacattatccgagtgtttttcaaagataatgaagactggtggtatggcagcataggaaagggacaggaaggttattttccagctaatcatgtggctagtgaaacactgtatcaagaactgcctcctgagataaaggagcgatcccctcctttaagccctgaggaaaaaactaaaatagaaaaatctccagctcctcaaaagcaatcaatcaataagaacaagtcccaggacttcagactaggctcagaatctatgacacattctgaaatgagaaaagaacagagccatgaggaccaaggacacataatggatacacggatgaggaagaacaagcaagcaggcagaaaagtcactctaatagagtaaagaattgaagaaaagttaagagctgccgaaatgcacagaggtgaaaatgacaaaccaaatggaatttctcttcagagttcagaattttcagatactaaggaggaagaaaggatccactacttcttgttcttatgaatgactctagaaaaatcagaatcaagttgtgggtggaaaaatcaacgtggcctttgagttcagttgttataaaccattgtgactattgttggtcaaagtattggtacttatattgttagtaattgcatcataattacattaccagtgttggaaaactaatgaagaaaacactgtaattgctactcagcaaatgtgaataaaaggtgtttgcgttattaggatgtctgttaagtaatcatttaatattattatattggtaatggttgtatgtgtgatgctatgcccagaatatgaagtatctgtttttgaaattcactttatttaaaagataagcagctgactgggcacggtgcctcatgcctgtaatcctagcaccttgggaggctgaggcaggtggatcacctaaggtcaggagttcaacaacaccagcctgaccaacatggtgaaaccccatctctactaaaaatacaaaaatcagccgggtctcatggcaggcacctgtaatcccatctactgaggcaggagaattgcttgacccaggaggcagaggttgcagtgagccaagatcacgccattgcactccagcctgggggacagagcaagactctatctccaaaaaacaaaaaagataagcagctttagaatatggcgcattcaaaacagtctcagtaacaaagacattaaaagaaaacaatttactttctaattaaaattttgtgtttcttaagatcaaatcatataggtaacttcatagacctaaattaaaagtgatttttggctggactggcaacaatgttcccaatgtctttactttttaaaaaaggcttttcatatttaagcacatacctattttgtagacttacattgtttaatatttattttaatcttaatatttttacattattatattgcattatttattttttctaagttccagaataatagtgtcattattatagactatatgttttgaagtttgatattataatgggatattcattttttgttcttttcttgactcctttctcaagtgtgtgataaggtctgctgataaaatatttaaccccaagaaagtgaaaactaatataaaattagaaagacctatccaaattagacagtcaattccattaaaataagaagtgagaaaaacaatgttgggcattgaggtgtaaattttgcccagatgtatacccagtgtgaaatatcttctaataaaaatatatttggctcttatccctgcacatgtagaggcataaaaattggtaaacatgtcccgctgtgtagaactttaaaaaaaaggcatttttgaaagtgttgagtggcactgataactggtgaagcctacagccatccgcccaaaagtctgttctgatggcactgagttttcattgttctggatgtataagtctgtgtgtcaggtacagctgggcccagccagcttgagtcactcttgtacaagcttgtttttttctgtcttgtgaatgcacttgataatttaaaaataaaaatatctgtttctctgca

SEQ ID NO: 363694 - DNA, 6003 bp, Homo sapiens
tgcggcacagagccgcggcttgctttcaggacacgggtcgctggcgggttaggtggctgcgtggccgcctcacttcgcgcacgcgccgctaggctgggggagttgatttgcactgctccgggtgtcggctccggcgggacgggcggttctgcgtacccctctccagtgtcaacctggggctgaatcttcaacctgtcaaagccttcttaattatgtctgagaaaagtactaaaataggtgccattttaaattcccagacaaggaaaaaccaaggattagaaattaagtagcttgcccaaggccacacatcagatcctgattgagtcaatgctttgcattctcagtcctctgcataaagctgagagatgcctacagctgagagtgaagcaaaagtaaaaaccaaagttcgctttgaagaattgcttaagacccacagtgatctaatgcgtgaaaagaaaaaactgaagaaaaaacttgtcaggtctgaagaaaacatctcacctgacactattagaagcaatcttcactatatgaaagaaactacaagtgatgatcccgacactattagaagcaatcttccccatattaaagaaactacaagtgatgatgtaagtgctgctaacactaacaacctgaagaagagcacgagagtcactaaaaacaaattgaggaacacacagttagcaactgaaaatcctaatggtgatgctagtgtagaggaagacaaacaaggaaagccaaataaaaaggtgataaagacggtgccccagttgactacacaagacctgaaaccggaaactcctgagaataaggttgattctacacaccagaaaacacatacaaagccacagccaggcgttgatcatcagaaaagtgagaaggcaaatgagggaagagaagagactgatttagaagaggatgaagaattgatgcaagcatatcagtgccatgtaactgaagaaatggcaaaggagattaagaggaaaataagaaagaaactgaaagaacagttgacttactttccctcagatactttattccatgatgacaaactaagcagtgaaaaaaggaaaaagaaaaaggaagttccagtcttctctaaagctgaaacaagtacattgaccatctctggtgacacagttgaaggtgaacaaaagaaagaatcttcagttagatcagtttcttcagattctcatcaagatgatgaaataagctcaatggaacaaagcacagaagacagcatgcaagatgatacaaaacctaaaccaaaaaaaacaaaaaagaagactaaagcagttgcagataataatgaagatgttgatggtgatggtgttcatgaaataacaagccgagatagcccggtttatcccaaatgtttgcttgatgatgaccttgtcttgggagtttacattcaccgaactgatagacttaagtcagattttatgatttctcacccaatggtaaaaattcatgtggttgatgagcatactggtcaatatgtcaagaaagatgatagtggacggcctgtttcatcttactatgaaaaagagaatgtggattatattcttcctattatgacccagccatatgattttaaacagttaaaatcaagacttccagagtgggaagaacaaattgtatttaatgaaaattttccctatttgcttcgaggctctgatgagagtcctaaagtcatcctgttctttgagattcttgatttcttaagcgtggatgaaattaagaataattctgaggttcaaaaccaagaatgtggctttcggaaaattgcctgggcatttcttaagcttctgggagccaatggaaatgcaaacatcaactcaaaacttcgcttgcagctatattacccacctactaagcctcgatccccattaagtgttgttgaggcatttgaatggtggtcaaaatgtccaagaaatcattacccatcaacactgtacgtaactgtaagaggactgaaagttccagactgtataaagccatcttaccgctctatgatggctcttcaggaggaaaaaggtaaaccagtgcattgtgaacgtcaccatgagtcaagctcagtagacacagaacctggattagaagagtcaaaggaagtaataaagtggaaacgactccctgggcaggcttgccgtatcccaaacaaacacctcttctcactaaatgcaggagaacgaggatgtttttgtcttgatttctcccacaatggaagaatattagcagcagcttgtgccagccgggatggatatccaattattttatatgaaattccttctggacgtttcatgagagaattgtgtggccacctcaatatcatttatgatctttcctggtcaaaagatgatcactacatccttacttcatcatctgatggcactgccaggatatggaaaaatgaaataaacaatacaaatactttcagagttttacctcatccttcttttgtttacacggctaaattccatccagctgtaagagagctagtagttacaggatgctatgattccatgatacggatatggaaagttgagatgagagaagattctgccatattggtccgacagtttgatgttcacaaaagttttatcaactcactttgttttgatactgaaggtcatcatatgtattcaggagattgtacaggggtgattgttgtttggaatacctatgtcaagattaatgatttggaacattcagtgcaccactggactataaataaggaaattaaagaaactgagtttaagggaattccaataagttatttggagattcatcccaatggaaaacgtttgttaatccataccaaagacagtactttgagaattatggatctccggatattagtagcaaggaagtttgtaggagcagcaaattatcgggagaagattcatagtactttgactccatgtgggacttttctgtttgctggaagtgaggatggtatagtgtatgtttggaacccagaaacaggagaacaagtagccatgtattctgacttgccattcaagtcacccattcgagacatttcttatcatccatttgaaaatatggttgcattctgtgcatttgggcaaaatgagccaattcttctgtatatttacgatttccatgttgcccagcaggaggctgaaatgttcaaacgctacaatggaacatttccattacctggaatacaccaaagtcaagatgccctatgtacctgtccaaaactaccccatcaaggctcttttcagattgatgaatttgtccacactgaaagttcttcaacgaagatgcagctagtaaaacagaggcttgaaactgtcacagaggtgatacgttcctgtgctgcaaaagtcaacaaaaatctctcatttacttcaccaccagcagtttcctcacaacagtctaagttaaagcagtcaaacatgctgaccgctcaagagattctacatcagtttggtttcactcagaccgggattatcagcatagaaagaaagccttgtaaccatcaggtagatacagcaccaacggtagtggctctttatgactacacagcgaatcgatcagatgaactaaccatccatcgcggagacattatccgagtgtttttcaaagataatgaagactggtggtatggcagcataggaaagggacaggaaggttattttccagctaatcatgtggctagtgaaacactgtatcaagaactgcctcctgagataaaggagcgatcccctcctttaagccctgaggaaaaaactaaaatagaaaaatctccagctcctcaaaaggtaaaataaaacaaaacagctcacagagacacctccttcttccccctgcttctgcctccatgagtaactacctatatgacgtgctgctgctgagaccaaggaatgaatagtgccaaatcttgctgaagaatgatcttgcagaaatctgattgtgaagaaggaaatctaaaaaggccaaacaagcttcagtagagataacaccaggaaagcagttactcaaacaagactgaaagagaagcaatcaatcaataagaacaagtcccaggacttcagactaggctcagaatctatgacacattctgaaatgagaaaagaacagagccatgaggaccaaggacacataatggatacacggatgaggaagaacaagcaagcaggcagaaaagtcactctaatagagtgtgccagctgtcacttttctcaggagtggtcgatggagttgactgctaccttaaccagatttgccatcgttctgaaactgccgtgtgttttctaaggacaaccaggtgttaagcctttctctttagaagaaggacagtaacctttctgttaaagaattgaagaaaagttaagagctgccgaaatgcacagaggtgaaaatgacaaaccaaatggaatttctcttcagagttcagaattttcagatactaaggaggaagaaaggatccactacttcttgttcttatgaatgactctagaaaaatcagaatcaagttgtgggtggaaaaatcaacgtggcctttgagttcagttgttataaaccattgtgactattgttggtcaaagtattggtacttatattgttagtaattgcatcataattacattaccagtgttggaaaactaatgaagaaaacactgtaattgctactcagcaaatgtgaataaaaggtgtttgcgttattaggatgtctgttaagtaatcatttaatattattatattggtaatggttgtatgtgtgatgctatgcccagaatatgaagtatctgtttttgaaattcactttatttaaaagataagcagctgactgggcacggtgcctcatgcctgtaatcctagcaccttgggaggctgaggcaggtggatcacctaaggtcaggagttcaacaacaccagcctgaccaacatggtgaaaccccatctctactaaaaatacaaaaatcagccgggtctcatggcaggcacctgtaatcccatctactgaggcaggagaattgcttgacccaggaggcagaggttgcagtgagccaagatcacgccattgcactccagcctgggggacagagcaagactctatctccaaaaaacaaaaaagataagcagctttagaatatggcgcattcaaaacagtctcagtaacaaagacattaaaagaaaacaatttactttctaattaaaattttgtgtttcttaagatcaaatcatataggtaacttcatagacctaaattaaaagtgatttttggctggactggcaacaatgttcccaatgtctttactttttaaaaaaggcttttcatatttaagcacatacctattttgtagacttacattgtttaatatttattttaatcttaatatttttacattattatattgcattatttattttttctaagttccagaataatagtgtcattattatagactatatgttttgaagtttgatattataatgggatattcattttttgttcttttcttgactcctttctcaagtgtgtgataaggtctgctgataaaatatttaaccccaagaaagtgaaaactaatataaaattagaaagacctatccaaattagacagtcaattccattaaaataagaagtgagaaaaacaatgttgggcattgaggtgtaaattttgcccagatgtatacccagtgtgaaatatcttctaataaaaatatatttggctcttatccctgcacatgtagaggcataaaaattggtaaacatgtcccgctgtgtagaactttaaaaaaaaggcatttttgaaagtgttgagtggcactgataactggtgaagcctacagccatccgcccaaaagtctgttctgatggcactgagttttcattgttctggatgtataagtctgtgtgtcaggtacagctgggcccagccagcttgagtcactcttgtacaagcttgtttttttctgtcttgtgaatgcacttgataatttaaaaataaaaatatctgtttctctgca

SEQ ID NO: 363695 - DNA, 5512 bp, Homo sapiens
tgcggcacagagccgcggcttgctttcaggacacgggtcgctggcgggttaggtggctgcgtggccgcctcacttcgcgcacgcgccgctaggctgggggagttgatttgcactgctccgggtgtcggctccggcgggacgggcggttctgcgtacccctctccagtgtcaacctggggctgaatcttcaacctgtcaaagccttcttaattatgtctgagaaaagtactaaaataggtgccattttaaattcccagacaaggaaaaaccaaggattagaaattaagtagcttgcccaaggccacacatcagatcctgattgagtcaatgctttgcattctcagtcctctgcataaagctgagagatgcctacagctgagagtgaagcaaaagtaaaaaccaaagttcgctttgaagaattgcttaagacccacagtgatctaatgcgtgaaaagaaaaaactgaagaaaaaacttgtcaggtctgaagaaaacatctcacctgacactattagaagcaatcttcactatatgaaagaaactacaagtgatgatcccgacactattagaagcaatcttccccatattaaagaaactacaagtgatgatgtaagtgctgctaacactaacaacctgaagaagagcacgagagtcactaaaaacaaattgaggaacacacagttagcaactgaaaatcctaatggtgatgctagtgtagaggaagacaaacaaggaaagccaaataaaaaggtgataaagacggtgccccagttgactacacaagacctgaaaccggaaactcctgagaataaggttgattctacacaccagaaaacacatacaaagccacagccaggcgttgatcatcagaaaagtgagaaggcaaatgagggaagagaagagactgatttagaagaggatgaagaattgatgcaagcatatcagtgccatgtaactgaagaaatggcaaaggagattaagaggaaaataagaaagaaactgaaagaacagttgacttactttccctcagatactttattccatgatgacaaactaagcagtgaaaaaaggaaaaagaaaaaggaagttccagtcttctctaaagctgaaacaagtacattgaccatctctggtgacacagttgaaggtgaacaaaagaaagaatcttcagttagatcagtttcttcagattctcatcaagatgatgaaataagctcaatggaacaaagcacagaagacagcatgcaagatgatacaaaacctaaaccaaaaaaaacaaaaaagaagactaaagcagttgcagataataatgaagatgttgatggtgatggtgttcatgaaataacaagccgagatagcccggtttatcccaaatgtttgcttgatgatgaccttgtcttgggagtttacattcaccgaactgatagacttaagtcagattttatgatttctcacccaatggtaaaaattcatgtggttgatgagcatactggtcaatatgtcaagaaagatgatagtggacggcctgtttcatcttactatgaaaaagagaatgtggattatattcttcctattatgacccagccatatgattttaaacagttaaaatcaagacttccagagtgggaagaacaaattgtatttaatgaaaattttccctatttgcttcgaggctctgatgagagtcctaaagtcatcctgttctttgagattcttgatttcttaagcgtggatgaaattaagaataattctgaggttcaaaaccaagaatgtggctttcggaaaattgcctgggcatttcttaagcttctgggagccaatggaaatgcaaacatcaactcaaaacttcgcttgcagctatattacccacctactaagcctcgatccccattaagtgttgttgaggcatttgaatggtggtcaaaatgtccaagaaatcattacccatcaacactgtacgtaactgtaagaggactgaaagttccagactgtataaagccatcttaccgctctatgatggctcttcaggaggaaaaaggtaaaccagtgcattgtgaacgtcaccatgagtcaagctcagtagacacagaacctggattagaagagtcaaaggaagtaataaagtggaaacgactccctgggcaggcttgccgtatcccaaacaaacacctcttctcactaaatgcaggagaacgaggatgtttttgtcttgatttctcccacaatggaagaatattagcagcagcttgtgccagccgggatggatatccaattattttatatgaaattccttctggacgtttcatgagagaattgtgtggccacctcaatatcatttatgatctttcctggtcaaaagatgatcactacatccttacttcatcatctgatggcactgccaggatatggaaaaatgaaataaacaatacaaatactttcagagttttacctcatccttcttttgtttacacggctaaattccatccagctgtaagagagctagtagttacaggatgctatgattccatgatacggatatggaaagttgagatgagagaagattctgccatattggtccgacagtttgatgttcacaaaagttttatcaactcactttgttttgatactgaaggtcatcatatgtattcaggagattgtacaggggtgattgttgtttggaatacctatgtcaagattaatgatttggaacattcagtgcaccactggactataaataaggaaattaaagaaactgagtttaagggaattccaataagttatttggagattcatcccaatggaaaacgtttgttaatccataccaaagacagtactttgagaattatggatctccggatattagtagcaaggaagtttgtaggagcagcaaattatcgggagaagattcatagtactttgactccatgtgggacttttctgtttgctggaagtgaggatggtatagtgtatgtttggaacccagaaacaggagaacaagtagccatgtattctgacttgccattcaagtcacccattcgagacatttcttatcatccatttgaaaatatggttgcattctgtgcatttgggcaaaatgagccaattcttctgtatatttacgatttccatgttgcccagcaggaggctgaaatgttcaaacgctacaatggaacatttccattacctggaatacaccaaagtcaagatgccctatgtacctgtccaaaactaccccatcaaggctcttttcagattgatgaatttgtccacactgaaagttcttcaacgaagatgcagctagtaaaacagaggcttgaaactgtcacagaggtgatacgttcctgtgctgcaaaagtcaacaaaaatctctcatttacttcaccaccagcagtttcctcacaacagtctaagttaaagcagtcaaacatgctgaccgctcaagagattctacatcagtttggtttcactcagaccgggattatcagcatagaaagaaagccttgtaaccatcaggtagatacagcaccaacggtagtggctctttatgactacacagcgaatcgatcagatgaactaaccatccatcgcggagacattatccgagtgtttttcaaagataatgaagactggtggtatggcagcataggaaagggacaggaaggttattttccagctaatcatgtggctagtgaaacactgtatcaagaactgcctcctgagataaaggagcgatcccctcctttaagccctgaggaaaaaactaaaatagaaaaatctccagctcctcaaaagcaatcaatcaataagaacaagtcccaggacttcagactaggctcagaatctatgacacataaagaattgaagaaaagttaagagctgccgaaatgcacagaggtgaaaatgacaaaccaaatggaatttctcttcagagttcagaattttcagatactaaggaggaagaaaggatccactacttcttgttcttatgaatgactctagaaaaatcagaatcaagttgtgggtggaaaaatcaacgtggcctttgagttcagttgttataaaccattgtgactattgttggtcaaagtattggtacttatattgttagtaattgcatcataattacattaccagtgttggaaaactaatgaagaaaacactgtaattgctactcagcaaatgtgaataaaaggtgtttgcgttattaggatgtctgttaagtaatcatttaatattattatattggtaatggttgtatgtgtgatgctatgcccagaatatgaagtatctgtttttgaaattcactttatttaaaagataagcagctgactgggcacggtgcctcatgcctgtaatcctagcaccttgggaggctgaggcaggtggatcacctaaggtcaggagttcaacaacaccagcctgaccaacatggtgaaaccccatctctactaaaaatacaaaaatcagccgggtctcatggcaggcacctgtaatcccatctactgaggcaggagaattgcttgacccaggaggcagaggttgcagtgagccaagatcacgccattgcactccagcctgggggacagagcaagactctatctccaaaaaacaaaaaagataagcagctttagaatatggcgcattcaaaacagtctcagtaacaaagacattaaaagaaaacaatttactttctaattaaaattttgtgtttcttaagatcaaatcatataggtaacttcatagacctaaattaaaagtgatttttggctggactggcaacaatgttcccaatgtctttactttttaaaaaaggcttttcatatttaagcacatacctattttgtagacttacattgtttaatatttattttaatcttaatatttttacattattatattgcattatttattttttctaagttccagaataatagtgtcattattatagactatatgttttgaagtttgatattataatgggatattcattttttgttcttttcttgactcctttctcaagtgtgtgataaggtctgctgataaaatatttaaccccaagaaagtgaaaactaatataaaattagaaagacctatccaaattagacagtcaattccattaaaataagaagtgagaaaaacaatgttgggcattgaggtgtaaattttgcccagatgtatacccagtgtgaaatatcttctaataaaaatatatttggctcttatccctgcacatgtagaggcataaaaattggtaaacatgtcccgctgtgtagaactttaaaaaaaaggcatttttgaaagtgttgagtggcactgataactggtgaagcctacagccatccgcccaaaagtctgttctgatggcactgagttttcattgttctggatgtataagtctgtgtgtcaggtacagctgggcccagccagcttgagtcactcttgtacaagcttgtttttttctgtcttgtgaatgcacttgataatttaaaaataaaaatatctgtttctctgca

SEQ ID NO: 363696 - DNA, 5445 bp, Homo sapiens
gcctactactactactaaattcgcggccgcgtcgacctacaagtgatgatgtaagtgctgctaacactaacaacctgaagaagagcacgagagtcactaaaaacaaattgaggaacacacagttagcaactgaaaatcctaatggtgatgctagtgtagaggaagacaaacaaggaaagccaaataaaaaggtgataaagacggtgccccagttgactacacaagacctgaaaccggaaactcctgagaataaggttgattctacacaccagaaaacacatacaaagccacagccaggcgttgatcatcagaaaagtgagaaggcaaatgagggaagagaagagactgatttagaagaggatgaagaattgatgcaagcatatcagtgccatgtaactgaagaaatggcaaaggagattaagaggaaaataagaaagaaactgaaagaacagttgacttactttccctcagatactttattccatgatgacaaactaagcagtgaaaaaaggaaaaagaaaaaggaagttccagtcttctctaaagctgaaacaagtacattgaccatctctggtgacacagttgaaggtgaacaaaagaaagaatcttcagttagatcagtttcttcagattctcatcaagatgatgaaataagctcaatggaacaaagcacagaagacagcatgcaagatgatacaaaacctaaaccaaaaaaaacaaaaaagaagactaaagcagttgcagataataatgaagatgttgatggtgatggtgttcatgaaataacaagccgagatagcccggtttatcccaaatgtttgcttgatgatgaccttgtcttgggagtttacattcaccgaactgatagacttaagtcagattttatgatttctcacccaatggtaaaaattcatgtggttgatgagcatactggtcaatatgtcaagaaagatgatagtggacggcctgtttcatcttactatgaaaaagagaatgtggattatattcttcctattatgacccagccatatgattttaaacagttaaaatcaagacttccagagtgggaagaacaaattgtatttaatgaaaattttccctatttgcttcgaggctctgatgagagtcctaaagtcatcctgttctttgagattcttgatttcttaagcgtggatgaaattaagaataattctgaggttcaaaaccaagaatgtggctttcggaaaattgcctgggcatttcttaagcttctgggagccaatggaaatgcaaacatcaactcaaaacttcgcttgcagctatattacccacctactaagcctcgatccccattaagtgttgttgaggcatttgaatggtggtcaaaatgtccaagaaatcattacccatcaacactgtacgtaactgtaagaggactgaaagttccagactgtataaagccatcttaccgctctatgatggctcttcaggaggaaaaaggtaaaccagtgcattgtgaacgtcaccatgagtcaagctcagtagacacagaacctggattagaagagtcaaaggaagtaataaagtggaaacgactccctgggcaggcttgccgtatcccaaacaaacacctcttctcactaaatgcaggagaacgaggatgtttttgtcttgatttctcccacaatggaagaatattagcagcagcttgtgccagccgggatggatatccaattattttatatgaaattccttctggacgtttcatgagagaattgtgtggccacctcaatatcatttatgatctttcctggtcaaaagatgatcactacatccttacttcatcatctgatggcactgccaggatatggaaaaatgaaataaacaatacaaatactttcagagttttacctcatccttcttttgtttacacggctaaattccatccagctgtaagagagctagtagttacaggatgctatgattccatgatacggatatggaaagttgagatgagagaagattctgccatattggtccgacagtttgatgttcacaaaagttttatcaactcactttgttttgatactgaaggtcatcatatgtattcaggagattgtacaggggtgattgttgtttggaatacctatgtcaagattaatgatttggaacattcagtgcaccactggactataaataaggaaattaaagaaactgagtttaagggaattccaataagttatttggagattcatcccaatggaaaacgtttgttaatccataccaaagacagtactttgagaattatggatctccggatattagtagcaaggaagtttgtaggagcagcaaattatcgggagaagattcatagtactttgactccatgtgggacttttctgtttgctggaagtgaggatggtatagtgtatgtttggaacccagaaacaggagaacaagtagccatgtattctgacttgccattcaagtcacccattcgagacatttcttatcatccatttgaaaatatggttgcattctgtgcatttgggcaaaatgagccaattcttctgtatatttacgatttccatgttgcccagcaggaggctgaaatgttcaaacgctacaatggaacatttccattacctggaatacaccaaagtcaagatgccctatgtacctgtccaaaactaccccatcaaggctcttttcagattgatgaatttgtccacactgaaagttcttcaacgaagatgcagctagtaaaacagaggcttgaaactgtcacagaggtgatacgttcctgtgctgcaaaagtcaacaaaaatctctcatttacttcaccaccagcagtttcctcacaacagtctaagttaaagcagtcaaacatgctgaccgctcaagagattctacatcagtttggtttcactcagaccgggattatcagcatagaaagaaagccttgtaaccatcaggtagatacagcaccaacggtagtggctctttatgactacacagcgaatcgatcagatgaactaaccatccatcgcggagacattatccgagtgtttttcaaagataatgaagactggtggtatggcagcataggaaagggacaggaaggttattttccagctaatcatgtggctagtgaaacactgtatcaagaactgcctcctgagataaaggagcgatcccctcctttaagccctgaggaaaaaactaaaatagaaaaatctccagctcctcaaaaggtaaaataaaacaaaacagctcacagagacacctccttcttccccctgcttctgcctccatgagtaactacctatatgacgtgctgctgctgagaccaaggaatgaatagtgccaaatcttgctgaagaatgatcttgcagaaatctgattgtgaagaaggaaatctaaaaaggccaaacaagcttcagtagagataacaccaggaaagcagttactcaaacaagactgaaagagaagcaatcaatcaataagaacaagtcccaggacttcagactaggctcagaatctatgacacattctgaaatgagaaaagaacagagccatgaggaccaaggacacataatggatacacggatgaggaagaacaagcaagcaggcagaaaagtcactctaatagagtgtgccagctgtcacttttctcaggagtggtcgatggagttgactgctaccttaaccagatttgccatcgttctgaaactgccgtgtgttttctaaggacaaccaggtgttaagcctttctctttagaagaaggacagtaacctttctgttaaagaattgaagaaaagttaagagctgccgaaatgcacagaggtgaaaatgacaaaccaaatggaatttctcttcagagttcagaattttcagatactaaggaggaagaaaggatccactacttcttgttcttatgaatgactctagaaaaatcagaatcaagttgtgggtggaaaaatcaacgtggcctttgagttcagttgttataaaccattgtgactattgttggtcaaagtattggtacttatattgttagtaattgcatcataattacattaccagtgttggaaaactaatgaagaaaacactgtaattgctactcagcaaatgtgaataaaaggtgtttgcgttattaggatgtctgttaagtaatcatttaatattattatattggtaatggttgtatgtgtgatgctatgcccagaatatgaagtatctgtttttgaaattcactttatttaaaagataagcagctgactgggcacggtgcctcatgcctgtaatcctagcaccttgggaggctgaggcaggtggatcacctaaggtcaggagttcaacaacaccagcctgaccaacatggtgaaaccccatctctactaaaaatacaaaaatcagccgggtctcatggcaggcacctgtaatcccatctactgaggcaggagaattgcttgacccaggaggcagaggttgcagtgagccaagatcacgccattgcactccagcctgggggacagagcaagactctatctccaaaaaacaaaaaagataagcagctttagaatatggcgcattcaaaacagtctcagtaacaaagacattaaaagaaaacaatttactttctaattaaaattttgtgtttcttaagatcaaatcatataggtaacttcatagacctaaattaaaagtgatttttggctggactggcaacaatgttcccaatgtctttactttttaaaaaaggcttttcatatttaagcacatacctattttgtagacttacattgtttaatatttattttaatcttaatatttttacattattatattgcattatttattttttctaagttccagaataatagtgtcattattatagactatatgttttgaagtttgatattataatgggatattcattttttgttcttttcttgactcctttctcaagtgtgtgataaggtctgctgataaaatatttaaccccaagaaagtgaaaactaatataaaattagaaagacctatccaaattagacagtcaattccattaaaataagaagtgagaaaaacaatgttgggcattgaggtgtaaattttgcccagatgtatacccagtgtgaaatatcttctaataaaaatatatttggctcttatccctgcacatgtagaggcataaaaattggtaaacatgtcccgctgtgtagaactttaaaaaaaaggcatttttgaaagtgttgagtggcactgataactggtgaagcctacagccatccgcccaaaagtctgttctgatggcactgagttttcattgttctggatgtataagtctgtgtgtcaggtacagctgggcccagccagcttgagtcactcttgtacaagcttgtttttttctgtcttgtgaatgcacttgataatttaaaaataaaaatatctgtttctctgca

SEQ ID NO: 363697 - DNA, 6459 bp, Homo sapiens
tgcggcacagagccgcggcttgctttcaggacacgggtcgctggcgggttaggtggctgcgtggccgcctcacttcgcgcacgcgccgctaggctgggggagttgatttgcactgctccgggtgtcggctccggcgggacgggcggttctgcgtacccctctccagtgtcaacctggggctgaatcttcaacctgtcaaagccttcttaattatgtctgagaaaagtactaaaataggtgccattttaaattcccagacaaggaaaaaccaaggattagaaattaagtagcttgcccaaggccacacatcagatcctgattgagtcaatgctttgcattctcagtcctctgcataaagctgagagatgcctacagctgagagtgaagcaaaagtaaaaaccaaagttcgctttgaagaattgcttaagacccacagtgatctaatgcgtgaaaagaaaaaactgaagaaaaaacttgtcaggtctgaagaaaacatctcacctgacactattagaagcaatcttcactatatgaaagaaactacaagtgatgatcccgacactattagaagcaatcttccccatattaaagaaactacaagtgatgatgtaagtgctgctaacactaacaacctgaagaagagcacgagagtcactaaaaacaaattgaggaacacacagttagcaactgaaaatcctaatggtgatgctagtgtagaggaagacaaacaaggaaagccaaataaaaaggtgataaagacggtgccccagttgactacacaagacctgaaaccggaaactcctgagaataaggttgattctacacaccagaaaacacatacaaagccacagccaggcgttgatcatcagaaaagtgagaaggcaaatgagggaagagaagagactgatttagaagaggatgaagaattgatgcaagcatatcagtgccatgtaactgaagaaatggcaaaggagattaagaggaaaataagaaagaaactgaaagaacagttgacttactttccctcagatactttattccatgatgacaaactaagcagtgaaaaaaggaaaaagaaaaaggaagttccagtcttctctaaagctgaaacaagtacattgaccatctctggtgacacagttgaaggtgaacaaaagaaagaatcttcagttagatcagtttcttcagattctcatcaagatgatgaaataagctcaatggaacaaagcacagaagacagcatgcaagatgatacaaaacctaaaccaaaaaaaacaaaaaagaagactaaagcagttgcagataataatgaagatgttgatggtgatggtgttcatgaaataacaagccgagatagcccggtttatcccaaatgtttgcttgatgatgaccttgtcttgggagtttacattcaccgaactgatagacttaagtcagattttatgatttctcacccaatggtaaaaattcatgtggttgatgagcatactggtcaatatgtcaagaaagatgatagtggacggcctgtttcatcttactatgaaaaagagaatgtggattatattcttcctattatgacccagccatatgattttaaacagttaaaatcaagacttccagagtgggaagaacaaattgtatttaatgaaaattttccctatttgcttcgaggctctgatgagagtcctaaagtcatcctgttctttgagattcttgatttcttaagcgtggatgaaattaagaataattctgaggttcaaaaccaagaatgtggctttcggaaaattgcctgggcatttcttaagcttctgggagccaatggaaatgcaaacatcaactcaaaacttcgcttgcagctatattacccacctactaagcctcgatccccattaagtgttgttgaggcatttgaatggtggtcaaaatgtccaagaaatcattacccatcaacactgtacgtaactgtaagaggactgaaagttccagactgtataaagccatcttaccgctctatgatggctcttcaggaggaaaaaggtaaaccagtgcattgtgaacgtcaccatgagtcaagctcagtagacacagaacctggattagaagagtcaaaggaagtaataaagtggaaacgactccctgggcaggcttgccgtatcccaaacaaacacctcttctcactaaatgcaggagaacgaggatgtttttgtcttgatttctcccacaatggaagaatattagcagcagcttgtgccagccgggatggatatccaattattttatatgaaattccttctggacgtttcatgagagaattgtgtggccacctcaatatcatttatgatctttcctggtcaaaagatgatcactacatccttacttcatcatctgatggcactgccaggatatggaaaaatgaaataaacaatacaaatactttcagagttttacctcatccttcttttgtttacacggctaaattccatccagctgtaagagagctagtagttacaggatgctatgattccatgatacggatatggaaagttgagatgagagaagattctgccatattggtccgacagtttgatgttcacaaaagttttatcaactcactttgttttgatactgaaggtcatcatatgtattcaggagattgtacaggggtgattgttgtttggaatacctatgtcaagattaatgatttggaacattcagtgcaccactggactataaataaggaaattaaagaaactgagtttaagggaattccaataagttatttggagattcatcccaatggaaaacgtttgttaatccataccaaagacagtactttgagaattatggatctccggatattagtagcaaggaagtttgtaggagcagcaaattatcgggagaagattcatagtactttgactccatgtgggacttttctgtttgctggaagtgaggatggtatagtgtatgtttggaacccagaaacaggagaacaagtagccatgtattctgacttgccattcaagtcacccattcgagacatttcttatcatccatttgaaaatatggttgcattctgtgcatttgggcaaaatgagccaattcttctgtatatttacgatttccatgttgcccagcaggaggctgaaatgttcaaacgctacaatggaacatttccattacctggaatacaccaaagtcaagatgccctatgtacctgtccaaaactaccccatcaaggctcttttcagattgatgaatttgtccacactgaaagttcttcaacgaagatgcagctagtaaaacagaggcttgaaactgtcacagaggtgatacgttcctgtgctgcaaaagtcaacaaaaatctctcatttacttcaccaccagcagtttcctcacaacagtctaagttaaagcagtcaaacatgctgaccgctcaagagattctacatcagtttggtttcactcagaccgggattatcagcatagaaagaaagccttgtaaccatcaggtagatacagcaccaacggtagtggctctttatgactacacagcgaatcgatcagatgaactaaccatccatcgcggagacattatccgagtgtttttcaaagataatgaagactggtggtatggcagcataggaaagggacaggaaggttattttccagctaatcatgtggctagtgaaacactgtatcaagaactgcctcctgagataaaggagcgatcccctcctttaagccctgaggaaaaaactaaaatagaaaaatctccagctcctcaaaaggtaaaataaaacaaaacagctcacagagacacctccttcttccccctgcttctgcctccatgagtaactacctatatgacgtgctgctgctgagaccaaggaatgaatagtgccaaatcttgctgaagaatgatcttgcagaaatctgattgtgaagaaggaaatctaaaaaggccaaacaagcttcagtagagataacaccaggaaagcagttactcaaacaagactgaaagagaagcaatcaatcaataagaacaagtcccaggacttcagactaggctcagaatctatgacacattctgaaatgagaaaagaacagagccatgaggaccaaggacacataatggatacacggatgaggaagaacaagcaagcaggcagaaaagtcactctaatagagtgtgccagctgtcacttttctcaggagtggtcgatggagttgactgctaccttaaccagatttgccatcgttctgaaactgccgtgtgttttctaaggacaaccaggtgttaagcctttctctttagaagaaggacagtaacctttctgttaaagaattgaagaaaagttaagagctgccgaaatgcacagaggtgaaaatgacaaaccaaatggaatttctcttcagagttcagaattttcagatactaaggaggaagaaaggatccactacttcttgttcttatgaatgactctagaaaaatcagaatcaagttgtgggtggaaaaatcaacgtggcctttgagttcagttgttataaaccattgtgactattgttggtcaaagtattggtacttatattgttagtaattgcatcataattacattaccagtgttggaaaactaatgaagaaaacactgtaattgctactcagcaaatgtgaataaaaggtgtttgcgttattaggatgtctgttaagtaatcatttaatattattatattggtaatggttgtatgtgtgatgctatgcccagaatatgaagtatctgtttttgaaattcactttatttaaaagataagcagctgactgggcacggtgcctcatgcctgtaatcctagcaccttgggaggctgaggcaggtggatcacctaaggtcaggagttcaacaacaccagcctgaccaacatggtgaaaccccatctctactaaaaatacaaaaatcagccgggtctcatggcaggcacctgtaatcccatctactgaggcaggagaattgcttgacccaggaggcagaggttgcagtgagccaagatcacgccattgcactccagcctgggggacagagcaagactctatctccaaaaaacaaaaaagataagcagctttagaatatggcgcattcaaaacagtctcagtaacaaagacattaaaagaaaacaatttactttctaattaaaattttgtgtttcttaagatcaaatcatataggtaacttcatagacctaaattaaaagtgatttttggctggactggcaacaatgttcccaatgtctttactttttaaaaaaggcttttcatatttaagcacatacctattttgtagacttacattgtttaatatttattttaatcttaatatttttacattattatattgcattatttattttttctaagttccagaataatagtgtcattattatagactatatgttttgaagtttgatattataatgggatattcattttttgttcttttcttgactcctttctcaagtgtgtgataaggtctgctgataaaatatttaaccccaagaaagtgaaaactaatataaaattagaaagacctatccaaattagacagtcaattccattaaaataagaagtgagaaaaacaatgttgggcattgaggtgtaaattttgcccagatgtatacccagtgtgaaatatcttctaataaaaatatatttggctcttatccctgcacatgtagaggcataaaaattggtaaacatgtcccgctgtgtagaactttaaaaaaaaggcatttttgaaagtgttgagtggcactgataactggtgaagcctacagccatccgcccaaaagtctgttctgatggcactgagttttcattgttctggatgtataagtctgtgtgtcaggtacagctgggcccagccagcttgagtcactcttgtacaagcttgtttttttctgtcttgtgaatgcacttgataatttaaaaataaaaatatctgtttctctgcagtttcagctaataattttgagatatgtgttgattttctgattgaatcaccaagaatttcaacaagtttagaaataatttaagatgaatgaaaaatatgtcagggggagctaagcatttgctaagctcttgatgtttatatgaaaaataaagggttgtttttatattgcaactactaaagagaaaaatagcagttgaagcaaacaccaggaaaatttggctctactgaaagcccagtccttttcccctttgtctcgctgacaaagtaagactagggttatgttcatgaatagattaataaaagatgtttctttaccacacaatctgagatgagatggggtgggggagatcatgacagtgccctccaagcaatagatccagctgataatcaagcagaaaatcagacaccagaatccatttgatgatgtacggcattaaacatttccttataacaaatt

SEQ ID NO: 363698 - DNA, 3729 bp, Homo sapiens
tgcggcacagagccgcggcttgctttcaggacacgggtcgctggcgggttaggtggctgcgtggccgcctcacttcgcgcacgcgccgctaggctgggggagttgatttgcactgctccgggtgtcggctccggcgggacgggcggttctgcgtacccctctccagtgtcaacctggggctgaatcttcaacctgtcaaagccttcttaattatgtctgagaaaagtactaaaataggtgccattttaaattcccagacaaggaaaaaccaaggattagaaattaagtagcttgcccaaggccacacatcagatcctgattgagtcaatgctttgcattctcagtcctctgcataaagctgagagatgcctacagctgagagtgaagcaaaagtaaaaaccaaagttcgctttgaagaattgcttaagacccacagtgatctaatgcgtgaaaagaaaaaactgaagaaaaaacttgtcaggtctgaagaaaacatctcacctgacactattagaagcaatcttcactatatgaaagaaactacaagtgatgatcccgacactattagaagcaatcttccccatattaaagaaactacaagtgatgatgtaagtgctgctaacactaacaacctgaagaagagcacgagagtcactaaaaacaaattgaggaacacacagttagcaactgaaaatcctaatggtgatgctagtgtagaggaagacaaacaaggaaagccaaataaaaaggtgataaagacggtgccccagttgactacacaagacctgaaaccggaaactcctgagaataaggttgattctacacaccagaaaacacatacaaagccacagccaggcgttgatcatcagaaaagtgagaaggcaaatgagggaagagaagagactgatttagaagaggatgaagaattgatgcaagcatatcagtgccatgtaactgaagaaatggcaaaggagattaagaggaaaataagaaagaaactgaaagaacagttgacttactttccctcagatactttattccatgatgacaaactaagcagtgaaaaaaggaaaaagaaaaaggaagttccagtcttctctaaagctgaaacaagtacattgaccatctctggtgacacagttgaaggtgaacaaaagaaagaatcttcagttagatcagtttcttcagattctcatcaagatgatgaaataagctcaatggaacaaagcacagaagacagcatgcaagatgatacaaaacctaaaccaaaaaaaacaaaaaagaagactaaagcagttgcagataataatgaagatgttgatggtgatggtgttcatgaaataacaagccgagatagcccggtttatcccaaatgtttgcttgatgatgaccttgtcttgggagtttacattcaccgaactgatagacttaagtcagattttatgatttctcacccaatggtaaaaattcatgtggttgatgagcatactggtcaatatgtcaagaaagatgatagtggacggcctgtttcatcttactatgaaaaagagaatgtggattatattcttcctattatgacccagccatatgattttaaacagttaaaatcaagacttccagagtgggaagaacaaattgtatttaatgaaaattttccctatttgcttcgaggctctgatgagagtcctaaagtcatcctgttctttgagattcttgatttcttaagcgtggatgaaattaagaataattctgaggttcaaaaccaagaatgtggctttcggaaaattgcctgggcatttcttaagcttctgggagccaatggaaatgcaaacatcaactcaaaacttcgcttgcagctatattacccacctactaagcctcgatccccattaagtgttgttgaggcatttgaatggtggtcaaaatgtccaagaaatcattacccatcaacactgtacgtaactgtaagaggactgaaagttccagactgtataaagccatcttaccgctctatgatggctcttcaggaggaaaaaggtaaaccagtgcattgtgaacgtcaccatgagtcaagctcagtagacacagaacctggattagaagagtcaaaggaagtaataaagtggaaacgactccctgggcaggcttgccgtatcccaaacaaacacctcttctcactaaatgcaggagaacgaggatgtttttgtcttgatttctcccacaatggaagaatattagcagcagcttgtgccagccgggatggatatccaattattttatatgaaattccttctggacgtttcatgagagaattgtgtggccacctcaatatcatttatgatctttcctggtcaaaagatgatcactacatccttacttcatcatctgatggcactgccaggatatggaaaaatgaaataaacaatacaaatactttcagagttttacctcatccttcttttgtttacacggctaaattccatccagctgtaagagagctagtagttacaggatgctatgattccatgatacggatatggaaagttgagatgagagaagattctgccatattggtccgacagtttgatgttcacaaaagttttatcaactcactttgttttgatactgaaggtcatcatatgtattcaggagattgtacaggggtgattgttgtttggaatacctatgtcaagattaatgatttggaacattcagtgcaccactggactataaataaggaaattaaagaaactgagtttaagggaattccaataagttatttggagattcatcccaatggaaaacgtttgttaatccataccaaagacagtactttgagaattatggatctccggatattagtagcaaggaagtttgtaggagcagcaaattatcgggagaagattcatagtactttgactccatgtgggacttttctgtttgctggaagtgaggatggtatagtgtatgtttggaacccagaaacaggagaacaagtagccatgtattctgacttgccattcaagtcacccattcgagacatttcttatcatccatttgaaaatatggttgcattctgtgcatttgggcaaaatgagccaattcttctgtatatttacgatttccatgttgcccagcaggaggctgaaatgttcaaacgctacaatggaacatttccattacctggaatacaccaaagtcaagatgccctatgtacctgtccaaaactaccccatcaaggctcttttcagattgatgaatttgtccacactgaaagttcttcaacgaagatgcagctagtaaaacagaggcttgaaactgtcacagaggtgatacgttcctgtgctgcaaaagtcaacaaaaatctctcatttacttcaccaccagcagtttcctcacaacagtctaagttaaagcagtcaaacatgctgaccgctcaagagattctacatcagtttggtttcactcagaccgacagtcactttgctgaattcaacacatgtatattatggtggaaaaagcactagactcagggtcagccagccagaagaactgagccgacctgggatcccaccacttcctaactgttttgttaggtagttcactttctctcttcggataaatgtctccacatttcctacttcatagaattgtcagaatcaacacaatacatttaatactttgaaactcataaaatattgggagaataaacagtatgaggttatggga

SEQ ID NO: 363699 - DNA, 2083 bp, Homo sapiens
tggtcacatacctgaaagctgactttacttataaatgagtgtttgaactctctggagaactacttccttggtttttcatgggagcaaatatattgtcctgatagacaatatatgttcaggacaggcatagatattcctgttcagaacaggcatattctctccccattcaggaagttggtgggttttcagcatgtgaatattgactgtgttgtcttttctcattttttacttactacttgtttttcctcttcttccacagcaatcaatcaataagaacaagtcccaggacttcagactaggctcagaatctatgacacattctgaaatgagaaaagaacagagccatgaggaccaaggacacataatggatacacggatgaggaagaacaagcaagcaggcagaaaagtcactctaatagagtaaagaattgaagaaaagttaagagctgccgaaatgcacagaggtgaaaatgacaaaccaaatggaatttctcttcagagttcagaattttcagatactaaggaggaagaaaggatccactacttcttgttcttatgaatgactctagaaaaatcagaatcaagttgtgggtggaaaaatcaacgtggcctttgagttcagttgttataaaccattgtgactattgttggtcaaagtattggtacttatattgttagtaattgcatcataattacattaccagtgttggaaaactaatgaagaaaacactgtaattgctactcagcaaatgtgaataaaaggtgtttgcgttattaggatgtctgttaagtaatcatttaatattattatattggtaatggttgtatgtgtgatgctatgcccagaatatgaagtatctgtttttgaaattcactttatttaaaagataagcagctgactgggcacggtgcctcatgcctgtaatcctagcaccttgggaggctgaggcaggtggatcacctaaggtcaggagttcaacaacaccagcctgaccaacatggtgaaaccccatctctactaaaaatacaaaaatcagccgggtctcatggcaggcacctgtaatcccatctactgaggcaggagaattgcttgacccaggaggcagaggttgcagtgagccaagatcacgccattgcactccagcctgggggacagagcaagactctatctccaaaaaacaaaaaagataagcagctttagaatatggcgcattcaaaacagtctcagtaacaaagacattaaaagaaaacaatttactttctaattaaaattttgtgtttcttaagatcaaatcatataggtaacttcatagacctaaattaaaagtgatttttggctggactggcaacaatgttcccaatgtctttactttttaaaaaaggcttttcatatttaagcacatacctattttgtagacttacattgtttaatatttattttaatcttaatatttttacattattatattgcattatttattttttctaagttccagaataatagtgtcattattatagactatatgttttgaagtttgatattataatgggatattcattttttgttcttttcttgactcctttctcaagtgtgtgataaggtctgctgataaaatatttaaccccaagaaagtgaaaactaatataaaattagaaagacctatccaaattagacagtcaattccattaaaataagaagtgagaaaaacaatgttgggcattgaggtgtaaattttgcccagatgtatacccagtgtgaaatatcttctaataaaaatatatttggctcttatccctgcacatgtagaggcataaaaattggtaaacatgtcccgctgtgtagaactttaaaaaaaaggcatttttgaaagtgttgagtggcactgataactggtgaagcctacagccatccgcccaaaagtctgttctgatggcactgagttttcattgttctggatgtataagtctgtgtgtcaggtacagctgggcccagccagcttgagtcactcttgtacaagcttgtttttttctgtcttgtgaatgcacttgataatttaaaaataaaaatatctgtttctctgca

SEQ ID NO: 363700 - DNA, 1997 bp, Homo sapiens
atcctcttgaaatctgtaagaaaagtaatgcttgtttaaagatagtgccaaatcttgctgaagaatgatcttgcagaaatctgattgtgaagaaggaaatctaaaaaggccaaacaagcttcagtagagataacaccaggaaagcagttactcaaacaagactgaaagagaagcaatcaatcaataagaacaagtcccaggacttcagactaggctcagaatctatgacacattctgaaatgagaaaagaacagagccatgaggaccaaggacacataatggatacacggatgaggaagaacaagcaagcaggcagaaaagtcactctaatagagtaaagaattgaagaaaagttaagagctgccgaaatgcacagaggtgaaaatgacaaaccaaatggaatttctcttcagagttcagaattttcagatactaaggaggaagaaaggatccactacttcttgttcttatgaatgactctagaaaaatcagaatcaagttgtgggtggaaaaatcaacgtggcctttgagttcagttgttataaaccattgtgactattgttggtcaaagtattggtacttatattgttagtaattgcatcataattacattaccagtgttggaaaactaatgaagaaaacactgtaattgctactcagcaaatgtgaataaaaggtgtttgcgttattaggatgtctgttaagtaatcatttaatattattatattggtaatggttgtatgtgtgatgctatgcccagaatatgaagtatctgtttttgaaattcactttatttaaaagataagcagctgactgggcacggtgcctcatgcctgtaatcctagcaccttgggaggctgaggcaggtggatcacctaaggtcaggagttcaacaacaccagcctgaccaacatggtgaaaccccatctctactaaaaatacaaaaatcagccgggtctcatggcaggcacctgtaatcccatctactgaggcaggagaattgcttgacccaggaggcagaggttgcagtgagccaagatcacgccattgcactccagcctgggggacagagcaagactctatctccaaaaaacaaaaaagataagcagctttagaatatggcgcattcaaaacagtctcagtaacaaagacattaaaagaaaacaatttactttctaattaaaattttgtgtttcttaagatcaaatcatataggtaacttcatagacctaaattaaaagtgatttttggctggactggcaacaatgttcccaatgtctttactttttaaaaaaggcttttcatatttaagcacatacctattttgtagacttacattgtttaatatttattttaatcttaatatttttacattattatattgcattatttattttttctaagttccagaataatagtgtcattattatagactatatgttttgaagtttgatattataatgggatattcattttttgttcttttcttgactcctttctcaagtgtgtgataaggtctgctgataaaatatttaaccccaagaaagtgaaaactaatataaaattagaaagacctatccaaattagacagtcaattccattaaaataagaagtgagaaaaacaatgttgggcattgaggtgtaaattttgcccagatgtatacccagtgtgaaatatcttctaataaaaatatatttggctcttatccctgcacatgtagaggcataaaaattggtaaacatgtcccgctgtgtagaactttaaaaaaaaggcatttttgaaagtgttgagtggcactgataactggtgaagcctacagccatccgcccaaaagtctgttctgatggcactgagttttcattgttctggatgtataagtctgtgtgtcaggtacagctgggcccagccagcttgagtcactcttgtacaagcttgtttttttctgtcttgtgaatgcacttgataatttaaaaataaaaatatctgtttctctgca

SEQ ID NO: 363701 - DNA, 1980 bp, Homo sapiens
tggtcacatacctgaaagctgactttacttataaatgagtgtttgaactctctggagaactacttccttggtttttcatgggagcaaatatattgtcctgatagacaatatatgttcaggacaggcatagatattcctgttcagaacaggcatattctctccccattcaggaagttggtgggttttcagcatgtgaatattgactgtgttgtcttttctcattttttacttactacttgtttttcctcttcttccacagcaatcaatcaataagaacaagtcccaggacttcagactaggctcagaatctatgacacataaagaattgaagaaaagttaagagctgccgaaatgcacagaggtgaaaatgacaaaccaaatggaatttctcttcagagttcagaattttcagatactaaggaggaagaaaggatccactacttcttgttcttatgaatgactctagaaaaatcagaatcaagttgtgggtggaaaaatcaacgtggcctttgagttcagttgttataaaccattgtgactattgttggtcaaagtattggtacttatattgttagtaattgcatcataattacattaccagtgttggaaaactaatgaagaaaacactgtaattgctactcagcaaatgtgaataaaaggtgtttgcgttattaggatgtctgttaagtaatcatttaatattattatattggtaatggttgtatgtgtgatgctatgcccagaatatgaagtatctgtttttgaaattcactttatttaaaagataagcagctgactgggcacggtgcctcatgcctgtaatcctagcaccttgggaggctgaggcaggtggatcacctaaggtcaggagttcaacaacaccagcctgaccaacatggtgaaaccccatctctactaaaaatacaaaaatcagccgggtctcatggcaggcacctgtaatcccatctactgaggcaggagaattgcttgacccaggaggcagaggttgcagtgagccaagatcacgccattgcactccagcctgggggacagagcaagactctatctccaaaaaacaaaaaagataagcagctttagaatatggcgcattcaaaacagtctcagtaacaaagacattaaaagaaaacaatttactttctaattaaaattttgtgtttcttaagatcaaatcatataggtaacttcatagacctaaattaaaagtgatttttggctggactggcaacaatgttcccaatgtctttactttttaaaaaaggcttttcatatttaagcacatacctattttgtagacttacattgtttaatatttattttaatcttaatatttttacattattatattgcattatttattttttctaagttccagaataatagtgtcattattatagactatatgttttgaagtttgatattataatgggatattcattttttgttcttttcttgactcctttctcaagtgtgtgataaggtctgctgataaaatatttaaccccaagaaagtgaaaactaatataaaattagaaagacctatccaaattagacagtcaattccattaaaataagaagtgagaaaaacaatgttgggcattgaggtgtaaattttgcccagatgtatacccagtgtgaaatatcttctaataaaaatatatttggctcttatccctgcacatgtagaggcataaaaattggtaaacatgtcccgctgtgtagaactttaaaaaaaaggcatttttgaaagtgttgagtggcactgataactggtgaagcctacagccatccgcccaaaagtctgttctgatggcactgagttttcattgttctggatgtataagtctgtgtgtcaggtacagctgggcccagccagcttgagtcactcttgtacaagcttgtttttttctgtcttgtgaatgcacttgataatttaaaaataaaaatatctgtttctctgca

SEQ ID NO: 363702 - DNA, 1888 bp, Homo sapiens
ttaaacaattgctaatgatacaaaaagatgctaacaatgtttgagaggcaaactagaagataggaaattagtattttggtcttttttagttgtgtttgtatgtgtttgtgttttacacaatgtcctttattacctgtgctgttgcctgagcacactaagatttggttgtagtcagaagacattattcaagtttatttagtacattttgtgtatttttctttccagttaaagaattgaagaaaagttaagagctgccgaaatgcacagaggtgaaaatgacaaaccaaatggaatttctcttcagagttcagaattttcagatactaaggaggaagaaaggatccactacttcttgttcttatgaatgactctagaaaaatcagaatcaagttgtgggtggaaaaatcaacgtggcctttgagttcagttgttataaaccattgtgactattgttggtcaaagtattggtacttatattgttagtaattgcatcataattacattaccagtgttggaaaactaatgaagaaaacactgtaattgctactcagcaaatgtgaataaaaggtgtttgcgttattaggatgtctgttaagtaatcatttaatattattatattggtaatggttgtatgtgtgatgctatgcccagaatatgaagtatctgtttttgaaattcactttatttaaaagataagcagctgactgggcacggtgcctcatgcctgtaatcctagcaccttgggaggctgaggcaggtggatcacctaaggtcaggagttcaacaacaccagcctgaccaacatggtgaaaccccatctctactaaaaatacaaaaatcagccgggtctcatggcaggcacctgtaatcccatctactgaggcaggagaattgcttgacccaggaggcagaggttgcagtgagccaagatcacgccattgcactccagcctgggggacagagcaagactctatctccaaaaaacaaaaaagataagcagctttagaatatggcgcattcaaaacagtctcagtaacaaagacattaaaagaaaacaatttactttctaattaaaattttgtgtttcttaagatcaaatcatataggtaacttcatagacctaaattaaaagtgatttttggctggactggcaacaatgttcccaatgtctttactttttaaaaaaggcttttcatatttaagcacatacctattttgtagacttacattgtttaatatttattttaatcttaatatttttacattattatattgcattatttattttttctaagttccagaataatagtgtcattattatagactatatgttttgaagtttgatattataatgggatattcattttttgttcttttcttgactcctttctcaagtgtgtgataaggtctgctgataaaatatttaaccccaagaaagtgaaaactaatataaaattagaaagacctatccaaattagacagtcaattccattaaaataagaagtgagaaaaacaatgttgggcattgaggtgtaaattttgcccagatgtatacccagtgtgaaatatcttctaataaaaatatatttggctcttatccctgcacatgtagaggcataaaaattggtaaacatgtcccgctgtgtagaactttaaaaaaaaggcatttttgaaagtgttgagtggcactgataactggtgaagcctacagccatccgcccaaaagtctgttctgatggcactgagttttcattgttctggatgtataagtctgtgtgtcaggtacagctgggcccagccagcttgagtcactcttgtacaagcttgtttttttctgtcttgtgaatgcacttgataatttaaaaataaaaatatctgtttctctgca

SEQ ID NO: 363703 - DNA, 4136 bp, Homo sapiens
tgcggcacagagccgcggcttgctttcaggacacgggtcgctggcgggttaggtggctgcgtggccgcctcacttcgcgcacgcgccgctaggctgggggagttgatttgcactgctccgggtgtcggctccggcgggacgggcggttctgcgtacccctctccagtgtcaacctggggctgaatcttcaacctgtcaaagccttcttaattatgtctgagaaaagtactaaaataggtgccattttaaattcccagacaaggaaaaaccaaggattagaaattaagtagcttgcccaaggccacacatcagatcctgattgagtcaatgctttgcattctcagtcctctgcataaagctgagagatgcctacagctgagagtgaagcaaaagtaaaaaccaaagttcgctttgaagaattgcttaagacccacagtgatctaatgcgtgaaaagaaaaaactgaagaaaaaacttgtcaggtctgaagaaaacatctcacctgacactattagaagcaatcttcactatatgaaagaaactacaagtgatgatcccgacactattagaagcaatcttccccatattaaagaaactacaagtgatgatgtaagtgctgctaacactaacaacctgaagaagagcacgagagtcactaaaaacaaattgaggaacacacagttagcaactgaaaatcctaatggtgatgctagtgtagaggaagacaaacaaggaaagccaaataaaaaggtgataaagacggtgccccagttgactacacaagacctgaaaccggaaactcctgagaataaggttgattctacacaccagaaaacacatacaaagccacagccaggcgttgatcatcagaaaagtgagaaggcaaatgagggaagagaagagactgatttagaagaggatgaagaattgatgcaagcatatcagtgccatgtaactgaagaaatggcaaaggagattaagaggaaaataagaaagaaactgaaagaacagttgacttactttccctcagatactttattccatgatgacaaactaagcagtgaaaaaaggaaaaagaaaaaggaagttccagtcttctctaaagctgaaacaagtacattgaccatctctggtgacacagttgaaggtgaacaaaagaaagaatcttcagttagatcagtttcttcagattctcatcaagatgatgaaataagctcaatggaacaaagcacagaagacagcatgcaagatgatacaaaacctaaaccaaaaaaaacaaaaaagaagactaaagcagttgcagataataatgaagatgttgatggtgatggtgttcatgaaataacaagccgagatagcccggtttatcccaaatgtttgcttgatgatgaccttgtcttgggagtttacattcaccgaactgatagacttaagtcagattttatgatttctcacccaatggtaaaaattcatgtggttgatgagcatactggtcaatatgtcaagaaagatgatagtggacggcctgtttcatcttactatgaaaaagagaatgtggattatattcttcctattatgacccagccatatgattttaaacagttaaaatcaagacttccagagtgggaagaacaaattgtatttaatgaaaattttccctatttgcttcgaggctctgatgagagtcctaaagtcatcctgttctttgagattcttgatttcttaagcgtggatgaaattaagaataattctgaggttcaaaaccaagaatgtggctttcggaaaattgcctgggcatttcttaagcttctgggagccaatggaaatgcaaacatcaactcaaaacttcgcttgcagctatattacccacctactaagcctcgatccccattaagtgttgttgaggcatttgaatggtggtcaaaatgtccaagaaatcattacccatcaacactgtacgtaactgtaagaggactgaaagttccagactgtataaagccatcttaccgctctatgatggctcttcaggaggaaaaaggtaaaccagtgcattgtgaacgtcaccatgagtcaagctcagtagacacagaacctggattagaagagtcaaaggaagtaataaagtggaaacgactccctgggcaggcttgccgtatcccaaacaaacacctcttctcactaaatgcaggagaacgaggatgtttttgtcttgatttctcccacaatggaagaatattagcagcagcttgtgccagccgggatggatatccaattattttatatgaaattccttctggacgtttcatgagagaattgtgtggccacctcaatatcatttatgatctttcctggtcaaaagatgatcactacatccttacttcatcatctgatggcactgccaggatatggaaaaatgaaataaacaatacaaatactttcagagttttacctcatccttcttttgtttacacggctaaattccatccagctgtaagagagctagtagttacaggatgctatgattccatgatacggatatggaaagttgagatgagagaagattctgccatattggtccgacagtttgatgttcacaaaagttttatcaactcactttgttttgatactgaaggtcatcatatgtattcaggagattgtacaggggtgattgttgtttggaatacctatgtcaagattaatgatttggaacattcagtgcaccactggactataaataaggaaattaaagaaactgagtttaagggaattccaataagttatttggagattcatcccaatggaaaacgtttgttaatccataccaaagacagtactttgagaattatggatctccggatattagtagcaaggaagtttgtaggagcagcaaattatcgggagaagattcatagtactttgactccatgtgggacttttctgtttgctggaagtgaggatggtatagtgtatgtttggaacccagaaacaggagaacaagtagccatgtattctgacttgccattcaagtcacccattcgagacatttcttatcatccatttgaaaatatggttgcattctgtgcatttgggcaaaatgagccaattcttctgtatatttacgatttccatgttgcccagcaggaggctgaaatgttcaaacgctacaatggaacatttccattacctggaatacaccaaagtcaagatgccctatgtacctgtccaaaactaccccatcaaggctcttttcagattgatgaatttgtccacactgaaagttcttcaacgaagatgcagctagtaaaacagaggcttgaaactgtcacagaggtgatacgttcctgtgctgcaaaagtcaacaaaaatctctcatttacttcaccaccagcagtttcctcacaacagtctaagttaaagcagtcaaacatgctgaccgctcaagagattctacatcagtttggtttcactcagaccgggattatcagcatagaaagaaagccttgtaaccatcaggtagatacagcaccaacggtagtggctctttatgactacacagcgaatcgatcagatgaactaaccatccatcgcggagacattatccgagtgtttttcaaagataatgaagactggtggtatggcagcataggaaagggacaggaaggttattttccagctaatcatgtggctagtgaaacactgtatcaagaactgcctcctgagataaaggagcgatcccctcctttaagccctgaggaaaaaactaaaatagaaaaatctccagctcctcaaaaggtaaaataaaacaaaacagctcacagagacacctccttcttccccctgcttctgcctccatgagtaactacctatatgacgtgctgctgctgagaccaaggaatgaatagtgccaaatcttgctgaagaatgatcttgcagaaatctgattgtgaagaaggaaatctaaaaaggccaaacaagcttcagtagagataacaccaggaaagcagttactcaaacaagactgaaagagaaggttgtattccttttctttcatttcattttgtttttatgttttctggattactgaaataattaggaacatatggtatatctgtttcatttgtatattattgaacttaa

SEQ ID NO: 363704 - DNA, 3438 bp, Homo sapiens
  misc_feature (3425)..(3425): n is a, c, g, or t
tgcggcacagagccgcggcttgctttcaggacacgggtcgctggcgggttaggtggctgcgtggccgcctcacttcgcgcacgcgccgctaggctgggggagttgatttgcactgctccgggtgtcggctccggcgggacgggcggttctgcgtacccctctccagtgtcaacctggggctgaatcttcaacctgtcaaagccttcttaattatgtctgagaaaagtactaaaataggtgccattttaaattcccagacaaggaaaaaccaaggattagaaattaagtagcttgcccaaggccacacatcagatcctgattgagtcaatgctttgcattctcagtcctctgcataaagctgagagatgcctacagctgagagtgaagcaaaagtaaaaaccaaagttcgctttgaagaattgcttaagacccacagtgatctaatgcgtgaaaagaaaaaactgaagaaaaaacttgtcaggtctgaagaaaacatctcacctgacactattagaagcaatcttcactatatgaaagaaactacaagtgatgatcccgacactattagaagcaatcttccccatattaaagaaactacaagtgatgatgtaagtgctgctaacactaacaacctgaagaagagcacgagagtcactaaaaacaaattgaggaacacacagttagcaactgaaaatcctaatggtgatgctagtgtagaggaagacaaacaaggaaagccaaataaaaaggtgataaagacggtgccccagttgactacacaagacctgaaaccggaaactcctgagaataaggttgattctacacaccagaaaacacatacaaagccacagccaggcgttgatcatcagaaaagtgagaaggcaaatgagggaagagaagagactgatttagaagaggatgaagaattgatgcaagcatatcagtgccatgtaactgaagaaatggcaaaggagattaagaggaaaataagaaagaaactgaaagaacagttgacttactttccctcagatactttattccatgatgacaaactaagcagtgaaaaaaggaaaaagaaaaaggaagttccagtcttctctaaagctgaaacaagtacattgaccatctctggtgacacagttgaaggtgaacaaaagaaagaatcttcagttagatcagtttcttcagattctcatcaagatgatgaaataagctcaatggaacaaagcacagaagacagcatgcaagatgatacaaaacctaaaccaaaaaaaacaaaaaagaagactaaagcagttgcagataataatgaagatgttgatggtgatggtgttcatgaaataacaagccgagatagcccggtttatcccaaatgtttgcttgatgatgaccttgtcttgggagtttacattcaccgaactgatagacttaagtcagattttatgatttctcacccaatggtaaaaattcatgtggttgatgagcatactggtcaatatgtcaagaaagatgatagtggacggcctgtttcatcttactatgaaaaagagaatgtggattatattcttcctattatgacccagccatatgattttaaacagttaaaatcaagacttccagagtgggaagaacaaattgtatttaatgaaaattttccctatttgcttcgaggctctgatgagagtcctaaagtcatcctgttctttgagattcttgatttcttaagcgtggatgaaattaagaataattctgaggttcaaaaccaagaatgtggctttcggaaaattgcctgggcatttcttaagcttctgggagccaatggaaatgcaaacatcaactcaaaacttcgcttgcagctatattacccacctactaagcctcgatccccattaagtgttgttgaggcatttgaatggtggtcaaaatgtccaagaaatcattacccatcaacactgtacgtaactgtaagaggactgaaagttccagactgtataaagccatcttaccgctctatgatggctcttcaggaggaaaaaggtaaaccagtgcattgtgaacgtcaccatgagtcaagctcagtagacacagaacctggattagaagagtcaaaggaagtaataaagtggaaacgactccctgggcaggcttgccgtatcccaaacaaacacctcttctcactaaatgcaggagaacgaggatgtttttgtcttgatttctcccacaatggaagaatattagcagcagcttgtgccagccgggatggatatccaattattttatatgaaattccttctggacgtttcatgagagaattgtgtggccacctcaatatcatttatgatctttcctggtcaaaagatgatcactacatccttacttcatcatctgatggcactgccaggatatggaaaaatgaaataaacaatacaaatactttcagagttttacctcatccttcttttgtttacacggctaaattccatccagctgtaagagagctagtagttacaggatgctatgattccatgatacggatatggaaagttgagatgagagaagattctgccatattggtccgacagtttgatgttcacaaaagttttatcaactcactttgttttgatactgaaggtcatcatatgtattcaggagattgtacaggggtgattgttgtttggaatacctatgtcaagattaatgatttggaacattcagtgcaccactggactataaataaggaaattaaagaaactgagtttaagggaattccaataagttatttggagattcatcccaatggaaaacgtttgttaatccataccaaagacagtactttgagaattatggatctccggatattagtagcaaggaagtttgtaggagcagcaaattatcgggagaagattcatagtactttgactccatgtgggacttttctgtttgctggaagtgaggatggtatagtgtatgtttggaacccagaaacaggagaacaagtagccatgtattctgacttgccattcaagtcacccattcgagacatttcttatcatccatttgaaaatatggttgcattctgtgcatttgggcaaaatgagccaattcttctgtatatttacgatttccatgttgcccagcaggaggctgaaatgttcaaacgctacaatggaacatttccattacctggaatacaccaaagtcaagatgccctatgtacctgtccaaaactacccaatacaggcctctccaatgacgaattgacaacagaagatctccccgacagcagcaccaaccaggctcaacggtccgaggaacctccagtcgcaaagtacaaacccaataaacccgcgaacaaagaagtaggaagtacgcagacaaggtcgcgggaccgaccacccggcgaaacaacaatatagagggcaccncccgccgcgcgcg

SEQ ID NO: 363705 - DNA, 3603 bp, Homo sapiens
tgcggcacagagccgcggcttgctttcaggacacgggtcgctggcgggttaggtggctgcgtggccgcctcacttcgcgcacgcgccgctaggctgggggagttgatttgcactgctccgggtgtcggctccggcgggacgggcggttctgcgtacccctctccagtgtcaacctggggctgaatcttcaacctgtcaaagccttcttaattatgtctgagaaaagtactaaaataggtgccattttaaattcccagacaaggaaaaaccaaggattagaaattaagtagcttgcccaaggccacacatcagatcctgattgagtcaatgctttgcattctcagtcctctgcataaagctgagagatgcctacagctgagagtgaagcaaaagtaaaaaccaaagttcgctttgaagaattgcttaagacccacagtgatctaatgcgtgaaaagaaaaaactgaagaaaaaacttgtcaggtctgaagaaaacatctcacctgacactattagaagcaatcttcactatatgaaagaaactacaagtgatgatcccgacactattagaagcaatcttccccatattaaagaaactacaagtgatgatgtaagtgctgctaacactaacaacctgaagaagagcacgagagtcactaaaaacaaattgaggaacacacagttagcaactgaaaatcctaatggtgatgctagtgtagaggaagacaaacaaggaaagccaaataaaaaggtgataaagacggtgccccagttgactacacaagacctgaaaccggaaactcctgagaataaggttgattctacacaccagaaaacacatacaaagccacagccaggcgttgatcatcagaaaagtgagaaggcaaatgagggaagagaagagactgatttagaagaggatgaagaattgatgcaagcatatcagtgccatgtaactgaagaaatggcaaaggagattaagaggaaaataagaaagaaactgaaagaacagttgacttactttccctcagatactttattccatgatgacaaactaagcagtgaaaaaaggaaaaagaaaaaggaagttccagtcttctctaaagctgaaacaagtacattgaccatctctggtgacacagttgaaggtgaacaaaagaaagaatcttcagttagatcagtttcttcagattctcatcaagatgatgaaataagctcaatggaacaaagcacagaagacagcatgcaagatgatacaaaacctaaaccaaaaaaaacaaaaaagaagactaaagcagttgcagataataatgaagatgttgatggtgatggtgttcatgaaataacaagccgagatagcccggtttatcccaaatgtttgcttgatgatgaccttgtcttgggagtttacattcaccgaactgatagacttaagtcagattttatgatttctcacccaatggtaaaaattcatgtggttgatgagcatactggtcaatatgtcaagaaagatgatagtggacggcctgtttcatcttactatgaaaaagagaatgtggattatattcttcctattatgacccagccatatgattttaaacagttaaaatcaagacttccagagtgggaagaacaaattgtatttaatgaaaattttccctatttgcttcgaggctctgatgagagtcctaaagtcatcctgttctttgagattcttgatttcttaagcgtggatgaaattaagaataattctgaggttcaaaaccaagaatgtggctttcggaaaattgcctgggcatttcttaagcttctgggagccaatggaaatgcaaacatcaactcaaaacttcgcttgcagctatattacccacctactaagcctcgatccccattaagtgttgttgaggcatttgaatggtggtcaaaatgtccaagaaatcattacccatcaacactgtacgtaactgtaagaggactgaaagttccagactgtataaagccatcttaccgctctatgatggctcttcaggaggaaaaaggtaaaccagtgcattgtgaacgtcaccatgagtcaagctcagtagacacagaacctggattagaagagtcaaaggaagtaataaagtggaaacgactccctgggcaggcttgccgtatcccaaacaaacacctcttctcactaaatgcaggagaacgaggatgtttttgtcttgatttctcccacaatggaagaatattagcagcagcttgtgccagccgggatggatatccaattattttatatgaaattccttctggacgtttcatgagagaattgtgtggccacctcaatatcatttatgatctttcctggtcaaaagatgatcactacatccttacttcatcatctgatggcactgccaggatatggaaaaatgaaataaacaatacaaatactttcagagttttacctcatccttcttttgtttacacggctaaattccatccagctgtaagagagctagtagttacaggatgctatgattccatgatacggatatggaaagttgagatgagagaagattctgccatattggtccgacagtttgatgttcacaaaagttttatcaactcactttgttttgatactgaaggtcatcatatgtattcaggagattgtacaggggtgattgttgtttggaatacctatgtcaagattaatgatttggaacattcagtgcaccactggactataaataaggaaattaaagaaactgagtttaagggaattccaataagttatttggagattcatcccaatggaaaacgtttgttaatccataccaaagacagtactttgagaattatggatctccggatattagtagcaaggaagtttgtaggagcagcaaattatcgggagaagattcatagtactttgactccatgtgggacttttctgtttgctggaagtgaggatggtatagtgtatgtttggaacccagaaacaggagaacaagtagccatgtattctgacttgccattcaagtcacccattcgagacatttcttatcatccatttgaaaatatggttgcattctgtgcatttgggcaaaatgagccaattcttctgtatatttacgatttccatgttgcccagcaggaggctgaaatgttcaaacgctacaatggaacatttccattacctggaatacaccaaagtcaagatgccctatgtacctgtccaaaactaccccatcaaggctcttttcagattgatgaatttgtccacactgaaagttcttcaacgaagatgcagctagtaaaacagaggcttgaaactgtcacagaggtgatacgttcctgtgctgcaaaagtcaacaaaaatctctcatttacttcaccaccagcagtttcctcacaacagtctaagttaaagcagtcaaacatgctgaccgctcaagagattctacatcagtttggtttcactcagaccggtgagcccctttcttactttgacaattcttttaaatgttcagatgcttgttgtgttgatgaatatcacttatttctttagaaataaagctcataatggtcggtttttacacttgacaaattatattcta

SEQ ID NO: 363706 - DNA, 1315 bp, Homo sapiens
gggggaaacagaaaatatgtttctttatatagatataaaaataattatataatttccatttgggttgagtgctgtgaaggaagagaacaacctgctatgtgagaaaagggaaaattagatgagtttgtcaggaggtgttttatttacaggcagcatttaaacagacaggttaacaccagccaggtgaggaattagaggaagcttgcctcagaaacagcttcatgtgggaaggagcttgctgtgacggaggagctaaaggaagggtattatagctagaacataggcatctaaggggatatttgtcttgatttgaagccctggagatagatcaggaggtatggagccctgtagggcatataaaagacttattttatcctaaatgtattgggaaattttcaggggcttaagcattatcttcttcatgttttaaaggaaaaacctgttaatatttgtggaatactgattacaggctaggcacaccttagccatttttcatgcaaaatgatctttggcataagataattgtgattttacagataaggaaaatgaagtttagagatcttgagtaacttgtctaaagccacataacacgtaactaacagtggtagatgctactgtttatcagaaataaaaagttaacttagcaaaggagacttttagagtgagtggccaaaaaggtcagagggatacaggtgaatgttgtgtcactaaagtcaaaataaaaaatattttaagaaggaaagataggtgagtttttctaatgtagctagagaactcatgccgatatttacaagaacttatttcttaacatcctagtagtgtaggttgtgtgttatgatagagtcatttacaaaatcacatggctgtatcttttgtagctgagagtgaagcaaaagtaaaaaccaaagttcgctttgaagaattgcttaagacccacagtgatctaatgcgtgaaaagaaaaaactgaagaaaaaacttgtcaggtctgaagaaaacatctcaaaccaggagaaatcaatggccgtatggtaataattatccttttatgtttgaggcacactttcaaatgatagaatctttggcagcacacttgaaggaattaaaaatacagtgctcaaagactaagcaaatcagcaactaactacaacctgatccccttggaatcataaagagtctgtattggcatccacagttaatgctctatgccctctttatacctatctccctacttgagttgcactttttactactttgaccattatctcttctgtcctcacagaaaaaaataaacaggctcttgtgtaaatggtaaaa

SEQ ID NO: 363707 - DNA, 812 bp, Homo sapiens
tgcggcacagagccgcggcttgctttcaggacacgggtcgctggcgggttaggtggctgcgtggccgcctcacttcgcgcacgcgccgctaggctgggggagttgatttgcactgctccgggtgtcggctccggcgggacgggcggttctgcgtacccctctccagtgtcaacctggggctgaatcttcaacctgtcaaagccttcttaattatgtctgagaaaagtactaaaataggtgccattttaaattcccagacaaggaaaaaccaaggattagaaattaagtagcttgcccaaggccacacatcagatcctgattgagtcaatgctttgcattctcagtcctctgcataaagctgagagatgcctacagctgagagtgaagcaaaagtaaaaaccaaagttcgctttgaagaattgcttaagacccacagtgatctaatgcgtgaaaagaaaaaactgaagaaaaaacttgtcaggtctgaagaaaacatctcaaaccaggagaaatcaatggccgtatggtaataattatccttttatgtttgaggcacactttcaaatgatagaatctttggcagcacacttgaaggaattaaaaatacagtgctcaaagactaagcaaatcagcaactaactacaacctgatccccttggaatcataaagagtctgtattggcatccacagttaatgctctatgccctctttatacctatctccctacttgagttgcactttttactactttgaccattatctcttctgtcctcacagaaaaaaataaacaggctcttgtgtaaatggtaaaa

SEQ ID NO: 363708 - DNA, 713 bp, Homo sapiens
gagcatggtgctctgatagagaattcaatctttgcctttcctactcccgattcttatttaaatgcttttaaatcagatgtgtactgagtgtgtttatttccttttagagtgtcaacctggggctgaatcttcaacctgtcaaagccttcttaattatgtctgagaaaaggtgatcaatttgttatatttataagagccaaattatattaatagggttgtttcgagatgcataaaaatagaacaaaaatgtagaccatttaagaatccttatcaaaggttgtgctgcgtttagcattcctgtaaaaacatctattgtgaaaataaagctttcccctttcttttgagaaagagatgccaacgattttttcacctgttgcattaacagttgctgttactgcttgggcgttaggaggaagattgcttcttatgagtactctgggaaattttttaaagaatgcttgaaagaaattcaaataccaaaagtgtttttaaaccatacctagaatcttgtttatgaggaataatatttatgaagttagaatcttgtttacttatgaagaatcttgttgatttattcattgaattttgtatacaggatttttgtttgtctttttttcccttgcgataacatttggttaaggagcgaattatcaagcctctcagttttttctcccaatgatattgagccacatattggctgataatcaggttgt

SEQ ID NO: 363709 - DNA, 5530 bp, Homo sapiens
tgcggcacagagccgcggcttgctttcaggacacgggtcgctggcgggttaggtggctgcgtggccgcctcacttcgcgcacgcgccgctaggctgggggagttgatttgcactgctccgggtgtcggctccggcgggacgggcggttctgcgtacccctctccagtgtcaacctggggctgaatcttcaacctgtcaaagccttcttaattatgtctgagaaaaggatcctgattgagtcaatgctttgcattctcagtcctctgcataaagctgagagatgcctacagctgagagtgaagcaaaagtaaaaaccaaagttcgctttgaagaattgcttaagacccacagtgatctaatgcgtgaaaagaaaaaactgaagaaaaaacttgtcaggtctgaagaaaacatctcacctgacactattagaagcaatcttcactatatgaaagaaactacaagtgatgatcccgacactattagaagcaatcttccccatattaaagaaactacaagtgatgatgtaagtgctgctaacactaacaacctgaagaagagcacgagagtcactaaaaacaaattgaggaacacacagttagcaactgaaaatcctaatggtgatgctagtgtagaggaagacaaacaaggaaagccaaataaaaaggtgataaagacggtgccccagttgactacacaagacctgaaaccggaaactcctgagaataaggttgattctacacaccagaaaacacatacaaagccacagccaggcgttgatcatcagaaaagtgagaaggcaaatgagggaagagaagagactgatttagaagaggatgaagaattgatgcaagcatatcagtgccatgtaactgaagaaatggcaaaggagattaagaggaaaataagaaagaaactgaaagaacagttgacttactttccctcagatactttattccatgatgacaaactaagcagtgaaaaaaggaaaaagaaaaaggaagttccagtcttctctaaagctgaaacaagtacattgaccatctctggtgacacagttgaaggtgaacaaaagaaagaatcttcagttagatcagtttcttcagattctcatcaagatgatgaaataagctcaatggaacaaagcacagaagacagcatgcaagatgatacaaaacctaaaccaaaaaaaacaaaaaagaagactaaagcagttgcagataataatgaagatgttgatggtgatggtgttcatgaaataacaagccgagatagcccggtttatcccaaatgtttgcttgatgatgaccttgtcttgggagtttacattcaccgaactgatagacttaagtcagattttatgatttctcacccaatggtaaaaattcatgtggttgatgagcatactggtcaatatgtcaagaaagatgatagtggacggcctgtttcatcttactatgaaaaagagaatgtggattatattcttcctattatgacccagccatatgattttaaacagttaaaatcaagacttccagagtgggaagaacaaattgtatttaatgaaaattttccctatttgcttcgaggctctgatgagagtcctaaagtcatcctgttctttgagattcttgatttcttaagcgtggatgaaattaagaataattctgaggttcaaaaccaagaatgtggctttcggaaaattgcctgggcatttcttaagcttctgggagccaatggaaatgcaaacatcaactcaaaacttcgcttgcagctatattacccacctactaagcctcgatccccattaagtgttgttgaggcatttgaatggtggtcaaaatgtccaagaaatcattacccatcaacactgtacgtaactgtaagaggactgaaagttccagactgtataaagccatcttaccgctctatgatggctcttcaggaggaaaaaggtaaaccagtgcattgtgaacgtcaccatgagtcaagctcagtagacacagaacctggattagaagagtcaaaggaagtaataaagtggaaacgactccctgggcaggcttgccgtatcccaaacaaacacctcttctcactaaatgcaggagaacgaggatgtttttgtcttgatttctcccacaatggaagaatattagcagcagcttgtgccagccgggatggatatccaattattttatatgaaattccttctggacgtttcatgagagaattgtgtggccacctcaatatcatttatgatctttcctggtcaaaagatgatcactacatccttacttcatcatctgatggcactgccaggatatggaaaaatgaaataaacaatacaaatactttcagagttttacctcatccttcttttgtttacacggctaaattccatccagctgtaagagagctagtagttacaggatgctatgattccatgatacggatatggaaagttgagatgagagaagattctgccatattggtccgacagtttgatgttcacaaaagttttatcaactcactttgttttgatactgaaggtcatcatatgtattcaggagattgtacaggggtgattgttgtttggaatacctatgtcaagattaatgatttggaacattcagtgcaccactggactataaataaggaaattaaagaaactgagtttaagggaattccaataagttatttggagattcatcccaatggaaaacgtttgttaatccataccaaagacagtactttgagaattatggatctccggatattagtagcaaggaagtttgtaggagcagcaaattatcgggagaagattcatagtactttgactccatgtgggacttttctgtttgctggaagtgaggatggtatagtgtatgtttggaacccagaaacaggagaacaagtagccatgtattctgacttgccattcaagtcacccattcgagacatttcttatcatccatttgaaaatatggttgcattctgtgcatttgggcaaaatgagccaattcttctgtatatttacgatttccatgttgcccagcaggaggctgaaatgttcaaacgctacaatggaacatttccattacctggaatacaccaaagtcaagatgccctatgtacctgtccaaaactaccccatcaaggctcttttcagattgatgaatttgtccacactgaaagttcttcaacgaagatgcagctagtaaaacagaggcttgaaactgtcacagaggtgatacgttcctgtgctgcaaaagtcaacaaaaatctctcatttacttcaccaccagcagtttcctcacaacagtctaagttaaagcagtcaaacatgctgaccgctcaagagattctacatcagtttggtttcactcagaccgggattatcagcatagaaagaaagccttgtaaccatcaggtagatacagcaccaacggtagtggctctttatgactacacagcgaatcgatcagatgaactaaccatccatcgcggagacattatccgagtgtttttcaaagataatgaagactggtggtatggcagcataggaaagggacaggaaggttattttccagctaatcatgtggctagtgaaacactgtatcaagaactgcctcctgagataaaggagcgatcccctcctttaagccctgaggaaaaaactaaaatagaaaaatctccagctcctcaaaagcaatcaatcaataagaacaagtcccaggacttcagactaggctcagaatctatgacacattctgaaatgagaaaagaacagagccatgaggaccaaggacacataatggatacacggatgaggaagaacaagcaagcaggcagaaaagtcactctaatagagtaaagaattgaagaaaagttaagagctgccgaaatgcacagaggtgaaaatgacaaaccaaatggaatttctcttcagagttcagaattttcagatactaaggaggaagaaaggatccactacttcttgttcttatgaatgactctagaaaaatcagaatcaagttgtgggtggaaaaatcaacgtggcctttgagttcagttgttataaaccattgtgactattgttggtcaaagtattggtacttatattgttagtaattgcatcataattacattaccagtgttggaaaactaatgaagaaaacactgtaattgctactcagcaaatgtgaataaaaggtgtttgcgttattaggatgtctgttaagtaatcatttaatattattatattggtaatggttgtatgtgtgatgctatgcccagaatatgaagtatctgtttttgaaattcactttatttaaaagataagcagctgactgggcacggtgcctcatgcctgtaatcctagcaccttgggaggctgaggcaggtggatcacctaaggtcaggagttcaacaacaccagcctgaccaacatggtgaaaccccatctctactaaaaatacaaaaatcagccgggtctcatggcaggcacctgtaatcccatctactgaggcaggagaattgcttgacccaggaggcagaggttgcagtgagccaagatcacgccattgcactccagcctgggggacagagcaagactctatctccaaaaaacaaaaaagataagcagctttagaatatggcgcattcaaaacagtctcagtaacaaagacattaaaagaaaacaatttactttctaattaaaattttgtgtttcttaagatcaaatcatataggtaacttcatagacctaaattaaaagtgatttttggctggactggcaacaatgttcccaatgtctttactttttaaaaaaggcttttcatatttaagcacatacctattttgtagacttacattgtttaatatttattttaatcttaatatttttacattattatattgcattatttattttttctaagttccagaataatagtgtcattattatagactatatgttttgaagtttgatattataatgggatattcattttttgttcttttcttgactcctttctcaagtgtgtgataaggtctgctgataaaatatttaaccccaagaaagtgaaaactaatataaaattagaaagacctatccaaattagacagtcaattccattaaaataagaagtgagaaaaacaatgttgggcattgaggtgtaaattttgcccagatgtatacccagtgtgaaatatcttctaataaaaatatatttggctcttatccctgcacatgtagaggcataaaaattggtaaacatgtcccgctgtgtagaactttaaaaaaaaggcatttttgaaagtgttgagtggcactgataactggtgaagcctacagccatccgcccaaaagtctgttctgatggcactgagttttcattgttctggatgtataagtctgtgtgtcaggtacagctgggcccagccagcttgagtcactcttgtacaagcttgtttttttctgtcttgtgaatgcacttgataatttaaaaataaaaatatctgtttctctgca

SEQ ID NO: 363710 - DNA, 6506 bp, Homo sapiens
gggggaaacagaaaatatgtttctttatatagatataaaaataattatataatttccatttgggttgagtgctgtgaaggaagagaacaacctgctatgtgagaaaagggaaaattagatgagtttgtcaggaggtgttttatttacaggcagcatttaaacagacaggttaacaccagccaggtgaggaattagaggaagcttgcctcagaaacagcttcatgtgggaaggagcttgctgtgacggaggagctaaaggaagggtattatagctagaacataggcatctaaggggatatttgtcttgatttgaagccctggagatagatcaggaggtatggagccctgtagggcatataaaagacttattttatcctaaatgtattgggaaattttcaggggcttaagcattatcttcttcatgttttaaaggaaaaacctgttaatatttgtggaatactgattacaggctaggcacaccttagccatttttcatgcaaaatgatctttggcataagataattgtgattttacagataaggaaaatgaagtttagagatcttgagtaacttgtctaaagccacataacacgtaactaacagtggtagatgctactgtttatcagaaataaaaagttaacttagcaaaggagacttttagagtgagtggccaaaaaggtcagagggatacaggtgaatgttgtgtcactaaagtcaaaataaaaaatattttaagaaggaaagataggtgagtttttctaatgtagctagagaactcatgccgatatttacaagaacttatttcttaacatcctagtagtgtaggttgtgtgttatgatagagtcatttacaaaatcacatggctgtatcttttgtagctgagagtgaagcaaaagtaaaaaccaaagttcgctttgaagaattgcttaagacccacagtgatctaatgcgtgaaaagaaaaaactgaagaaaaaacttgtcaggtctgaagaaaacatctcacctgacactattagaagcaatcttcactatatgaaagaaactacaagtgatgatcccgacactattagaagcaatcttccccatattaaagaaactacaagtgatgatgtaagtgctgctaacactaacaacctgaagaagagcacgagagtcactaaaaacaaattgaggaacacacagttagcaactgaaaatcctaatggtgatgctagtgtagaggaagacaaacaaggaaagccaaataaaaaggtgataaagacggtgccccagttgactacacaagacctgaaaccggaaactcctgagaataaggttgattctacacaccagaaaacacatacaaagccacagccaggcgttgatcatcagaaaagtgagaaggcaaatgagggaagagaagagactgatttagaagaggatgaagaattgatgcaagcatatcagtgccatgtaactgaagaaatggcaaaggagattaagaggaaaataagaaagaaactgaaagaacagttgacttactttccctcagatactttattccatgatgacaaactaagcagtgaaaaaaggaaaaagaaaaaggaagttccagtcttctctaaagctgaaacaagtacattgaccatctctggtgacacagttgaaggtgaacaaaagaaagaatcttcagttagatcagtttcttcagattctcatcaagatgatgaaataagctcaatggaacaaagcacagaagacagcatgcaagatgatacaaaacctaaaccaaaaaaaacaaaaaagaagactaaagcagttgcagataataatgaagatgttgatggtgatggtgttcatgaaataacaagccgagatagcccggtttatcccaaatgtttgcttgatgatgaccttgtcttgggagtttacattcaccgaactgatagacttaagtcagattttatgatttctcacccaatggtaaaaattcatgtggttgatgagcatactggtcaatatgtcaagaaagatgatagtggacggcctgtttcatcttactatgaaaaagagaatgtggattatattcttcctattatgacccagccatatgattttaaacagttaaaatcaagacttccagagtgggaagaacaaattgtatttaatgaaaattttccctatttgcttcgaggctctgatgagagtcctaaagtcatcctgttctttgagattcttgatttcttaagcgtggatgaaattaagaataattctgaggttcaaaaccaagaatgtggctttcggaaaattgcctgggcatttcttaagcttctgggagccaatggaaatgcaaacatcaactcaaaacttcgcttgcagctatattacccacctactaagcctcgatccccattaagtgttgttgaggcatttgaatggtggtcaaaatgtccaagaaatcattacccatcaacactgtacgtaactgtaagaggactgaaagttccagactgtataaagccatcttaccgctctatgatggctcttcaggaggaaaaaggtaaaccagtgcattgtgaacgtcaccatgagtcaagctcagtagacacagaacctggattagaagagtcaaaggaagtaataaagtggaaacgactccctgggcaggcttgccgtatcccaaacaaacacctcttctcactaaatgcaggagaacgaggatgtttttgtcttgatttctcccacaatggaagaatattagcagcagcttgtgccagccgggatggatatccaattattttatatgaaattccttctggacgtttcatgagagaattgtgtggccacctcaatatcatttatgatctttcctggtcaaaagatgatcactacatccttacttcatcatctgatggcactgccaggatatggaaaaatgaaataaacaatacaaatactttcagagttttacctcatccttcttttgtttacacggctaaattccatccagctgtaagagagctagtagttacaggatgctatgattccatgatacggatatggaaagttgagatgagagaagattctgccatattggtccgacagtttgatgttcacaaaagttttatcaactcactttgttttgatactgaaggtcatcatatgtattcaggagattgtacaggggtgattgttgtttggaatacctatgtcaagattaatgatttggaacattcagtgcaccactggactataaataaggaaattaaagaaactgagtttaagggaattccaataagttatttggagattcatcccaatggaaaacgtttgttaatccataccaaagacagtactttgagaattatggatctccggatattagtagcaaggaagtttgtaggagcagcaaattatcgggagaagattcatagtactttgactccatgtgggacttttctgtttgctggaagtgaggatggtatagtgtatgtttggaacccagaaacaggagaacaagtagccatgtattctgacttgccattcaagtcacccattcgagacatttcttatcatccatttgaaaatatggttgcattctgtgcatttgggcaaaatgagccaattcttctgtatatttacgatttccatgttgcccagcaggaggctgaaatgttcaaacgctacaatggaacatttccattacctggaatacaccaaagtcaagatgccctatgtacctgtccaaaactaccccatcaaggctcttttcagattgatgaatttgtccacactgaaagttcttcaacgaagatgcagctagtaaaacagaggcttgaaactgtcacagaggtgatacgttcctgtgctgcaaaagtcaacaaaaatctctcatttacttcaccaccagcagtttcctcacaacagtctaagttaaagcagtcaaacatgctgaccgctcaagagattctacatcagtttggtttcactcagaccgggattatcagcatagaaagaaagccttgtaaccatcaggtagatacagcaccaacggtagtggctctttatgactacacagcgaatcgatcagatgaactaaccatccatcgcggagacattatccgagtgtttttcaaagataatgaagactggtggtatggcagcataggaaagggacaggaaggttattttccagctaatcatgtggctagtgaaacactgtatcaagaactgcctcctgagataaaggagcgatcccctcctttaagccctgaggaaaaaactaaaatagaaaaatctccagctcctcaaaaggtaaaataaaacaaaacagctcacagagacacctccttcttccccctgcttctgcctccatgagtaactacctatatgacgtgctgctgctgagaccaaggaatgaatagtgccaaatcttgctgaagaatgatcttgcagaaatctgattgtgaagaaggaaatctaaaaaggccaaacaagcttcagtagagataacaccaggaaagcagttactcaaacaagactgaaagagaagcaatcaatcaataagaacaagtcccaggacttcagactaggctcagaatctatgacacattctgaaatgagaaaagaacagagccatgaggaccaaggacacataatggatacacggatgaggaagaacaagcaagcaggcagaaaagtcactctaatagagtgtgccagctgtcacttttctcaggagtggtcgatggagttgactgctaccttaaccagatttgccatcgttctgaaactgccgtgtgttttctaaggacaaccaggtgttaagcctttctctttagaagaaggacagtaacctttctgttaaagaattgaagaaaagttaagagctgccgaaatgcacagaggtgaaaatgacaaaccaaatggaatttctcttcagagttcagaattttcagatactaaggaggaagaaaggatccactacttcttgttcttatgaatgactctagaaaaatcagaatcaagttgtgggtggaaaaatcaacgtggcctttgagttcagttgttataaaccattgtgactattgttggtcaaagtattggtacttatattgttagtaattgcatcataattacattaccagtgttggaaaactaatgaagaaaacactgtaattgctactcagcaaatgtgaataaaaggtgtttgcgttattaggatgtctgttaagtaatcatttaatattattatattggtaatggttgtatgtgtgatgctatgcccagaatatgaagtatctgtttttgaaattcactttatttaaaagataagcagctgactgggcacggtgcctcatgcctgtaatcctagcaccttgggaggctgaggcaggtggatcacctaaggtcaggagttcaacaacaccagcctgaccaacatggtgaaaccccatctctactaaaaatacaaaaatcagccgggtctcatggcaggcacctgtaatcccatctactgaggcaggagaattgcttgacccaggaggcagaggttgcagtgagccaagatcacgccattgcactccagcctgggggacagagcaagactctatctccaaaaaacaaaaaagataagcagctttagaatatggcgcattcaaaacagtctcagtaacaaagacattaaaagaaaacaatttactttctaattaaaattttgtgtttcttaagatcaaatcatataggtaacttcatagacctaaattaaaagtgatttttggctggactggcaacaatgttcccaatgtctttactttttaaaaaaggcttttcatatttaagcacatacctattttgtagacttacattgtttaatatttattttaatcttaatatttttacattattatattgcattatttattttttctaagttccagaataatagtgtcattattatagactatatgttttgaagtttgatattataatgggatattcattttttgttcttttcttgactcctttctcaagtgtgtgataaggtctgctgataaaatatttaaccccaagaaagtgaaaactaatataaaattagaaagacctatccaaattagacagtcaattccattaaaataagaagtgagaaaaacaatgttgggcattgaggtgtaaattttgcccagatgtatacccagtgtgaaatatcttctaataaaaatatatttggctcttatccctgcacatgtagaggcataaaaattggtaaacatgtcccgctgtgtagaactttaaaaaaaaggcatttttgaaagtgttgagtggcactgataactggtgaagcctacagccatccgcccaaaagtctgttctgatggcactgagttttcattgttctggatgtataagtctgtgtgtcaggtacagctgggcccagccagcttgagtcactcttgtacaagcttgtttttttctgtcttgtgaatgcacttgataatttaaaaataaaaatatctgtttctctgca

SEQ ID NO: 363711 - DNA, 5577 bp, Homo sapiens
ctcagatcgatcactcagatactttattccatgatgacaaactaagcagtgaaaaaaggaaaaagaaaaaggaagttccagtcttctctaaagctgaaacaaggtatttttgcattgataaatgtaaaatatcctcttagaaaaacactgttattttcaggttttgaatattatctgtggtttaacaaagaaaattcttacgcttttattagaagagcacgagagtcactaaaaacaaattgaggaacacacagttagcaactgaaaatcctaatggtgatgctagtgtagaggaagacaaacaaggaaagccaaataaaaaggtgataaagacggtgccccagttgactacacaagacctgaaaccggaaactcctgagaataaggttgattctacacaccagaaaacacatacaaagccacagccaggcgttgatcatcagaaaagtgagaaggcaaatgagggaagagaagagactgatttagaagaggatgaagaattgatgcaagcatatcagtgccatgtaactgaagaaatggcaaaggagattaagaggaaaataagaaagaaactgaaagaacagttgacttactttccctcagatactttattccatgatgacaaactaagcagtgaaaaaaggaaaaagaaaaaggaagttccagtcttctctaaagctgaaacaagtacattgaccatctctggtgacacagttgaaggtgaacaaaagaaagaatcttcagttagatcagtttcttcagattctcatcaagatgatgaaataagctcaatggaacaaagcacagaagacagcatgcaagatgatacaaaacctaaaccaaaaaaaacaaaaaagaagactaaagcagttgcagataataatgaagatgttgatggtgatggtgttcatgaaataacaagccgagatagcccggtttatcccaaatgtttgcttgatgatgaccttgtcttgggagtttacattcaccgaactgatagacttaagtcagattttatgatttctcacccaatggtaaaaattcatgtggttgatgagcatactggtcaatatgtcaagaaagatgatagtggacggcctgtttcatcttactatgaaaaagagaatgtggattatattcttcctattatgacccagccatatgattttaaacagttaaaatcaagacttccagagtgggaagaacaaattgtatttaatgaaaattttccctatttgcttcgaggctctgatgagagtcctaaagtcatcctgttctttgagattcttgatttcttaagcgtggatgaaattaagaataattctgaggttcaaaaccaagaatgtggctttcggaaaattgcctgggcatttcttaagcttctgggagccaatggaaatgcaaacatcaactcaaaacttcgcttgcagctatattacccacctactaagcctcgatccccattaagtgttgttgaggcatttgaatggtggtcaaaatgtccaagaaatcattacccatcaacactgtacgtaactgtaagaggactgaaagttccagactgtataaagccatcttaccgctctatgatggctcttcaggaggaaaaaggtaaaccagtgcattgtgaacgtcaccatgagtcaagctcagtagacacagaacctggattagaagagtcaaaggaagtaataaagtggaaacgactccctgggcaggcttgccgtatcccaaacaaacacctcttctcactaaatgcaggagaacgaggatgtttttgtcttgatttctcccacaatggaagaatattagcagcagcttgtgccagccgggatggatatccaattattttatatgaaattccttctggacgtttcatgagagaattgtgtggccacctcaatatcatttatgatctttcctggtcaaaagatgatcactacatccttacttcatcatctgatggcactgccaggatatggaaaaatgaaataaacaatacaaatactttcagagttttacctcatccttcttttgtttacacggctaaattccatccagctgtaagagagctagtagttacaggatgctatgattccatgatacggatatggaaagttgagatgagagaagattctgccatattggtccgacagtttgatgttcacaaaagttttatcaactcactttgttttgatactgaaggtcatcatatgtattcaggagattgtacaggggtgattgttgtttggaatacctatgtcaagattaatgatttggaacattcagtgcaccactggactataaataaggaaattaaagaaactgagtttaagggaattccaataagttatttggagattcatcccaatggaaaacgtttgttaatccataccaaagacagtactttgagaattatggatctccggatattagtagcaaggaagtttgtaggagcagcaaattatcgggagaagattcatagtactttgactccatgtgggacttttctgtttgctggaagtgaggatggtatagtgtatgtttggaacccagaaacaggagaacaagtagccatgtattctgacttgccattcaagtcacccattcgagacatttcttatcatccatttgaaaatatggttgcattctgtgcatttgggcaaaatgagccaattcttctgtatatttacgatttccatgttgcccagcaggaggctgaaatgttcaaacgctacaatggaacatttccattacctggaatacaccaaagtcaagatgccctatgtacctgtccaaaactaccccatcaaggctcttttcagattgatgaatttgtccacactgaaagttcttcaacgaagatgcagctagtaaaacagaggcttgaaactgtcacagaggtgatacgttcctgtgctgcaaaagtcaacaaaaatctctcatttacttcaccaccagcagtttcctcacaacagtctaagttaaagcagtcaaacatgctgaccgctcaagagattctacatcagtttggtttcactcagaccgggattatcagcatagaaagaaagccttgtaaccatcaggtagatacagcaccaacggtagtggctctttatgactacacagcgaatcgatcagatgaactaaccatccatcgcggagacattatccgagtgtttttcaaagataatgaagactggtggtatggcagcataggaaagggacaggaaggttattttccagctaatcatgtggctagtgaaacactgtatcaagaactgcctcctgagataaaggagcgatcccctcctttaagccctgaggaaaaaactaaaatagaaaaatctccagctcctcaaaaggtaaaataaaacaaaacagctcacagagacacctccttcttccccctgcttctgcctccatgagtaactacctatatgacgtgctgctgctgagaccaaggaatgaatagtgccaaatcttgctgaagaatgatcttgcagaaatctgattgtgaagaaggaaatctaaaaaggccaaacaagcttcagtagagataacaccaggaaagcagttactcaaacaagactgaaagagaagcaatcaatcaataagaacaagtcccaggacttcagactaggctcagaatctatgacacattctgaaatgagaaaagaacagagccatgaggaccaaggacacataatggatacacggatgaggaagaacaagcaagcaggcagaaaagtcactctaatagagtgtgccagctgtcacttttctcaggagtggtcgatggagttgactgctaccttaaccagatttgccatcgttctgaaactgccgtgtgttttctaaggacaaccaggtgttaagcctttctctttagaagaaggacagtaacctttctgttaaagaattgaagaaaagttaagagctgccgaaatgcacagaggtgaaaatgacaaaccaaatggaatttctcttcagagttcagaattttcagatactaaggaggaagaaaggatccactacttcttgttcttatgaatgactctagaaaaatcagaatcaagttgtgggtggaaaaatcaacgtggcctttgagttcagttgttataaaccattgtgactattgttggtcaaagtattggtacttatattgttagtaattgcatcataattacattaccagtgttggaaaactaatgaagaaaacactgtaattgctactcagcaaatgtgaataaaaggtgtttgcgttattaggatgtctgttaagtaatcatttaatattattatattggtaatggttgtatgtgtgatgctatgcccagaatatgaagtatctgtttttgaaattcactttatttaaaagataagcagctgactgggcacggtgcctcatgcctgtaatcctagcaccttgggaggctgaggcaggtggatcacctaaggtcaggagttcaacaacaccagcctgaccaacatggtgaaaccccatctctactaaaaatacaaaaatcagccgggtctcatggcaggcacctgtaatcccatctactgaggcaggagaattgcttgacccaggaggcagaggttgcagtgagccaagatcacgccattgcactccagcctgggggacagagcaagactctatctccaaaaaacaaaaaagataagcagctttagaatatggcgcattcaaaacagtctcagtaacaaagacattaaaagaaaacaatttactttctaattaaaattttgtgtttcttaagatcaaatcatataggtaacttcatagacctaaattaaaagtgatttttggctggactggcaacaatgttcccaatgtctttactttttaaaaaaggcttttcatatttaagcacatacctattttgtagacttacattgtttaatatttattttaatcttaatatttttacattattatattgcattatttattttttctaagttccagaataatagtgtcattattatagactatatgttttgaagtttgatattataatgggatattcattttttgttcttttcttgactcctttctcaagtgtgtgataaggtctgctgataaaatatttaaccccaagaaagtgaaaactaatataaaattagaaagacctatccaaattagacagtcaattccattaaaataagaagtgagaaaaacaatgttgggcattgaggtgtaaattttgcccagatgtatacccagtgtgaaatatcttctaataaaaatatatttggctcttatccctgcacatgtagaggcataaaaattggtaaacatgtcccgctgtgtagaactttaaaaaaaaggcatttttgaaagtgttgagtggcactgataactggtgaagcctacagccatccgcccaaaagtctgttctgatggcactgagttttcattgttctggatgtataagtctgtgtgtcaggtacagctgggcccagccagcttgagtcactcttgtacaagcttgtttttttctgtcttgtgaatgcacttgataatttaaaaataaaaatatctgtttctctgca

SEQ ID NO: 363712 - DNA, 3762 bp, Homo sapiens
tgcggcacagagccgcggcttgctttcaggacacgggtcgctggcgggttaggtggctgcgtggccgcctcacttcgcgcacgcgccgctaggctgggggagttgatttgcactgctccgggtgtcggctccggcgggacgggcggttctgcgtacccctctccagtgtcaacctggggctgaatcttcaacctgtcaaagccttcttaattatgtctgagaaaagtactaaaataggtgccattttaaattcccagacaaggaaaaaccaaggattagaaattaagtagcttgcccaaggccacacatcagatcctgattgagtcaatgctttgcattctcagtcctctgcataaagctgagagatgcctacagctgagagtgaagcaaaagtaaaaaccaaagttcgctttgaagaattgcttaagacccacagtgatctaatgcgtgaaaagaaaaaactgaagaaaaaacttgtcaggtctgaagaaaacatctcacctgacactattagaagcaatcttcactatatgaaagaaactacaagtgatgatcccgacactattagaagcaatcttccccatattaaagaaactacaagtgatgatgtaagtgctgctaacactaacaacctgaagaagagcacgagagtcactaaaaacaaattgaggaacacacagttagcaactgaaaatcctaatggtgatgctagtgtagaggaagacaaacaaggaaagccaaataaaaaggtgataaagacggtgccccagttgactacacaagacctgaaaccggaaactcctgagaataaggttgattctacacaccagaaaacacatacaaagccacagccaggcgttgatcatcagaaaagtgagaaggcaaatgagggaagagaagagactgatttagaagaggatgaagaattgatgcaagcatatcagtgccatgtaactgaagaaatggcaaaggagattaagaggaaaataagaaagaaactgaaagaacagttgacttactttccctcagatactttattccatgatgacaaactaagcagtgaaaaaaggaaaaagaaaaaggaagttccagtcttctctaaagctgaaacaagtacattgaccatctctggtgacacagttgaaggtgaacaaaagaaagaatcttcagttagatcagtttcttcagattctcatcaagatgatgaaataagctcaatggaacaaagcacagaagacagcatgcaagatgatacaaaacctaaaccaaaaaaaacaaaaaagaagactaaagcagttgcagataataatgaagatgttgatggtgatggtgttcatgaaataacaagccgagatagcccggtttatcccaaatgtttgcttgatgatgaccttgtcttgggagtttacattcaccgaactgatagacttaagtcagattttatgatttctcacccaatggtaaaaattcatgtggttgatgagcatactggtcaatatgtcaagaaagatgatagtggacggcctgtttcatcttactatgaaaaagagaatgtggattatattcttcctattatgacccagccatatgattttaaacagttaaaatcaagacttccagagtgggaagaacaaattgtatttaatgaaaattttccctatttgcttcgaggctctgatgagagtcctaaagtcatcctgttctttgagattcttgatttcttaagcgtggatgaaattaagaataattctgaggttcaaaaccaagaatgtggctttcggaaaattgcctgggcatttcttaagcttctgggagccaatggaaatgcaaacatcaactcaaaacttcgcttgcagctatattacccacctactaagcctcgatccccattaagtgttgttgaggcatttgaatggtggtcaaaatgtccaagaaatcattacccatcaacactgtacgtaactgtaagaggactgaaagttccagactgtataaagccatcttaccgctctatgatggctcttcaggaggaaaaaggtaaaccagtgcattgtgaacgtcaccatgagtcaagctcagtagacacagaacctggattagtaaagaattgaagaaaagttaagagctgccgaaatgcacagaggtgaaaatgacaaaccaaatggaatttctcttcagagttcagaattttcagatactaaggaggaagaaaggatccactacttcttgttcttatgaatgactctagaaaaatcagaatcaagttgtgggtggaaaaatcaacgtggcctttgagttcagttgttataaaccattgtgactattgttggtcaaagtattggtacttatattgttagtaattgcatcataattacattaccagtgttggaaaactaatgaagaaaacactgtaattgctactcagcaaatgtgaataaaaggtgtttgcgttattaggatgtctgttaagtaatcatttaatattattatattggtaatggttgtatgtgtgatgctatgcccagaatatgaagtatctgtttttgaaattcactttatttaaaagataagcagctgactgggcacggtgcctcatgcctgtaatcctagcaccttgggaggctgaggcaggtggatcacctaaggtcaggagttcaacaacaccagcctgaccaacatggtgaaaccccatctctactaaaaatacaaaaatcagccgggtctcatggcaggcacctgtaatcccatctactgaggcaggagaattgcttgacccaggaggcagaggttgcagtgagccaagatcacgccattgcactccagcctgggggacagagcaagactctatctccaaaaaacaaaaaagataagcagctttagaatatggcgcattcaaaacagtctcagtaacaaagacattaaaagaaaacaatttactttctaattaaaattttgtgtttcttaagatcaaatcatataggtaacttcatagacctaaattaaaagtgatttttggctggactggcaacaatgttcccaatgtctttactttttaaaaaaggcttttcatatttaagcacatacctattttgtagacttacattgtttaatatttattttaatcttaatatttttacattattatattgcattatttattttttctaagttccagaataatagtgtcattattatagactatatgttttgaagtttgatattataatgggatattcattttttgttcttttcttgactcctttctcaagtgtgtgataaggtctgctgataaaatatttaaccccaagaaagtgaaaactaatataaaattagaaagacctatccaaattagacagtcaattccattaaaataagaagtgagaaaaacaatgttgggcattgaggtgtaaattttgcccagatgtatacccagtgtgaaatatcttctaataaaaatatatttggctcttatccctgcacatgtagaggcataaaaattggtaaacatgtcccgctgtgtagaactttaaaaaaaaggcatttttgaaagtgttgagtggcactgataactggtgaagcctacagccatccgcccaaaagtctgttctgatggcactgagttttcattgttctggatgtataagtctgtgtgtcaggtacagctgggcccagccagcttgagtcactcttgtacaagcttgtttttttctgtcttgtgaatgcacttgataatttaaaaataaaaatatctgtttctctgca

SEQ ID NO: 363713 - DNA, 3717 bp, Homo sapiens
tgcggcacagagccgcggcttgctttcaggacacgggtcgctggcgggttaggtggctgcgtggccgcctcacttcgcgcacgcgccgctaggctgggggagttgatttgcactgctccgggtgtcggctccggcgggacgggcggttctgcgtacccctctccagtgtcaacctggggctgaatcttcaacctgtcaaagccttcttaattatgtctgagaaaagtactaaaataggtgccattttaaattcccagacaaggaaaaaccaaggattagaaattaagtagcttgcccaaggccacacatcagatcctgattgagtcaatgctttgcattctcagtcctctgcataaagctgagagatgcctacagctgagagtgaagcaaaagtaaaaaccaaagttcgctttgaagaattgcttaagacccacagtgatctaatgcgtgaaaagaaaaaactgaagaaaaaacttgtcaggtctgaagaaaacatctcacctgacactattagaagcaatcttcactatatgaaagaaactacaagtgatgatcccgacactattagaagcaatcttccccatattaaagaaactacaagtgatgatgtaagtgctgctaacactaacaacctgaagaagagcacgagagtcactaaaaacaaattgaggaacacacagttagcaactgaaaatcctaatggtgatgctagtgtagaggaagacaaacaaggaaagccaaataaaaaggtgataaagacggtgccccagttgactacacaagacctgaaaccggaaactcctgagaataaggttgattctacacaccagaaaacacatacaaagccacagccaggcgttgatcatcagaaaagtgagaaggcaaatgagggaagagaagagactgatttagaagaggatgaagaattgatgcaagcatatcagtgccatgtaactgaagaaatggcaaaggagattaagaggaaaataagaaagaaactgaaagaacagttgacttactttccctcagatactttattccatgatgacaaactaagcagtgaaaaaaggaaaaagaaaaaggaagttccagtcttctctaaagctgaaacaagtacattgaccatctctggtgacacagttgaaggtgaacaaaagaaagaatcttcagttagatcagtttcttcagattctcatcaagatgatgaaataagctcaatggaacaaagcacagaagacagcatgcaagatgatacaaaacctaaaccaaaaaaaacaaaaaagaagactaaagcagttgcagataataatgaagatgttgatggtgatggtgttcatgaaataacaagccgagatagcccggtttatcccaaatgtttgcttgatgatgaccttgtcttgggagtttacattcaccgaactgatagacttaagtcagattttatgatttctcacccaatggtaaaaattcatgtggttgatgagcatactggtcaatatgtcaagaaagatgatagtggacggcctgtttcatcttactatgaaaaagagaatgtggattatattcttcctattatgacccagccatatgattttaaacagttaaaatcaagacttccagagtgggaagaacaaattgtatttaatgaaaattttccctatttgcttcgaggctctgatgagagtcctaaagtcatcctgttctttgagattcttgatttcttaagcgtggatgaaattaagaataattctgaggttcaaaaccaagaatgtggctttcggaaaattgcctgggcatttcttaagcttctgggagccaatggaaatgcaaacatcaactcaaaacttcgcttgcagctatattacccacctactaagcctcgatccccattaagtgttgttgaggcatttgaatggtggtcaaaatgtccaagaaatcattacccatcaacactgtacgtaactgtaagaggactgaaagttccagactgtataaagccatcttaccgctctatgatggctcttcaggaggaaaaaggtaaaccagtgcattgtgaacgtcaccatgagtcaagctcagtagacacagaacctggattagaagagtcaaaggaagtaataaagtggaaacgactccctgggcaggcttgccgtatcccaaacaaacacctcttctcactaaatgcaggagaacgaggatgtttttgtcttgatttctcccacaatggaagaatattagcagcagcttgtgccagccgggatggatatccaattattttatatgaaattccttctggacgtttcatgagagaattgtgtggccacctcaatatcatttatgatctttcctggtcaaaagatgatcactacatccttacttcatcatctgatggcactgccaggatatggaaaaatgaaataaacaatacaaatactttcagagttttacctcatccttcttttgtttacacggctaaattccatccagctgtaagagagctagtagttacaggatgctatgattccatgatacggatatggaaagttgagatgagagaagattctgccatattggtccgacagtttgatgttcacaaaagttttatcaactcactttgttttgatactgaaggtcatcatatgtattcaggagattgtacaggggtgattgttgtttggaatacctatgtcaagattaatgatttggaacattcagtgcaccactggactataaataaggaaattaaagaaactgagtttaagggaattccaataagttatttggagattcatcccaatggaaaacgtttgttaatccataccaaagacagtactttgagaattatggatctccggatattagtagcaaggaagtttgtaggagcagcaaattatcgggagaagattcatagtactttgactccatgtgggacttttctgtttgctggaagtgaggatggtatagtgtatgtttggaacccagaaacaggagaacaagtagccatgtattctgacttgccattcaagtcacccattcgagacatttcttatcatccatttgaaaatatggttgcattctgtgcatttgggcaaaatgagccaattcttctgtatatttacgatttccatgttgcccagcaggaggctgaaatgttcaaacgctacaatggaacatttccattacctggaatacaccaaagtcaagatgccctatgtacctgtccaaaactaccccatcaaggctcttttcagattgatgaatttgtccacactgaaagttcttcaacgaagatgcagctagtaataaagtgtcctgcacagattgagcaaggctttatggagaacagcctctactaatctggaaactccccaagggtgaaggatcatgccattcatcttcatatccctagtatttaataaaggtagaataaatactcattgaaaaaatgattaatttggaaatgaatcagtgtctggaaaaattaaccttactagtatcttcagttattctttttttataatagttttattgagctataatttatataccgtaatgcccactcttttaaaatatacagttcactggtttttaccatattcacaaagttttgcagccatccctactatctgattttagagtttttcatcacccctgaatgaagccccatatctcttagcagtcattcccaattcctacacatacacactccaaatacaa

SEQ ID NO: 363714 - DNA, 3106 bp, Homo sapiens
  misc_feature (1)..(1): n is a, c, g, or t
natcgggggatgatctggaaagcgcgatcagtgaagcggacgaacggcaggataaggcgggtctagtgacaggaatgggccgatgaagctctgtagggatggtgggtaggccgatcgggccgtgtccccggcctcccgatccgacggaatttggaaatcccggggctattcatacattgagcttttaggagcggaggagaaaagccaccaccctgacgatcccggctctcgctccaccttcactcaggtggcccggcagcggaagtgacgaacgcggaagtggtttttctgttgccgaggggacgggccgggcagatgccaacatggcagcggttggggctggtggttccaccgcggcgcccgggccaggggcggtttccgcgggtgcattggagccggggaccgccagtgcggctcacaggcgcctgaagtacatatccctagctgtgctggtggtccagaatgcctccctcatcctcagcatccgctacgcccgcacgttgccaggggaccgcttctttgccaccactgctgtggtcatggcggaagtgctcaaaggtctcacctgcctgctgctgctcttcgcacagaagaggggtaacgtgaagcacctggttctcttcctccatgaggctgtcctggtgcagtatgtggacacgctcaagctcgcagtgccctctctcatctacaccttgcagaataacctccagtatgttgccatctctaacctaccagctgccactttccaggtgacataccagctgaagatcctgaccacagcgctgttctccgtgctcatgctgaatcgcagcctttcccggctgcagtgggcctccctgctgctcctcttcactggcgtcgccattgtccaggcacagcaagccggtgggggaggcccacggccactggatcagaaccctggggcaggcctggcagccgtcgtggcctcctgtctctcctccggcttcgcaggtgtctactttgagaagatcctcaaaggcagctcaggctccgtgtggctgcgcaacctgcaactgggcctcttcggcacagcactgggcctggtggggctctggtgggctgagggtaccgccgtggccacccgtggtttcttttttgggtacacacctgctgtctggggcgtggtgctcaaccaggccttcggcgggctactggtggctgtggttgtcaagtacgctgacaatatcctcaagggctttgccacctccctgtccattgtgctgtccactgttgcctccattcgcctctttggcttccacgtggacccattatttgcccttggcgctggactcgtcattggtgctgtctacctctacagccttccccgaggtgcagccaaagccatagcctctgcctctgcctccgcctccgggccctgcgttcaccagcagcctcccgggcagccaccaccaccgcagctgtcttcccaccgtggagacctcatcacggagccctttctgccaaagtcagtgctggtgaagtgagggctggcagcaatggggggacacaagggagggggactggggtggagggtgttgggcatctgcaggacccaagtcgccaccctccggggcctggctcctctgggtttgggagatggtcttttctcccaggtcactgagacttctggaggggtgtgggactagagctgggtgtcacgtgaacccttcctggtagggtgacccccttcccctggagggggttttagagctgccgcctctgctccctctaacctctttggaggcagggttgggggtattgtcattcaaggccttttttttgtctgctccctccccgaccctgtgccctcttctggaggtttctcgtctgggagagtccctcccagcagtccctccacctccataaggacacactggacaaaactcccgcagctcttcaggaatgaccgatgcctacctgtggggttcagttgcccatagtttgaggccttctctcctcccttaccaccgctctggatcatgttactagttccgtcttttgtgtggccttgggccagcttccttgataccttgaagatgggcttcttgtgagtccccagggagaaagggacaagagctaagatttttgcatcagcccttctggcagaaggtgtggtaggggccatttgttttttttagtggacttgggatttgtggtgtaatcatatcattaatgatccagggtgtgggaaaaatggaggtccttgaagtggctgaatctcattgtatttaagacactgtcagttgccagatgtaggcttatttttggagatgtctaggagaggaaaaagctaccaatcatactcttgatatccgtctggctgtgtgaggcacccctacctcatgggggtgtcttgggattgatgaactgtggaacctgcctcctgcgctccccaaagcttattaaccccttaactgtatcggggcggggtgtgtgtgtgcatggaagatgcctgggctgtctttgctatatgtaaatagagccattggatctttatttttgattaatttgttctgattttttggtttgttttttaaggaactgtaatgaacaaatgtcaggatatccaatgccaaataaagatgttgtatttatttagtccacgtgtagctttctgaccaggtgggcaccattactaaccccaggactaccagcctcaccaccgccgccctcacttgctcaggaaacccgcctgccagcctagcccagctttgtgtttttctttcctccccattcccaccacagggttgctcaccaaggtgaagggttcctagccgctgggattgaagacattggcctggcctcgttctctcttcttgcccttggcccagctgggaccaaactctgatcagtattaggggtagagtgaggtagacactggactccctgtccccaccacccctgccccacccagggccaacatgactaagctctctcatgacccacctcagctcagccccccagcccctgccagctccacactatctcttagctgagtttttgcaaataaaatgtgttgtgtatcttgccgacttgggttgggcagcctcaaaggaagcactcaggtatggtgggcaggatcacc

SEQ ID NO: 363715 - DNA, 2866 bp, Homo sapiens
  misc_feature (1)..(1): n is a, c, g, or t
natcgggggatgatctggaaagcgcgatcagtgaagcggacgaacggcaggataaggcgggtctagtgacaggaatgggccgatgaagctctgtagggatggtgggtaggccgatcgggccgtgtccccggcctcccgatccgacggaatttggaaatcccggggctattcatacattgagcttttaggagcggaggagaaaagccaccaccctgacgatcccggctctcgctccaccttcactcaggtggcccggcagcggaagtgacgaacgcggaagtggtttttctgttgccgaggggacgggccgggcagatgccaacatggcagcggttggggctggtggttccaccgcggcgcccgggccaggggcggtttccgcgggtgcattggagccggggaccgccagtgcggctcacaggcgcctgaagtacatatccctagctgtgctggtggtccagaatgcctccctcatcctcagcatccgctacgcccgcacgttgccaggggaccgcttctttgccaccactgctgtggtcatggcggaagtgctcaaaggtctcacctgcctgctgctgctcttcgcacagaagaggggtaacgtgaagcacctggttctcttcctccatgaggctgtcctggtgcagtatgtggacacgctcaagctcgcagtgccctctctcatctacaccttgcagaataacctccagtatgttgccatctctaacctaccagctgccactttccaggtgacataccagctgaagatcctgaccacagcgctgttctccgtgctcatgctgaatcgcagcctttcccggctgcagtgggcctccctgctgctcctcttcactggcgtcgccattgtccaggcacagcaagccggtgggggaggcccacggccactggatcagaaccctggggcaggcctggcagccgtcgtggcctcctgtctctcctccggcttcgcaggtgtctactttgagaagatcctcaaaggcagctcaggctccgtgtggctgcgcaacctgcaactgggcctcttcggcacagcactgggcctggtggggctctggtgggctgagggtaccgccgtggccacccgtggtttcttttttgggtacacacctgctgtctggggcgtggtgctcaaccaggccttcggcgggctactggtggctgtggttgtcaagtacgctgacaatatcctcaagggctttgccacctccctgtccattgtgctgtccactgttgcctccattcgcctctttggcttccacgtggacccattatttgcccttggcgctggactcgtcattggtgctgtctacctctacagccttccccgaggtgcagccaaagccatagcctctgcctctgcctccgcctccgggccctgcgttcaccagcagcctcccgggcagccaccaccaccgcagctgtcttcccaccgtggagacctcatcacggagccctttctgccaaagtcagtgctggtgaagtgagggctggcagcaatggggggacacaagggagggggactggggtggagggtgttgggcatctgcaggacccaagtcgccaccctccggggcctggctcctctgggtttgggagatggtcttttctcccaggtcactgagacttctggaggggtgtgggactagagctgggtgtcacgtgaacccttcctggtagggtgacccccttcccctggagggggttttagagctgccgcctctgctccctctaacctctttggaggcagggttgggggtattgtcattcaaggccttttttttgtctgctccctccccgaccctgtgccctcttctggaggtttctcgtctgggagagtccctcccagcagtccctccacctccataaggacacactggacaaaactcccgcagctcttcaggaatgaccgatgcctacctgtggggttcagttgcccatagtttgaggccttctctcctcccttaccaccgctctggatcatgttactagttccgtcttttgtgtggccttgggccagcttccttgataccttgaagatgggcttcttgtgagtccccagggagaaagggacaagagctaagatttttgcatcagcccttctggcagaaggtgtggtaggggccatttgttttttttagtggacttgggatttgtggtgtaatcatatcattaatgatccagggtgtgggaaaaatggaggtccttgaagtggctgaatctcattgtatttaagacactgtcagttgccagatgtaggcttatttttggagatgtctaggagaggaaaaagctaccaatcatactcttgatatccgtctggctgtgtgaggcacccctacctcatgggggtgtcttgggattgatgaactgtggaacctgcctcctgcgctccccaaagcttattaaccccttaactgtatcggggcggggtgtgtgtgtgcatggaagatgcctgggctgtctttgctatatgtaaatagagccattggatctttatttttgattaatttgttctgattttttggtttgttttttaaggaactgtaatgaacaaatgtcaggatatccaatgccaaataaagatgttgtatttatttagtccacgtgtagctttctgaccaggtgggcaccattactaaccccaggactaccagcctcaccaccgccgccctcacttgctcaggaaacccgcctgccagcctagcccagctttgtgtttttctttcctccccattcccaccacaggctcttgggatagggagccagctcctcccggcgatggtggcgccgttctttgccctcttcccggtctgccttgtcatacccgcggtcccgatcccgttcc

SEQ ID NO: 363716 - DNA, 4015 bp, Homo sapiens
  misc_feature (1)..(1): n is a, c, g, or t
natcgggggatgatctggaaagcgcgatcagtgaagcggacgaacggcaggataaggcgggtctagtgacaggaatgggccgatgaagctctgtagggatggtgggtaggccgatcgggccgtgtccccggcctcccgatccgacggaatttggaaatcccggggctattcatacattgagcttttaggagcggaggagaaaagccaccaccctgacgatcccggctctcgctccaccttcactcaggtggcccggcagcggaagtgacgaacgcggaagtggtttttctgttgccgaggggacgggccgggcagatgccaacatggcagcggttggggctggtggttccaccgcggcgcccgggccaggggcggtttccgcgggtgcattggagccggggaccgccagtgcggctcacaggcgcctgaagtacatatccctagctgtgctggtggtccagaatgcctccctcatcctcagcatccgctacgcccgcacgttgccaggggaccgcttctttgccaccactgctgtggtcatggcggaagtgctcaaaggtctcacctgcctgctgctgctcttcgcacagaagaggggtaacgtgaagcacctggttctcttcctccatgaggctgtcctggtgcagtatgtggacacgctcaagctcgcagtgccctctctcatctacaccttgcagaataacctccagtatgttgccatctctaacctaccagctgccactttccaggtgagccccaagcccagcatggccccagaggaactaactgggttggggactggagtatgggaatagcgtggtgggggggtgttgcagaggacaggggctatgtcaccttcagaatgtccttggaactccttcaacctcccttttctcgtctgtgaaaattgggggtggaaatagtaatgcctgttcattgagatgctaggatacttaaaagaaataatacctgtgaagagcccttgattggtgacagataagctttaggctatttgtgggcagctttgtgaaatggttaaagagcctggattctggggccaggctgtctgggttcaaatctcagctctgctaccttccagctgtgtgattttggggcacgtcacctaacctctctgtgccttagttttctcacctttaaattggggcttacagtggtgctcacttcagaatggtgttgtgagaattaaatgaatgaattcacgtgcagtgcctagaaccacactgatatattgtaagcactatgtaagtatttgctgacattgttgtggctattgattcatttgtatcaagtccctcatcacaaagatacttccatacctcagccatcttttatagatgatgatgccagggctcagacagggcaagtgctttgtccccagtcacacagccaggaaatgggattgggatgtggacttcttggcacagccatccttttgtgcacttgctgggagagacttcagaactgttttgctgcagctcagccaatggccagtggctggctccttttgctgtttttgctgtcataccccccaccctgtccctccattgtgcctgggggcccacagtgggtgctgccccccatgtgcacctgttgggggccagggtcagccctcagtgccttccacgtgccactcgcaggtgacataccagctgaagatcctgaccacagcgctgttctccgtgctcatgctgaatcgcagcctttcccggctgcagtgggcctccctgctgctcctcttcactggcgtcgccattgtccaggcacagcaagccggtgggggaggcccacggccactggatcagaaccctggggcaggcctggcagccgtcgtggcctcctgtctctcctccggcttcgcaggtgtctactttgagaagatcctcaaaggcagctcaggctccgtgtggctgcgcaacctgcaactgggcctcttcggcacagcactgggcctggtggggctctggtgggctgagggtaccgccgtggccacccgtggtttcttttttgggtacacacctgctgtctggggcgtggtgctcaaccaggccttcggcgggctactggtggctgtggttgtcaagtacgctgacaatatcctcaagggctttgccacctccctgtccattgtgctgtccactgttgcctccattcgcctctttggcttccacgtggacccattatttgcccttggcgctggactcgtcattggtgctgtctacctctacagccttccccgaggtgcagccaaagccatagcctctgcctctgcctccgcctccgggccctgcgttcaccagcagcctcccgggcagccaccaccaccgcagctgtcttcccaccgtggagacctcatcacggagccctttctgccaaagtcagtgctggtgaagtgagggctggcagcaatggggggacacaagggagggggactggggtggagggtgttgggcatctgcaggacccaagtcgccaccctccggggcctggctcctctgggtttgggagatggtcttttctcccaggtcactgagacttctggaggggtgtgggactagagctgggtgtcacgtgaacccttcctggtagggtgacccccttcccctggagggggttttagagctgccgcctctgctccctctaacctctttggaggcagggttgggggtattgtcattcaaggccttttttttgtctgctccctccccgaccctgtgccctcttctggaggtttctcgtctgggagagtccctcccagcagtccctccacctccataaggacacactggacaaaactcccgcagctcttcaggaatgaccgatgcctacctgtggggttcagttgcccatagtttgaggccttctctcctcccttaccaccgctctggatcatgttactagttccgtcttttgtgtggccttgggccagcttccttgataccttgaagatgggcttcttgtgagtccccagggagaaagggacaagagctaagatttttgcatcagcccttctggcagaaggtgtggtaggggccatttgttttttttagtggacttgggatttgtggtgtaatcatatcattaatgatccagggtgtgggaaaaatggaggtccttgaagtggctgaatctcattgtatttaagacactgtcagttgccagatgtaggcttatttttggagatgtctaggagaggaaaaagctaccaatcatactcttgatatccgtctggctgtgtgaggcacccctacctcatgggggtgtcttgggattgatgaactgtggaacctgcctcctgcgctccccaaagcttattaaccccttaactgtatcggggcggggtgtgtgtgtgcatggaagatgcctgggctgtctttgctatatgtaaatagagccattggatctttatttttgattaatttgttctgattttttggtttgttttttaaggaactgtaatgaacaaatgtcaggatatccaatgccaaataaagatgttgtatttatttagtccacgtgtagctttctgaccaggtgggcaccattactaaccccaggactaccagcctcaccaccgccgccctcacttgctcaggaaacccgcctgccagcctagcccagctttgtgtttttctttcctccccattcccaccacagggttgctcaccaaggtgaagggttcctagccgctgggattgaagacattggcctggcctcgttctctcttcttgcccttggcccagctgggaccaaactctgatcagtattaggggtagagtgaggtagacactggactccctgtccccaccacccctgccccacccagggccaacatgactaagctctctcatgacccacctcagctcagccccccagcccctgccagctccacactatctcttagctgagtttttgcaaataaaatgtgttgtgtatcttgccgacttgggttgggcagcctcaaaggaagcactcaggtatggtgggcaggatcacc

SEQ ID NO: 363717 - DNA, 3183 bp, Homo sapiens
  misc_feature (1)..(1): n is a, c, g, or t
natcgggggatgatctggaaagcgcgatcagtgaagcggacgaacggcaggataaggcgggtctagtgacaggaatgggccgatgaagctctgtagggatggtgggtaggccgatcgggccgtgtccccggcctcccgatccgacggaatttggaaatcccggggctattcatacattgagcttttaggagcggaggagaaaagccaccaccctgacgatcccggctctcgctccaccttcactcaggtggcccggcagcggaagtgacgaacgcggaagtggtttttctgttgccgaggggacgggccgggcagatgccaacatggcagcggttggggctggtggttccaccgcggcgcccgggccaggggcggtttccgcgggtgcattggagccggggaccgccagtgcgggtgagacagtctgcccgagcagtcgcatgggaggcggaggtcgggatcgctgggagtcgggaatgttcctcactaaactcacaggcgcctgaagtacatatccctagctgtgctggtggtccagaatgcctccctcatcctcagcatccgctacgcccgcacgttgccaggggaccgcttctttgccaccactgctgtggtcatggcggaagtgctcaaaggtctcacctgcctgctgctgctcttcgcacagaagaggggtaacgtgaagcacctggttctcttcctccatgaggctgtcctggtgcagtatgtggacacgctcaagctcgcagtgccctctctcatctacaccttgcagaataacctccagtatgttgccatctctaacctaccagctgccactttccaggtgacataccagctgaagatcctgaccacagcgctgttctccgtgctcatgctgaatcgcagcctttcccggctgcagtgggcctccctgctgctcctcttcactggcgtcgccattgtccaggcacagcaagccggtgggggaggcccacggccactggatcagaaccctggggcaggcctggcagccgtcgtggcctcctgtctctcctccggcttcgcaggtgtctactttgagaagatcctcaaaggcagctcaggctccgtgtggctgcgcaacctgcaactgggcctcttcggcacagcactgggcctggtggggctctggtgggctgagggtaccgccgtggccacccgtggtttcttttttgggtacacacctgctgtctggggcgtggtgctcaaccaggccttcggcgggctactggtggctgtggttgtcaagtacgctgacaatatcctcaagggctttgccacctccctgtccattgtgctgtccactgttgcctccattcgcctctttggcttccacgtggacccattatttgcccttggcgctggactcgtcattggtgctgtctacctctacagccttccccgaggtgcagccaaagccatagcctctgcctctgcctccgcctccgggccctgcgttcaccagcagcctcccgggcagccaccaccaccgcagctgtcttcccaccgtggagacctcatcacggagccctttctgccaaagtcagtgctggtgaagtgagggctggcagcaatggggggacacaagggagggggactggggtggagggtgttgggcatctgcaggacccaagtcgccaccctccggggcctggctcctctgggtttgggagatggtcttttctcccaggtcactgagacttctggaggggtgtgggactagagctgggtgtcacgtgaacccttcctggtagggtgacccccttcccctggagggggttttagagctgccgcctctgctccctctaacctctttggaggcagggttgggggtattgtcattcaaggccttttttttgtctgctccctccccgaccctgtgccctcttctggaggtttctcgtctgggagagtccctcccagcagtccctccacctccataaggacacactggacaaaactcccgcagctcttcaggaatgaccgatgcctacctgtggggttcagttgcccatagtttgaggccttctctcctcccttaccaccgctctggatcatgttactagttccgtcttttgtgtggccttgggccagcttccttgataccttgaagatgggcttcttgtgagtccccagggagaaagggacaagagctaagatttttgcatcagcccttctggcagaaggtgtggtaggggccatttgttttttttagtggacttgggatttgtggtgtaatcatatcattaatgatccagggtgtgggaaaaatggaggtccttgaagtggctgaatctcattgtatttaagacactgtcagttgccagatgtaggcttatttttggagatgtctaggagaggaaaaagctaccaatcatactcttgatatccgtctggctgtgtgaggcacccctacctcatgggggtgtcttgggattgatgaactgtggaacctgcctcctgcgctccccaaagcttattaaccccttaactgtatcggggcggggtgtgtgtgtgcatggaagatgcctgggctgtctttgctatatgtaaatagagccattggatctttatttttgattaatttgttctgattttttggtttgttttttaaggaactgtaatgaacaaatgtcaggatatccaatgccaaataaagatgttgtatttatttagtccacgtgtagctttctgaccaggtgggcaccattactaaccccaggactaccagcctcaccaccgccgccctcacttgctcaggaaacccgcctgccagcctagcccagctttgtgtttttctttcctccccattcccaccacagggttgctcaccaaggtgaagggttcctagccgctgggattgaagacattggcctggcctcgttctctcttcttgcccttggcccagctgggaccaaactctgatcagtattaggggtagagtgaggtagacactggactccctgtccccaccacccctgccccacccagggccaacatgactaagctctctcatgacccacctcagctcagccccccagcccctgccagctccacactatctcttagctgagtttttgcaaataaaatgtgttgtgtatcttgccgacttgggttgggcagcctcaaaggaagcactcaggtatggtgggcaggatcacc

SEQ ID NO: 363718 - DNA, 2939 bp, Homo sapiens
  misc_feature (1)..(1): n is a, c, g, or t
natcgggggatgatctggaaagcgcgatcagtgaagcggacgaacggcaggataaggcgggtctagtgacaggaatgggccgatgaagctctgtagggatggtgggtaggccgatcgggccgtgtccccggcctcccgatccgacggaatttggaaatcccggggctattcatacattgagcttttaggagcggaggagaaaagccaccaccctgacgatcccggctctcgctccaccttcactcagctcacaggcgcctgaagtacatatccctagctgtgctggtggtccagaatgcctccctcatcctcagcatccgctacgcccgcacgttgccaggggaccgcttctttgccaccactgctgtggtcatggcggaagtgctcaaaggtctcacctgcctgctgctgctcttcgcacagaagaggggtaacgtgaagcacctggttctcttcctccatgaggctgtcctggtgcagtatgtggacacgctcaagctcgcagtgccctctctcatctacaccttgcagaataacctccagtatgttgccatctctaacctaccagctgccactttccaggtgacataccagctgaagatcctgaccacagcgctgttctccgtgctcatgctgaatcgcagcctttcccggctgcagtgggcctccctgctgctcctcttcactggcgtcgccattgtccaggcacagcaagccggtgggggaggcccacggccactggatcagaaccctggggcaggcctggcagccgtcgtggcctcctgtctctcctccggcttcgcaggtgtctactttgagaagatcctcaaaggcagctcaggctccgtgtggctgcgcaacctgcaactgggcctcttcggcacagcactgggcctggtggggctctggtgggctgagggtaccgccgtggccacccgtggtttcttttttgggtacacacctgctgtctggggcgtggtgctcaaccaggccttcggcgggctactggtggctgtggttgtcaagtacgctgacaatatcctcaagggctttgccacctccctgtccattgtgctgtccactgttgcctccattcgcctctttggcttccacgtggacccattatttgcccttggcgctggactcgtcattggtgctgtctacctctacagccttccccgaggtgcagccaaagccatagcctctgcctctgcctccgcctccgggccctgcgttcaccagcagcctcccgggcagccaccaccaccgcagctgtcttcccaccgtggagacctcatcacggagccctttctgccaaagtcagtgctggtgaagtgagggctggcagcaatggggggacacaagggagggggactggggtggagggtgttgggcatctgcaggacccaagtcgccaccctccggggcctggctcctctgggtttgggagatggtcttttctcccaggtcactgagacttctggaggggtgtgggactagagctgggtgtcacgtgaacccttcctggtagggtgacccccttcccctggagggggttttagagctgccgcctctgctccctctaacctctttggaggcagggttgggggtattgtcattcaaggccttttttttgtctgctccctccccgaccctgtgccctcttctggaggtttctcgtctgggagagtccctcccagcagtccctccacctccataaggacacactggacaaaactcccgcagctcttcaggaatgaccgatgcctacctgtggggttcagttgcccatagtttgaggccttctctcctcccttaccaccgctctggatcatgttactagttccgtcttttgtgtggccttgggccagcttccttgataccttgaagatgggcttcttgtgagtccccagggagaaagggacaagagctaagatttttgcatcagcccttctggcagaaggtgtggtaggggccatttgttttttttagtggacttgggatttgtggtgtaatcatatcattaatgatccagggtgtgggaaaaatggaggtccttgaagtggctgaatctcattgtatttaagacactgtcagttgccagatgtaggcttatttttggagatgtctaggagaggaaaaagctaccaatcatactcttgatatccgtctggctgtgtgaggcacccctacctcatgggggtgtcttgggattgatgaactgtggaacctgcctcctgcgctccccaaagcttattaaccccttaactgtatcggggcggggtgtgtgtgtgcatggaagatgcctgggctgtctttgctatatgtaaatagagccattggatctttatttttgattaatttgttctgattttttggtttgttttttaaggaactgtaatgaacaaatgtcaggatatccaatgccaaataaagatgttgtatttatttagtccacgtgtagctttctgaccaggtgggcaccattactaaccccaggactaccagcctcaccaccgccgccctcacttgctcaggaaacccgcctgccagcctagcccagctttgtgtttttctttcctccccattcccaccacagggttgctcaccaaggtgaagggttcctagccgctgggattgaagacattggcctggcctcgttctctcttcttgcccttggcccagctgggaccaaactctgatcagtattaggggtagagtgaggtagacactggactccctgtccccaccacccctgccccacccagggccaacatgactaagctctctcatgacccacctcagctcagccccccagcccctgccagctccacactatctcttagctgagtttttgcaaataaaatgtgttgtgtatcttgccgacttgggttgggcagcctcaaaggaagcactcaggtatggtgggcaggatcacc

SEQ ID NO: 363719 - DNA, 1769 bp, Homo sapiens
  misc_feature (1)..(1): n is a, c, g, or t
natcgggggatgatctggaaagcgcgatcagtgaagcggacgaacggcaggataaggcgggtctagtgacaggaatgggccgatgaagctctgtagggatggtgggtaggccgatcgggccgtgtccccggcctcccgatccgacggaatttggaaatcccggggctattcatacattgagcttttaggagcggaggagaaaagccaccaccctgacgatcccggctctcgctccaccttcactcaggtggcccggcagcggaagtgacgaacgcggaagtggtttttctgttgccgaggggacgggccgggcagatgccaacatggcagcggttggggctggtggttccaccgcggcgcccgggccaggggcggtttccgcgggtgcattggagccggggaccgccagtgcggctcacaggcgcctgaagtacatatccctagctgtgctggtggtccagaatgcctccctcatcctcagcatccgctacgcccgcacgttgccaggggaccgcttctttgccaccactgctgtggtcatggcggaagtgctcaaaggtctcacctgcctgctgctgctcttcgcacagaagaggggtaacgtgaagcacctggttctcttcctccatgaggctgtcctggtgcagtatgtggacacgctcaagctcgcagtgccctctctcatctacaccttgcagaataacctccagtatgttgccatctctaacctaccagctgccactttccaggtgacataccagctgaagatcctgaccacagcgctgttctccgtgctcatgctgaatcgcagcctttcccggctgcagtgggcctccctgctgctcctcttcactggcgtcgccattgtccaggcacagcaagccggtgggggaggcccacggccactggatcagaaccctggggcaggcctggcagccgtcgtggcctcctgtctctcctccggcttcgcaggtgtctactttgagaagatcctcaaaggcagctcaggctccgtgtggctgcgcaacctgcaactgggcctcttcggcacagcactgggcctggtggggctctggtgggctgagggtaccgccgtggccacccgtggtttcttttttgggtacacacctgctgtctggggcgtggtgctcaaccaggccttcggcgggctactggtggctgtggttgtcaagtacgctgacaatatcctcaagggctttgccacctccctgtccattgtgctgtccactgttgcctccattcgcctctttggcttccacgtggacccattatttgcccttggcgctggactcgtcattggtgctgtctacctctacagccttccccgaggtgcagccaaagccatagcctctgcctctgcctccgcctccgggccctgcgttcaccagcagcctcccgggcagccaccaccaccgcagctgtcttcccaccgtggagacctcatcacggagccctttctgccaaagttgctcaccaaggtgaagggttcctagccgctgggattgaagacattggcctggcctcgttctctcttcttgcccttggcccagctgggaccaaactctgatcagtattaggggtagagtgaggtagacactggactccctgtccccaccacccctgccccacccagggccaacatgactaagctctctcatgacccacctcagctcagccccccagcccctgccagctccacactatctcttagctgagtttttgcaaataaaatgtgttgtgtatcttgc

SEQ ID NO: 363720 - DNA, 1013 bp, Homo sapiens
ttttttcgttccctcgtctcccccgtgctctgctttttcttttttccctcgtttgcgttgtggtgtgttgtttccccctctcgttttgttctttcgtcgctcccctccctctggatgtagtgggtgttggtgcgttctctgcgacactgcaggtagctccgcgcgccagctgcggtgtcttttgtttgctcctcctccgccgcctcgtggccttttttgtttgttttcgtgcctccgcgcgcgctgtcggtcgctctcgtgcttttatatatgtctcgccctctctctcttgtctgtgtgcccgcgcctctttcttctcatatacatacaacattgggccgcgcgctgtgcgctcgatctatgtcgtttcgtcctcgccccgtcgctgcggtggggcgtcgtgtggggctgcccccgtcctctctctttttctttcttttttttgtttttcttgttgttttgtctttctttttgtttttgttcttgtctctttcttttgttttttttgttttgttttcttttttttctttttttttttgtttttttttttctttggccaaataaagatgttgtatttatttagtccacgtgtagctttctgaccaggtgggcaccattactaaccccaggactaccagcctcaccaccgccgccctcacttgctcaggaaacccgcctgccagcctagcccagctttgtgtttttctttcctccccattcccaccacagggttgctcaccaaggtgaagggttcctagccgctgggattgaagacattggcctggcctcgttctctcttcttgcccttggcccagctgggaccaaactctgatcagtattaggggtagagtgaggtagacactggactccctgtccccaccacccctgccccacccagggccaacatgactaagctctctcatgacccacctcagctcagccccccagcccctgccagctccacactatctcttagctgagtttttgcaaataaaatgtgttgtgtatcttgc

SEQ ID NO: 363721 - DNA, 3050 bp, Homo sapiens
  misc_feature (1)..(1): n is a, c, g, or t
natcgggggatgatctggaaagcgcgatcagtgaagcggacgaacggcaggataaggcgggtctagtgacaggaatgggccgatgaagctctgtagggatggtgggtaggccgatcgggccgtgtccccggcctcccgatccgacggaatttggaaatcccggggctattcatacattgagcttttaggagcggaggagaaaagccaccaccctgacgatcccggctctcgctccaccttcactcaggtggcccggcagcggaagtgacgaacgcggaagtggtttttctgttgccgaggggacgggccgggcagatgccaacatggcagcggttggggctggtggttccaccgcggcgcccgggccaggggcggtttccgcgggtgcattggagccggggaccgccagtgcggctcacaggcgcctgaagtacatatccctagctgtgctggtggtccagaatgcctccctcatcctcagcatccgctacgcccgcacgttgccaggggaccgcttctttgccaccactgctgtggtcatggcggaagtgctcaaaggtctcacctgcctgctgctgctcttcgcacagaagaggggtaacgtgaagcacctggttctcttcctccatgaggctgtcctggtgcagtatgtggacacgctcaagctcgcagtgccctctctcatctacaccttgcagaataacctccagtatgttgccatctctaacctaccagctgccactttccaggtgacataccagctgaagatcctgaccacagcgctgttctccgtgctcatgctgaatcgcagcctttcccggctgcagtgggcctccctgctgctcctcttcactggcgtcgccattgtccaggcacagcaagccggtgggggaggcccacggccactggatcagaaccctggggcaggcctggcagccgtcgtggcctcctgtctctcctccggcttcgcaggtgtctactttgagaagatcctcaaaggcagctcaggctccgtgtggctgcgcaacctgcaactgggcctcttcggcacagcactgggcctggtggggctctggtgggctgagggtaccgccgtggccacccgtggtttcttttttgggtacacacctgctgtctggggcgtggtgctcaaccaggccttcggcgggctactggtggctgtggttgtcaagtacgctgacaatatcctcaagggctttgccacctccctgtccattgtgctgtccactgttgcctccattcgcctctttggcttccacgtggacccattatttgcccttggcgctggactcgtcattggtgctgtctacctctacagccttccccgaggtgcagccaaagccatagcctctgcctctgcctccgcctccgggccctgcgttcaccagcagcctcccgggcagccaccaccaccgcagctgtcttcccaccgtggagacctcatcacggagccctttctgccaaagtcagtgctggtgaagtgagggctggcagcaatggggggacacaagggagggggactggggtggagggtgttgggcatctgcaggacccaagtcgccaccctccggggcctggctcctctgggtttgggagatggtcttttctcccaggtcactgagacttctggaggggtgtgggactagagctgggtgtcacgtgaacccttcctggtagggtgacccccttcccctggagggggttttagagctgccgcctctgctccctctaacctctttggaggcagggttgggggtattgtcattcaaggccttttttttgtctgctccctccccgaccctgtgccctcttctggaggtttctcgtctgggagagtccctcccagcagtccctccacctccataaggacacactggacaaaactcccgcagctcttcaggaatgaccgatgcctacctgtggggttcagttgcccatagtttgaggccttctctcctcccttaccaccgctctggatcatgttactagttccgtcttttgtgtggccttgggccagcttccttgataccttgaagatgggcttcttgtgagtccccagggagaaagggacaagagctaagatttttgcatcagcccttctggcagaaggtgtggtaggggccatttgttttttttagtggacttgggatttgtggtgtaatcatatcattaatgatccagggtgtgggaaaaatggaggtccttgaagtggctgaatctcattgtatttaagacactgtcagttgccagatgtaggcttatttttggagatgtctaggagaggaaaaagctaccaatcatactcttgatatccgtctggctgtgtgaggcacccctacctcatgggggtgtcttgggattgatgaactgtggaacctgcctcctgcgctccccaaagcttattaaccccttaactgtatcggggcggggtgtgtgtgtgcatggaagatgcctgggctgtctttgctatatgtaaatagagccattggatctttatttttgattaatttgttctgattttttggtttgttttttaaggaactgtaatgaacaaatgtcaggatatccaatgccaaataaagatgttgtatttatttagtccacgtgtagctttctgaccaggtgggcaccattactaaccccaggactaccagcctcaccaccgccgccctcacttgctcaggaaacccgcctgccagcctagcccagctttgtgtttttctttcctccccattcccaccacagggttgctcaccaaggtgaagggttcctagccgctgggattgaagacattggcctggcctcgttctctcttcttgcccttggcccagctgggaccaaactctgatcagtattaggggtagagtgaggtagacactggactccctgtccccaccacccctgccccacccagggccaacatgactaagctctctcatgacccacctcagctcagccccccagcccctgccagctccacactatctcttagctgagtttttgcaaataaaatgtgttgtgtatcttgc

SEQ ID NO: 363722 - DNA, 2516 bp, Homo sapiens
  misc_feature (1)..(1): n is a, c, g, or t
natcgggggatgatctggaaagcgcgatcagtgaagcggacgaacggcaggataaggcgggtctagtgacaggaatgggccgatgaagctctgtagggatggtgggtaggccgatcgggccgtgtccccggcctcccgatccgacggaatttggaaatcccggggctattcatacattgagcttttaggagcggaggagaaaagccaccaccctgacgatcccggctctcgctccaccttcactcaggtggcccggcagcggaagtgacgaacgcggaagtggtttttctgttgccgaggggacgggccgggcagatgccaacatggcagcggttggggctggtggttccaccgcggcgcccgggccaggggcggtttccgcgggtgcattggagccggggaccgccagtgcggctcacaggcgcctgaagtacatatccctagctgtgctggtggtccagaatgcctccctcatcctcagcatccgctacgcccgcacgttgccaggggaccgcttctttgccaccactgctgtggtcatggcggaagtgctcaaaggtctcacctgcctgctgctgctcttcgcacagaagaggggtaacgtgaagcacctggttctcttcctccatgaggctgtcctggtgcagtatgtggacacgctcaagctcgcagtgccctctctcatctacaccttgcagaataacctccagtatgttgccatctctaacctaccagctgccactttccagccttccccgaggtgcagccaaagccatagcctctgcctctgcctccgcctccgggccctgcgttcaccagcagcctcccgggcagccaccaccaccgcagctgtcttcccaccgtggagacctcatcacggagccctttctgccaaagtcagtgctggtgaagtgagggctggcagcaatggggggacacaagggagggggactggggtggagggtgttgggcatctgcaggacccaagtcgccaccctccggggcctggctcctctgggtttgggagatggtcttttctcccaggtcactgagacttctggaggggtgtgggactagagctgggtgtcacgtgaacccttcctggtagggtgacccccttcccctggagggggttttagagctgccgcctctgctccctctaacctctttggaggcagggttgggggtattgtcattcaaggccttttttttgtctgctccctccccgaccctgtgccctcttctggaggtttctcgtctgggagagtccctcccagcagtccctccacctccataaggacacactggacaaaactcccgcagctcttcaggaatgaccgatgcctacctgtggggttcagttgcccatagtttgaggccttctctcctcccttaccaccgctctggatcatgttactagttccgtcttttgtgtggccttgggccagcttccttgataccttgaagatgggcttcttgtgagtccccagggagaaagggacaagagctaagatttttgcatcagcccttctggcagaaggtgtggtaggggccatttgttttttttagtggacttgggatttgtggtgtaatcatatcattaatgatccagggtgtgggaaaaatggaggtccttgaagtggctgaatctcattgtatttaagacactgtcagttgccagatgtaggcttatttttggagatgtctaggagaggaaaaagctaccaatcatactcttgatatccgtctggctgtgtgaggcacccctacctcatgggggtgtcttgggattgatgaactgtggaacctgcctcctgcgctccccaaagcttattaaccccttaactgtatcggggcggggtgtgtgtgtgcatggaagatgcctgggctgtctttgctatatgtaaatagagccattggatctttatttttgattaatttgttctgattttttggtttgttttttaaggaactgtaatgaacaaatgtcaggatatccaatgccaaataaagatgttgtatttatttagtccacgtgtagctttctgaccaggtgggcaccattactaaccccaggactaccagcctcaccaccgccgccctcacttgctcaggaaacccgcctgccagcctagcccagctttgtgtttttctttcctccccattcccaccacagggttgctcaccaaggtgaagggttcctagccgctgggattgaagacattggcctggcctcgttctctcttcttgcccttggcccagctgggaccaaactctgatcagtattaggggtagagtgaggtagacactggactccctgtccccaccacccctgccccacccagggccaacatgactaagctctctcatgacccacctcagctcagccccccagcccctgccagctccacactatctcttagctgagtttttgcaaataaaatgtgttgtgtatcttgccgacttgggttgggcagcctcaaaggaagcactcaggtatggtgggcaggatcacc

SEQ ID NO: 363723 - DNA, 2203 bp, Homo sapiens
  misc_feature (1)..(1): n is a, c, g, or t
natcgggggatgatctggaaagcgcgatcagtgaagcggacgaacggcaggataaggcgggtctagtgacaggaatgggccgatgaagctctgtagggatgctcacaggcgcctgaagtacatatccctagctgtgctggtggtccagaatgcctccctcatcctcagcatccgctacgcccgcacgttgccaggggaccgcttctttgccaccactgctgtggtcatggcggaagtgctcaaaggtctcacctgcctgctgctgctcttcgcacagaagaggggtaacgtgaagcacctggttctcttcctccatgaggctgtcctggtgcagtatgtggacacgctcaagctcgcagtgccctctctcatctacaccttgcagaataacctccagtatgttgccatctctaacctaccagctgccactttccagccttccccgaggtgcagccaaagccatagcctctgcctctgcctccgcctccgggccctgcgttcaccagcagcctcccgggcagccaccaccaccgcagctgtcttcccaccgtggagacctcatcacggagccctttctgccaaagtcagtgctggtgaagtgagggctggcagcaatggggggacacaagggagggggactggggtggagggtgttgggcatctgcaggacccaagtcgccaccctccggggcctggctcctctgggtttgggagatggtcttttctcccaggtcactgagacttctggaggggtgtgggactagagctgggtgtcacgtgaacccttcctggtagggtgacccccttcccctggagggggttttagagctgccgcctctgctccctctaacctctttggaggcagggttgggggtattgtcattcaaggccttttttttgtctgctccctccccgaccctgtgccctcttctggaggtttctcgtctgggagagtccctcccagcagtccctccacctccataaggacacactggacaaaactcccgcagctcttcaggaatgaccgatgcctacctgtggggttcagttgcccatagtttgaggccttctctcctcccttaccaccgctctggatcatgttactagttccgtcttttgtgtggccttgggccagcttccttgataccttgaagatgggcttcttgtgagtccccagggagaaagggacaagagctaagatttttgcatcagcccttctggcagaaggtgtggtaggggccatttgttttttttagtggacttgggatttgtggtgtaatcatatcattaatgatccagggtgtgggaaaaatggaggtccttgaagtggctgaatctcattgtatttaagacactgtcagttgccagatgtaggcttatttttggagatgtctaggagaggaaaaagctaccaatcatactcttgatatccgtctggctgtgtgaggcacccctacctcatgggggtgtcttgggattgatgaactgtggaacctgcctcctgcgctccccaaagcttattaaccccttaactgtatcggggcggggtgtgtgtgtgcatggaagatgcctgggctgtctttgctatatgtaaatagagccattggatctttatttttgattaatttgttctgattttttggtttgttttttaaggaactgtaatgaacaaatgtcaggatatccaatgccaaataaagatgttgtatttatttagtccacgtgtagctttctgaccaggtgggcaccattactaaccccaggactaccagcctcaccaccgccgccctcacttgctcaggaaacccgcctgccagcctagcccagctttgtgtttttctttcctccccattcccaccacagggttgctcaccaaggtgaagggttcctagccgctgggattgaagacattggcctggcctcgttctctcttcttgcccttggcccagctgggaccaaactctgatcagtattaggggtagagtgaggtagacactggactccctgtccccaccacccctgccccacccagggccaacatgactaagctctctcatgacccacctcagctcagccccccagcccctgccagctccacactatctcttagctgagtttttgcaaataaaatgtgttgtgtatcttgccgacttgggttgggcagcctcaaaggaagcactcaggtatggtgggcaggatcacc

SEQ ID NO: 363724 - DNA, 1179 bp, Homo sapiens
  misc_feature (1)..(1): n is a, c, g, or t
natcgggggatgatctggaaagcgcgatcagtgaagcggacgaacggcaggataaggcgggtctagtgacaggaatgggccgatgaagctctgtagggatggtgggtaggccgatcgggccgtgtccccggcctcccgatccgacggaatttggaaatcccggggctattcatacattgagcttttaggagcggaggagaaaagccaccaccctgacgatcccggctctcgctccaccttcactcaggtggcccggcagcggaagtgacgaacgcggaagtggtttttctgttgccgaggggacgggccgggcagatgccaacatggcagcggttggggctggtggttccaccgcggcgcccgggccaggggcggtttccgcgggtgcattggagccggggaccgccagtgcggctcacaggcgcctgaagtacatatccctagctgtgctggtggtccagaatgcctccctcatcctcagcatccgctacgcccgcacgttgccaggggaccgcttctttgccaccactgctgtggtcatggcggaagtgctcaaaggtctcacctgcctgctgctgctcttcgcacagaagaggggtaacgtgaagcacctggttctcttcctccatgaggctgtcctggtgcagtatgtggacacgctcaagctcgcagtgccctctctcatctacaccttgcagaataacctccagtatgttgccatctctaacctaccagctgccactttccagccttccccgaggtgcagccaaagccatagcctctgcctctgcctccgcctccgggccctgcgttcaccagcagcctcccgggcagccaccaccaccgcagctgtcttcccaccgtggagacctcatcacggagccctttctgccaaagttgctcaccaaggtgaagggttcctagccgctgggattgaagacattggcctggcctcgttctctcttcttgcccttggcccagctgggaccaaactctgatcagtattaggggtagagtgaggtagacactggactccctgtccccaccacccctgccccacccagggccaacatgactaagctctctcatgacccacctcagctcagccccccagcccctgccagctccacactatctcttagctgagtttttgcaaataaaatgtgttgtgtatcttgc

SEQ ID NO: 363725 - DNA, 766 bp, Homo sapiens
  misc_feature (1)..(1): n is a, c, g, or t
natcgggggatgatctggaaagcgcgatcagtgaagcggacgaacggcaggataaggcgggtctagtgacaggaatgggccgatgaagctctgtagggatggtgggtaggccgatcgggccgtgtccccggcctcccgatccgacggaatttggaaatcccggggctattcatacattgagcttttaggagcggaggagaaaagccaccaccctgacgatcccggctctcgctccaccttcactcaggtggcccggcagcggaagtgacgaacgcggaagtggtttttctgttgccgaggggacgggccgggcagatgccaacatggcagcggttggggctggtggttccaccgcggcgcccgggccaggggcggtttccgcgggtgcattggagccggggaccgccagtgcgggtgagacagtctgcccgagcagtcgcatgggaggcggaggtcgggatcgctgggagtcgggaatgttcctcactaaagtgagagggagcatcccgtgtggaccgacgtgtgtgtgtgtgtgtgtgtgcacattgtcagtgtgttgggggcggggaagagaacattctgagagtgattgtgggatccttccgcatatggagagtagagaccattgtgagtgtggtgggtaattctttttgggaaggctaaggccaccgaaaccattctgaatatgtggagtccttccgtgtggaagagaccattctgcgggtgtgggagttcctcactgaagaagggggagactattctgagg

SEQ ID NO: 363726 - DNA, 315 bp, Homo sapiens
cccaccgactgggggaatggactacacaccgatgtagttggctttgggctccatctcgactttggtggggagagggtgccaccttctggacaaggaacagtatgagcaaaggtctggaggctgcttttgagaagtagcctcacggagtctttccaggatggtggggccgtaggggagacagaagcacctagtgccagggctgggaaccttggctcaattatctagattcttgtgaacaggaaagggacacgttaattagaaatggcatgaagggcctggagagggcaggcagggaaaactccatttaaaagccct

SEQ ID NO: 363727 - DNA, 695 bp, Homo sapiens
gtcccgcctcaagcctcgggctacttcctccaactctaatcatgccgcacccctcatggttagttgatggcctccctggcaggtgttcaaggccaagttcaagaattgggacgatgtgttgacggtggactacacacgcaatgcggaggccgtgctgcagagcccgggtctctccgggaaggtgaaacgcgacgccgagaagaaagaccagatgaaggctgacctcactgcgcttttcctgccgcggcagccgcccatgtcgctggccgaggcggagcagctgatggaggagtggaacgaagacctagacggcatggagggtttcgtgctggagggcaagaagtttgcgcggctgccggaagaggagtttggccacttctacacgcaggactgctacgtcttcctctgcaggtactgggtgcctgtggagtacgaggaggaggaaaagaaggaagacaaggaggagaaggccgagggcaaagaaggcgaggaagcaaccgctgaggcagaggagaagcagccagaggaggacttccagtgcatcgtgtacttctggcagggccgtgaagcctccaatatgggctggctcaccttcaccttcagcctgcaaaagaagttcgagagcctcttccctgggaagctggaggtgtgcctggcagccccgcgagcccgaggccaggcggaggggtgtggtg

SEQ ID NO: 363728 - DNA, 3644 bp, Homo sapiens
tgatcgagctcggtccctcgttattcatcggcaccccccgcagatgcgccgcctggtgcacctgcagacgctcgtgctcaatggaaaccccctgctgcatgcacagctccggcagctcccagcgatgacggccctgcagaccctgcacctgcggagcacccagcgcacccagagcaacctgcccaccagcctggagggtctgagcaacctcgcagacgtggatctgtcctgcaatgacctgacacgggtgcccgagtgtctgtacaccctccccagcctgcgccgcctcaacctcagcagcaaccagatcacggagctgtccctgtgcatagaccagtgggtgcacgtggaaactctgaacctgtcccgaaatcagctcacctcactgccctcagccatttgcaagctgagcaagctgaagaagctgtacctgaattccaacaagctggactttgacgggctgccctcaggcattggcaagctcaccaacctggaagagttcatggctgccaacaacaacctggagctggtccctgaaagtctctgcaggtgcccaaagctgaggaaacttgtcctgaacaagaaccacctggtgaccctcccagaagccatccatttcctgacggagatcgaggtcctggatgtgcgggagaaccccaacctggtcatgccgcccaagcccgcagaccgtgccgctgagtggtacaacatcgacttctcgctgcagaaccagctgcggctagcgggtgcctctcctgctaccgtggctgcagctgcagctgcagggagtgggcccaaggaccctatggctcgcaagatgcgactgcggaggcgcaaggattcagcccaggatgaccaggccaagcaggtgctgaagggcatgtcagatgttgcccaggagaagaacaaaaagcaggaggagagcgcagatgcccgggcccccagcgggaaggtgcggcgttgggaccagggcctggagaagccccgccttgactactccgagttcttcacggaggacgtgggccagctgcccggactgaccatctggcagatagagaacttcgtgcctgtgctggtggaggaagccttccacggcaagttctacgaggctgactgctacattgtgctcaagacctttctggatgacagcggctccctcaactgggagatctactactggattggcggggaggccacactcgacaagaaagcttgctctgccatccacgctgtcaacttgcgcaactacctgggtgctgagtgccgcactgtccgggaggagatgggcgatgagagcgaggagttcctgcaggtgtttgacaacgacatctcctacattgagggtggaacagccagtggcttctacactgtggaagacacacactatgtcaccaggatgtatcgtgtgtatgggaaaaagaacatcaagttggagcctgtgcccctcaaggggacctctctggacccaaggtttgttttcctgctggaccgagggctagacatctacgtatggcggggggcccaggccacactgagcagcaccaccaaggccaggctctttgcagagaaaattaacaagaatgagcggaaagggaaggctgagatcacactgctggtgcagggccaggagctcccagagttctgggaggcactgggtggggagccctctgagatcaagaagcacgtgcctgaagacttctggccgccgcagcccaagctgtacaaggtgggcctgggcttgggctacctggagctgccacagatcaactacaagctctccgtggaacataagcagcgtcccaaggtggagctgatgccaagaatgcggctgctgcagagtctgctggacacgcgctgcgtgtacattctggactgttggtccgacgtgttcatctggctcggccgcaagtccccgcgcctggtgcgcgctgccgccctcaagctgggtcaggagctgtgcgggatgctgcaccggccacgccatgccacggtcagccgcagcctcgagggcaccgaggcgcaggtgttcaaggccaagttcaagaattgggacgatgtgttgacggtggactacacacgcaatgcggaggccgtgctgcagagcccgggtctctccgggaaggtgaaacgcgacgccgagaagaaagaccagatgaaggctgacctcactgcgcttttcctgccgcggcagccgcccatgtcgctggccgaggcggagcagctgatggaggagtggaacgaagacctagacggcatggagggtttcgtgctggagggcaagaagtttgcgcggctgccggaagaggagtttggccacttctacacgcaggactgctacgtcttcctctgcaggtactgggtgcctgtggagtacgaggaggaggaaaagaaggaagacaaggaggagaaggccgagggcaaagaaggcgaggaagcaaccgctgaggcagaggagaagcagccagaggaggacttccagtgcatcgtgtacttctggcagggccgtgaagcctccaatatgggctggctcaccttcaccttcagcctgcaaaagaagttcgagagcctcttccctgggaagctggaggtggtacgcatgacgcagcagcaggagaaccccaagttcctgtcccatttcaagaggaagttcatcatccaccggggcaagaggaaggcggtccagggcgcccaacagcccagcctctaccagatccgcaccaacggcagcgccctctgcacccggtgcatccagatcaacaccgactccagcctcctcaactccgagttctgcttcatcctcaaggttccctttgagagtgaggacaaccagggcatcgtgtatgcctgggtgggccgggcatcagaccctgacgaagccaagttggcagaagacatcctgaacaccatgtttgacacctcctacagcaagcaggttatcaacgaaggtgaggagcctgagaacttcttctgggtgggcattggggcacagaagccctatgatgacgatgccgagtacatgaaacacacacgtctcttccggtgctccaacgagaagggctactttgcagtgactgagaaatgctccgacttttgccaagatgacctggcagatgatgacatcatgttgctagacaatggccaagaggtctacatgtgggtggggacccagactagccaggtggagatcaagctgagcctgaaggcctgccaggtatatatccagcacatgcggtccaaggaacatgagcggccgcgccggctgcgcctggtccgcaagggcaatgagcagcacgcctttacccgctgcttccacgcctggagcgccttctgcaaggccctggcctaagacaggctggcacagccccaggcttggtgaggaagaggaaggggcctcatccactgtctgctagcaaagaatgtactcaggtgacaccacctgctccagccacgtccagtgccacagtccccagtagcctcaagcagcaccaatggggatgaccctgacaggtgccctcaggggtctgggaaatccaactctctccacagtgtgagtgcacgtgtgaagccccctcactcttccgctagggataaagcagatgtggatgccctttaagagatattaaatgcttttattttcaatatta

SEQ ID NO: 363729 - DNA, 4572 bp, Homo sapiens
cccagcccgcggctccccccagcgccctcgccccggcgctccctagcccggcgcggcccggcagcgagagcggcgccatggaggccaccggggtgctgccgttcgtgcgtggcgtggacctcagcggcaacgacttcaagggcggctacttccctgagaatgtcaaggccatgaccagcctgcggtggctgaagctgaaccgcactggcctctgctacctgcccgaggagctggccgccctgcagaagctggaacacttgtctgtgagccacaacaacctgaccacgcttcatggggagctgtccagcctgccatcgctgcgcgccatcgtggcccgagccaacagtctgaagaattccggagtccccgatgacatcttcaagctagatgatctctcagtcctggacttgagccacaaccagctgacagagtgcccgcgggagctggagaacgccaagaacatgctggtgctgaacctcagccacaacagcatcgacaccatccccaaccagctcttcatcaacctcactgacctactatacctggacctcagcgagaaccgcctggagagcctgcccccgcagatgcgccgcctggtgcacctgcagacgctcgtgctcaatggaaaccccctgctgcatgcacagctccggcagctcccagcgatgacggccctgcagaccctgcacctgcggagcacccagcgcacccagagcaacctgcccaccagcctggagggtctgagcaacctcgcaggtcaggcagccccaggagcccctctgagctcgggccccctctgggccctcttgcttccttgggtggaaggggttgaaccctgctcttcggaccaatacccagagggacaaggctggagttatgttacagtgacttttgcgattatgatgatgccttaacactgactttatgcctagaaaactcccccgcaacccccatgtgagggagtttgtccaaatggagaaacttgggcgcacagcagttgtcacttgcctaagccacacagctcagaggtggcagagctggggttcacactagggctggctgccctggcacctggtgtatgggccccagctgatgcaccccaccctgcaccccagacgtggatctgtcctgcaatgacctgacacgggtgcccgagtgtctgtacaccctccccagcctgcgccgcctcaacctcagcagcaaccagatcacggagctgtccctgtgcatagaccagtgggtgcacgtggaaactctgaacctgtcccgaaatcagctcacctcactgccctcagccatttgcaagctgagcaagctgaagaagctgtacctgaattccaacaagctggactttgacgggctgccctcaggcattggcaagctcaccaacctggaagagttcatggctgccaacaacaacctggagctggtccctgaaagtctctgcaggtgcccaaagctgaggaaacttgtcctgaacaagaaccacctggtgaccctcccagaagccatccatttcctgacggagatcgaggtcctggatgtgcgggagaaccccaacctggtcatgccgcccaagcccgcagaccgtgccgctgagtggtacaacatcgacttctcgctgcagaaccagctgcggctagcgggtgcctctcctgctaccgtggctgcagctgcagctgcagggagtgggcccaaggaccctatggctcgcaagatgcgactgcggaggcgcaaggattcagcccaggatgaccaggccaagcaggtgctgaagggcatgtcagatgttgcccaggagaagaacaaaaagcaggaggagagcgcagatgcccgggcccccagcgggaaggtgcggcgttgggaccagggcctggagaagccccgccttgactactccgagttcttcacggaggacgtgggccagctgcccggactgaccatctggcagatagagaacttcgtgcctgtgctggtggaggaagccttccacggcaagttctacgaggctgactgctacattgtgctcaagacctttctggatgacagcggctccctcaactgggagatctactactggattggcggggaggccacactcgacaagaaagcttgctctgccatccacgctgtcaacttgcgcaactacctgggtgctgagtgccgcactgtccgggaggagatgggcgatgagagcgaggagttcctgcaggtgtttgacaacgacatctcctacattgagggtggaacagccagtggcttctacactgtggaagacacacactatgtcaccaggatgtatcgtgtgtatgggaaaaagaacatcaagttggagcctgtgcccctcaaggggacctctctggacccaaggtttgttttcctgctggaccgagggctagacatctacgtatggcggggggcccaggccacactgagcagcaccaccaaggccaggctctttgcagagaaaattaacaagaatgagcggaaagggaaggctgagatcacactgctggtgcagggccaggagctcccagagttctgggaggcactgggtggggagccctctgagatcaagaagcacgtgcctgaagacttctggccgccgcagcccaagctgtacaaggtgggcctgggcttgggctacctggagctgccacagatcaactacaagctctccgtggaacataagcagcgtcccaaggtggagctgatgccaagaatgcggctgctgcagagtctgctggacacgcgctgcgtgtacattctggactgttggtccgacgtgttcatctggctcggccgcaagtccccgcgcctggtgcgcgctgccgccctcaagctgggtcaggagctgtgcgggatgctgcaccggccacgccatgccacggtcagccgcagcctcgagggcaccgaggcgcaggtgttcaaggccaagttcaagaattgggacgatgtgttgacggtggactacacacgcaatgcggaggccgtgctgcagagcccgggtctctccgggaaggtgaaacgcgacgccgagaagaaagaccagatgaaggctgacctcactgcgcttttcctgccgcggcagccgcccatgtcgctggccgaggcggagcagctgatggaggagtggaacgaagacctagacggcatggagggtttcgtgctggagggcaagaagtttgcgcggctgccggaagaggagtttggccacttctacacgcaggactgctacgtcttcctctgcaggtactgggtgcctgtggagtacgaggaggaggaaaagaaggaagacaaggaggagaaggccgagggcaaagaaggcgaggaagcaaccgctgaggcagaggagaagcagccagaggaggacttccagtgcatcgtgtacttctggcagggccgtgaagcctccaatatgggctggctcaccttcaccttcagcctgcaaaagaagttcgagagcctcttccctgggaagctggaggtggtacgcatgacgcagcagcaggagaaccccaagttcctgtcccatttcaagaggaagttcatcatccaccggggcaagaggaaggcggtccagggcgcccaacagcccagcctctaccagatccgcaccaacggcagcgccctctgcacccggtgcatccagatcaacaccgactccagcctcctcaactccgagttctgcttcatcctcaaggttccctttgagagtgaggacaaccagggcatcgtgtatgcctgggtgggccgggcatcagaccctgacgaagccaagttggcagaagacatcctgaacaccatgtttgacacctcctacagcaagcaggttatcaacgaaggtgaggagcctgagaacttcttctgggtgggcattggggcacagaagccctatgatgacgatgccgagtacatgaaacacacacgtctcttccggtgctccaacgagaagggctactttgcagtgactgagaaatgctccgacttttgccaagatgacctggcagatgatgacatcatgttgctagacaatggccaagaggtctacatgtgggtggggacccagactagccaggtggagatcaagctgagcctgaaggcctgccaggtatatatccagcacatgcggtccaaggaacatgagcggccgcgccggctgcgcctggtccgcaagggcaatgagcagcacgcctttacccgctgcttccacgcctggagcgccttctgcaaggccctggcctaagacaggctggcacagccccaggcttggtgaggaagaggaaggggcctcatccactgtctgctagcaaagaatgtactcaggtgacaccacctgctccagccacgtccagtgccacagtccccagtagcctcaagcagcaccaatggggatgaccctgacaggtgccctcaggggtctgggaaatccaactctctccacagtgtgagtgcacgtgtgaagccccctcactcttccgctagggataaagcagatgtggatgccctttaagagatattaaatgcttttattttcaatattaaaaatcagtatttttaatattaaaatgg

SEQ ID NO: 363730 - DNA, 2363 bp, Homo sapiens
gtatcgtgtgtatgggaaaaagaacatcctggtgacatagtgtgtgtcttccacagatgtagaagccactggctgttccaccctcaatgtaggagacacacactatgtcaccaggatgtatcgtgtgtatgggaaaaagaacatcaagttggagcctgtgcccctcaaggggacctctctggacccaaggtttgttttcctgctggaccgagggctagacatctacgtatggcggggggcccaggccacactgagcagcaccaccaaggccaggctctttgcagagaaaattaacaagaatgagcggaaagggaaggctgagatcacactgctggtgcagggccaggagctcccagagttctgggaggcactgggtggggagccctctgagatcaagaagcacgtgcctgaagacttctggccgccgcagcccaagctgtacaaggtgggcctgggcttgggctacctggagctgccacagatcaactacaagctctccgtggaacataagcagcgtcccaaggtggagctgatgccaagaatgcggctgctgcagagtctgctggacacgcgctgcgtgtacattctggactgttggtccgacgtgttcatctggctcggccgcaagtccccgcgcctggtgcgcgctgccgccctcaagctgggtcaggagctgtgcgggatgctgcaccggccacgccatgccacggtcagccgcagcctcgagggcaccgaggcgcaggtgttcaaggccaagttcaagaattgggacgatgtgttgacggtggactacacacgcaatgcggaggccgtgctgcagagcccgggtctctccgggaaggtgaaacgcgacgccgagaagaaagaccagatgaaggctgacctcactgcgcttttcctgccgcggcagccgcccatgtcgctggccgaggcggagcagctgatggaggagtggaacgaagacctagacggcatggagggtttcgtgctggagggcaagaagtttgcgcggctgccggaagaggagtttggccacttctacacgcaggactgctacgtcttcctctgcaggtactgggtgcctgtggagtacgaggaggaggaaaagaaggaagacaaggaggagaaggccgagggcaaagaaggcgaggaagcaaccgctgaggcagaggagaagcagccagaggaggacttccagtgcatcgtgtacttctggcagggccgtgaagcctccaatatgggctggctcaccttcaccttcagcctgcaaaagaagttcgagagcctcttccctgggaagctggaggtggtacgcatgacgcagcagcaggagaaccccaagttcctgtcccatttcaagaggaagttcatcatccaccggggcaagaggaaggcggtccagggcgcccaacagcccagcctctaccagatccgcaccaacggcagcgccctctgcacccggtgcatccagatcaacaccgactccagcctcctcaactccgagttctgcttcatcctcaaggttccctttgagagtgaggacaaccagggcatcgtgtatgcctgggtgggccgggcatcagaccctgacgaagccaagttggcagaagacatcctgaacaccatgtttgacacctcctacagcaagcaggttatcaacgaaggtgaggagcctgagaacttcttctgggtgggcattggggcacagaagccctatgatgacgatgccgagtacatgaaacacacacgtctcttccggtgctccaacgagaagggctactttgcagtgactgagaaatgctccgacttttgccaagatgacctggcagatgatgacatcatgttgctagacaatggccaagaggtctacatgtgggtggggacccagactagccaggtggagatcaagctgagcctgaaggcctgccaggtatatatccagcacatgcggtccaaggaacatgagcggccgcgccggctgcgcctggtccgcaagggcaatgagcagcacgcctttacccgctgcttccacgcctggagcgccttctgcaaggccctggcctaagacaggctggcacagccccaggcttggtgaggaagaggaaggggcctcatccactgtctgctagcaaagaatgtactcaggtgacaccacctgctccagccacgtccagtgccacagtccccagtagcctcaagcagcaccaatggggatgaccctgacaggtgccctcaggggtctgggaaatccaactctctccacagtgtgagtgcacgtgtgaagccccctcactcttccgctagggataaagcagatgtggatgccctttaagagatattaaatgcttttattttcaatatta

SEQ ID NO: 363731 - DNA, 4629 bp, Homo sapiens
cccagcccgcggctccccccagcgccctcgccccggcgctccctagcccggcgcggcccggcagcgagagcggcgccatggaggccaccggggtgctgccgttcgtgcgtggcgtggacctcagcggcaacgacttcaagggcggctacttccctgagaatgtcaaggccatgaccagcctgcggtggctgaagctgaaccgcactggcctctgctacctgcccgaggagctggccgccctgcagaagctggaacacttgtctgtgagccacaacaacctgaccacgcttcatggggagctgtccagcctgccatcgctgcgcgccatcgtggcccgagccaacagtctgaagaattccggagtccccgatgacatcttcaagctagatgatctctcagtcctggacttgagccacaaccagctgacagagtgcccgcgggagctggagaacgccaagaacatgctggtgctgaacctcagccacaacagcatcgacaccatccccaaccagctcttcatcaacctcactgacctactatacctggacctcagcgagaaccgcctggagagcctgcccccgcagatgcgccgcctggtgcacctgcagacgctcgtgctcaatggaaaccccctgctgcatgcacagctccggcagctcccagcgatgacggccctgcagaccctgcacctgcggagcacccagcgcacccagagcaacctgcccaccagcctggagggtctgagcaacctcgcaggtcaggcagccccaggagcccctctgagctcgggccccctctgggccctcttgcttccttgggtggaaggggttgaaccctgctcttcggaccaatacccagagggacaaggctggagttatgttacagtgacttttgcgattatgatgatgccttaacactgactttatgcctagaaaactcccccgcaacccccatgtgagggagtttgtccaaatggagaaacttgggcgcacagcagttgtcacttgcctaagccacacagctcagaggtggcagagctggggttcacactagggctggctgccctggcacctggtgtatgggccccagctgatgcaccccaccctgcaccccagacgtggatctgtcctgcaatgacctgacacgggtgcccgagtgtctgtacaccctccccagcctgcgccgcctcaacctcagcagcaaccagatcacggagctgtccctgtgcatagaccagtgggtgcacgtggaaactctgaacctgtcccgaaatcagctcacctcactgccctcagccatttgcaagctgagcaagctgaagaagctgtacctgaattccaacaagctggactttgacgggctgccctcaggcattggcaagctcaccaacctggaagagttcatggctgccaacaacaacctggagctggtccctgaaagtctctgcaggtgcccaaagctgaggaaacttgtcctgaacaagaaccacctggtgaccctcccagaagccatccatttcctgacggagatcgaggtcctggatgtgcgggagaaccccaacctggtcatgccgcccaagcccgcagaccgtgccgctgagtggtacaacatcgacttctcgctgcagaaccagctgcggctagcgggtgcctctcctgctaccgtggctgcagctgcagctgcagggagtgggcccaaggaccctatggctcgcaagatgcgactgcggaggcgcaaggattcagcccaggatgaccaggccaagcaggtgctgaagggcatgtcagatgttgcccaggagaagaacaaaaagcaggaggagagcgcagatgcccgggcccccagcgggaaggtgcggcgttgggaccagggcctggagaagccccgccttgactactccgagttcttcacggaggacgtgggccagctgcccggactgaccatctggcagatagagaacttcgtgcctgtgctggtggaggaagccttccacggcaagttctacgaggctgactgctacattgtgctcaagacctttctggatgacagcggctccctcaactgggagatctactactggattggcggggaggccacactcgacaagaaagcttgctctgccatccacgctgtcaacttgcgcaactacctgggtgctgagtgccgcactgtccgggaggagatgggcgatgagagcgaggagttcctgcaggtgtttgacaacgacatctcctacattgagggtggaacagccagtggcttctacactgtggaagacacacactatgtcaccaggatgtatcgtgtgtatgggaaaaagaacatcaagttggagcctgtgcccctcaaggggacctctctggacccaaggtttgttttcctgctggaccgagggctagacatctacgtatggcggggggcccaggccacactgagcagcaccaccaaggccaggctctttgcagagaaaattaacaagaatgagcggaaagggaaggctgagatcacactgctggtgcagggccaggagctcccagagttctgggaggcactgggtggggagccctctgagatcaagaagcacgtgcctgaagacttctggccgccgcagcccaagctgtacaaggtgggcctgggcttgggctacctggagctgccacagatcaactacaagctctccgtggaacataagcagcgtcccaaggtggagctgatgccaagaatgcggctgctgcagagtctgctggacacgcgctgcgtgtacattctggactgttggtccgacgtgttcatctggctcggccgcaagtccccgcgcctggtgcgcgctgccgccctcaagctgggtcaggagctgtgcgggatgctgcaccggccacgccatgccacggtcagccgcagcctcgagggcaccgaggcgcaggtgttcaaggccaagttcaagaattgggacgatgtgttgacggtggactacacacgcaatgcggaggccgtgctgcagagcccgggtctctccgggaaggtgaaacgcgacgccgagaagaaagaccagatgaaggctgacctcactgcgcttttcctgccgcggcagccgcccatgtcgctggccgaggcggagcagctgatggaggagtggaacgaagacctagacggcatggagggtttcgtgctggagggcaagaagtttgcgcggctgccggaagaggagtttggccacttctacacgcaggactgctacgtcttcctctgcaggtactgggtgcctgtggagtacgaggaggaggaaaagaaggaagacaaggaggagaaggccgagggcaaagaaggcgaggaagcaaccgctgaggcagaggagaagcagccagaggaggacttccagtgcatcgtgtacttctggcagggccgtgaagcctccaatatgggctggctcaccttcaccttcagcctgcaaaagaagttcgagagcctcttccctgggaagctggaggtggtacgcatgacgcagcagcaggagaaccccaagttcctgtcccatttcaagaggaagttcatcatccaccggggcaagaggaaggcggtccagggcgcccaacagcccagcctctaccagatccgcaccaacggcagcgccctctgcacccggtgcctggctgggggaggacgcagtggcgagcaagcgtcagggagccaggcctgaatccttgctgatgccccatcccttccacaggtgcatccagatcaacaccgactccagcctcctcaactccgagttctgcttcatcctcaaggttccctttgagagtgaggacaaccagggcatcgtgtatgcctgggtgggccgggcatcagaccctgacgaagccaagttggcagaagacatcctgaacaccatgtttgacacctcctacagcaagcaggttatcaacgaaggtgaggagcctgagaacttcttctgggtgggcattggggcacagaagccctatgatgacgatgccgagtacatgaaacacacacgtctcttccggtgctccaacgagaagggctactttgcagtgactgagaaatgctccgacttttgccaagatgacctggcagatgatgacatcatgttgctagacaatggccaagaggtctacatgtgggtggggacccagactagccaggtggagatcaagctgagcctgaaggcctgccaggtatatatccagcacatgcggtccaaggaacatgagcggccgcgccggctgcgcctggtccgcaagggcaatgagcagcacgcctttacccgctgcttccacgcctggagcgccttctgcaaggccctggcctaagacaggctggcacagccccaggcttggtgaggaagaggaaggggcctcatccactgtctgctagcaaagaatgtactcaggtgacaccacctgctccagccacgtccagtgccacagtccccagtagcctcaagcagcaccaatggggatgaccctgacaggtgccctcaggggtctgggaaatccaactctctccacagtgtgagtgcacgtgtgaagccccctcactcttccgctagggataaagcagatgtggatgccctttaagagatattaaatgcttttattttcaatatta

SEQ ID NO: 363732 - DNA, 4625 bp, Homo sapiens
cccagcccgcggctccccccagcgccctcgccccggcgctccctagcccggcgcggcccggcagcgagagcggcgccatggaggccaccggggtgctgccgttcgtgcgtggcgtggacctcagcggcaacgacttcaagggcggctacttccctgagaatgtcaaggccatgaccagcctgcggtggctgaagctgaaccgcactggcctctgctacctgcccgaggagctggccgccctgcagaagctggaacacttgtctgtgagccacaacaacctgaccacgcttcatggggagctgtccagcctgccatcgctgcgcgccatcgtggcccgagccaacagtctgaagaattccggagtccccgatgacatcttcaagctagatgatctctcagtcctggacttgagccacaaccagctgacagagtgcccgcgggagctggagaacgccaagaacatgctggtgctgaacctcagccacaacagcatcgacaccatccccaaccagctcttcatcaacctcactgacctactatacctggacctcagcgagaaccgcctggagagcctgcccccgcagatgcgccgcctggtgcacctgcagacgctcgtgctcaatggaaaccccctgctgcatgcacagctccggcagctcccagcgatgacggccctgcagaccctgcacctgcggagcacccagcgcacccagagcaacctgcccaccagcctggagggtctgagcaacctcgcaggtcaggcagccccaggagcccctctgagctcgggccccctctgggccctcttgcttccttgggtggaaggggttgaaccctgctcttcggaccaatacccagagggacaaggctggagttatgttacagtgacttttgcgattatgatgatgccttaacactgactttatgcctagaaaactcccccgcaacccccatgtgagggagtttgtccaaatggagaaacttgggcgcacagcagttgtcacttgcctaagccacacagctcagaggtggcagagctggggttcacactagggctggctgccctggcacctggtgtatgggccccagctgatgcaccccaccctgcaccccagacgtggatctgtcctgcaatgacctgacacgggtgcccgagtgtctgtacaccctccccagcctgcgccgcctcaacctcagcagcaaccagatcacggagctgtccctgtgcatagaccagtgggtgcacgtggaaactctgaacctgtcccgaaatcagctcacctcactgccctcagccatttgcaagctgagcaagctgaagaagctgtacctgaattccaacaagctggactttgacgggctgccctcaggcattggcaagctcaccaacctggaagagttcatggctgccaacaacaacctggagctggtccctgaaagtctctgcaggtgcccaaagctgaggaaacttgtcctgaacaagaaccacctggtgaccctcccagaagccatccatttcctgacggagatcgaggtcctggatgtgcgggagaaccccaacctggtcatgccgcccaagcccgcagaccgtgccgctgagtggtacaacatcgacttctcgctgcagaaccagctgcggctagcgggtgcctctcctgctaccgtggctgcagctgcagctgcagggagtgggcccaaggaccctatggctcgcaagatgcgactgcggaggcgcaaggattcagcccaggatgaccaggccaagcaggtgctgaagggcatgtcagatgttgcccaggagaagaacaaaaagcaggaggagagcgcagatgcccgggcccccagcgggaaggtgcggcgttgggaccagggcctggagaagccccgccttgactactccgagttcttcacggaggacgtgggccagctgcccggactgaccatctggcagatagagaacttcgtgcctgtgctggtggaggaagccttccacggcaagttctacgaggctgactgctacattgtgctcaagacctttctggatgacagcggctccctcaactgggagatctactactggattggcggggaggccacactcgacaagaaagcttgctctgccatccacgctgtcaacttgcgcaactacctgggtgctgagtgccgcactgtccgggaggagatgggcgatgagagcgaggagttcctgcaggtgtttgacaacgacatctcctacattgagggtggaacagccagtggcttctacactgtggaagacacacactatgtcaccaggatgtatcgtgtgtatgggaaaaagaacatcaagttggagcctgtgcccctcaaggggacctctctggacccaaggtttgttttcctgctggaccgagggctagacatctacgtatggcggggggcccaggccacactgagcagcaccaccaaggccaggctctttgcagagaaaattaacaagaatgagcggaaagggaaggctgagatcacactgctggtgcagggccaggagctcccagagttctgggaggcactgggtggggagccctctgagatcaagaagcacgtgcctgaagacttctggccgccgcagcccaagctgtacaaggtgggcctgggcttgggctacctggagctgccacagatcaactacaagctctccgtggaacataagcagcgtcccaaggtggagctgatgccaagaatgcggctgctgcagagtctgctggacacgcgctgcgtgtacattctggactgttggtccgacgtgttcatctggctcggccgcaagtccccgcgcctggtgcgcgctgccgccctcaagctgggtcaggagctgtgcgggatgctgcaccggccacgccatgccacggtcagccgcagcctcgagggcaccgaggcgcaggtgttcaaggccaagttcaagaattgggacgatgtgttgacggtggactacacacgcaatgcggaggccgtgctgcagagcccgggtctctccgggaaggtgaaacgcgacgccgagaagaaagaccagatgaaggctgacctcactgcgcttttcctgccgcggcagccgcccatgtcgctggccgaggcggagcagctgatggaggagtggaacgaagacctagacggcatggagggtttcgtgctggagggcaagaagtttgcgcggctgccggaagaggagtttggccacttctacacgcaggactgctacgtcttcctctgcaggtactgggtgcctgtggagtacgaggaggaggaaaagaaggaagacaaggaggagaaggccgagggcaaagaaggcgaggaagcaaccgctgaggcagaggagaagcagccagaggaggacttccagtgcatcgtgtacttctggcagggccgtgaagcctccaatatgggctggctcaccttcaccttcagcctgcaaaagaagttcgagagcctcttccctgggaagctggaggtggtacgcatgacgcagcagcaggagaaccccaagttcctgtcccatttcaagaggaagttcatcatccaccggggcaagaggaaggcggtccagggcgcccaacagcccagcctctaccagatccgcaccaacggcagcgccctctgcacccggtgcatccagatcaacaccgactccagcctcctcaactccgagttctgcttcatcctcaaggttccctttgagagtgaggacaaccagggcatcgtgtatgcctgggtgggccgggcatcagaccctgacgaagccaagttggcagaagacatcctgaacaccatgtttgacacctcctacagcaagcaggttatcaacgaaggtgaggagcctgagaacttcttctgggtgggcattggggcacagaagccctatgatgacgatgccgagtacatgaaacacacacgtctcttccggtgctccaacgagaagggctactttgcagtgactgagaaatgctccgacttttgccaagatgacctggcagatgatgacatcatgttgctagacaatggccaagaggtctacatgtgggtggggacccagactagccaggtggagatcaagctgagcctgaaggcctgccaggtaatctgggtggagggagggccgaggtgggcctgtgggcagggcagggtcatcacccaaggctcgctgtccccttgccaggtatatatccagcacatgcggtccaaggaacatgagcggccgcgccggctgcgcctggtccgcaagggcaatgagcagcacgcctttacccgctgcttccacgcctggagcgccttctgcaaggccctggcctaagacaggctggcacagccccaggcttggtgaggaagaggaaggggcctcatccactgtctgctagcaaagaatgtactcaggtgacaccacctgctccagccacgtccagtgccacagtccccagtagcctcaagcagcaccaatggggatgaccctgacaggtgccctcaggggtctgggaaatccaactctctccacagtgtgagtgcacgtgtgaagccccctcactcttccgctagggataaagcagatgtggatgccctttaagagatattaaatgcttttattttcaatatta

SEQ ID NO: 363733 - DNA, 1516 bp, Homo sapiens
gacccacgctgttcggacccacgcttccgggctgacctcactgcgcttttcctgccgcggcagccgcccatgtcgctggccgaggcggagcagctgatggaggagtggaacgaagacctagacggcatggagggtttcgtgctggagggcaagaagtttgcgcggctgccggaagaggagtttggccacttctacacgcaggactgctacgtcttcctctgcaggtactgggtgcctgtggagtacgaggaggaggaaaagaaggaagacaaggaggagaaggccgagggcaaagaaggcgaggaagcaaccgctgaggcagaggagaagcagccagaggaggacttccagtgcatcgtgtacttctggcagggccgtgaagcctccaatatgggctggctcaccttcaccttcagcctgcaaaagaagttcgagagcctcttccctgggaagctggaggtggtacgcatgacgcagcagcaggagaaccccaagttcctgtcccatttcaagaggaagttcatcatccaccggggcaagaggaaggcggtccagggcgcccaacagcccagcctctaccagatccgcaccaacggcagcgccctctgcacccggtgcatccagatcaacaccgactccagcctcctcaactccgagttctgcttcatcctcaaggttccctttgagagtgaggacaaccagggcatcgtgtatgcctgggtgggccgggcatcagaccctgacgaagccaagttggcagaagacatcctgaacaccatgtttgacacctcctacagcaagcaggttatcaacgaaggtgaggagcctgagaacttcttctgggtgggcattggggcacagaagccctatgatgacgatgccgagtacatgaaacacacacgtctcttccggtgctccaacgagaagggctactttgcagtgactgagaaatgctccgacttttgccaagatgacctggcagatgatgacatcatgttgctagacaatggccaagaggtctacatgtgggtggggacccagactagccaggtggagatcaagctgagcctgaaggcctgccaggtatatatccagcacatgcggtccaaggaacatgagcggccgcgccggctgcgcctggtccgcaagggcaatgagcagcacgcctttacccgctgcttccacgcctggagcgccttctgcaaggccctggcctaagacaggctggcacagccccaggcttggtgaggaagaggaaggggcctcatccactgtctgctagcaaagaatgtactcaggtgacaccacctgctccagccacgtccagtgccacagtccccagtagcctcaagcagcaccaatggggatgaccctgacaggtgccctcaggggtctgggaaatccaactctctccacagtgtgagtgcacgtgtgaagccccctcactcttccgctagggataaagcagatgtggatgccctttaagagatattaaatgcttttattttcaatatta

SEQ ID NO: 363734 - DNA, 4679 bp, Homo sapiens
cccagcccgcggctccccccagcgccctcgccccggcgctccctagcccggcgcggcccggcagcgagagcggcgccatggaggccaccggggtgctgccgttcgtgcgtggcgtggacctcagcggcaacgacttcaagggcggctacttccctgagaatgtcaaggccatgaccagcctgcggtggctgaagctgaaccgcactggcctctgctacctgcccgaggagctggccgccctgcagaagctggaacacttgtctgtgagccacaacaacctgaccacgcttcatggggagctgtccagcctgccatcgctgcgcgccatcgtggcccgagccaacagtctgaagaattccggagtccccgatgacatcttcaagctagatgatctctcagtcctggacttgagccacaaccagctgacagagtgcccgcgggagctggagaacgccaagaacatgctggtgctgaacctcagccacaacagcatcgacaccatccccaaccagctcttcatcaacctcactgacctactatacctggacctcagcgagaaccgcctggagagcctgcccccgcagatgcgccgcctggtgcacctgcagacgctcgtgctcaatggaaaccccctgctgcatgcacagctccggcagctcccagcgatgacggccctgcagaccctgcacctgcggagcacccagcgcacccagagcaacctgcccaccagcctggagggtctgagcaacctcgcaggtcaggcagccccaggagcccctctgagctcgggccccctctgggccctcttgcttccttgggtggaaggggttgaaccctgctcttcggaccaatacccagagggacaaggctggagttatgttacagtgacttttgcgattatgatgatgccttaacactgactttatgcctagaaaactcccccgcaacccccatgtgagggagtttgtccaaatggagaaacttgggcgcacagcagttgtcacttgcctaagccacacagctcagaggtggcagagctggggttcacactagggctggctgccctggcacctggtgtatgggccccagctgatgcaccccaccctgcaccccagacgtggatctgtcctgcaatgacctgacacgggtgcccgagtgtctgtacaccctccccagcctgcgccgcctcaacctcagcagcaaccagatcacggagctgtccctgtgcatagaccagtgggtgcacgtggaaactctgaacctgtcccgaaatcagctcacctcactgccctcagccatttgcaagctgagcaagctgaagaagctgtacctgaattccaacaagctggactttgacgggctgccctcaggcattggcaagctcaccaacctggaagagttcatggctgccaacaacaacctggagctggtccctgaaagtctctgcaggtgcccaaagctgaggaaacttgtcctgaacaagaaccacctggtgaccctcccagaagccatccatttcctgacggagatcgaggtcctggatgtgcgggagaaccccaacctggtcatgccgcccaagcccgcagaccgtgccgctgagtggtacaacatcgacttctcgctgcagaaccagctgcggctagcgggtgcctctcctgctaccgtggctgcagctgcagctgcagggagtgggcccaaggaccctatggctcgcaagatgcgactgcggaggcgcaaggattcagcccaggatgaccaggccaagcaggtgctgaagggcatgtcagatgttgcccaggagaagaacaaaaagcaggaggagagcgcagatgcccgggcccccagcgggaaggtgcggcgttgggaccagggcctggagaagccccgccttgactactccgagttcttcacggaggacgtgggccagctgcccggactgaccatctggcagatagagaacttcgtgcctgtgctggtggaggaagccttccacggcaagttctacgaggctgactgctacattgtgctcaagacctttctggatgacagcggctccctcaactgggagatctactactggattggcggggaggccacactcgacaagaaagcttgctctgccatccacgctgtcaacttgcgcaactacctgggtgctgagtgccgcactgtccgggaggagatgggcgatgagagcgaggagttcctgcaggtgtttgacaacgacatctcctacattgagggtggaacagccagtggcttctacactgtggaagacacacactatgtcaccaggatgtatcgtgtgtatgggaaaaagaacatcaagttggagcctgtgcccctcaaggggacctctctggacccaaggtttgttttcctgctggaccgagggctagacatctacgtatggcggggggcccaggccacactgagcagcaccaccaaggccaggctctttgcagagaaaattaacaagaatgagcggaaagggaaggctgagatcacactgctggtgcagggccaggagctcccagagttctgggaggcactgggtggggagccctctgagatcaagaagcacgtgcctgaagacttctggccgccgcagcccaagctgtacaaggtgggcctgggcttgggctacctggagctgccacagatcaactacaagctctccgtggaacataagcagcgtcccaaggtggagctgatgccaagaatgcggctgctgcagagtctgctggacacgcgctgcgtgtacattctggactgttggtccgacgtgttcatctggctcggccgcaagtccccgcgcctggtgcgcgctgccgccctcaagctgggtcaggagctgtgcgggatgctgcaccggccacgccatgccacggtcagccgcagcctcgagggcaccgaggcgcaggtgttcaaggccaagttcaagaattgggacgatgtgttgacggtggactacacacgcaatgcggaggccgtgctgcagagcccgggtctctccgggaaggtgaaacgcgacgccgagaagaaagaccagatgaaggctgacctcactgcgcttttcctgccgcggcagccgcccatgtcgctggccgaggcggagcagctgatggaggagtggaacgaagacctagacggcatggagggtttcgtgctggagggcaagaagtttgcgcggctgccggaagaggagtttggccacttctacacgcaggactgctacgtcttcctctgcaggtactgggtgcctgtggagtacgaggaggaggaaaagaaggaagacaaggaggagaaggccgagggcaaagaaggcgaggaagcaaccgctgaggcagaggagaagcagccagaggaggacttccagtgcatcgtgtacttctggcagggccgtgaagcctccaatatgggctggctcaccttcaccttcagcctgcaaaagaagttcgagagcctcttccctgggaagctggaggtggtacgcatgacgcagcagcaggagaaccccaagttcctgtcccatttcaagaggaagttcatcatccaccggggcaagaggaaggcggtccagggcgcccaacagcccagcctctaccagatccgcaccaacggcagcgccctctgcacccggtgcatccagatcaacaccgactccagcctcctcaactccgagttctgcttcatcctcaaggttccctttgagagtgaggacaaccagggcatcgtgtatgcctgggtgggccgggcatcagaccctgacgaagccaagttggcagaagacatcctgaacaccatgtttgacacctcctacagcaagcaggttatcaacgaaggtgaggagcctgagaacttcttctgggtgggcattggggcacagaagccctatgatgacgatgccgagtacatgaaacacacacgtctcttccggtgctccaacgagaagggctactttgcagtgactgagaaatgctccgacttttgccaagatgacctggcagatgatgacatcatgttgctagacaatggccaagaggtgtgatgttgccactagccctgcccatccaaggaggcgcccatagacttacttacaaatgggaattctcgggccaggagcaaggggctgttcccaggcacccatgcaaccgtatctcccctgctgcccccacaggtctacatgtgggtggggacccagactagccaggtggagatcaagctgagcctgaaggcctgccaggtatatatccagcacatgcggtccaaggaacatgagcggccgcgccggctgcgcctggtccgcaagggcaatgagcagcacgcctttacccgctgcttccacgcctggagcgccttctgcaaggccctggcctaagacaggctggcacagccccaggcttggtgaggaagaggaaggggcctcatccactgtctgctagcaaagaatgtactcaggtgacaccacctgctccagccacgtccagtgccacagtccccagtagcctcaagcagcaccaatggggatgaccctgacaggtgccctcaggggtctgggaaatccaactctctccacagtgtgagtgcacgtgtgaagccccctcactcttccgctagggataaagcagatgtggatgccctttaagagatattaaatgcttttattttcaatatta

SEQ ID NO: 363735 - DNA, 1375 bp, Homo sapiens
  misc_feature (1)..(1): n is a, c, g, or t
natcagctcggtaccattaggcgcgtctgcgtgtaggagtttggccacttctacacgcaggactgctacgtcttcctctgcaggtactgggtgcctgtggagtacgaggaggaggaaaagaaggaagacaaggaggagaaggccgagggcaaagaaggcgaggaagcaaccgctgaggcagaggagaagcagccagaggaggacttccagtgcatcgtgtacttctggcagggccgtgaagcctccaatatgggctggctcaccttcaccttcagcctgcaaaagaagttcgagagcctcttccctgggaagctggaggtggtacgcatgacgcagcagcaggagaaccccaagttcctgtcccatttcaagaggaagttcatcatccaccggggcaagaggaaggcggtccagggcgcccaacagcccagcctctaccagatccgcaccaacggcagcgccctctgcacccggtgcatccagatcaacaccgactccagcctcctcaactccgagttctgcttcatcctcaaggttccctttgagagtgaggacaaccagggcatcgtgtatgcctgggtgggccgggcatcagaccctgacgaagccaagttggcagaagacatcctgaacaccatgtttgacacctcctacagcaagcaggttatcaacgaaggtgaggagcctgagaacttcttctgggtgggcattggggcacagaagccctatgatgacgatgccgagtacatgaaacacacacgtctcttccggtgctccaacgagaagggctactttgcagtgactgagaaatgctccgacttttgccaagatgacctggcagatgatgacatcatgttgctagacaatggccaagaggtctacatgtgggtggggacccagactagccaggtggagatcaagctgagcctgaaggcctgccaggtatatatccagcacatgcggtccaaggaacatgagcggccgcgccggctgcgcctggtccgcaagggcaatgagcagcacgcctttacccgctgcttccacgcctggagcgccttctgcaaggccctggcctaagacaggctggcacagccccaggcttggtgaggaagaggaaggggcctcatccactgtctgctagcaaagaatgtactcaggtgacaccacctgctccagccacgtccagtgccacagtccccagtagcctcaagcagcaccaatggggatgaccctgacaggtgccctcaggggtctgggaaatccaactctctccacagtgtgagtgcacgtgtgaagccccctcactcttccgctagggataaagcagatgtggatgccctttaagagatattaaatgcttttattttcaatatta

SEQ ID NO: 363736 - DNA, 4813 bp, Homo sapiens
cccagcccgcggctccccccagcgccctcgccccggcgctccctagcccggcgcggcccggcagcgagagcggcgccatggaggccaccggggtgctgccgttcgtgcgtggcgtggacctcagcggcaacgacttcaagggcggctacttccctgagaatgtcaaggccatgaccagcctgcggtggctgaagctgaaccgcactggcctctgctacctgcccgaggagctggccgccctgcagaagctggaacacttgtctgtgagccacaacaacctgaccacgcttcatggggagctgtccagcctgccatcgctgcgcgccatcgtggcccgagccaacagtctgaagaattccggagtccccgatgacatcttcaagctagatgatctctcagtcctggacttgagccacaaccagctgacagagtgcccgcgggagctggagaacgccaagaacatgctggtgctgaacctcagccacaacagcatcgacaccatccccaaccagctcttcatcaacctcactgacctactatacctggacctcagcgagaaccgcctggagagcctgcccccgcagatgcgccgcctggtgcacctgcagacgctcgtgctcaatggaaaccccctgctgcatgcacagctccggcagctcccagcgatgacggccctgcagaccctgcacctgcggagcacccagcgcacccagagcaacctgcccaccagcctggagggtctgagcaacctcgcaggtcaggcagccccaggagcccctctgagctcgggccccctctgggccctcttgcttccttgggtggaaggggttgaaccctgctcttcggaccaatacccagagggacaaggctggagttatgttacagtgacttttgcgattatgatgatgccttaacactgactttatgcctagaaaactcccccgcaacccccatgtgagggagtttgtccaaatggagaaacttgggcgcacagcagttgtcacttgcctaagccacacagctcagaggtggcagagctggggttcacactagggctggctgccctggcacctggtgtatgggccccagctgatgcaccccaccctgcaccccagacgtggatctgtcctgcaatgacctgacacgggtgcccgagtgtctgtacaccctccccagcctgcgccgcctcaacctcagcagcaaccagatcacggagctgtccctgtgcatagaccagtgggtgcacgtggaaactctgaacctgtcccgaaatcagctcacctcactgccctcagccatttgcaagctgagcaagctgaagaagctgtacctgaattccaacaagctggactttgacgggctgccctcaggcattggcaagctcaccaacctggaagagttcatggctgccaacaacaacctggagctggtccctgaaagtctctgcaggtgcccaaagctgaggaaacttgtcctgaacaagaaccacctggtgaccctcccagaagccatccatttcctgacggagatcgaggtcctggatgtgcgggagaaccccaacctggtcatgccgcccaagcccgcagaccgtgccgctgagtggtacaacatcgacttctcgctgcagaaccagctgcggctagcgggtgcctctcctgctaccgtggctgcagctgcagctgcagggagtgggcccaaggaccctatggctcgcaagatgcgactgcggaggcgcaaggattcagcccaggatgaccaggccaagcaggtgctgaagggcatgtcagatgttgcccaggagaagaacaaaaagcaggaggagagcgcagatgcccgggcccccagcgggaaggtgcggcgttgggaccagggcctggagaagccccgccttgactactccgagttcttcacggaggacgtgggccagctgcccggactgaccatctggcagatagagaacttcgtgcctgtgctggtggaggaagccttccacggcaagttctacgaggctgactgctacattgtgctcaagacctttctggatgacagcggctccctcaactgggagatctactactggattggcggggaggccacactcgacaagaaagcttgctctgccatccacgctgtcaacttgcgcaactacctgggtgctgagtgccgcactgtccgggaggagatgggcgatgagagcgaggagttcctgcaggtgtttgacaacgacatctcctacattgagggtggaacagccagtggcttctacactgtggaagacacacactatgtcaccaggatgtatcgtgtgtatgggaaaaagaacatcaagttggagcctgtgcccctcaaggggacctctctggacccaaggtttgttttcctgctggaccgagggctagacatctacgtatggcggggggcccaggccacactgagcagcaccaccaaggccaggctctttgcagagaaaattaacaagaatgagcggaaagggaaggctgagatcacactgctggtgcagggccaggagctcccagagttctgggaggcactgggtggggagccctctgagatcaagaagcacgtgcctgaagacttctggccgccgcagcccaagctgtacaaggtgggcctgggcttgggctacctggagctgccacagatcaactacaagctctccgtggaacataagcagcgtcccaaggtggagctgatgccaagaatgcggctgctgcagagtctgctggacacgcgctgcgtgtacattctggactgttggtccgacgtgttcatctggctcggccgcaagtccccgcgcctggtgcgcgctgccgccctcaagctgggtcaggagctgtgcgggatgctgcaccggccacgccatgccacggtcagccgcagcctcgagggcaccgaggcgcaggtgttcaaggccaagttcaagaattgggacgatgtgttgacggtggactacacacgcaatgcggaggccgtgctgcagagcccgggtctctccgggaaggtgaaacgcgacgccgagaagaaagaccagatgaaggctgacctcactgcgcttttcctgccgcggcagccgcccatgtcgctggccgaggcggagcagctgatggaggagtggaacgaagacctagacggcatggagggtttcgtgctggagggcaagaagtttgcgcggctgccggaagaggagtttggccacttctacacgcaggactgctacgtcttcctctgcaggtactgggtgcctgtggagtacgaggaggaggaaaagaaggaagacaaggaggagaaggccgagggcaaagaaggcgaggaagcaaccgctgaggcagaggagaagcagccagaggaggacttccagtgcatcgtgtacttctggcagggccgtgaagcctccaatatgggctggctcaccttcaccttcagcctgcaaaagaagttcgagagcctcttccctgggaagctggaggtggtacgcatgacgcagcagcaggagaaccccaagttcctgtcccatttcaagaggaagttcatcatccaccggggcaagaggaaggcggtccagggcgcccaacagcccagcctctaccagatccgcaccaacggcagcgccctctgcacccggtgcatccagatcaacaccgactccagcctcctcaactccgagttctgcttcatcctcaagggtggggttgtgggtgtgagccaggactccgtggaccaaggggtggggtgtttgggggctgagtcagctgcgaacacccccacccctgcacactccccaggttccctttgagagtgaggacaaccagggcatcgtgtatgcctgggtgggccgggcatcagaccctgacgaagccaagttggcagaagacatcctgaacaccatgtttgacacctcctacagcaagcaggtcaggaggcgggcgggcaggcgggcacacacagaggagccagggcaggcaggggccctgggctggactggcctttcccgcaggttgttatcaacgaaggtgaggagcctgagaacttcttctgggtgggcattggggcacagaagccctatgatgacgatgccgagtacatgaaacacacacgtctcttccggtgaggccagggccctgaccctcccctcagtcctggcactgctgcttatgacctctggcctcaccttgacccttgattcccaggtgctccaacgagaagggctactttgcagtgactgagaaatgctccgacttttgccaagatgacctggcagatgatgacatcatgttgctagacaatggccaagaggtctacatgtgggtggggacccagactagccaggtggagatcaagctgagcctgaaggcctgccaggtatatatccagcacatgcggtccaaggaacatgagcggccgcgccggctgcgcctggtccgcaagggcaatgagcagcacgcctttacccgctgcttccacgcctggagcgccttctgcaaggccctggcctaagacaggctggcacagccccaggcttggtgaggaagaggaaggggcctcatccactgtctgctagcaaagaatgtactcaggtgacaccacctgctccagccacgtccagtgccacagtccccagtagcctcaagcagcaccaatggggatgaccctgacaggtgccctcaggggtctgggaaatccaactctctccacagtgtgagtgcacgtgtgaagccccctcactcttccgctagggataaagcagatgtggatgccctttaagagatattaaatgcttttattttcaatatta

SEQ ID NO: 363737 - DNA, 1346 bp, Homo sapiens
cgaagaactaacggctaggtacgaggcctcgggtgtttaatcccttatctgcaggtactgggtgcctgtggagtacgaggaggaggaaaagaaggaagacaaggaggagaaggccgagggcaaagaaggcgaggaagcaaccgctgaggcagaggagaagcagccagaggaggacttccagtgcatcgtgtacttctggcagggccgtgaagcctccaatatgggctggctcaccttcaccttcagcctgcaaaagaagttcgagagcctcttccctgggaagctggaggtggtacgcatgacgcagcagcaggagaaccccaagttcctgtcccatttcaagaggaagttcatcatccaccggggcaagaggaaggcggtccagggcgcccaacagcccagcctctaccagatccgcaccaacggcagcgccctctgcacccggtgcatccagatcaacaccgactccagcctcctcaactccgagttctgcttcatcctcaaggttccctttgagagtgaggacaaccagggcatcgtgtatgcctgggtgggccgggcatcagaccctgacgaagccaagttggcagaagacatcctgaacaccatgtttgacacctcctacagcaagcaggttatcaacgaaggtgaggagcctgagaacttcttctgggtgggcattggggcacagaagccctatgatgacgatgccgagtacatgaaacacacacgtctcttccggtgctccaacgagaagggctactttgcagtgactgagaaatgctccgacttttgccaagatgacctggcagatgatgacatcatgttgctagacaatggccaagaggtctacatgtgggtggggacccagactagccaggtggagatcaagctgagcctgaaggcctgccaggtatatatccagcacatgcggtccaaggaacatgagcggccgcgccggctgcgcctggtccgcaagggcaatgagcagcacgcctttacccgctgcttccacgcctggagcgccttctgcaaggccctggcctaagacaggctggcacagccccaggcttggtgaggaagaggaaggggcctcatccactgtctgctagcaaagaatgtactcaggtgacaccacctgctccagccacgtccagtgccacagtccccagtagcctcaagcagcaccaatggggatgaccctgacaggtgccctcaggggtctgggaaatccaactctctccacagtgtgagtgcacgtgtgaagccccctcactcttccgctagggataaagcagatgtggatgccctttaagagatattaaatgcttttattttcaatatta

SEQ ID NO: 363738 - DNA, 4848 bp, Homo sapiens
cccagcccgcggctccccccagcgccctcgccccggcgctccctagcccggcgcggcccggcagcgagagcggcgccatggaggccaccggggtgctgccgttcgtgcgtggcgtggacctcagcggcaacgacttcaagggcggctacttccctgagaatgtcaaggccatgaccagcctgcggtggctgaagctgaaccgcactggcctctgctacctgcccgaggagctggccgccctgcagaagctggaacacttgtctgtgagccacaacaacctgaccacgcttcatggggagctgtccagcctgccatcgctgcgcgccatcgtggcccgagccaacagtctgaagaattccggagtccccgatgacatcttcaagctagatgatctctcagtcctggacttgagccacaaccagctgacagagtgcccgcgggagctggagaacgccaagaacatgctggtgctgaacctcagccacaacagcatcgacaccatccccaaccagctcttcatcaacctcactgacctactatacctggacctcagcgagaaccgcctggagagcctgcccccgcagatgcgccgcctggtgcacctgcagacgctcgtgctcaatggaaaccccctgctgcatgcacagctccggcagctcccagcgatgacggccctgcagaccctgcacctgcggagcacccagcgcacccagagcaacctgcccaccagcctggagggtctgagcaacctcgcaggtcaggcagccccaggagcccctctgagctcgggccccctctgggccctcttgcttccttgggtggaaggggttgaaccctgctcttcggaccaatacccagagggacaaggctggagttatgttacagtgacttttgcgattatgatgatgccttaacactgactttatgcctagaaaactcccccgcaacccccatgtgagggagtttgtccaaatggagaaacttgggcgcacagcagttgtcacttgcctaagccacacagctcagaggtggcagagctggggttcacactagggctggctgccctggcacctggtgtatgggccccagctgatgcaccccaccctgcaccccagacgtggatctgtcctgcaatgacctgacacgggtgcccgagtgtctgtacaccctccccagcctgcgccgcctcaacctcagcagcaaccagatcacggagctgtccctgtgcatagaccagtgggtgcacgtggaaactctgaacctgtcccgaaatcagctcacctcactgccctcagccatttgcaagctgagcaagctgaagaagctgtacctgaattccaacaagctggactttgacgggctgccctcaggcattggcaagctcaccaacctggaagagttcatggctgccaacaacaacctggagctggtccctgaaagtctctgcaggtgcccaaagctgaggaaacttgtcctgaacaagaaccacctggtgaccctcccagaagccatccatttcctgacggagatcgaggtcctggatgtgcgggagaaccccaacctggtcatgccgcccaagcccgcagaccgtgccgctgagtggtacaacatcgacttctcgctgcagaaccagctgcggctagcgggtgcctctcctgctaccgtggctgcagctgcagctgcagggagtgggcccaaggaccctatggctcgcaagatgcgactgcggaggcgcaaggattcagcccaggatgaccaggccaagcaggtgctgaagggcatgtcagatgttgcccaggagaagaacaaaaagcaggaggagagcgcagatgcccgggcccccagcgggaaggtgcggcgttgggaccagggcctggagaagccccgccttgactactccgagttcttcacggaggacgtgggccagctgcccggactgaccatctggcagatagagaacttcgtgcctgtgctggtggaggaagccttccacggcaagttctacgaggctgactgctacattgtgctcaagacctttctggatgacagcggctccctcaactgggagatctactactggattggcggggaggccacactcgacaagaaagcttgctctgccatccacgctgtcaacttgcgcaactacctgggtgctgagtgccgcactgtccgggaggagatgggcgatgagagcgaggagttcctgcaggtgtttgacaacgacatctcctacattgagggtggaacagccagtggcttctacactgtggaagacacacactatgtcaccaggatgtatcgtgtgtatgggaaaaagaacatcaagttggagcctgtgcccctcaaggggacctctctggacccaaggtttgttttcctgctggaccgagggctagacatctacgtatggcggggggcccaggccacactgagcagcaccaccaaggccaggctctttgcagagaaaattaacaagaatgagcggaaagggaaggctgagatcacactgctggtgcagggccaggagctcccagagttctgggaggcactgggtggggagccctctgagatcaagaagcacgtgcctgaagacttctggccgccgcagcccaagctgtacaaggtgggcctgggcttgggctacctggagctgccacagatcaactacaagctctccgtggaacataagcagcgtcccaaggtggagctgatgccaagaatgcggctgctgcagagtctgctggacacgcgctgcgtgtacattctggactgttggtccgacgtgttcatctggctcggccgcaagtccccgcgcctggtgcgcgctgccgccctcaagctgggtcaggagctgtgcgggatgctgcaccggccacgccatgccacggtcagccgcagcctcgagggcaccgaggcgcaggtgttcaaggccaagttcaagaattgggacgatgtgttgacggtggactacacacgcaatgcggaggccgtgctgcagagcccgggtctctccgggaaggtgaaacgcgacgccgagaagaaagaccagatgaaggctgacctcactgcgcttttcctgccgcggcagccgcccatgtcgctggccgaggcggagcagctgatggaggagtggaacgaagacctagacggcatggagggtttcgtgctggagggcaagaagtttgcgcggctgccggaagaggagtttggccacttctacacgcaggactgctacgtcttcctctgcaggtactgggtgcctgtggagtacgaggaggaggaaaagaaggaagacaaggaggagaaggccgagggcaaagaaggcgaggaagcaaccgctgaggcagaggagaagcagccagaggaggacttccagtgcatcgtgtacttctggcagggccgtgaagcctccaatatgggctggctcaccttcaccttcagcctgcaaaagaagttcgagagcctcttccctgggaagctggaggtggtacgcatgacgcagcagcaggagaaccccaagttcctgtcccatttcaagaggaagttcatcatccaccggggcaagaggaaggcggtccagggcgcccaacagcccagcctctaccagatccgcaccaacggcagcgccctctgcacccggtgcatccagatcaacaccgactccagcctcctcaactccgagttctgcttcatcctcaaggttccctttgagagtgaggacaaccagggcatcgtgtatgcctgggtgggccgggcatcagaccctgacgaagccaagttggcagaagacatcctgaacaccatgtttgacacctcctacagcaagcaggtcaggaggcgggcgggcaggcgggcacacacagaggagccagggcaggcaggggccctgggctggactggcctttcccgcaggttgttatcaacgaaggtgaggagcctgagaacttcttctgggtgggcattggggcacagaagccctatgatgacgatgccgagtacatgaaacacacacgtctcttccggtgaggccagggccctgaccctcccctcagtcctggcactgctgcttatgacctctggcctcaccttgacccttgattcccaggtgctccaacgagaagggctactttgcagtgactgagaaatgctccgacttttgccaagatgacctggcagatgatgacatcatgttgctagacaatggccaagaggtgtgatgttgccactagccctgcccatccaaggaggcgcccatagacttacttacaaatgggaattctcgggccaggagcaaggggctgttcccaggcacccatgcaaccgtatctcccctgctgcccccacaggtctacatgtgggtggggacccagactagccaggtggagatcaagctgagcctgaaggcctgccaggtatatatccagcacatgcggtccaaggaacatgagcggccgcgccggctgcgcctggtccgcaagggcaatgagcagcacgcctttacccgctgcttccacgcctggagcgccttctgcaaggccctggcctaagacaggctggcacagccccaggcttggtgaggaagaggaaggggcctcatccactgtctgctagcaaagaatgtactcaggtgacaccacctgctccagccacgtccagtgccacagtccccagtagcctcaagcagcaccaatggggatgaccctgacaggtgccctcaggggtctgggaaatccaactctctccacagtgtgagtgcacgtgtgaagccccctcactcttccgctagggataaagcagatgtggatgccctttaagagatattaaatgcttttattttcaatatta

SEQ ID NO: 363739 - DNA, 4267 bp, Homo sapiens
  misc_feature (4267)..(4267): n is a, c, g, or t
cccagcccgcggctccccccagcgccctcgccccggcgctccctagcccggcgcggcccggcagcgagagcggcgccatggaggccaccggggtgctgccgttcgtgcgtggcgtggacctcagcggcaacgacttcaagggcggctacttccctgagaatgtcaaggccatgaccagcctgcggtggctgaagctgaaccgcactggcctctgctacctgcccgaggagctggccgccctgcagaagctggaacacttgtctgtgagccacaacaacctgaccacgcttcatggggagctgtccagcctgccatcgctgcgcgccatcgtggcccgagccaacagtctgaagaattccggagtccccgatgacatcttcaagctagatgatctctcagtcctggacttgagccacaaccagctgacagagtgcccgcgggagctggagaacgccaagaacatgctggtgctgaacctcagccacaacagcatcgacaccatccccaaccagctcttcatcaacctcactgacctactatacctggacctcagcgagaaccgcctggagagcctgcccccgcagatgcgccgcctggtgcacctgcagacgctcgtgctcaatggaaaccccctgctgcatgcacagctccggcagctcccagcgatgacggccctgcagaccctgcacctgcggagcacccagcgcacccagagcaacctgcccaccagcctggagggtctgagcaacctcgcaggtcaggcagccccaggagcccctctgagctcgggccccctctgggccctcttgcttccttgggtggaaggggttgaaccctgctcttcggaccaatacccagagggacaaggctggagttatgttacagtgacttttgcgattatgatgatgccttaacactgactttatgcctagaaaactcccccgcaacccccatgtgagggagtttgtccaaatggagaaacttgggcgcacagcagttgtcacttgcctaagccacacagctcagaggtggcagagctggggttcacactagggctggctgccctggcacctggtgtatgggccccagctgatgcaccccaccctgcaccccagacgtggatctgtcctgcaatgacctgacacgggtgcccgagtgtctgtacaccctccccagcctgcgccgcctcaacctcagcagcaaccagatcacggagctgtccctgtgcatagaccagtgggtgcacgtggaaactctgaacctgtcccgaaatcagctcacctcactgccctcagccatttgcaagctgagcaagctgaagaagctgtacctgaattccaacaagctggactttgacgggctgccctcaggcattggcaagctcaccaacctggaagagttcatggctgccaacaacaacctggagctggtccctgaaagtctctgcaggtgcccaaagctgaggaaacttgtcctgaacaagaaccacctggtgaccctcccagaagccatccatttcctgacggagatcgaggtcctggatgtgcgggagaaccccaacctggtcatgccgcccaagcccgcagaccgtgccgctgagtggtacaacatcgacttctcgctgcagaaccagctgcggctagcgggtgcctctcctgctaccgtggctgcagctgcagctgcagggagtgggcccaaggaccctatggctcgcaagatgcgactgcggaggcgcaaggattcagcccaggatgaccaggccaagcaggtgctgaagggcatgtcagatgttgcccaggagaagaacaaaaagcaggaggagagcgcagatgcccgggcccccagcgggaaggtgcggcgttgggaccagggcctggagaagccccgccttgactactccgagttcttcacggaggacgtgggccagctgcccggactgaccatctggcagatagagaacttcgtgcctgtgctggtggaggaagccttccacggcaagttctacgaggctgactgctacattgtgctcaagacctttctggatgacagcggctccctcaactgggagatctactactggattggcggggaggccacactcgacaagaaagcttgctctgccatccacgctgtcaacttgcgcaactacctgggtgctgagtgccgcactgtccgggaggagatgggcgatgagagcgaggagttcctgcaggtgtttgacaacgacatctcctacattgagggtggaacagccagtggcttctacactgtggaagacacacactatgtcaccaggatgtatcgtgtgtatgggaaaaagaacatcaagttggagcctgtgcccctcaaggggacctctctggacccaaggtttgttttcctgctggaccgagggctagacatctacgtatggcggggggcccaggccacactgagcagcaccaccaaggccaggctctttgcagagaaaattaacaagaatgagcggaaagggaaggctgagatcacactgctggtgcagggccaggagctcccagagttctgggaggcactgggtggggagccctctgagatcaagaagcacgtgcctgaagacttctggccgccgcagcccaagctgtacaaggtgggcctgggcttgggctacctggagctgccacagatcaactacaagctctccgtggaacataagcagcgtcccaaggtggagctgatgccaagaatgcggctgctgcagagtctgctggacacgcgctgcgtgtacattctggactgttggtccgacgtgttcatctggctcggccgcaagtccccgcgcctggtgcgcgctgccgccctcaagctgggtcaggagctgtgcgggatgctgcaccggccacgccatgccacggtcagccgcagcctcgagggcaccgaggcgcaggtgttcaaggccaagttcaagaattgggacgatgtgttgacggtggactacacacgcaatgcggaggccgtgctgcagagcccgggtctctccgggaaggtgaaacgcgacgccgagaagaaagaccagatgaaggctgacctcactgcgcttttcctgccgcggcagccgcccatgtcgctggccgaggcggagcagctgatggaggagtggaacgaagacctagacggcatggagggtttcgtgctggagggcaagaagtttgcgcggctgccggaagaggagtttggccacttctacacgcaggactgctacgtcttcctctgcaggtactgggtgcctgtggagtacgaggaggaggaaaagaaggaagacaaggaggagaaggccgagggcaaagaaggcgaggaagcaaccgctgaggcagaggagaagcagccagaggaggacttccagtgcatcgtgtacttctggcagggccgtgaagcctccaatatgggctggctcaccttcaccttcagcctgcaaaagaagttcgagagcctcttccctgggaagctggaggtggtacgcatgacgcagcagcaggagaaccccaagttcctgtcccatttcaagaggaagttcatcatccaccggggcaagaggaaggcggtccagggcgcccaacagcccagcctctaccagatccgcaccaacggcagcgccctctgcacccggtgcatccagatcaacaccgactccagcctcctcaactccgagttctgcttcatcctcaaggttccctttgagagtgaggacaaccagggcatcgtgtatgcctgggtgggccgggcatcagaccctgacgaagccaagttggcagaagacatcctgaacaccatgtttgacacctcctacagcaagcaggttatcaacgaaggtgaggagcctgagaacttcttctgggtgggcattggggcacagaagccctatgatgacgatgccgagtacatgaaacacacacgtctcttccggtgctccaacgagaagggctactttgcagtgactgagaaatgctccgacttttgccaagatgacctggcagatgatgacatcatgttgctagacaatggccaagaggtctacatgcgggtgtccccttcctccctcaccgctccatgtgcgtccctcccgaagctgcgcgctcggtcgaagaggacgaccatccccgatagaggaggaccggtcttcggtcaagggtatacgagtagctgcgctcccctgctagaacctccaaacaagctctcaaggtaaatttgtaggagaacgtatggtagtcaagcttccaagactccagcggcn

SEQ ID NO: 363740 - DNA, 4711 bp, Homo sapiens
cccagcccgcggctccccccagcgccctcgccccggcgctccctagcccggcgcggcccggcagcgagagcggcgccatggaggccaccggggtgctgccgttcgtgcgtggcgtggacctcagcggcaacgacttcaagggcggctacttccctgagaatgtcaaggccatgaccagcctgcggtggctgaagctgaaccgcactggcctctgctacctgcccgaggagctggccgccctgcagaagctggaacacttgtctgtgagccacaacaacctgaccacgcttcatggggagctgtccagcctgccatcgctgcgcgccatcgtggcccgagccaacagtctgaagaattccggagtccccgatgacatcttcaagctagatgatctctcagtcctggacttgagccacaaccagctgacagagtgcccgcgggagctggagaacgccaagaacatgctggtgctgaacctcagccacaacagcatcgacaccatccccaaccagctcttcatcaacctcactgacctactatacctggacctcagcgagaaccgcctggagagcctgcccccgcagatgcgccgcctggtgcacctgcagacgctcgtgctcaatggaaaccccctgctgcatgcacagctccggcagctcccagcgatgacggccctgcagaccctgcacctgcggagcacccagcgcacccagagcaacctgcccaccagcctggagggtctgagcaacctcgcaggtcaggcagccccaggagcccctctgagctcgggccccctctgggccctcttgcttccttgggtggaaggggttgaaccctgctcttcggaccaatacccagagggacaaggctggagttatgttacagtgacttttgcgattatgatgatgccttaacactgactttatgcctagaaaactcccccgcaacccccatgtgagggagtttgtccaaatggagaaacttgggcgcacagcagttgtcacttgcctaagccacacagctcagaggtggcagagctggggttcacactagggctggctgccctggcacctggtgtatgggccccagctgatgcaccccaccctgcaccccagacgtggatctgtcctgcaatgacctgacacgggtgcccgagtgtctgtacaccctccccagcctgcgccgcctcaacctcagcagcaaccagatcacggagctgtccctgtgcatagaccagtgggtgcacgtggaaactctgaacctgtcccgaaatcagctcacctcactgccctcagccatttgcaagctgagcaagctgaagaagctgtacctgaattccaacaagctggactttgacgggctgccctcaggcattggcaagctcaccaacctggaagagttcatggctgccaacaacaacctggagctggtccctgaaagtctctgcaggtgcccaaagctgaggaaacttgtcctgaacaagaaccacctggtgaccctcccagaagccatccatttcctgacggagatcgaggtcctggatgtgcgggagaaccccaacctggtcatgccgcccaagcccgcagaccgtgccgctgagtggtacaacatcgacttctcgctgcagaaccagctgcggctagcgggtgcctctcctgctaccgtggctgcagctgcagctgcagggagtgggcccaaggaccctatggctcgcaagatgcgactgcggaggcgcaaggattcagcccaggatgaccaggccaagcaggtgctgaagggcatgtcagatgttgcccaggagaagaacaaaaagcaggaggagagcgcagatgcccgggcccccagcgggaaggtgcggcgttgggaccagggcctggagaagccccgccttgactactccgagttcttcacggaggacgtgggccagctgcccggactgaccatctggcagatagagaacttcgtgcctgtgctggtggaggaagccttccacggcaagttctacgaggctgactgctacattgtgctcaagacctttctggatgacagcggctccctcaactgggagatctactactggattggcggggaggccacactcgacaagaaagcttgctctgccatccacgctgtcaacttgcgcaactacctgggtgctgagtgccgcactgtccgggaggagatgggcgatgagagcgaggagttcctgcaggtgtttgacaacgacatctcctacattgagggtggaacagccagtggcttctacactgtggaagacacacactatgtcaccaggatgtatcgtgtgtatgggaaaaagaacatcaagttggagcctgtgcccctcaaggggacctctctggacccaaggtttgttttcctgctggaccgagggctagacatctacgtatggcggggggcccaggccacactgagcagcaccaccaaggccaggctctttgcagagaaaattaacaagaatgagcggaaagggaaggctgagatcacactgctggtgcagggccaggagctcccagagttctgggaggcactgggtggggagccctctgagatcaagaagcacgtgcctgaagacttctggccgccgcagcccaagctgtacaaggtgggcctgggcttgggctacctggagctgccacagatcaactacaagctctccgtggaacataagcagcgtcccaaggtggagctgatgccaagaatgcggctgctgcagagtctgctggacacgcgctgcgtgtacattctggactgttggtccgacgtgttcatctggctcggccgcaagtccccgcgcctggtgcgcgctgccgccctcaagctgggtcaggagctgtgcgggatgctgcaccggccacgccatgccacggtcagccgcagcctcgagggcaccgaggcgcaggtgttcaaggccaagttcaagaattgggacgatgtgttgacggtggactacacacgcaatgcggaggccgtgctgcagagcccgggtctctccgggaaggtgaaacgcgacgccgagaagaaagaccagatgaaggctgacctcactgcgcttttcctgccgcggcagccgcccatgtcgctggccgaggcggagcagctgatggaggagtggaacgaagacctagacggcatggagggtttcgtgctggagggcaagaagtttgcgcggctgccggaagaggagtttggccacttctacacgcaggactgctacgtcttcctctgcaggtactgggtgcctgtggagtacgaggaggaggaaaagaaggaagacaaggaggagaaggccgagggcaaagaaggcgaggaagcaaccgctgaggcagaggagaagcagccagaggaggacttccagtgcatcgtgtacttctggcagggccgtgaagcctccaatatgggctggctcaccttcaccttcagcctgcaaaagaagttcgagagcctcttccctgggaagctggaggtggtacgcatgacgcagcagcaggagaaccccaagttcctgtcccatttcaagaggaagttcatcatccaccggggcaagaggaaggcggtccagggcgcccaacagcccagcctctaccagatccgcaccaacggcagcgccctctgcacccggtgcatccagatcaacaccgactccagcctcctcaactccgagttctgcttcatcctcaaggttccctttgagagtgaggacaaccagggcatcgtgtatgcctgggtgggccgggcatcagaccctgacgaagccaagttggcagaagacatcctgaacaccatgtttgacacctcctacagcaagcaggtcaggaggcgggcgggcaggcgggcacacacagaggagccagggcaggcaggggccctgggctggactggcctttcccgcaggttgttatcaacgaaggtgaggagcctgagaacttcttctgggtgggcattggggcacagaagccctatgatgacgatgccgagtacatgaaacacacacgtctcttccggtgctccaacgagaagggctactttgcagtgactgagaaatgctccgacttttgccaagatgacctggcagatgatgacatcatgttgctagacaatggccaagaggtctacatgtgggtggggacccagactagccaggtggagatcaagctgagcctgaaggcctgccaggtaatctgggtggagggagggccgaggtgggcctgtgggcagggcagggtcatcacccaaggctcgctgtccccttgccaggtatatatccagcacatgcggtccaaggaacatgagcggccgcgccggctgcgcctggtccgcaagggcaatgagcagcacgcctttacccgctgcttccacgcctggagcgccttctgcaaggccctggcctaagacaggctggcacagccccaggcttggtgaggaagaggaaggggcctcatccactgtctgctagcaaagaatgtactcaggtgacaccacctgctccagccacgtccagtgccacagtccccagtagcctcaagcagcaccaatggggatgaccctgacaggtgccctcaggggtctgggaaatccaactctctccacagtgtgagtgcacgtgtgaagccccctcactcttccgctagggataaagcagatgtggatgccctttaagagatattaaatgcttttattttcaatatta

SEQ ID NO: 363741 - DNA, 3807 bp, Homo sapiens
cccagcccgcggctccccccagcgccctcgccccggcgctccctagcccggcgcggcccggcagcgagagcggcgccatggaggccaccggggtgctgccgttcgtgcgtggcgtggacctcagcggcaacgacttcaagggcggctacttccctgagaatgtcaaggccatgaccagcctgcggtggctgaagctgaaccgcactggcctctgctacctgcccgaggagctggccgccctgcagaagctggaacacttgtctgtgagccacaacaacctgaccacgcttcatggggagctgtccagcctgccatcgctgcgcgccatcgtggcccgagccaacagtctgaagaattccggagtccccgatgacatcttcaagctagatgatctctcagtcctggacttgagccacaaccagctgacagagtgcccgcgggagctggagaacgccaagaacatgctggtgctgaacctcagccacaacagcatcgacaccatccccaaccagctcttcatcaacctcactgacctactatacctggacctcagcgagaaccgcctggagagcctgcccccgcagatgcgccgcctggtgcacctgcagacgctcgtgctcaatggaaaccccctgctgcatgcacagctccggcagctcccagcgatgacggccctgcagaccctgcacctgcggagcacccagcgcacccagagcaacctgcccaccagcctggagggtctgagcaacctcgcaggtcaggcagccccaggagcccctctgagctcgggccccctctgggccctcttgcttccttgggtggaaggggttgaaccctgctcttcggaccaatacccagagggacaaggctggagttatgttacagtgacttttgcgattatgatgatgccttaacactgactttatgcctagaaaactcccccgcaacccccatgtgagggagtttgtccaaatggagaaacttgggcgcacagcagttgtcacttgcctaagccacacagctcagaggtggcagagctggggttcacactagggctggctgccctggcacctggtgtatgggccccagctgatgcaccccaccctgcaccccagacgtggatctgtcctgcaatgacctgacacgggtgcccgagtgtctgtacaccctccccagcctgcgccgcctcaacctcagcagcaaccagatcacggagctgtccctgtgcatagaccagtgggtgcacgtggaaactctgaacctgtcccgaaatcagctcacctcactgccctcagccatttgcaagctgagcaagctgaagaagctgtacctgaattccaacaagctggactttgacgggctgccctcaggcattggcaagctcaccaacctggaagagttcatggctgccaacaacaacctggagctggtccctgaaagtctctgcaggtgcccaaagctgaggaaacttgtcctgaacaagaaccacctggtgaccctcccagaagccatccatttcctgacggagatcgaggtcctggatgtgcgggagaaccccaacctggtcatgccgcccaagcccgcagaccgtgccgctgagtggtacaacatcgacttctcgctgcagaaccagctgcggctagcgggtgcctctcctgctaccgtggctgcagctgcagctgcagggagtgggcccaaggaccctatggctcgcaagatgcgactgcggaggcgcaaggattcagcccaggatgaccaggccaagcaggtgctgaagggcatgtcagatgttgcccaggagaagaacaaaaagcaggaggagagcgcagatgcccgggcccccagcgggaaggtgcggcgttgggaccagggcctggagaagccccgccttgactactccgagttcttcacggaggacgtgggccagctgcccggactgaccatctggcagatagagaacttcgtgcctgtgctggtggaggaagccttccacggcaagttctacgaggctgactgctacattgtgctcaagacctttctggatgacagcggctccctcaactgggagatctactactggattggcggggaggccacactcgacaagaaagcttgctctgccatccacgctgtcaacttgcgcaactacctgggtgctgagtgccgcactgtccgggaggagatgggcgatgagagcgaggagttcctgcaggtgtttgacaacgacatctcctacattgagggtggaacagccagtggcttctacactgtggaagacacacactatgtcaccaggatgtatcgtgtgtatgggaaaaagaacatcaagttggagcctgtgcccctcaaggggacctctctggacccaaggtttgttttcctgctggaccgagggctagacatctacgtatggcggggggcccaggccacactgagcagcaccaccaaggccaggctctttgcagagaaaattaacaagaatgagcggaaagggaaggctgagatcacactgctggtgcagggccaggagctcccagagttctgggaggcactgggtggggagccctctgagatcaagaagcacgtgcctgaagacttctggccgccgcagcccaagctgtacaaggtgggcctgggcttgggctacctggagctgccacagatcaactacaagctctccgtggaacataagcagcgtcccaaggtggagctgatgccaagaatgcggctgctgcagagtctgctggacacgcgctgcgtgtacattctggactgttggtccgacgtgttcatctggctcggccgcaagtccccgcgcctggtgcgcgctgccgccctcaagctgggtcaggagctgtgcgggatgctgcaccggccacgccatgccacggtcagccgcagcctcgagggcaccgaggcgcaggtgttcaaggccaagttcaagaattgggacgatgtgttgacggtggactacacacgcaatgcggaggccgtgctgcagagcccgggtctctccgggaaggtgaaacgcgacgccgagaagaaagaccagatgaaggctgacctcactgcgcttttcctgccgcggcagccgcccatgtcgctggccgaggcggagcagctgatggaggagtggaacgaagacctagacggcatggagggtttcgtgctggagggcaagaagtttgcgcggctgccggaagaggagtttggccacttctacacgcaggactgctacgtcttcctctgcaggtactgggtgcctgtggagtacgaggaggaggaaaagaaggaagacaaggaggagaaggccgagggcaaagaaggcgaggaagcaaccgctgaggcagaggagaagcagccagaggaggacttccagtgcatcgtgtacttctggcagggccgtgaagcctccaatatgggctggctcaccttcaccttcagcctgcaaaagaagttcgagagcctcttccctgggaagctggaggtggtacgcatgacgcagcagcaggagaaccccaagttcctgtcccatttcaagaggaagttcatcatccaccggggcaagaggaaggcggtccagggcgcccaacagcccagcctctaccagatccgcaccaacggcagcgccctctgcacccggtgcatccagatcaacaccgactccagcctcctcaactccgagttctgcttcatcctcaagcctcactcttccgctagggataaagcagatgtggatgccctttaagagatattaaatgcttttattttcaatattaaaaatcagtatttttaatattaaaatgg

SEQ ID NO: 363742 - DNA, 3621 bp, Homo sapiens
cccagcccgcggctccccccagcgccctcgccccggcgctccctagcccggcgcggcccggcagcgagagcggcgccatggaggccaccggggtgctgccgttcgtgcgtggcgtggacctcagcggcaacgacttcaagggcggctacttccctgagaatgtcaaggccatgaccagcctgcggtggctgaagctgaaccgcactggcctctgctacctgcccgaggagctggccgccctgcagaagctggaacacttgtctgtgagccacaacaacctgaccacgcttcatggggagctgtccagcctgccatcgctgcgcgccatcgtggcccgagccaacagtctgaagaattccggagtccccgatgacatcttcaagctagatgatctctcagtcctggacttgagccacaaccagctgacagagtgcccgcgggagctggagaacgccaagaacatgctggtgctgaacctcagccacaacagcatcgacaccatccccaaccagctcttcatcaacctcactgacctactatacctggacctcagcgagaaccgcctggagagcctgcccccgcagatgcgccgcctggtgcacctgcagacgctcgtgctcaatggaaaccccctgctgcatgcacagctccggcagctcccagcgatgacggccctgcagaccctgcacctgcggagcacccagcgcacccagagcaacctgcccaccagcctggagggtctgagcaacctcgcaggtcaggcagccccaggagcccctctgagctcgggccccctctgggccctcttgcttccttgggtggaaggggttgaaccctgctcttcggaccaatacccagagggacaaggctggagttatgttacagtgacttttgcgattatgatgatgccttaacactgactttatgcctagaaaactcccccgcaacccccatgtgagggagtttgtccaaatggagaaacttgggcgcacagcagttgtcacttgcctaagccacacagctcagaggtggcagagctggggttcacactagggctggctgccctggcacctggtgtatgggccccagctgatgcaccccaccctgcaccccagacgtggatctgtcctgcaatgacctgacacgggtgcccgagtgtctgtacaccctccccagcctgcgccgcctcaacctcagcagcaaccagatcacggagctgtccctgtgcatagaccagtgggtgcacgtggaaactctgaacctgtcccgaaatcagctcacctcactgccctcagccatttgcaagctgagcaagctgaagaagctgtacctgaattccaacaagctggactttgacgggctgccctcaggcattggcaagctcaccaacctggaagagttcatggctgccaacaacaacctggagctggtccctgaaagtctctgcaggtgcccaaagctgaggaaacttgtcctgaacaagaaccacctggtgaccctcccagaagccatccatttcctgacggagatcgaggtcctggatgtgcgggagaaccccaacctggtcatgccgcccaagcccgcagaccgtgccgctgagtggtacaacatcgacttctcgctgcagaaccagctgcggctagcgggtgcctctcctgctaccgtggctgcagctgcagctgcagggagtgggcccaaggaccctatggctcgcaagatgcgactgcggaggcgcaaggattcagcccaggatgaccaggccaagcaggtgctgaagggcatgtcagatgttgcccaggagaagaacaaaaagcaggaggagagcgcagatgcccgggcccccagcgggaaggtgcggcgttgggaccagggcctggagaagccccgccttgactactccgagttcttcacggaggacgtgggccagctgcccggactgaccatctggcagatagagaacttcgtgcctgtgctggtggaggaagccttccacggcaagttctacgaggctgactgctacattgtgctcaagacctttctggatgacagcggctccctcaactgggagatctactactggattggcggggaggccacactcgacaagaaagcttgctctgccatccacgctgtcaacttgcgcaactacctgggtgctgagtgccgcactgtccgggaggagatgggcgatgagagcgaggagttcctgcaggtgtttgacaacgacatctcctacattgagggtggaacagccagtggcttctacactgtggaagacacacactatgtcaccaggatgtatcgtgtgtatgggaaaaagaacatcaagttggagcctgtgcccctcaaggggacctctctggacccaaggtttgttttcctgctggaccgagggctagacatctacgtatggcggggggcccaggccacactgagcagcaccaccaaggccaggctctttgcagagaaaattaacaagaatgagcggaaagggaaggctgagatcacactgctggtgcagggccaggagctcccagagttctgggaggcactgggtggggagccctctgagatcaagaagcacgtgcctgaagacttctggccgccgcagcccaagctgtacaaggtgggcctgggcttgggctacctggagctgccacagatcaactacaagctctccgtggaacataagcagcgtcccaaggtggagctgatgccaagaatgcggctgctgcagagtctgctggacacgcgctgcgtgtacattctggactgttggtccgacgtgttcatctggctcggccgcaagtccccgcgcctggtgcgcgctgccgccctcaagctgggtcaggagctgtgcgggatgctgcaccggccacgccatgccacggtcagccgcagcctcgagggcaccgaggcgcaggtgttcaaggccaagttcaagaattgggacgatgtgttgacggtggactacacacgcaatgcggaggccgtgctgcagagcccgggtctctccgggaaggtgaaacgcgacgccgagaagaaagaccagatgaaggctgacctcactgcgcttttcctgccgcggcagccgcccatgtcgctggccgaggcggagcagctgatggaggagtggaacgaagacctagacggcatggagggtttcgtgctggagggcaagaagtttgcgcggctgccggaagaggagtttggccacttctacacgcaggactgctacgtcttcctctgcaggtactgggtgcctgtggagtacgaggaggaggaaaagaaggaagacaaggaggagaaggccgagggcaaagaaggcgaggaagcaaccgctgaggcagaggagaagcagccagaggaggacttccagtgcatcgtgtacttctggcagggccgtgaagcctccaatatgggctggctcaccttcaccttcagcctgcaaaagaagttcgagagcctcttccctgggaagctggagtggtacgcatgacgcagcagctcgcccctgagttagcagctcgcccctgagttagctgctcgcccctgagttagcagctcgctcctgagttgcagctcgcccctgagttagcagctcgcccctgagtacagctc

SEQ ID NO: 363743 - DNA, 3007 bp, Homo sapiens
cccagcccgcggctccccccagcgccctcgccccggcgctccctagcccggcgcggcccggcagcgagagcggcgccatggaggccaccggggtgctgccgttcgtgcgtggcgtggacctcagcggcaacgacttcaagggcggctacttccctgagaatgtcaaggccatgaccagcctgcggtggctgaagctgaaccgcactggcctctgctacctgcccgaggagctggccgccctgcagaagctggaacacttgtctgtgagccacaacaacctgaccacgcttcatggggagctgtccagcctgccatcgctgcgcgccatcgtggcccgagccaacagtctgaagaattccggagtccccgatgacatcttcaagctagatgatctctcagtcctggacttgagccacaaccagctgacagagtgcccgcgggagctggagaacgccaagaacatgctggtgctgaacctcagccacaacagcatcgacaccatccccaaccagctcttcatcaacctcactgacctactatacctggacctcagcgagaaccgcctggagagcctgcccccgcagatgcgccgcctggtgcacctgcagacgctcgtgctcaatggaaaccccctgctgcatgcacagctccggcagctcccagcgatgacggccctgcagaccctgcacctgcggagcacccagcgcacccagagcaacctgcccaccagcctggagggtctgagcaacctcgcaggtcaggcagccccaggagcccctctgagctcgggccccctctgggccctcttgcttccttgggtggaaggggttgaaccctgctcttcggaccaatacccagagggacaaggctggagttatgttacagtgacttttgcgattatgatgatgccttaacactgactttatgcctagaaaactcccccgcaacccccatgtgagggagtttgtccaaatggagaaacttgggcgcacagcagttgtcacttgcctaagccacacagctcagaggtggcagagctggggttcacactagggctggctgccctggcacctggtgtatgggccccagctgatgcaccccaccctgcaccccagacgtggatctgtcctgcaatgacctgacacgggtgcccgagtgtctgtacaccctccccagcctgcgccgcctcaacctcagcagcaaccagatcacggagctgtccctgtgcatagaccagtgggtgcacgtggaaactctgaacctgtcccgaaatcagctcacctcactgccctcagccatttgcaagctgagcaagctgaagaagctgtacctgaattccaacaagctggactttgacgggctgccctcaggcattggcaagctcaccaacctggaagagttcatggctgccaacaacaacctggagctggtccctgaaagtctctgcaggtgcccaaagctgaggaaacttgtcctgaacaagaaccacctggtgaccctcccagaagccatccatttcctgacggagatcgaggtcctggatgtgcgggagaaccccaacctggtcatgccgcccaagcccgcagaccgtgccgctgagtggtacaacatcgacttctcgctgcagaaccagctgcggctagcgggtgcctctcctgctaccgtggctgcagctgcagctgcagggagtgggcccaaggaccctatggctcgcaagatgcgactgcggaggcgcaaggattcagcccaggatgaccaggccaagcaggtgctgaagggcatgtcagatgttgcccaggagaagaacaaaaagcaggaggagagcgcagatgcccgggcccccagcgggaaggtgcggcgttgggaccagggcctggagaagccccgccttgactactccgagttcttcacggaggacgtgggccagctgcccggactgaccatctggcagatagagaacttcgtgcctgtgctggtggaggaagccttccacggcaagttctacgaggctgactgctacattgtgctcaagacctttctggatgacagcggctccctcaactgggagatctactactggattggcggggaggccacactcgacaagaaagcttgctctgccatccacgctgtcaacttgcgcaactacctgggtgctgagtgccgcactgtccgggaggagatgggcgatgagagcgaggagttcctgcaggtgtttgacaacgacatctcctacattgagggtggaacagccagtggcttctacactgtggaagacacacactatgtcaccaggatgtatcgtgtgtatgggaaaaagaacatcaagttggagcctgtgcccctcaaggggacctctctggacccaaggtttgttttcctgctggaccgagggctagacatctacgtatggcggggggcccaggccacactgagcagcaccaccaaggccaggctctttgcagagaaaattaacaagaatgagcggaaagggaaggctgagatcacactgctggtgcagggccaggagctcccagagttctgggaggcactgggtggggagccctctgagatcaagaagcacgtgcctgaagacttctggccgccgcagcccaagctgtacaaggtgagccctgctgctgaggcccacctggagcgccttctgcaaggccctggcctaagacaggctggcacagccccaggcttggtgaggaagaggaaggggcctcatccactgtctgctagcaaagaatgtactcaggtgacaccacctgctccagccacgtccagtgccacagtccccagtagcctcaagcagcaccaatggggatgaccctgacaggtgccctcaggggtctgggaaatccaactctctccacagtgtgagtgcacgtgtgaagccccctcactcttccgctagggataaagcagatgtggatgccctttaagagatattaaatgcttttattttcaatattaaaaatcagtatttttaatattaaaatgg

SEQ ID NO: 363744 - DNA, 2549 bp, Homo sapiens
cccagcccgcggctccccccagcgccctcgccccggcgctccctagcccggcgcggcccggcagcgagagcggcgccatggaggccaccggggtgctgccgttcgtgcgtggcgtggacctcagcggcaacgacttcaagggcggctacttccctgagaatgtcaaggccatgaccagcctgcggtggctgaagctgaaccgcactggcctctgctacctgcccgaggagctggccgccctgcagaagctggaacacttgtctgtgagccacaacaacctgaccacgcttcatggggagctgtccagcctgccatcgctgcgcgccatcgtggcccgagccaacagtctgaagaattccggagtccccgatgacatcttcaagctagatgatctctcagtcctggacttgagccacaaccagctgacagagtgcccgcgggagctggagaacgccaagaacatgctggtgctgaacctcagccacaacagcatcgacaccatccccaaccagctcttcatcaacctcactgacctactatacctggacctcagcgagaaccgcctggagagcctgcccccgcagatgcgccgcctggtgcacctgcagacgctcgtgctcaatggaaaccccctgctgcatgcacagctccggcagctcccagcgatgacggccctgcagaccctgcacctgcggagcacccagcgcacccagagcaacctgcccaccagcctggagggtctgagcaacctcgcaggtcaggcagccccaggagcccctctgagctcgggccccctctgggccctcttgcttccttgggtggaaggggttgaaccctgctcttcggaccaatacccagagggacaaggctggagttatgttacagtgacttttgcgattatgatgatgccttaacactgactttatgcctagaaaactcccccgcaacccccatgtgagggagtttgtccaaatggagaaacttgggcgcacagcagttgtcacttgcctaagccacacagctcagaggtggcagagctggggttcacactagggctggctgccctggcacctggtgtatgggccccagctgatgcaccccaccctgcaccccagacgtggatctgtcctgcaatgacctgacacgggtgcccgagtgtctgtacaccctccccagcctgcgccgcctcaacctcagcagcaaccagatcacggagctgtccctgtgcatagaccagtgggtgcacgtggaaactctgaacctgtcccgaaatcagctcacctcactgccctcagccatttgcaagctgagcaagctgaagaagctgtacctgaattccaacaagctggactttgacgggctgccctcaggcattggcaagctcaccaacctggaagagttcatggctgccaacaacaacctggagctggtccctgaaagtctctgcaggtgcccaaagctgaggaaacttgtcctgaacaagaaccacctggtgaccctcccagaagccatccatttcctgacggagatcgaggtcctggatgtgcgggagaaccccaacctggtcatgccgcccaagcccgcagaccgtgccgctgagtggtacaacatcgacttctcgctgcagaaccagctgcggctagcgggtgcctctcctgctaccgtggctgcagctgcagctgcagggagtgggcccaaggaccctatggctcgcaagatgcgactgcggaggcgcaaggattcagcccaggatgaccaggccaagcaggtgctgaagggcatgtcagatgttgcccaggagaagaacaaaaagcaggaggagagcgcagatgcccgggcccccagcgggaaggtgcggcgttgggaccagggcctggagaagccccgccttgactactccgagttcttcacggaggacgtgggccagctgcccggactgaccatctggcagatagagaacttcgtgcctgtgctggtggaggaagccttccacggcaagttctacgaggctgactgctacattgtgctcaagacctttctggatgacagcggctccctcaactgggagatctactactggattggcggggaggccacactcgacaagaaagcttgctctgccatccacgctgtcaacttgcgcaactacctgggtgctgagtgccgcactgtccgggaggagatgggcgatgagagcgaggagttcctgcaggtgccagcccgttaaaattgggggtgggcagagtggggttcccagggaactctggtgcaggggcagtgggcccaaggcaggtaggcagaacaggtgggcaggcagggagctggggttaaagggggtggatcaacgatactgtgcgggacctaaggcagaccgcagggtgaggtctaaggtggccaaagcctgggtcagcaaaggagagttctggaacgcggggcagaattcagccgggcaaggataagggtacaggctgggcatgggagctagaccagtgggctgacacaggggagctgagagtagggtggaaggggtgttgccaagagcagtgaga

SEQ ID NO: 363745 - DNA, 766 bp, Homo sapiens
  misc_feature (70)..(70): n is a, c, g, or t
ggtgggcattggcccacccagaagaagttctcaggctcctcaccttcgttgataacctgcttgctgtagnaggtgtcaaacatggtgttcaggatgtcttctgccaacttggcttcgtcagggtctgatgccgagtacatgaaacacacacgtctcttccggtgctccaacgagaagggctactttgcagtgactgagaaatgctccgacttttgccaagatgacctggcagatgatgacatcatgttgctagacaatggccaagaggtctacatgtgggtggggacccagactagccaggtggagatcaagctgagcctgaaggcctgccaggtatatatccagcacatgcggtccaaggaacatgagcggccgcgccggctgcgcctggtccgcaagggcaatgagcagcacgcctttacccgctgcttccacgcctggagcgccttctgcaaggccctggcctaagacaggctggcacagccccaggcttggtgaggaagaggaaggggcctcatccactgtctgctagcaaagaatgtactcaggtgacaccacctgctccagccacgtccagtgccacagtccccagtagcctcaagcagcaccaatggggatgaccctgacaggtgccctcaggggtctgggaaatccaactctctccacagtgtgagtgcacgtgtgaagccccctcactcttccgctagggataaagcagatgtggatgccctttaagagatattaaatgcttttattttcaatatta

SEQ ID NO: 363746 - DNA, 1974 bp, Homo sapiens
cccagcccgcggctccccccagcgccctcgccccggcgctccctagcccggcgcggcccggcagcgagagcggcgccatggaggccaccggggtgctgccgttcgtgcgtggcgtggacctcagcggcaacgacttcaagggcggctacttccctgagaatgtcaaggccatgaccagcctgcggtggctgaagctgaaccgcactggcctctgctacctgcccgaggagctggccgccctgcagaagctggaacacttgtctgtgagccacaacaacctgaccacgcttcatggggagctgtccagcctgccatcgctgcgcgccatcgtggcccgagccaacagtctgaagaattccggagtccccgatgacatcttcaagctagatgatctctcagtcctggacttgagccacaaccagctgacagagtgcccgcgggagctggagaacgccaagaacatgctggtgctgaacctcagccacaacagcatcgacaccatccccaaccagctcttcatcaacctcactgacctactatacctggacctcagcgagaaccgcctggagagcctgcccccgcagatgcgccgcctggtgcacctgcagacgctcgtgctcaatggaaaccccctgctgcatgcacagctccggcagctcccagcgatgacggccctgcagaccctgcacctgcggagcacccagcgcacccagagcaacctgcccaccagcctggagggtctgagcaacctcgcaggtcaggcagccccaggagcccctctgagctcgggccccctctgggccctcttgcttccttgggtggaaggggttgaaccctgctcttcggaccaatacccagagggacaaggctggagttatgttacagtgacttttgcgattatgatgatgccttaacactgactttatgcctagaaaactcccccgcaacccccatgtgagggagtttgtccaaatggagaaacttgggcgcacagcagttgtcacttgcctaagccacacagctcagaggtggcagagctggggttcacactagggctggctgccctggcacctggtgtatgggccccagctgatgcaccccaccctgcaccccagacgtggatctgtcctgcaatgacctgacacgggtgcccgagtgtctgtacaccctccccagcctgcgccgcctcaacctcagcagcaaccagatcacggagctgtccctgtgcatagaccagtgggtgcacgtggaaactctgaacctgtcccgaaatcagctcacctcactgccctcagccatttgcaagctgagcaagctgaagaagctgtacctgaattccaacaagctggactttgacgggctgccctcaggcattggcaagctcaccaacctggaagagttcatggctgccaacaacaacctggagctggtccctgaaagtctctgcaggtgcccaaagctgaggaaacttgtcctgaacaagaaccacctggtgaccctcccagaagccatccatttcctgacggagatcgaggtcctggatgtgcgggagaaccccaacctggtcatgccgcccaagcccgcagaccgtgccgctgagtggtacaacatcgacttctcgctgcagaaccagctgcggctagcgggtgcctctcctgctaccgtggctgcagctgcagctgccagggagctgaggcccaacggacccatatggcatcgcaacgactgccgacatggcgagaaggccgcaaagggaacttccaagccccagcgaatggaacccagggccgaaggcaagggttgccctggaaaacggggcaatggtcacagcaactggcctagccccaccaagaggacagccaaccccgcaaacccccaaccaacaagaaaggccacacgcggcacagggcaagcaaaggccacgggaccacaggaaattggaccgcaacaggtgacgagacacaccccacccga

SEQ ID NO: 363747 - DNA, 301 bp, Homo sapiens
cggtaccggttttatgggtccagtgcttggtgaggaagaggaaggggcctcatccactgtctgctagcaaagaatgtactcaggtgacaccacctgctccagccacgtccagtgccacagtccccagtagcctcaagcagcaccaatggggatgaccctgacaggtgccctcaggggtctgggaaatccaactctctccacagtgtgagtgcacgtgtgaagccccctcactcttccgctagggataaagcagatgtggatgccctttaagagatattaaatgcttttattttcaatatta

SEQ ID NO: 363748 - DNA, 528 bp, Homo sapiens
gtacaaggacaccgtggggtcttttgtgtgaaggaaaggggtgtgagcctcgctgatgactttgcatcctgctctcaggctctttgcagagaaaattaacaagaatgagcggaaagggaaggctgagatcacactgctggtgcagggccaggagctcccagagttctgggaggcactgggtggggagccctctgagatcaagaagcacgtgcctgaagacttctggccgccgcagcccaagctgtacaaggtgagccctgctgctgaggcccaccttggcctcccaagttcacccaccgactgggggaatggactacacaccgatgtagttggctttgggctccatctcgactttggtggggagagggtgccaccttctggacaaggaacagtatgagcaaaggtctggaggctgcttttgagaagtagcctcacggagtctttccaggatggtggggccgtaggggagacagaagcacctagtgccagggctgggaaccttggctcaattatctagattcttgtgaa

SEQ ID NO: 363749 - DNA, 4185 bp, Homo sapiens
cccagcccgcggctccccccagcgccctcgccccggcgctccctagcccggcgcggcccggcagcgagagcggcgccatggaggccaccggggtgctgccgttcgtgcgtggcgtggacctcagcggcaacgacttcaagggcggctacttccctgagaatgtcaaggccatgaccagcctgcggtggctgaagctgaaccgcactggcctctgctacctgcccgaggagctggccgccctgcagaagctggaacacttgtctgtgagccacaacaacctgaccacgcttcatggggagctgtccagcctgccatcgctgcgcgccatcgtggcccgagccaacagtctgaagaattccggagtccccgatgacatcttcaagctagatgatctctcagtcctggacttgagccacaaccagctgacagagtgcccgcgggagctggagaacgccaagaacatgctggtgctgaacctcagccacaacagcatcgacaccatccccaaccagctcttcatcaacctcactgacctactatacctggacctcagcgagaaccgcctggagagcctgcccccgcagatgcgccgcctggtgcacctgcagacgctcgtgctcaatggaaaccccctgctgcatgcacagctccggcagctcccagcgatgacggccctgcagaccctgcacctgcggagcacccagcgcacccagagcaacctgcccaccagcctggagggtctgagcaacctcgcagacgtggatctgtcctgcaatgacctgacacgggtgcccgagtgtctgtacaccctccccagcctgcgccgcctcaacctcagcagcaaccagatcacggagctgtccctgtgcatagaccagtgggtgcacgtggaaactctgaacctgtcccgaaatcagctcacctcactgccctcagccatttgcaagctgagcaagctgaagaagctgtacctgaattccaacaagctggactttgacgggctgccctcaggcattggcaagctcaccaacctggaagagttcatggctgccaacaacaacctggagctggtccctgaaagtctctgcaggtgcccaaagctgaggaaacttgtcctgaacaagaaccacctggtgaccctcccagaagccatccatttcctgacggagatcgaggtcctggatgtgcgggagaaccccaacctggtcatgccgcccaagcccgcagaccgtgccgctgagtggtacaacatcgacttctcgctgcagaaccagctgcggctagcgggtgcctctcctgctaccgtggctgcagctgcagctgcagggagtgggcccaaggaccctatggctcgcaagatgcgactgcggaggcgcaaggattcagcccaggatgaccaggccaagcaggtgctgaagggcatgtcagatgttgcccaggagaagaacaaaaagcaggaggagagcgcagatgcccgggcccccagcgggaaggtgcggcgttgggaccagggcctggagaagccccgccttgactactccgagttcttcacggaggacgtgggccagctgcccggactgaccatctggcagatagagaacttcgtgcctgtgctggtggaggaagccttccacggcaagttctacgaggctgactgctacattgtgctcaagacctttctggatgacagcggctccctcaactgggagatctactactggattggcggggaggccacactcgacaagaaagcttgctctgccatccacgctgtcaacttgcgcaactacctgggtgctgagtgccgcactgtccgggaggagatgggcgatgagagcgaggagttcctgcaggtgtttgacaacgacatctcctacattgagggtggaacagccagtggcttctacactgtggaagacacacactatgtcaccaggatgtatcgtgtgtatgggaaaaagaacatcaagttggagcctgtgcccctcaaggggacctctctggacccaaggtttgttttcctgctggaccgagggctagacatctacgtatggcggggggcccaggccacactgagcagcaccaccaaggccaggctctttgcagagaaaattaacaagaatgagcggaaagggaaggctgagatcacactgctggtgcagggccaggagctcccagagttctgggaggcactgggtggggagccctctgagatcaagaagcacgtgcctgaagacttctggccgccgcagcccaagctgtacaaggtgggcctgggcttgggctacctggagctgccacagatcaactacaagctctccgtggaacataagcagcgtcccaaggtggagctgatgccaagaatgcggctgctgcagagtctgctggacacgcgctgcgtgtacattctggactgttggtccgacgtgttcatctggctcggccgcaagtccccgcgcctggtgcgcgctgccgccctcaagctgggtcaggagctgtgcgggatgctgcaccggccacgccatgccacggtcagccgcagcctcgagggcaccgaggcgcaggtgttcaaggccaagttcaagaattgggacgatgtgttgacggtggactacacacgcaatgcggaggccgtgctgcagagcccgggtctctccgggaaggtgaaacgcgacgccgagaagaaagaccagatgaaggctgacctcactgcgcttttcctgccgcggcagccgcccatgtcgctggccgaggcggagcagctgatggaggagtggaacgaagacctagacggcatggagggtttcgtgctggagggcaagaagtttgcgcggctgccggaagaggagtttggccacttctacacgcaggactgctacgtcttcctctgcaggtactgggtgcctgtggagtacgaggaggaggaaaagaaggaagacaaggaggagaaggccgagggcaaagaaggcgaggaagcaaccgctgaggcagaggagaagcagccagaggaggacttccagtgcatcgtgtacttctggcagggccgtgaagcctccaatatgggctggctcaccttcaccttcagcctgcaaaagaagttcgagagcctcttccctgggaagctggaggtggtacgcatgacgcagcagcaggagaaccccaagttcctgtcccatttcaagaggaagttcatcatccaccggggcaagaggaaggcggtccagggcgcccaacagcccagcctctaccagatccgcaccaacggcagcgccctctgcacccggtgcatccagatcaacaccgactccagcctcctcaactccgagttctgcttcatcctcaaggttccctttgagagtgaggacaaccagggcatcgtgtatgcctgggtgggccgggcatcagaccctgacgaagccaagttggcagaagacatcctgaacaccatgtttgacacctcctacagcaagcaggttatcaacgaaggtgaggagcctgagaacttcttctgggtgggcattggggcacagaagccctatgatgacgatgccgagtacatgaaacacacacgtctcttccggtgctccaacgagaagggctactttgcagtgactgagaaatgctccgacttttgccaagatgacctggcagatgatgacatcatgttgctagacaatggccaagaggtctacatgtgggtggggacccagactagccaggtggagatcaagctgagcctgaaggcctgccaggtatatatccagcacatgcggtccaaggaacatgagcggccgcgccggctgcgcctggtccgcaagggcaatgagcagcacgcctttacccgctgcttccacgcctggagcgccttctgcaaggccctggcctaagacaggctggcacagccccaggcttggtgaggaagaggaaggggcctcatccactgtctgctagcaaagaatgtactcaggtgacaccacctgctccagccacgtccagtgccacagtccccagtagcctcaagcagcaccaatggggatgaccctgacaggtgccctcaggggtctgggaaatccaactctctccacagtgtgagtgcacgtgtgaagccccctcactcttccgctagggataaagcagatgtggatgccctttaagagatattaaatgcttttattttcaatatta

SEQ ID NO: 363750 - DNA, 4544 bp, Homo sapiens
cccagcccgcggctccccccagcgccctcgccccggcgctccctagcccggcgcggcccggcagcgagagcggcgccatggaggccaccggggtgctgccgttcgtgcgtggcgtggacctcagcggcaacgacttcaagggcggctacttccctgagaatgtcaaggccatgaccagcctgcggtggctgaagctgaaccgcactggcctctgctacctgcccgaggagctggccgccctgcagaagctggaacacttgtctgtgagccacaacaacctgaccacgcttcatggggagctgtccagcctgccatcgctgcgcgccatcgtggcccgagccaacagtctgaagaattccggagtccccgatgacatcttcaagctagatgatctctcagtcctggacttgagccacaaccagctgacagagtgcccgcgggagctggagaacgccaagaacatgctggtgctgaacctcagccacaacagcatcgacaccatccccaaccagctcttcatcaacctcactgacctactatacctggacctcagcgagaaccgcctggagagcctgcccccgcagatgcgccgcctggtgcacctgcagacgctcgtgctcaatggaaaccccctgctgcatgcacagctccggcagctcccagcgatgacggccctgcagaccctgcacctgcggagcacccagcgcacccagagcaacctgcccaccagcctggagggtctgagcaacctcgcaggtcaggcagccccaggagcccctctgagctcgggccccctctgggccctcttgcttccttgggtggaaggggttgaaccctgctcttcggaccaatacccagagggacaaggctggagttatgttacagtgacttttgcgattatgatgatgccttaacactgactttatgcctagaaaactcccccgcaacccccatgtgagggagtttgtccaaatggagaaacttgggcgcacagcagttgtcacttgcctaagccacacagctcagaggtggcagagctggggttcacactagggctggctgccctggcacctggtgtatgggccccagctgatgcaccccaccctgcaccccagacgtggatctgtcctgcaatgacctgacacgggtgcccgagtgtctgtacaccctccccagcctgcgccgcctcaacctcagcagcaaccagatcacggagctgtccctgtgcatagaccagtgggtgcacgtggaaactctgaacctgtcccgaaatcagctcacctcactgccctcagccatttgcaagctgagcaagctgaagaagctgtacctgaattccaacaagctggactttgacgggctgccctcaggcattggcaagctcaccaacctggaagagttcatggctgccaacaacaacctggagctggtccctgaaagtctctgcaggtgcccaaagctgaggaaacttgtcctgaacaagaaccacctggtgaccctcccagaagccatccatttcctgacggagatcgaggtcctggatgtgcgggagaaccccaacctggtcatgccgcccaagcccgcagaccgtgccgctgagtggtacaacatcgacttctcgctgcagaaccagctgcggctagcgggtgcctctcctgctaccgtggctgcagctgcagctgcagggagtgggcccaaggaccctatggctcgcaagatgcgactgcggaggcgcaaggattcagcccaggatgaccaggccaagcaggtgctgaagggcatgtcagatgttgcccaggagaagaacaaaaagcaggaggagagcgcagatgcccgggcccccagcgggaaggtgcggcgttgggaccagggcctggagaagccccgccttgactactccgagttcttcacggaggacgtgggccagctgcccggactgaccatctggcagatagagaacttcgtgcctgtgctggtggaggaagccttccacggcaagttctacgaggctgactgctacattgtgctcaagacctttctggatgacagcggctccctcaactgggagatctactactggattggcggggaggccacactcgacaagaaagcttgctctgccatccacgctgtcaacttgcgcaactacctgggtgctgagtgccgcactgtccgggaggagatgggcgatgagagcgaggagttcctgcaggtgtttgacaacgacatctcctacattgagggtggaacagccagtggcttctacactgtggaagacacacactatgtcaccaggatgtatcgtgtgtatgggaaaaagaacatcaagttggagcctgtgcccctcaaggggacctctctggacccaaggtttgttttcctgctggaccgagggctagacatctacgtatggcggggggcccaggccacactgagcagcaccaccaaggccaggctctttgcagagaaaattaacaagaatgagcggaaagggaaggctgagatcacactgctggtgcagggccaggagctcccagagttctgggaggcactgggtggggagccctctgagatcaagaagcacgtgcctgaagacttctggccgccgcagcccaagctgtacaaggtgggcctgggcttgggctacctggagctgccacagatcaactacaagctctccgtggaacataagcagcgtcccaaggtggagctgatgccaagaatgcggctgctgcagagtctgctggacacgcgctgcgtgtacattctggactgttggtccgacgtgttcatctggctcggccgcaagtccccgcgcctggtgcgcgctgccgccctcaagctgggtcaggagctgtgcgggatgctgcaccggccacgccatgccacggtcagccgcagcctcgagggcaccgaggcgcaggtgttcaaggccaagttcaagaattgggacgatgtgttgacggtggactacacacgcaatgcggaggccgtgctgcagagcccgggtctctccgggaaggtgaaacgcgacgccgagaagaaagaccagatgaaggctgacctcactgcgcttttcctgccgcggcagccgcccatgtcgctggccgaggcggagcagctgatggaggagtggaacgaagacctagacggcatggagggtttcgtgctggagggcaagaagtttgcgcggctgccggaagaggagtttggccacttctacacgcaggactgctacgtcttcctctgcaggtactgggtgcctgtggagtacgaggaggaggaaaagaaggaagacaaggaggagaaggccgagggcaaagaaggcgaggaagcaaccgctgaggcagaggagaagcagccagaggaggacttccagtgcatcgtgtacttctggcagggccgtgaagcctccaatatgggctggctcaccttcaccttcagcctgcaaaagaagttcgagagcctcttccctgggaagctggaggtggtacgcatgacgcagcagcaggagaaccccaagttcctgtcccatttcaagaggaagttcatcatccaccggggcaagaggaaggcggtccagggcgcccaacagcccagcctctaccagatccgcaccaacggcagcgccctctgcacccggtgcatccagatcaacaccgactccagcctcctcaactccgagttctgcttcatcctcaaggttccctttgagagtgaggacaaccagggcatcgtgtatgcctgggtgggccgggcatcagaccctgacgaagccaagttggcagaagacatcctgaacaccatgtttgacacctcctacagcaagcaggttatcaacgaaggtgaggagcctgagaacttcttctgggtgggcattggggcacagaagccctatgatgacgatgccgagtacatgaaacacacacgtctcttccggtgctccaacgagaagggctactttgcagtgactgagaaatgctccgacttttgccaagatgacctggcagatgatgacatcatgttgctagacaatggccaagaggtctacatgtgggtggggacccagactagccaggtggagatcaagctgagcctgaaggcctgccaggtatatatccagcacatgcggtccaaggaacatgagcggccgcgccggctgcgcctggtccgcaagggcaatgagcagcacgcctttacccgctgcttccacgcctggagcgccttctgcaaggccctggcctaagacaggctggcacagccccaggcttggtgaggaagaggaaggggcctcatccactgtctgctagcaaagaatgtactcaggtgacaccacctgctccagccacgtccagtgccacagtccccagtagcctcaagcagcaccaatggggatgaccctgacaggtgccctcaggggtctgggaaatccaactctctccacagtgtgagtgcacgtgtgaagccccctcactcttccgctagggataaagcagatgtggatgccctttaagagatattaaatgcttttattttcaatatta

SEQ ID NO: 363751 - DNA, 4629 bp, Homo sapiens
cccagcccgcggctccccccagcgccctcgccccggcgctccctagcccggcgcggcccggcagcgagagcggcgccatggaggccaccggggtgctgccgttcgtgcgtggcgtggacctcagcggcaacgacttcaagggcggctacttccctgagaatgtcaaggccatgaccagcctgcggtggctgaagctgaaccgcactggcctctgctacctgcccgaggagctggccgccctgcagaagctggaacacttgtctgtgagccacaacaacctgaccacgcttcatggggagctgtccagcctgccatcgctgcgcgccatcgtggcccgagccaacagtctgaagaattccggagtccccgatgacatcttcaagctagatgatctctcagtcctggacttgagccacaaccagctgacagagtgcccgcgggagctggagaacgccaagaacatgctggtgctgaacctcagccacaacagcatcgacaccatccccaaccagctcttcatcaacctcactgacctactatacctggacctcagcgagaaccgcctggagagcctgcccccgcagatgcgccgcctggtgcacctgcagacgctcgtgctcaatggaaaccccctgctgcatgcacagctccggcagctcccagcgatgacggccctgcagaccctgcacctgcggagcacccagcgcacccagagcaacctgcccaccagcctggagggtctgagcaacctcgcaggtcaggcagccccaggagcccctctgagctcgggccccctctgggccctcttgcttccttgggtggaaggggttgaaccctgctcttcggaccaatacccagagggacaaggctggagttatgttacagtgacttttgcgattatgatgatgccttaacactgactttatgcctagaaaactcccccgcaacccccatgtgagggagtttgtccaaatggagaaacttgggcgcacagcagttgtcacttgcctaagccacacagctcagaggtggcagagctggggttcacactagggctggctgccctggcacctggtgtatgggccccagctgatgcaccccaccctgcaccccagacgtggatctgtcctgcaatgacctgacacgggtgcccgagtgtctgtacaccctccccagcctgcgccgcctcaacctcagcagcaaccagatcacggagctgtccctgtgcatagaccagtgggtgcacgtggaaactctgaacctgtcccgaaatcagctcacctcactgcccgtgcgtctgaggccctcagtagggggatgggaggaaggccgtgagcctggccctgacctcccacccctgcccgttccccctccagtcagccatttgcaagctgagcaagctgaagaagctgtacctgaattccaacaagctggactttgacgggctgccctcaggcattggcaagctcaccaacctggaagagttcatggctgccaacaacaacctggagctggtccctgaaagtctctgcaggtgcccaaagctgaggaaacttgtcctgaacaagaaccacctggtgaccctcccagaagccatccatttcctgacggagatcgaggtcctggatgtgcgggagaaccccaacctggtcatgccgcccaagcccgcagaccgtgccgctgagtggtacaacatcgacttctcgctgcagaaccagctgcggctagcgggtgcctctcctgctaccgtggctgcagctgcagctgcagggagtgggcccaaggaccctatggctcgcaagatgcgactgcggaggcgcaaggattcagcccaggatgaccaggccaagcaggtgctgaagggcatgtcagatgttgcccaggagaagaacaaaaagcaggaggagagcgcagatgcccgggcccccagcgggaaggtgcggcgttgggaccagggcctggagaagccccgccttgactactccgagttcttcacggaggacgtgggccagctgcccggactgaccatctggcagatagagaacttcgtgcctgtgctggtggaggaagccttccacggcaagttctacgaggctgactgctacattgtgctcaagacctttctggatgacagcggctccctcaactgggagatctactactggattggcggggaggccacactcgacaagaaagcttgctctgccatccacgctgtcaacttgcgcaactacctgggtgctgagtgccgcactgtccgggaggagatgggcgatgagagcgaggagttcctgcaggtgtttgacaacgacatctcctacattgagggtggaacagccagtggcttctacactgtggaagacacacactatgtcaccaggatgtatcgtgtgtatgggaaaaagaacatcaagttggagcctgtgcccctcaaggggacctctctggacccaaggtttgttttcctgctggaccgagggctagacatctacgtatggcggggggcccaggccacactgagcagcaccaccaaggccaggctctttgcagagaaaattaacaagaatgagcggaaagggaaggctgagatcacactgctggtgcagggccaggagctcccagagttctgggaggcactgggtggggagccctctgagatcaagaagcacgtgcctgaagacttctggccgccgcagcccaagctgtacaaggtgggcctgggcttgggctacctggagctgccacagatcaactacaagctctccgtggaacataagcagcgtcccaaggtggagctgatgccaagaatgcggctgctgcagagtctgctggacacgcgctgcgtgtacattctggactgttggtccgacgtgttcatctggctcggccgcaagtccccgcgcctggtgcgcgctgccgccctcaagctgggtcaggagctgtgcgggatgctgcaccggccacgccatgccacggtcagccgcagcctcgagggcaccgaggcgcaggtgttcaaggccaagttcaagaattgggacgatgtgttgacggtggactacacacgcaatgcggaggccgtgctgcagagcccgggtctctccgggaaggtgaaacgcgacgccgagaagaaagaccagatgaaggctgacctcactgcgcttttcctgccgcggcagccgcccatgtcgctggccgaggcggagcagctgatggaggagtggaacgaagacctagacggcatggagggtttcgtgctggagggcaagaagtttgcgcggctgccggaagaggagtttggccacttctacacgcaggactgctacgtcttcctctgcaggtactgggtgcctgtggagtacgaggaggaggaaaagaaggaagacaaggaggagaaggccgagggcaaagaaggcgaggaagcaaccgctgaggcagaggagaagcagccagaggaggacttccagtgcatcgtgtacttctggcagggccgtgaagcctccaatatgggctggctcaccttcaccttcagcctgcaaaagaagttcgagagcctcttccctgggaagctggaggtggtacgcatgacgcagcagcaggagaaccccaagttcctgtcccatttcaagaggaagttcatcatccaccggggcaagaggaaggcggtccagggcgcccaacagcccagcctctaccagatccgcaccaacggcagcgccctctgcacccggtgcatccagatcaacaccgactccagcctcctcaactccgagttctgcttcatcctcaaggttccctttgagagtgaggacaaccagggcatcgtgtatgcctgggtgggccgggcatcagaccctgacgaagccaagttggcagaagacatcctgaacaccatgtttgacacctcctacagcaagcaggttatcaacgaaggtgaggagcctgagaacttcttctgggtgggcattggggcacagaagccctatgatgacgatgccgagtacatgaaacacacacgtctcttccggtgctccaacgagaagggctactttgcagtgactgagaaatgctccgacttttgccaagatgacctggcagatgatgacatcatgttgctagacaatggccaagaggtctacatgtgggtggggacccagactagccaggtggagatcaagctgagcctgaaggcctgccaggtatatatccagcacatgcggtccaaggaacatgagcggccgcgccggctgcgcctggtccgcaagggcaatgagcagcacgcctttacccgctgcttccacgcctggagcgccttctgcaaggccctggcctaagacaggctggcacagccccaggcttggtgaggaagaggaaggggcctcatccactgtctgctagcaaagaatgtactcaggtgacaccacctgctccagccacgtccagtgccacagtccccagtagcctcaagcagcaccaatggggatgaccctgacaggtgccctcaggggtctgggaaatccaactctctccacagtgtgagtgcacgtgtgaagccccctcactcttccgctagggataaagcagatgtggatgccctttaagagatattaaatgcttttattttcaatatta

SEQ ID NO: 363752 - DNA, 3713 bp, Homo sapiens
aggctggtacggcccgggtgttaggcatgggacaaggctggagttatgttacagtgacttttgcgattatgatgatgccttaacactgactttatgcctagaaaactcccccgcaacccccatgtgagggagtttgtccaaatggagaaacttgggcgcacagcagttgtcacttgcctaagccacacagctcagaggtggcagagctggggttcacactagggctggctgccctggcacctggtgtatgggccccagctgatgcaccccaccctgcaccccagacgtggatctgtcctgcaatgacctgacacgggtgcccgagtgtctgtacaccctccccagcctgcgccgcctcaacctcagcagcaaccagatcacggagctgtccctgtgcatagaccagtgggtgcacgtggaaactctgaacctgtcccgaaatcagctcacctcactgccctcagccatttgcaagctgagcaagctgaagaagctgtacctgaattccaacaagctggactttgacgggctgccctcaggcattggcaagctcaccaacctggaagagttcatggctgccaacaacaacctggagctggtccctgaaagtctctgcaggtgcccaaagctgaggaaacttgtcctgaacaagaaccacctggtgaccctcccagaagccatccatttcctgacggagatcgaggtcctggatgtgcgggagaaccccaacctggtcatgccgcccaagcccgcagaccgtgccgctgagtggtacaacatcgacttctcgctgcagaaccagctgcggctagcgggtgcctctcctgctaccgtggctgcagctgcagctgcagggagtgggcccaaggaccctatggctcgcaagatgcgactgcggaggcgcaaggattcagcccaggatgaccaggccaagcaggtgctgaagggcatgtcagatgttgcccaggagaagaacaaaaagcaggaggagagcgcagatgcccgggcccccagcgggaaggtgcggcgttgggaccagggcctggagaagccccgccttgactactccgagttcttcacggaggacgtgggccagctgcccggactgaccatctggcagatagagaacttcgtgcctgtgctggtggaggaagccttccacggcaagttctacgaggctgactgctacattgtgctcaagacctttctggatgacagcggctccctcaactgggagatctactactggattggcggggaggccacactcgacaagaaagcttgctctgccatccacgctgtcaacttgcgcaactacctgggtgctgagtgccgcactgtccgggaggagatgggcgatgagagcgaggagttcctgcaggtgtttgacaacgacatctcctacattgagggtggaacagccagtggcttctacactgtggaagacacacactatgtcaccaggatgtatcgtgtgtatgggaaaaagaacatcaagttggagcctgtgcccctcaaggggacctctctggacccaaggtttgttttcctgctggaccgagggctagacatctacgtatggcggggggcccaggccacactgagcagcaccaccaaggccaggctctttgcagagaaaattaacaagaatgagcggaaagggaaggctgagatcacactgctggtgcagggccaggagctcccagagttctgggaggcactgggtggggagccctctgagatcaagaagcacgtgcctgaagacttctggccgccgcagcccaagctgtacaaggtgggcctgggcttgggctacctggagctgccacagatcaactacaagctctccgtggaacataagcagcgtcccaaggtggagctgatgccaagaatgcggctgctgcagagtctgctggacacgcgctgcgtgtacattctggactgttggtccgacgtgttcatctggctcggccgcaagtccccgcgcctggtgcgcgctgccgccctcaagctgggtcaggagctgtgcgggatgctgcaccggccacgccatgccacggtcagccgcagcctcgagggcaccgaggcgcaggtgttcaaggccaagttcaagaattgggacgatgtgttgacggtggactacacacgcaatgcggaggccgtgctgcagagcccgggtctctccgggaaggtgaaacgcgacgccgagaagaaagaccagatgaaggctgacctcactgcgcttttcctgccgcggcagccgcccatgtcgctggccgaggcggagcagctgatggaggagtggaacgaagacctagacggcatggagggtttcgtgctggagggcaagaagtttgcgcggctgccggaagaggagtttggccacttctacacgcaggactgctacgtcttcctctgcaggtactgggtgcctgtggagtacgaggaggaggaaaagaaggaagacaaggaggagaaggccgagggcaaagaaggcgaggaagcaaccgctgaggcagaggagaagcagccagaggaggacttccagtgcatcgtgtacttctggcagggccgtgaagcctccaatatgggctggctcaccttcaccttcagcctgcaaaagaagttcgagagcctcttccctgggaagctggaggtggtacgcatgacgcagcagcaggagaaccccaagttcctgtcccatttcaagaggaagttcatcatccaccggggcaagaggaaggcggtccagggcgcccaacagcccagcctctaccagatccgcaccaacggcagcgccctctgcacccggtgcatccagatcaacaccgactccagcctcctcaactccgagttctgcttcatcctcaaggttccctttgagagtgaggacaaccagggcatcgtgtatgcctgggtgggccgggcatcagaccctgacgaagccaagttggcagaagacatcctgaacaccatgtttgacacctcctacagcaagcaggttatcaacgaaggtgaggagcctgagaacttcttctgggtgggcattggggcacagaagccctatgatgacgatgccgagtacatgaaacacacacgtctcttccggtgctccaacgagaagggctactttgcagtgactgagaaatgctccgacttttgccaagatgacctggcagatgatgacatcatgttgctagacaatggccaagaggtctacatgtgggtggggacccagactagccaggtggagatcaagctgagcctgaaggcctgccaggtatatatccagcacatgcggtccaaggaacatgagcggccgcgccggctgcgcctggtccgcaagggcaatgagcagcacgcctttacccgctgcttccacgcctggagcgccttctgcaaggccctggcctaagacaggctggcacagccccaggcttggtgaggaagaggaaggggcctcatccactgtctgctagcaaagaatgtactcaggtgacaccacctgctccagccacgtccagtgccacagtccccagtagcctcaagcagcaccaatggggatgaccctgacaggtgccctcaggggtctgggaaatccaactctctccacagtgtgagtgcacgtgtgaagccccctcactcttccgctagggataaagcagatgtggatgccctttaagagatattaaatgcttttattttcaatatta

SEQ ID NO: 363753 - DNA, 4791 bp, Homo sapiens
cccagcccgcggctccccccagcgccctcgccccggcgctccctagcccggcgcggcccggcagcgagagcggcgccatggaggccaccggggtgctgccgttcgtgcgtggcgtggacctcagcggcaacgacttcaagggcggctacttccctgagaatgtcaaggccatgaccagcctgcggtggctgaagctgaaccgcactggcctctgctacctgcccgaggagctggccgccctgcagaagctggaacacttgtctgtgagccacaacaacctgaccacgcttcatggggagctgtccagcctgccatcgctgcgcgccatcgtggcccgagccaacagtctgaagaattccggagtccccgatgacatcttcaagctagatgatctctcagtcctggacttgagccacaaccagctgacagagtgcccgcgggagctggagaacgccaagaacatgctggtgctgaacctcagccacaacagcatcgacaccatccccaaccagctcttcatcaacctcactgacctactatacctggacctcagcgagaaccgcctggagagcctgcccccgcagatgcgccgcctggtgcacctgcagacgctcgtgctcaatggaaaccccctgctgcatgcacagctccggcagctcccagcgatgacggccctgcagaccctgcacctgcggagcacccagcgcacccagagcaacctgcccaccagcctggagggtctgagcaacctcgcaggtcaggcagccccaggagcccctctgagctcgggccccctctgggccctcttgcttccttgggtggaaggggttgaaccctgctcttcggaccaatacccagagggacaaggctggagttatgttacagtgacttttgcgattatgatgatgccttaacactgactttatgcctagaaaactcccccgcaacccccatgtgagggagtttgtccaaatggagaaacttgggcgcacagcagttgtcacttgcctaagccacacagctcagaggtggcagagctggggttcacactagggctggctgccctggcacctggtgtatgggccccagctgatgcaccccaccctgcaccccagacgtggatctgtcctgcaatgacctgacacgggtgcccgagtgtctgtacaccctccccagcctgcgccgcctcaacctcagcagcaaccagatcacggagctgtccctgtgcatagaccagtgggtgcacgtggaaactctgaacctgtcccgaaatcagctcacctcactgccctcagccatttgcaagctgagcaagctgaagaagctgtacctgaattccaacaagctggactttgacgggctgccctcaggcattggcaagctcaccaacctggaagagttcatggctgccaacaacaacctggagctggtccctgaaagtctctgcaggtgcccaaagctgaggaaacttgtcctgaacaagaaccacctggtgaccctcccagaagccatccatttcctgacggagatcgaggtcctggatgtgcgggagaaccccaacctggtcatgccgcccaagcccgcagaccgtgccgctgagtggtacaacatcgacttctcgctgcagaaccagctgcggctagcgggtgcctctcctgctaccgtggctgcagctgcagctgcagggagtgggcccaaggaccctatggctcgcaagatgcgactgcggaggcgcaaggattcagcccaggatgaccaggccaagcaggtgctgaagggcatgtcagatgttgcccaggagaagaacaaaaagcaggaggagagcgcagatgcccgggcccccagcgggaaggtgcggcgttgggaccagggcctggagaagccccgccttgactactccgagttcttcacggaggacgtgggccagctgcccggactgaccatctggcagatagagaacttcgtgcctgtgctggtggaggaagccttccacggcaagttctacgaggctgactgctacattgtgctcaaggtgagggctgggcatgctgttaggggccatgtggcccagtaccttcctctaagatggctcagtccccaactccagagttttgttcagggaggccaggtgggaggtgggcaggctgcaggaggtggtccaggcacaggggcagtacaaagcccctggggctgggaagcctgtgctgttcagagtggcgtctccggggtggccggaagaccaggatgaaagctgatgtggccggtgccttggcttccagacctttctggatgacagcggctccctcaactgggagatctactactggattggcggggaggccacactcgacaagaaagcttgctctgccatccacgctgtcaacttgcgcaactacctgggtgctgagtgccgcactgtccgggaggagatgggcgatgagagcgaggagttcctgcaggtgtttgacaacgacatctcctacattgagggtggaacagccagtggcttctacactgtggaagacacacactatgtcaccaggatgtatcgtgtgtatgggaaaaagaacatcaagttggagcctgtgcccctcaaggggacctctctggacccaaggtttgttttcctgctggaccgagggctagacatctacgtatggcggggggcccaggccacactgagcagcaccaccaaggccaggctctttgcagagaaaattaacaagaatgagcggaaagggaaggctgagatcacactgctggtgcagggccaggagctcccagagttctgggaggcactgggtggggagccctctgagatcaagaagcacgtgcctgaagacttctggccgccgcagcccaagctgtacaaggtgggcctgggcttgggctacctggagctgccacagatcaactacaagctctccgtggaacataagcagcgtcccaaggtggagctgatgccaagaatgcggctgctgcagagtctgctggacacgcgctgcgtgtacattctggactgttggtccgacgtgttcatctggctcggccgcaagtccccgcgcctggtgcgcgctgccgccctcaagctgggtcaggagctgtgcgggatgctgcaccggccacgccatgccacggtcagccgcagcctcgagggcaccgaggcgcaggtgttcaaggccaagttcaagaattgggacgatgtgttgacggtggactacacacgcaatgcggaggccgtgctgcagagcccgggtctctccgggaaggtgaaacgcgacgccgagaagaaagaccagatgaaggctgacctcactgcgcttttcctgccgcggcagccgcccatgtcgctggccgaggcggagcagctgatggaggagtggaacgaagacctagacggcatggagggtttcgtgctggagggcaagaagtttgcgcggctgccggaagaggagtttggccacttctacacgcaggactgctacgtcttcctctgcaggtactgggtgcctgtggagtacgaggaggaggaaaagaaggaagacaaggaggagaaggccgagggcaaagaaggcgaggaagcaaccgctgaggcagaggagaagcagccagaggaggacttccagtgcatcgtgtacttctggcagggccgtgaagcctccaatatgggctggctcaccttcaccttcagcctgcaaaagaagttcgagagcctcttccctgggaagctggaggtggtacgcatgacgcagcagcaggagaaccccaagttcctgtcccatttcaagaggaagttcatcatccaccggggcaagaggaaggcggtccagggcgcccaacagcccagcctctaccagatccgcaccaacggcagcgccctctgcacccggtgcatccagatcaacaccgactccagcctcctcaactccgagttctgcttcatcctcaaggttccctttgagagtgaggacaaccagggcatcgtgtatgcctgggtgggccgggcatcagaccctgacgaagccaagttggcagaagacatcctgaacaccatgtttgacacctcctacagcaagcaggttatcaacgaaggtgaggagcctgagaacttcttctgggtgggcattggggcacagaagccctatgatgacgatgccgagtacatgaaacacacacgtctcttccggtgctccaacgagaagggctactttgcagtgactgagaaatgctccgacttttgccaagatgacctggcagatgatgacatcatgttgctagacaatggccaagaggtctacatgtgggtggggacccagactagccaggtggagatcaagctgagcctgaaggcctgccaggtatatatccagcacatgcggtccaaggaacatgagcggccgcgccggctgcgcctggtccgcaagggcaatgagcagcacgcctttacccgctgcttccacgcctggagcgccttctgcaaggccctggcctaagacaggctggcacagccccaggcttggtgaggaagaggaaggggcctcatccactgtctgctagcaaagaatgtactcaggtgacaccacctgctccagccacgtccagtgccacagtccccagtagcctcaagcagcaccaatggggatgaccctgacaggtgccctcaggggtctgggaaatccaactctctccacagtgtgagtgcacgtgtgaagccccctcactcttccgctagggataaagcagatgtggatgccctttaagagatattaaatgcttttattttcaatatta

SEQ ID NO: 363754 - DNA, 4627 bp, Homo sapiens
cccagcccgcggctccccccagcgccctcgccccggcgctccctagcccggcgcggcccggcagcgagagcggcgccatggaggccaccggggtgctgccgttcgtgcgtggcgtggacctcagcggcaacgacttcaagggcggctacttccctgagaatgtcaaggccatgaccagcctgcggtggctgaagctgaaccgcactggcctctgctacctgcccgaggagctggccgccctgcagaagctggaacacttgtctgtgagccacaacaacctgaccacgcttcatggggagctgtccagcctgccatcgctgcgcgccatcgtggcccgagccaacagtctgaagaattccggagtccccgatgacatcttcaagctagatgatctctcagtcctggacttgagccacaaccagctgacagagtgcccgcgggagctggagaacgccaagaacatgctggtgctgaacctcagccacaacagcatcgacaccatccccaaccagctcttcatcaacctcactgacctactatacctggacctcagcgagaaccgcctggagagcctgcccccgcagatgcgccgcctggtgcacctgcagacgctcgtgctcaatggaaaccccctgctgcatgcacagctccggcagctcccagcgatgacggccctgcagaccctgcacctgcggagcacccagcgcacccagagcaacctgcccaccagcctggagggtctgagcaacctcgcaggtcaggcagccccaggagcccctctgagctcgggccccctctgggccctcttgcttccttgggtggaaggggttgaaccctgctcttcggaccaatacccagagggacaaggctggagttatgttacagtgacttttgcgattatgatgatgccttaacactgactttatgcctagaaaactcccccgcaacccccatgtgagggagtttgtccaaatggagaaacttgggcgcacagcagttgtcacttgcctaagccacacagctcagaggtggcagagctggggttcacactagggctggctgccctggcacctggtgtatgggccccagctgatgcaccccaccctgcaccccagacgtggatctgtcctgcaatgacctgacacgggtgcccgagtgtctgtacaccctccccagcctgcgccgcctcaacctcagcagcaaccagatcacggagctgtccctgtgcatagaccagtgggtgcacgtggaaactctgaacctgtcccgaaatcagctcacctcactgccctcagccatttgcaagctgagcaagctgaagaagctgtacctgaattccaacaagctggactttgacgggctgccctcaggcattggcaagctcaccaacctggaagagttcatggctgccaacaacaacctggagctggtccctgaaagtctctgcaggtgcccaaagctgaggaaacttgtcctgaacaagaaccacctggtgaccctcccagaagccatccatttcctgacggagatcgaggtcctggatgtgcgggagaaccccaacctggtcatgccgcccaagcccgcagaccgtgccgctgagtggtacaacatcgacttctcgctgcagaaccagctgcggctagcgggtgcctctcctgctaccgtggctgcagctgcagctgcagggagtgggcccaaggaccctatggctcgcaagatgcgactgcggaggcgcaaggattcagcccaggatgaccaggccaagcaggtgctgaagggcatgtcagatgttgcccaggagaagaacaaaaagcaggaggagagcgcagatgcccgggcccccagcgggaaggtgcggcgttgggaccagggcctggagaagccccgccttgactactccgagttcttcacggaggacgtgggccagctgcccggactgaccatctggcagatagagaacttcgtgcctgtgctggtggaggaagccttccacggcaagttctacgaggctgactgctacattgtgctcaagacctttctggatgacagcggctccctcaactgggagatctactactggattggcggggaggccacactcgacaagaaagcttgctctgccatccacgctgtcaacttgcgcaactacctgggtgctgagtgccgcactgtccgggaggagatgggcgatgagagcgaggagttcctgcaggtgtttgacaacgacatctcctacattgagggtggaacagccagtggcttctacactgtggaagacacacactatgtcaccaggatgtatcgtgtgtatgggaaaaagaacatcaagttggagcctgtgcccctcaaggggacctctctggacccaaggtttgttttcctgctggaccgagggctagacatctacgtatggcggggggcccaggccacactgagcagcaccaccaaggccaggctctttgcagagaaaattaacaagaatgagcggaaagggaaggctgagatcacactgctggtgcagggccaggagctcccagagttctgggaggcactgggtggggagccctctgagatcaagaagcacgtgcctgaagacttctggccgccgcagcccaagctgtacaaggtgggcctgggcttgggctacctggagctgccacagatcaactacaagctctccgtggaacataagcagcgtcccaaggtggagctgatgccaagaatgcggctgctgcagagtctgctggacacgcgctgcgtgtacattctggactgttggtccgacgtgttcatctggctcggccgcaagtccccgcgcctggtgcgcgctgccgccctcaagctgggtcaggagctgtgcgggatgctgcaccggccacgccatgccacggtcagccgcagcctcgagggcaccgaggcgcaggtgttcaaggccaagttcaagaattgggacgatgtgttgacggtggactacacacgcaatgcggaggccgtgctgcagagcccgggtctctccgggaaggtgaaacgcgacgccgagaagaaagaccagatgaaggctgacctcactgcgcttttcctgccgcggcagccgcccatgtcgctggccgaggcggagcagctgatggaggagtggaacgaagacctagacggcatggagggtttcgtgctggagggcaagaagtttgcgcggctgccggaagaggagtttggccacttctacacgcaggactgctacgtcttcctctgcaggtactgggtgcctgtggagtacgaggaggaggaaaagaaggaagacaaggaggagaaggccgagggcaaagaaggcgaggaagcaaccgctgaggcagaggagaagcagccagaggaggacttccagtgcatcgtgtacttctggcagggccgtgaagcctccaatatgggctggctcaccttcaccttcagcctgcaaaagaagttcgagagcctcttccctgggaagctggaggtggtacgcatgacgcagcagcaggagaaccccaagttcctgtcccatttcaagaggaagttcatcatccaccggggcaagaggaaggcggtccagggcgcccaacagcccagcctctaccagatccgcaccaacggcagcgccctctgcacccggtgcatccagatcaacaccgactccagcctcctcaactccgagttctgcttcatcctcaaggttccctttgagagtgaggacaaccagggcatcgtgtatgcctgggtgggccgggcatcagaccctgacgaagccaagttggcagaagacatcctgaacaccatgtttgacacctcctacagcaagcaggttatcaacgaaggtgaggagcctgagaacttcttctgggtgggcattggggcacagaagccctatgatgacgatgccgagtacatgaaacacacacgtctcttccggtgaggccagggccctgaccctcccctcagtcctggcactgctgcttatgacctctggcctcaccttgacccttgattcccaggtgctccaacgagaagggctactttgcagtgactgagaaatgctccgacttttgccaagatgacctggcagatgatgacatcatgttgctagacaatggccaagaggtctacatgtgggtggggacccagactagccaggtggagatcaagctgagcctgaaggcctgccaggtatatatccagcacatgcggtccaaggaacatgagcggccgcgccggctgcgcctggtccgcaagggcaatgagcagcacgcctttacccgctgcttccacgcctggagcgccttctgcaaggccctggcctaagacaggctggcacagccccaggcttggtgaggaagaggaaggggcctcatccactgtctgctagcaaagaatgtactcaggtgacaccacctgctccagccacgtccagtgccacagtccccagtagcctcaagcagcaccaatggggatgaccctgacaggtgccctcaggggtctgggaaatccaactctctccacagtgtgagtgcacgtgtgaagccccctcactcttccgctagggataaagcagatgtggatgccctttaagagatattaaatgcttttattttcaatatta

SEQ ID NO: 363755 - DNA, 4713 bp, Homo sapiens
cccagcccgcggctccccccagcgccctcgccccggcgctccctagcccggcgcggcccggcagcgagagcggcgccatggaggccaccggggtgctgccgttcgtgcgtggcgtggacctcagcggcaacgacttcaagggcggctacttccctgagaatgtcaaggccatgaccagcctgcggtggctgaagctgaaccgcactggcctctgctacctgcccgaggagctggccgccctgcagaagctggaacacttgtctgtgagccacaacaacctgaccacgcttcatggggagctgtccagcctgccatcgctgcgcgccatcgtggcccgagccaacagtctgaagaattccggagtccccgatgacatcttcaagctagatgatctctcagtcctggacttgagccacaaccagctgacagagtgcccgcgggagctggagaacgccaagaacatgctggtgctgaacctcagccacaacagcatcgacaccatccccaaccagctcttcatcaacctcactgacctactatacctggacctcagcgagaaccgcctggagagcctgcccccgcagatgcgccgcctggtgcacctgcagacgctcgtgctcaatggaaaccccctgctgcatgcacagctccggcagctcccagcgatgacggccctgcagaccctgcacctgcggagcacccagcgcacccagagcaacctgcccaccagcctggagggtctgagcaacctcgcaggtcaggcagccccaggagcccctctgagctcgggccccctctgggccctcttgcttccttgggtggaaggggttgaaccctgctcttcggaccaatacccagagggacaaggctggagttatgttacagtgacttttgcgattatgatgatgccttaacactgactttatgcctagaaaactcccccgcaacccccatgtgagggagtttgtccaaatggagaaacttgggcgcacagcagttgtcacttgcctaagccacacagctcagaggtggcagagctggggttcacactagggctggctgccctggcacctggtgtatgggccccagctgatgcaccccaccctgcaccccagacgtggatctgtcctgcaatgacctgacacgggtgcccgagtgtctgtacaccctccccagcctgcgccgcctcaacctcagcagcaaccagatcacggagctgtccctgtgcatagaccagtgggtgcacgtggaaactctgaacctgtcccgaaatcagctcacctcactgccctcagccatttgcaagctgagcaagctgaagaagctgtacctgaattccaacaagctggactttgacgggctgccctcaggcattggcaagctcaccaacctggaagagttcatggctgccaacaacaacctggagctggtccctgaaagtctctgcaggtgcccaaagctgaggaaacttgtcctgaacaagaaccacctggtgaccctcccagaagccatccatttcctgacggagatcgaggtcctggatgtgcgggagaaccccaacctggtcatgccgcccaagcccgcagaccgtgccgctgagtggtacaacatcgacttctcgctgcagaaccagctgcggctagcgggtgcctctcctgctaccgtggctgcagctgcagctgcagggagtgggcccaaggaccctatggctcgcaagatgcgactgcggaggcgcaaggattcagcccaggatgaccaggccaagcaggtgctgaagggcatgtcagatgttgcccaggagaagaacaaaaagcaggaggagagcgcagatgcccgggcccccagcgggaaggtgcggcgttgggaccagggcctggagaagccccgccttgactactccgagttcttcacggaggacgtgggccagctgcccggactgaccatctggcagatagagaacttcgtgcctgtgctggtggaggaagccttccacggcaagttctacgaggctgactgctacattgtgctcaagacctttctggatgacagcggctccctcaactgggagatctactactggattggcggggaggccacactcgacaagaaagcttgctctgccatccacgctgtcaacttgcgcaactacctgggtgctgagtgccgcactgtccgggaggagatgggcgatgagagcgaggagttcctgcaggtgtttgacaacgacatctcctacattgagggtggaacagccagtggcttctacactgtggaagacacacactatgtcaccaggatgtatcgtgtgtatgggaaaaagaacatcaagttggagcctgtgcccctcaaggggacctctctggacccaaggtttgttttcctgctggaccgagggctagacatctacgtatggcggggggcccaggccacactgagcagcaccaccaaggccaggctctttgcagagaaaattaacaagaatgagcggaaagggaaggctgagatcacactgctggtgcagggccaggagctcccagagttctgggaggcactgggtggggagccctctgagatcaagaagcacgtgcctgaagacttctggccgccgcagcccaagctgtacaaggtgggcctgggcttgggctacctggagctgccacagatcaactacaagctctccgtggaacataagcagcgtcccaaggtggagctgatgccaagaatgcggctgctgcagagtctgctggacacgcgctgcgtgtacattctggactgttggtccgacgtgttcatctggctcggccgcaagtccccgcgcctggtgcgcgctgccgccctcaagctgggtcaggagctgtgcgggatgctgcaccggccacgccatgccacggtcagccgcagcctcgagggcaccgaggcgcaggtgttcaaggccaagttcaagaattgggacgatgtgttgacggtggactacacacgcaatgcggaggccgtgctgcagagcccgggtctctccgggaaggtgaaacgcgacgccgagaagaaagaccagatgaaggctgacctcactgcgcttttcctgccgcggcagccgcccatgtcgctggccgaggcggagcagctgatggaggagtggaacgaagacctagacggcatggagggtttcgtgctggagggcaagaagtttgcgcggctgccggaagaggagtttggccacttctacacgcaggactgctacgtcttcctctgcaggtactgggtgcctgtggagtacgaggaggaggaaaagaaggaagacaaggaggagaaggccgagggcaaagaaggcgaggaagcaaccgctgaggcagaggagaagcagccagaggaggacttccagtgcatcgtgtacttctggcagggccgtgaagcctccaatatgggctggctcaccttcaccttcagcctgcaaaagaagttcgagagcctcttccctgggaagctggaggtggtacgcatgacgcagcagcaggagaaccccaagttcctgtcccatttcaagaggaagttcatcatccaccggggcaagaggaaggcggtccagggcgcccaacagcccagcctctaccagatccgcaccaacggcagcgccctctgcacccggtgcatccagatcaacaccgactccagcctcctcaactccgagttctgcttcatcctcaaggttccctttgagagtgaggacaaccagggcatcgtgtatgcctgggtgggccgggcatcagaccctgacgaagccaagttggcagaagacatcctgaacaccatgtttgacacctcctacagcaagcaggtcaggaggcgggcgggcaggcgggcacacacagaggagccagggcaggcaggggccctgggctggactggcctttcccgcaggttgttatcaacgaaggtgaggagcctgagaacttcttctgggtgggcattggggcacagaagccctatgatgacgatgccgagtacatgaaacacacacgtctcttccggtgaggccagggccctgaccctcccctcagtcctggcactgctgcttatgacctctggcctcaccttgacccttgattcccaggtgctccaacgagaagggctactttgcagtgactgagaaatgctccgacttttgccaagatgacctggcagatgatgacatcatgttgctagacaatggccaagaggtctacatgtgggtggggacccagactagccaggtggagatcaagctgagcctgaaggcctgccaggtatatatccagcacatgcggtccaaggaacatgagcggccgcgccggctgcgcctggtccgcaagggcaatgagcagcacgcctttacccgctgcttccacgcctggagcgccttctgcaaggccctggcctaagacaggctggcacagccccaggcttggtgaggaagaggaaggggcctcatccactgtctgctagcaaagaatgtactcaggtgacaccacctgctccagccacgtccagtgccacagtccccagtagcctcaagcagcaccaatggggatgaccctgacaggtgccctcaggggtctgggaaatccaactctctccacagtgtgagtgcacgtgtgaagccccctcactcttccgctagggataaagcagatgtggatgccctttaagagatattaaatgcttttattttcaatatta

SEQ ID NO: 363756 - DNA, 4602 bp, Homo sapiens
cccagcccgcggctccccccagcgccctcgccccggcgctccctagcccggcgcggcccggcagcgagagcggcgccatggaggccaccggggtgctgccgttcgtgcgtggcgtggacctcagcggcaacgacttcaagggcggctacttccctgagaatgtcaaggccatgaccagcctgcggtggctgaagctgaaccgcactggcctctgctacctgcccgaggagctggccgccctgcagaagctggaacacttgtctgtgagccacaacaacctgaccacgcttcatggggagctgtccagcctgccatcgctgcgcgccatcgtggcccgagccaacagtctgaagaattccggagtccccgatgacatcttcaagctagatgatctctcagtcctggacttgagccacaaccagctgacagagtgcccgcgggagctggagaacgccaagaacatgctggtgctgaacctcagccacaacagcatcgacaccatccccaaccagctcttcatcaacctcactgacctactatacctggacctcagcgagaaccgcctggagagcctgcccccgcagatgcgccgcctggtgcacctgcagacgctcgtgctcaatggaaaccccctgctgcatgcacagctccggcagctcccagcgatgacggccctgcagaccctgcacctgcggagcacccagcgcacccagagcaacctgcccaccagcctggagggtctgagcaacctcgcagacgtggatctgtcctgcaatgacctgacacgggtgcccgagtgtctgtacaccctccccagcctgcgccgcctcaacctcagcagcaaccagatcacggagctgtccctgtgcatagaccagtgggtgcacgtggaaactctgaacctgtcccgaaatcagctcacctcactgcccgtgcgtctgaggccctcagtagggggatgggaggaaggccgtgagcctggccctgacctcccacccctgcccgttccccctccagtcagccatttgcaagctgagcaagctgaagaagctgtacctgaattccaacaagctggactttgacgggctgccctcaggcattggcaagctcaccaacctggaagagttcatggctgccaacaacaacctggagctggtccctgaaagtctctgcaggtgcccaaagctgaggaaacttgtcctgaacaagaaccacctggtgaccctcccagaagccatccatttcctgacggagatcgaggtcctggatgtgcgggagaaccccaacctggtcatgccgcccaagcccgcagaccgtgccgctgagtggtacaacatcgacttctcgctgcagaaccagctgcggctagcgggtgcctctcctgctaccgtggctgcagctgcagctgcagggagtgggcccaaggaccctatggctcgcaagatgcgactgcggaggcgcaaggattcagcccaggatgaccaggccaagcaggtgctgaagggcatgtcagatgttgcccaggagaagaacaaaaagcaggaggagagcgcagatgcccgggcccccagcgggaaggtgcggcgttgggaccagggcctggagaagccccgccttgactactccgagttcttcacggaggacgtgggccagctgcccggactgaccatctggcagatagagaacttcgtgcctgtgctggtggaggaagccttccacggcaagttctacgaggctgactgctacattgtgctcaaggtgagggctgggcatgctgttaggggccatgtggcccagtaccttcctctaagatggctcagtccccaactccagagttttgttcagggaggccaggtgggaggtgggcaggctgcaggaggtggtccaggcacaggggcagtacaaagcccctggggctgggaagcctgtgctgttcagagtggcgtctccggggtggccggaagaccaggatgaaagctgatgtggccggtgccttggcttccagacctttctggatgacagcggctccctcaactgggagatctactactggattggcggggaggccacactcgacaagaaagcttgctctgccatccacgctgtcaacttgcgcaactacctgggtgctgagtgccgcactgtccgggaggagatgggcgatgagagcgaggagttcctgcaggtgtttgacaacgacatctcctacattgagggtggaacagccagtggcttctacactgtggaagacacacactatgtcaccaggatgtatcgtgtgtatgggaaaaagaacatcaagttggagcctgtgcccctcaaggggacctctctggacccaaggtttgttttcctgctggaccgagggctagacatctacgtatggcggggggcccaggccacactgagcagcaccaccaaggccaggctctttgcagagaaaattaacaagaatgagcggaaagggaaggctgagatcacactgctggtgcagggccaggagctcccagagttctgggaggcactgggtggggagccctctgagatcaagaagcacgtgcctgaagacttctggccgccgcagcccaagctgtacaaggtgggcctgggcttgggctacctggagctgccacagatcaactacaagctctccgtggaacataagcagcgtcccaaggtggagctgatgccaagaatgcggctgctgcagagtctgctggacacgcgctgcgtgtacattctggactgttggtccgacgtgttcatctggctcggccgcaagtccccgcgcctggtgcgcgctgccgccctcaagctgggtcaggagctgtgcgggatgctgcaccggccacgccatgccacggtcagccgcagcctcgagggcaccgaggcgcaggtgttcaaggccaagttcaagaattgggacgatgtgttgacggtggactacacacgcaatgcggaggccgtgctgcagagcccgggtctctccgggaaggtgaaacgcgacgccgagaagaaagaccagatgaaggctgacctcactgcgcttttcctgccgcggcagccgcccatgtcgctggccgaggcggagcagctgatggaggagtggaacgaagacctagacggcatggagggtttcgtgctggagggcaagaagtttgcgcggctgccggaagaggagtttggccacttctacacgcaggactgctacgtcttcctctgcaggtactgggtgcctgtggagtacgaggaggaggaaaagaaggaagacaaggaggagaaggccgagggcaaagaaggcgaggaagcaaccgctgaggcagaggagaagcagccagaggaggacttccagtgcatcgtgtacttctggcagggccgtgaagcctccaatatgggctggctcaccttcaccttcagcctgcaaaagaagttcgagagcctcttccctgggaagctggaggtggtacgcatgacgcagcagcaggagaaccccaagttcctgtcccatttcaagaggaagttcatcatccaccggggcaagaggaaggcggtccagggcgcccaacagcccagcctctaccagatccgcaccaacggcagcgccctctgcacccggtgcctggctgggggaggacgcagtggcgagcaagcgtcagggagccaggcctgaatccttgctgatgccccatcccttccacaggtgcatccagatcaacaccgactccagcctcctcaactccgagttctgcttcatcctcaaggttccctttgagagtgaggacaaccagggcatcgtgtatgcctgggtgggccgggcatcagaccctgacgaagccaagttggcagaagacatcctgaacaccatgtttgacacctcctacagcaagcaggttatcaacgaaggtgaggagcctgagaacttcttctgggtgggcattggggcacagaagccctatgatgacgatgccgagtacatgaaacacacacgtctcttccggtgctccaacgagaagggctactttgcagtgactgagaaatgctccgacttttgccaagatgacctggcagatgatgacatcatgttgctagacaatggccaagaggtctacatgtgggtggggacccagactagccaggtggagatcaagctgagcctgaaggcctgccaggtatatatccagcacatgcggtccaaggaacatgagcggccgcgccggctgcgcctggtccgcaagggcaatgagcagcacgcctttacccgctgcttccacgcctggagcgccttctgcaaggccctggcctaagacaggctggcacagccccaggcttggtgaggaagaggaaggggcctcatccactgtctgctagcaaagaatgtactcaggtgacaccacctgctccagccacgtccagtgccacagtccccagtagcctcaagcagcaccaatggggatgaccctgacaggtgccctcaggggtctgggaaatccaactctctccacagtgtgagtgcacgtgtgaagccccctcactcttccgctagggataaagcagatgtggatgccctttaagagatattaaatgcttttattttcaatatta

SEQ ID NO: 363757 - DNA, 4630 bp, Homo sapiens
cccagcccgcggctccccccagcgccctcgccccggcgctccctagcccggcgcggcccggcagcgagagcggcgccatggaggccaccggggtgctgccgttcgtgcgtggcgtggacctcagcggcaacgacttcaagggcggctacttccctgagaatgtcaaggccatgaccagcctgcggtggctgaagctgaaccgcactggcctctgctacctgcccgaggagctggccgccctgcagaagctggaacacttgtctgtgagccacaacaacctgaccacgcttcatggggagctgtccagcctgccatcgctgcgcgccatcgtggcccgagccaacagtctgaagaattccggagtccccgatgacatcttcaagctagatgatctctcagtcctggacttgagccacaaccagctgacagagtgcccgcgggagctggagaacgccaagaacatgctggtgctgaacctcagccacaacagcatcgacaccatccccaaccagctcttcatcaacctcactgacctactatacctggacctcagcgagaaccgcctggagagcctgcccccgcagatgcgccgcctggtgcacctgcagacgctcgtgctcaatggaaaccccctgctgcatgcacagctccggcagctcccagcgatgacggccctgcagaccctgcacctgcggagcacccagcgcacccagagcaacctgcccaccagcctggagggtctgagcaacctcgcaggtcaggcagccccaggagcccctctgagctcgggccccctctgggccctcttgcttccttgggtggaaggggttgaaccctgctcttcggaccaatacccagagggacaaggctggagttatgttacagtgacttttgcgattatgatgatgccttaacactgactttatgcctagaaaactcccccgcaacccccatgtgagggagtttgtccaaatggagaaacttgggcgcacagcagttgtcacttgcctaagccacacagctcagaggtggcagagctggggttcacactagggctggctgccctggcacctggtgtatgggccccagctgatgcaccccaccctgcaccccagacgtggatctgtcctgcaatgacctgacacgggtgcccgagtgtctgtacaccctccccagcctgcgccgcctcaacctcagcagcaaccagatcacggagctgtccctgtgcatagaccagtgggtgcacgtggaaactctgaacctgtcccgaaatcagctcacctcactgccctcagccatttgcaagctgagcaagctgaagaagctgtacctgaattccaacaagctggactttgacgggctgccctcaggcattggcaagctcaccaacctggaagagttcatggctgccaacaacaacctggagctggtccctgaaagtctctgcaggtgcccaaagctgaggaaacttgtcctgaacaagaaccacctggtgaccctcccagaagccatccatttcctgacggagatcgaggtcctggatgtgcgggagaaccccaacctggtcatgccgcccaagcccgcagaccgtgccgctgagtggtacaacatcgacttctcgctgcagaaccagctgcggctagcgggtgcctctcctgctaccgtggctgcagctgcagctgcagggagtgggcccaaggaccctatggctcgcaagatgcgactgcggaggcgcaaggattcagcccaggatgaccaggccaagcaggtgctgaagggcatgtcagatgttgcccaggagaagaacaaaaagcaggaggagagcgcagatgcccgggcccccagcgggaaggtgcggcgttgggaccagggcctggagaagccccgccttgactactccgagttcttcacggaggacgtgggccagctgcccggactgaccatctggcagatagagaacttcgtgcctgtgctggtggaggaagccttccacggcaagttctacgaggctgactgctacattgtgctcaagacctttctggatgacagcggctccctcaactgggagatctactactggattggcggggaggccacactcgacaagaaagcttgctctgccatccacgctgtcaacttgcgcaactacctgggtgctgagtgccgcactgtccgggaggagatgggcgatgagagcgaggagttcctgcaggtgtttgacaacgacatctcctacattgagggtggaacagccagtggcttctacactgtggaagacacacactatgtcaccaggatgtatcgtgtgtatgggaaaaagaacatcaagttggagcctgtgcccctcaaggggacctctctggacccaaggtttgttttcctgctggaccgagggctagacatctacgtatggcggggggcccaggccacactgagcagcaccaccaaggccaggctctttgcagagaaaattaacaagaatgagcggaaagggaaggctgagatcacactgctggtgcagggccaggagctcccagagttctgggaggcactgggtggggagccctctgagatcaagaagcacgtgcctgaagacttctggccgccgcagcccaagctgtacaaggtgggcctgggcttgggctacctggagctgccacagatcaactacaagctctccgtggaacataagcagcgtcccaaggtggagctgatgccaagaatgcggctgctgcagagtctgctggacacgcgctgcgtgtacattctggactgttggtccgacgtgttcatctggctcggccgcaagtccccgcgcctggtgcgcgctgccgccctcaagctgggtcaggagctgtgcgggatgctgcaccggccacgccatgccacggtcagccgcagcctcgagggcaccgaggcgcaggtgttcaaggccaagttcaagaattgggacgatgtgttgacggtggactacacacgcaatgcggaggccgtgctgcagagcccgggtctctccgggaaggtgaaacgcgacgccgagaagaaagaccagatgaaggctgacctcactgcgcttttcctgccgcggcagccgcccatgtcgctggccgaggcggagcagctgatggaggagtggaacgaagacctagacggcatggagggtttcgtgctggagggcaagaagtttgcgcggctgccggaagaggagtttggccacttctacacgcaggactgctacgtcttcctctgcaggtactgggtgcctgtggagtacgaggaggaggaaaagaaggaagacaaggaggagaaggccgagggcaaagaaggcgaggaagcaaccgctgaggcagaggagaagcagccagaggaggacttccagtgcatcgtgtacttctggcagggccgtgaagcctccaatatgggctggctcaccttcaccttcagcctgcaaaagaagttcgagagcctcttccctgggaagctggaggtggtacgcatgacgcagcagcaggagaaccccaagttcctgtcccatttcaagaggaagttcatcatccaccggggcaagaggaaggcggtccagggcgcccaacagcccagcctctaccagatccgcaccaacggcagcgccctctgcacccggtgcatccagatcaacaccgactccagcctcctcaactccgagttctgcttcatcctcaaggttccctttgagagtgaggacaaccagggcatcgtgtatgcctgggtgggccgggcatcagaccctgacgaagccaagttggcagaagacatcctgaacaccatgtttgacacctcctacagcaagcaggtcaggaggcgggcgggcaggcgggcacacacagaggagccagggcaggcaggggccctgggctggactggcctttcccgcaggttgttatcaacgaaggtgaggagcctgagaacttcttctgggtgggcattggggcacagaagccctatgatgacgatgccgagtacatgaaacacacacgtctcttccggtgctccaacgagaagggctactttgcagtgactgagaaatgctccgacttttgccaagatgacctggcagatgatgacatcatgttgctagacaatggccaagaggtctacatgtgggtggggacccagactagccaggtggagatcaagctgagcctgaaggcctgccaggtatatatccagcacatgcggtccaaggaacatgagcggccgcgccggctgcgcctggtccgcaagggcaatgagcagcacgcctttacccgctgcttccacgcctggagcgccttctgcaaggccctggcctaagacaggctggcacagccccaggcttggtgaggaagaggaaggggcctcatccactgtctgctagcaaagaatgtactcaggtgacaccacctgctccagccacgtccagtgccacagtccccagtagcctcaagcagcaccaatggggatgaccctgacaggtgccctcaggggtctgggaaatccaactctctccacagtgtgagtgcacgtgtgaagccccctcactcttccgctagggataaagcagatgtggatgccctttaagagatattaaatgcttttattttcaatatta

SEQ ID NO: 363758 - DNA, 4760 bp, Homo sapiens
cccagcccgcggctccccccagcgccctcgccccggcgctccctagcccggcgcggcccggcagcgagagcggcgccatggaggccaccggggtgctgccgttcgtgcgtggcgtggacctcagcggcaacgacttcaagggcggctacttccctgagaatgtcaaggccatgaccagcctgcggtggctgaagctgaaccgcactggcctctgctacctgcccgaggagctggccgccctgcagaagctggaacacttgtctgtgagccacaacaacctgaccacgcttcatggggagctgtccagcctgccatcgctgcgcgccatcgtggcccgagccaacagtctgaagaattccggagtccccgatgacatcttcaagctagatgatctctcagtcctggacttgagccacaaccagctgacagagtgcccgcgggagctggagaacgccaagaacatgctggtgctgaacctcagccacaacagcatcgacaccatccccaaccagctcttcatcaacctcactgacctactatacctggacctcagcgagaaccgcctggagagcctgcccccgcagatgcgccgcctggtgcacctgcagacgctcgtgctcaatggaaaccccctgctgcatgcacagctccggcagctcccagcgatgacggccctgcagaccctgcacctgcggagcacccagcgcacccagagcaacctgcccaccagcctggagggtctgagcaacctcgcaggtcaggcagccccaggagcccctctgagctcgggccccctctgggccctcttgcttccttgggtggaaggggttgaaccctgctcttcggaccaatacccagagggacaaggctggagttatgttacagtgacttttgcgattatgatgatgccttaacactgactttatgcctagaaaactcccccgcaacccccatgtgagggagtttgtccaaatggagaaacttgggcgcacagcagttgtcacttgcctaagccacacagctcagaggtggcagagctggggttcacactagggctggctgccctggcacctggtgtatgggccccagctgatgcaccccaccctgcaccccagacgtggatctgtcctgcaatgacctgacacgggtgcccgagtgtctgtacaccctccccagcctgcgccgcctcaacctcagcagcaaccagatcacggagctgtccctgtgcatagaccagtgggtgcacgtggaaactctgaacctgtcccgaaatcagctcacctcactgccctcagccatttgcaagctgagcaagctgaagaagctgtacctgaattccaacaagctggactttgacgggctgccctcaggcattggcaagctcaccaacctggaagagttcatggctgccaacaacaacctggagctggtccctgaaagtctctgcaggtgcccaaagctgaggaaacttgtcctgaacaagaaccacctggtgaccctcccagaagccatccatttcctgacggagatcgaggtcctggatgtgcgggagaaccccaacctggtcatgccgcccaagcccgcagaccgtgccgctgagtggtacaacatcgacttctcgctgcagaaccagctgcggctagcgggtgcctctcctgctaccgtggctgcagctgcagctgcagggagtgggcccaaggaccctatggctcgcaagatgcgactgcggaggcgcaaggattcagcccaggatgaccaggccaagcaggtgctgaagggcatgtcagatgttgcccaggagaagaacaaaaagcaggaggagagcgcagatgcccgggcccccagcgggaaggtgcggcgttgggaccagggcctggagaagccccgccttgactactccgagttcttcacggaggacgtgggccagctgcccggactgaccatctggcagatagagaacttcgtgcctgtgctggtggaggaagccttccacggcaagttctacgaggctgactgctacattgtgctcaagacctttctggatgacagcggctccctcaactgggagatctactactggattggcggggaggccacactcgacaagaaagcttgctctgccatccacgctgtcaacttgcgcaactacctgggtgctgagtgccgcactgtccgggaggagatgggcgatgagagcgaggagttcctgcaggtgtttgacaacgacatctcctacattgagggtggaacagccagtggcttctacactgtggaagacacacactatgtcaccaggatgtatcgtgtgtatgggaaaaagaacatcaagttggagcctgtgcccctcaaggggacctctctggacccaaggtttgttttcctgctggaccgagggctagacatctacgtatggcggggggcccaggccacactgagcagcaccaccaaggccaggctctttgcagagaaaattaacaagaatgagcggaaagggaaggctgagatcacactgctggtgcagggccaggagctcccagagttctgggaggcactgggtggggagccctctgagatcaagaagcacgtgcctgaagacttctggccgccgcagcccaagctgtacaaggtgggcctgggcttgggctacctggagctgccacagatcaactacaagctctccgtggaacataagcagcgtcccaaggtggagctgatgccaagaatgcggctgctgcagagtctgctggacacgcgctgcgtgtacattctggactgttggtccgacgtgttcatctggctcggccgcaagtccccgcgcctggtgcgcgctgccgccctcaagctgggtcaggagctgtgcgggatgctgcaccggccacgccatgccacggtcagccgcagcctcgagggcaccgaggcgcaggtgttcaaggccaagttcaagaattgggacgatgtgttgacggtggactacacacgcaatgcggaggccgtgctgcagagcccgggtctctccgggaaggtgaaacgcgacgccgagaagaaagaccagatgaaggctgacctcactgcgcttttcctgccgcggcagccgcccatgtcgctggccgaggcggagcagctgatggaggagtggaacgaagacctagacggcatggagggtttcgtgctggagggcaagaagtttgcgcggctgccggaagaggagtttggccacttctacacgcaggactgctacgtcttcctctgcaggtactgggtgcctgtggagtacgaggaggaggaaaagaaggaagacaaggaggagaaggccgagggcaaagaaggcgaggaagcaaccgctgaggcagaggagaagcagccagaggaggacttccagtgcatcgtgtacttctggcagggccgtgaagcctccaatatgggctggctcaccttcaccttcagcctgcaaaagaagttcgagagcctcttccctgggaagctggaggtggtacgcatgacgcagcagcaggagaaccccaagttcctgtcccatttcaagaggaagttcatcatccaccggggcaagaggaaggcggtccagggcgcccaacagcccagcctctaccagatccgcaccaacggcagcgccctctgcacccggtgcatccagatcaacaccgactccagcctcctcaactccgagttctgcttcatcctcaaggttccctttgagagtgaggacaaccagggcatcgtgtatgcctgggtgggccgggcatcagaccctgacgaagccaagttggcagaagacatcctgaacaccatgtttgacacctcctacagcaagcaggttatcaacgaaggtgaggagcctgagaacttcttctgggtgggcattggggcacagaagccctatgatgacgatgccgagtacatgaaacacacacgtctcttccggtgctccaacgagaagggctactttgcagtgactgagaaatgctccgacttttgccaagatgacctggcagatgatgacatcatgttgctagacaatggccaagaggtgtgatgttgccactagccctgcccatccaaggaggcgcccatagacttacttacaaatgggaattctcgggccaggagcaaggggctgttcccaggcacccatgcaaccgtatctcccctgctgcccccacaggtctacatgtgggtggggacccagactagccaggtggagatcaagctgagcctgaaggcctgccaggtaatctgggtggagggagggccgaggtgggcctgtgggcagggcagggtcatcacccaaggctcgctgtccccttgccaggtatatatccagcacatgcggtccaaggaacatgagcggccgcgccggctgcgcctggtccgcaagggcaatgagcagcacgcctttacccgctgcttccacgcctggagcgccttctgcaaggccctggcctaagacaggctggcacagccccaggcttggtgaggaagaggaaggggcctcatccactgtctgctagcaaagaatgtactcaggtgacaccacctgctccagccacgtccagtgccacagtccccagtagcctcaagcagcaccaatggggatgaccctgacaggtgccctcaggggtctgggaaatccaactctctccacagtgtgagtgcacgtgtgaagccccctcactcttccgctagggataaagcagatgtggatgccctttaagagatattaaatgcttttattttcaatatta

SEQ ID NO: 363759 - DNA, 4762 bp, Homo sapiens
cccagcccgcggctccccccagcgccctcgccccggcgctccctagcccggcgcggcccggcagcgagagcggcgccatggaggccaccggggtgctgccgttcgtgcgtggcgtggacctcagcggcaacgacttcaagggcggctacttccctgagaatgtcaaggccatgaccagcctgcggtggctgaagctgaaccgcactggcctctgctacctgcccgaggagctggccgccctgcagaagctggaacacttgtctgtgagccacaacaacctgaccacgcttcatggggagctgtccagcctgccatcgctgcgcgccatcgtggcccgagccaacagtctgaagaattccggagtccccgatgacatcttcaagctagatgatctctcagtcctggacttgagccacaaccagctgacagagtgcccgcgggagctggagaacgccaagaacatgctggtgctgaacctcagccacaacagcatcgacaccatccccaaccagctcttcatcaacctcactgacctactatacctggacctcagcgagaaccgcctggagagcctgcccccgcagatgcgccgcctggtgcacctgcagacgctcgtgctcaatggaaaccccctgctgcatgcacagctccggcagctcccagcgatgacggccctgcagaccctgcacctgcggagcacccagcgcacccagagcaacctgcccaccagcctggagggtctgagcaacctcgcaggtcaggcagccccaggagcccctctgagctcgggccccctctgggccctcttgcttccttgggtggaaggggttgaaccctgctcttcggaccaatacccagagggacaaggctggagttatgttacagtgacttttgcgattatgatgatgccttaacactgactttatgcctagaaaactcccccgcaacccccatgtgagggagtttgtccaaatggagaaacttgggcgcacagcagttgtcacttgcctaagccacacagctcagaggtggcagagctggggttcacactagggctggctgccctggcacctggtgtatgggccccagctgatgcaccccaccctgcaccccagacgtggatctgtcctgcaatgacctgacacgggtgcccgagtgtctgtacaccctccccagcctgcgccgcctcaacctcagcagcaaccagatcacggagctgtccctgtgcatagaccagtgggtgcacgtggaaactctgaacctgtcccgaaatcagctcacctcactgccctcagccatttgcaagctgagcaagctgaagaagctgtacctgaattccaacaagctggactttgacgggctgccctcaggcattggcaagctcaccaacctggaagagttcatggctgccaacaacaacctggagctggtccctgaaagtctctgcaggtgcccaaagctgaggaaacttgtcctgaacaagaaccacctggtgaccctcccagaagccatccatttcctgacggagatcgaggtcctggatgtgcgggagaaccccaacctggtcatgccgcccaagcccgcagaccgtgccgctgagtggtacaacatcgacttctcgctgcagaaccagctgcggctagcgggtgcctctcctgctaccgtggctgcagctgcagctgcagggagtgggcccaaggaccctatggctcgcaagatgcgactgcggaggcgcaaggattcagcccaggatgaccaggccaagcaggtgctgaagggcatgtcagatgttgcccaggagaagaacaaaaagcaggaggagagcgcagatgcccgggcccccagcgggaaggtgcggcgttgggaccagggcctggagaagccccgccttgactactccgagttcttcacggaggacgtgggccagctgcccggactgaccatctggcagatagagaacttcgtgcctgtgctggtggaggaagccttccacggcaagttctacgaggctgactgctacattgtgctcaagacctttctggatgacagcggctccctcaactgggagatctactactggattggcggggaggccacactcgacaagaaagcttgctctgccatccacgctgtcaacttgcgcaactacctgggtgctgagtgccgcactgtccgggaggagatgggcgatgagagcgaggagttcctgcaggtgtttgacaacgacatctcctacattgagggtggaacagccagtggcttctacactgtggaagacacacactatgtcaccaggatgtatcgtgtgtatgggaaaaagaacatcaagttggagcctgtgcccctcaaggggacctctctggacccaaggtttgttttcctgctggaccgagggctagacatctacgtatggcggggggcccaggccacactgagcagcaccaccaaggccaggctctttgcagagaaaattaacaagaatgagcggaaagggaaggctgagatcacactgctggtgcagggccaggagctcccagagttctgggaggcactgggtggggagccctctgagatcaagaagcacgtgcctgaagacttctggccgccgcagcccaagctgtacaaggtgggcctgggcttgggctacctggagctgccacagatcaactacaagctctccgtggaacataagcagcgtcccaaggtggagctgatgccaagaatgcggctgctgcagagtctgctggacacgcgctgcgtgtacattctggactgttggtccgacgtgttcatctggctcggccgcaagtccccgcgcctggtgcgcgctgccgccctcaagctgggtcaggagctgtgcgggatgctgcaccggccacgccatgccacggtcagccgcagcctcgagggcaccgaggcgcaggtgttcaaggccaagttcaagaattgggacgatgtgttgacggtggactacacacgcaatgcggaggccgtgctgcagagcccgggtctctccgggaaggtgaaacgcgacgccgagaagaaagaccagatgaaggctgacctcactgcgcttttcctgccgcggcagccgcccatgtcgctggccgaggcggagcagctgatggaggagtggaacgaagacctagacggcatggagggtttcgtgctggagggcaagaagtttgcgcggctgccggaagaggagtttggccacttctacacgcaggactgctacgtcttcctctgcaggtactgggtgcctgtggagtacgaggaggaggaaaagaaggaagacaaggaggagaaggccgagggcaaagaaggcgaggaagcaaccgctgaggcagaggagaagcagccagaggaggacttccagtgcatcgtgtacttctggcagggccgtgaagcctccaatatgggctggctcaccttcaccttcagcctgcaaaagaagttcgagagcctcttccctgggaagctggaggtggtacgcatgacgcagcagcaggagaaccccaagttcctgtcccatttcaagaggaagttcatcatccaccggggcaagaggaaggcggtccagggcgcccaacagcccagcctctaccagatccgcaccaacggcagcgccctctgcacccggtgcatccagatcaacaccgactccagcctcctcaactccgagttctgcttcatcctcaaggttccctttgagagtgaggacaaccagggcatcgtgtatgcctgggtgggccgggcatcagaccctgacgaagccaagttggcagaagacatcctgaacaccatgtttgacacctcctacagcaagcaggttatcaacgaaggtgaggagcctgagaacttcttctgggtgggcattggggcacagaagccctatgatgacgatgccgagtacatgaaacacacacgtctcttccggtgaggccagggccctgaccctcccctcagtcctggcactgctgcttatgacctctggcctcaccttgacccttgattcccaggtgctccaacgagaagggctactttgcagtgactgagaaatgctccgacttttgccaagatgacctggcagatgatgacatcatgttgctagacaatggccaagaggtgtgatgttgccactagccctgcccatccaaggaggcgcccatagacttacttacaaatgggaattctcgggccaggagcaaggggctgttcccaggcacccatgcaaccgtatctcccctgctgcccccacaggtctacatgtgggtggggacccagactagccaggtggagatcaagctgagcctgaaggcctgccaggtatatatccagcacatgcggtccaaggaacatgagcggccgcgccggctgcgcctggtccgcaagggcaatgagcagcacgcctttacccgctgcttccacgcctggagcgccttctgcaaggccctggcctaagacaggctggcacagccccaggcttggtgaggaagaggaaggggcctcatccactgtctgctagcaaagaatgtactcaggtgacaccacctgctccagccacgtccagtgccacagtccccagtagcctcaagcagcaccaatggggatgaccctgacaggtgccctcaggggtctgggaaatccaactctctccacagtgtgagtgcacgtgtgaagccccctcactcttccgctagggataaagcagatgtggatgccctttaagagatattaaatgcttttattttcaatatta

SEQ ID NO: 363760 - DNA, 4523 bp, Homo sapiens
cccagcccgcggctccccccagcgccctcgccccggcgctccctagcccggcgcggcccggcagcgagagcggcgccatggaggccaccggggtgctgccgttcgtgcgtggcgtggacctcagcggcaacgacttcaagggcggctacttccctgagaatgtcaaggccatgaccagcctgcggtggctgaagctgaaccgcactggcctctgctacctgcccgaggagctggccgccctgcagaagctggaacacttgtctgtgagccacaacaacctgaccacgcttcatggggagctgtccagcctgccatcgctgcgcgccatcgtggcccgagccaacagtctgaagaattccggagtccccgatgacatcttcaagctagatgatctctcagtcctggacttgagccacaaccagctgacagagtgcccgcgggagctggagaacgccaagaacatgctggtgctgaacctcagccacaacagcatcgacaccatccccaaccagctcttcatcaacctcactgacctactatacctggacctcagcgagaaccgcctggagagcctgcccccgcagatgcgccgcctggtgcacctgcagacgctcgtgctcaatggaaaccccctgctgcatgcacagctccggcagctcccagcgatgacggccctgcagaccctgcacctgcggagcacccagcgcacccagagcaacctgcccaccagcctggagggtctgagcaacctcgcaggtcaggcagccccaggagcccctctgagctcgggccccctctgggccctcttgcttccttgggtggaaggggttgaaccctgctcttcggaccaatacccagagggacaaggctggagttatgttacagtgacttttgcgattatgatgatgccttaacactgactttatgcctagaaaactcccccgcaacccccatgtgagggagtttgtccaaatggagaaacttgggcgcacagcagttgtcacttgcctaagccacacagctcagaggtggcagagctggggttcacactagggctggctgccctggcacctggtgtatgggccccagctgatgcaccccaccctgcaccccagacgtggatctgtcctgcaatgacctgacacgggtgcccgagtgtctgtacaccctccccagcctgcgccgcctcaacctcagcagcaaccagatcacggagctgtccctgtgcatagaccagtgggtgcacgtggaaactctgaacctgtcccgaaatcagctcacctcactgccctcagccatttgcaagctgagcaagctgaagaagctgtacctgaattccaacaagctggactttgacgggctgccctcaggcattggcaagctcaccaacctggaagagttcatggctgccaacaacaacctggagctggtccctgaaagtctctgcaggtgcccaaagctgaggaaacttgtcctgaacaagaaccacctggtgaccctcccagaagccatccatttcctgacggagatcgaggtcctggatgtgcgggagaaccccaacctggtcatgccgcccaagcccgcagaccgtgccgctgagtggtacaacatcgacttctcgctgcagaaccagctgcggctagcgggtgcctctcctgctaccgtggctgcagctgcagctgcagggagtgggcccaaggaccctatggctcgcaagatgcgactgcggaggcgcaaggattcagcccaggatgaccaggccaagcaggtgctgaagggcatgtcagatgttgcccaggagaagaacaaaaagcaggaggagagcgcagatgcccgggcccccagcgggaaggtgcggcgttgggaccagggcctggagaagccccgccttgactactccgagttcttcacggaggacgtgggccagctgcccggactgaccatctggcagatagagaacttcgtgcctgtgctggtggaggaagccttccacggcaagttctacgaggctgactgctacattgtgctcaagacctttctggatgacagcggctccctcaactgggagatctactactggattggcggggaggccacactcgacaagaaagcttgctctgccatccacgctgtcaacttgcgcaactacctgggtgctgagtgccgcactgtccgggaggagatgggcgatgagagcgaggagttcctgcaggtgtttgacaacgacatctcctacattgagggtggaacagccagtggcttctacactgtggaagacacacactatgtcaccaggatgtatcgtgtgtatgggaaaaagaacatcaagttggagcctgtgcccctcaaggggacctctctggacccaaggtttgttttcctgctggaccgagggctagacatctacgtatggcggggggcccaggccacactgagcagcaccaccaaggccaggctctttgcagagaaaattaacaagaatgagcggaaagggaaggctgagatcacactgctggtgcagggccaggagctcccagagttctgggaggcactgggtggggagccctctgagatcaagaagcacgtgcctgaagacttctggccgccgcagcccaagctgtacaaggtgggcctgggcttgggctacctggagctgccacagatcaactacaagctctccgtggaacataagcagcgtcccaaggtggagctgatgccaagaatgcggctgctgcagagtctgctggacacgcgctgcgtgtacattctggactgttggtccgacgtgttcatctggctcggccgcaagtccccgcgcctggtgcgcgctgccgccctcaagctgggtcaggagctgtgcgggatgctgcaccggccacgccatgccacggtcagccgcagcctcgagggcaccgaggcgcaggtgttcaaggccaagttcaagaattgggacgatgtgttgacggtggactacacacgcaatgcggaggccgtgctgcagagcccgggtctctccgggaaggtgaaacgcgacgccgagaagaaagaccagatgaaggctgacctcactgcgcttttcctgccgcggcagccgcccatgtcgctggccgaggcggagcagctgatggaggagtggaacgaagacctagacggcatggagggtttcgtgctggagggcaagaagtttgcgcggctgccggaagaggagtttggccacttctacacgcaggactgctacgtcttcctctgcaggtactgggtgcctgtggagtacgaggaggaggaaaagaaggaagacaaggaggagaaggccgagggcaaagaaggcgaggaagcaaccgctgaggcagaggagaagcagccagaggaggacttccagtgcatcgtgtacttctggcagggccgtgaagcctccaatatgggctggctcaccttcaccttcagcctgcaaaagaagttcgagagcctcttccctgggaagctggaggtggtacgcatgacgcagcagcaggagaaccccaagttcctgtcccatttcaagaggaagttcatcatccaccggggcaagaggaaggcggtccagggcgcccaacagcccagcctctaccagatccgcaccaacggcagcgccctctgcacccggtgcatccagatcaacaccgactccagcctcctcaactccgagttctgcttcatcctcaaggttccctttgagagtgaggacaaccagggcatcgtgtatgcctgggtgggccgggcatcagaccctgacgaagccaagttggcagaagacatcctgaacaccatgtttgacacctcctacagcaagcaggtcaggaggcgggcgggcaggcgggcacacacagaggagccagggcaggcaggggccctgggctggactggcctttcccgcaggttgtgctccaacgagaagggctactttgcagtgactgagaaatgctccgacttttgccaagatgacctggcagatgatgacatcatgttgctagacaatggccaagaggtctacatgtgggtggggacccagactagccaggtggagatcaagctgagcctgaaggcctgccaggtatatatccagcacatgcggtccaaggaacatgagcggccgcgccggctgcgcctggtccgcaagggcaatgagcagcacgcctttacccgctgcttccacgcctggagcgccttctgcaaggccctggcctaagacaggctggcacagccccaggcttggtgaggaagaggaaggggcctcatccactgtctgctagcaaagaatgtactcaggtgacaccacctgctccagccacgtccagtgccacagtccccagtagcctcaagcagcaccaatggggatgaccctgacaggtgccctcaggggtctgggaaatccaactctctccacagtgtgagtgcacgtgtgaagccccctcactcttccgctagggataaagcagatgtggatgccctttaagagatattaaatgcttttattttcaatatta

SEQ ID NO: 363761 - DNA, 1332 bp, Homo sapiens
aacgaatgtgctgcggtgactctaaggatccctcataggttcgcaggactacctggaagatcgaggaggaggaaaagaaggaagacaaggaggagaaggccgagggcaaagaaggcgaggaagcaaccgctgaggcagaggagaagcagccagaggaggacttccagtgcatcgtgtacttctggcagggccgtgaagcctccaatatgggctggctcaccttcaccttcagcctgcaaaagaagttcgagagcctcttccctgggaagctggaggtggtacgcatgacgcagcagcaggagaaccccaagttcctgtcccatttcaagaggaagttcatcatccaccggggcaagaggaaggcggtccagggcgcccaacagcccagcctctaccagatccgcaccaacggcagcgccctctgcacccggtgcatccagatcaacaccgactccagcctcctcaactccgagttctgcttcatcctcaaggttccctttgagagtgaggacaaccagggcatcgtgtatgcctgggtgggccgggcatcagaccctgacgaagccaagttggcagaagacatcctgaacaccatgtttgacacctcctacagcaagcaggttatcaacgaaggtgaggagcctgagaacttcttctgggtgggcattggggcacagaagccctatgatgacgatgccgagtacatgaaacacacacgtctcttccggtgctccaacgagaagggctactttgcagtgactgagaaatgctccgacttttgccaagatgacctggcagatgatgacatcatgttgctagacaatggccaagaggtctacatgtgggtggggacccagactagccaggtggagatcaagctgagcctgaaggcctgccaggtatatatccagcacatgcggtccaaggaacatgagcggccgcgccggctgcgcctggtccgcaagggcaatgagcagcacgcctttacccgctgcttccacgcctggagcgccttctgcaaggccctggcctaagacaggctggcacagccccaggcttggtgaggaagaggaaggggcctcatccactgtctgctagcaaagaatgtactcaggtgacaccacctgctccagccacgtccagtgccacagtccccagtagcctcaagcagcaccaatggggatgaccctgacaggtgccctcaggggtctgggaaatccaactctctccacagtgtgagtgcacgtgtgaagccccctcactcttccgctagggataaagcagatgtggatgccctttaagagatattaaatgcttttattttcaatatta

SEQ ID NO: 363762 - DNA, 3779 bp, Homo sapiens
cccagcccgcggctccccccagcgccctcgccccggcgctccctagcccggcgcggcccggcagcgagagcggcgccatggaggccaccggggtgctgccgttcgtgcgtggcgtggacctcagcggcaacgacttcaagggcggctacttccctgagaatgtcaaggccatgaccagcctgcggtggctgaagctgaaccgcactggcctctgctacctgcccgaggagctggccgccctgcagaagctggaacacttgtctgtgagccacaacaacctgaccacgcttcatggggagctgtccagcctgccatcgctgcgcgccatcgtggcccgagccaacagtctgaagaattccggagtccccgatgacatcttcaagctagatgatctctcagtcctggacttgagccacaaccagctgacagagtgcccgcgggagctggagaacgccaagaacatgctggtgctgaacctcagccacaacagcatcgacaccatccccaaccagctcttcatcaacctcactgacctactatacctggacctcagcgagaaccgcctggagagcctgcccccgcagatgcgccgcctggtgcacctgcagacgctcgtgctcaatggaaaccccctgctgcatgcacagctccggcagctcccagcgatgacggccctgcagaccctgcacctgcggagcacccagcgcacccagagcaacctgcccaccagcctggagggtctgagcaacctcgcaggtcaggcagccccaggagcccctctgagctcgggccccctctgggccctcttgcttccttgggtggaaggggttgaaccctgctcttcggaccaatacccagagggacaaggctggagttatgttacagtgacttttgcgattatgatgatgccttaacactgactttatgcctagaaaactcccccgcaacccccatgtgagggagtttgtccaaatggagaaacttgggcgcacagcagttgtcacttgcctaagccacacagctcagaggtggcagagctggggttcacactagggctggctgccctggcacctggtgtatgggccccagctgatgcaccccaccctgcaccccagacgtggatctgtcctgcaatgacctgacacgggtgcccgagtgtctgtacaccctccccagcctgcgccgcctcaacctcagcagcaaccagatcacggagctgtccctgtgcatagaccagtgggtgcacgtggaaactctgaacctgtcccgaaatcagctcacctcactgccctcagccatttgcaagctgagcaagctgaagaagctgtacctgaattccaacaagctggactttgacgggctgccctcaggcattggcaagctcaccaacctggaagagttcatggctgccaacaacaacctggagctggtccctgaaagtctctgcaggtgcccaaagctgaggaaacttgtcctgaacaagaaccacctggtgaccctcccagaagccatccatttcctgacggagatcgaggtcctggatgtgcgggagaaccccaacctggtcatgccgcccaagcccgcagaccgtgccgctgagtggtacaacatcgacttctcgctgcagaaccagctgcggctagcgggtgcctctcctgctaccgtggctgcagctgcagctgcagggagtgggcccaaggaccctatggctcgcaagatgcgactgcggaggcgcaaggattcagcccaggatgaccaggccaagcaggtgctgaagggcatgtcagatgttgcccaggagaagaacaaaaagcaggaggagagcgcagatgcccgggcccccagcgggaaggtgcggcgttgggaccagggcctggagaagccccgccttgactactccgagttcttcacggaggacgtgggccagctgcccggactgaccatctggcagatagagaacttcgtgcctgtgctggtggaggaagccttccacggcaagttctacgaggctgactgctacattgtgctcaagacctttctggatgacagcggctccctcaactgggagatctactactggattggcggggaggccacactcgacaagaaagcttgctctgccatccacgctgtcaacttgcgcaactacctgggtgctgagtgccgcactgtccgggaggagatgggcgatgagagcgaggagttcctgcaggtgtttgacaacgacatctcctacattgagggtggaacagccagtggcttctacactgtggaagacacacactatgtcaccaggatgtatcgtgtgtatgggaaaaagaacatcaagttggagcctgtgcccctcaaggggacctctctggacccaaggtttgttttcctgctggaccgagggctagacatctacgtatggcggggggcccaggccacactgagcagcaccaccaaggccaggctctttgcagagaaaattaacaagaatgagcggaaagggaaggctgagatcacactgctggtgcagggccaggagctcccagagttctgggaggcactgggtggggagccctctgagatcaagaagcacgtgcctgaagacttctggccgccgcagcccaagctgtacaaggtgggcctgggcttgggctacctggagctgccacagatcaactacaagctctccgtggaacataagcagcgtcccaaggtggagctgatgccaagaatgcggctgctgcagagtctgctggacacgcgctgcgtgtacattctggactgttggtccgacgtgttcatctggctcggccgcaagtccccgcgcctggtgcgcgctgccgccctcaagctgggtcaggagctgtgcgggatgctgcaccggccacgccatgccacggtcagccgcagcctcgagggcaccgaggcgcaggtgttcaaggccaagttcaagaattgggacgatgtgttgacggtggactacacacgcaatgcggaggccgtgctgcagagcccgggtctctccgggaaggtgaaacgcgacgccgagaagaaagaccagatgaaggctgacctcactgcgcttttcctgccgcggcagccgcccatgtcgctggccgaggcggagcagctgatggaggagtggaacgaagacctagacggcatggagggtttcgtgctggagggcaagaagtttgcgcggctgccggaagaggagtttggccacttctacacgcaggactgctacgtcttcctctgcaggtactgggtgcctgtggagtacgaggaggaggaaaagaaggaagacaaggaggagaaggccgagggcaaagaaggcgaggaagcaaccgctgaggcagaggagaagcagccagaggaggacttccagtgcatcgtgtacttctggcagggccgtgaagcctccaatatgggctggctcaccttcaccttcagcctgcaaaagaagttcgagagcctcttccctgggaagctggaggtggtacgcatgacgcagcagcaggagaaccccaagttcctgtcccatttcaagaggaagttcatcatccaccggggcaagaggaaggcggtccagggcgcccaacagcccagcctctaccagatccgcaccaacggcagcgccctctgcacccggtgcatccagatcaacaccgactccagcctcctcaactccgagttctgcttcatcctcaagcctcactcttccgctagggataaagcagatgtggatgccctttaagagatattaaatgcttttattttcaatatta

SEQ ID NO: 363763 - DNA, 1078 bp, Homo sapiens
tctagaggatcttttggctcagtggtacgcatgacgcagcagcaggagaaccccaagttcctgtcccatttcaagaggaagttcatcatccaccggggcaagaggaaggcggtccagggcgcccaacagcccagcctctaccagatccgcaccaacggcagcgccctctgcacccggtgcatccagatcaacaccgactccagcctcctcaactccgagttctgcttcatcctcaaggttccctttgagagtgaggacaaccagggcatcgtgtatgcctgggtgggccgggcatcagaccctgacgaagccaagttggcagaagacatcctgaacaccatgtttgacacctcctacagcaagcaggttatcaacgaaggtgaggagcctgagaacttcttctgggtgggcattggggcacagaagccctatgatgacgatgccgagtacatgaaacacacacgtctcttccggtgctccaacgagaagggctactttgcagtgactgagaaatgctccgacttttgccaagatgacctggcagatgatgacatcatgttgctagacaatggccaagaggtctacatgtgggtggggacccagactagccaggtggagatcaagctgagcctgaaggcctgccaggtatatatccagcacatgcggtccaaggaacatgagcggccgcgccggctgcgcctggtccgcaagggcaatgagcagcacgcctttacccgctgcttccacgcctggagcgccttctgcaaggccctggcctaagacaggctggcacagccccaggcttggtgaggaagaggaaggggcctcatccactgtctgctagcaaagaatgtactcaggtgacaccacctgctccagccacgtccagtgccacagtccccagtagcctcaagcagcaccaatggggatgaccctgacaggtgccctcaggggtctgggaaatccaactctctccacagtgtgagtgcacgtgtgaagccccctcactcttccgctagggataaagcagatgtggatgccctttaagagatattaaatgcttttattttcaatatta

SEQ ID NO: 363764 - DNA, 1089 bp, Homo sapiens
tcctgtacttcctcttccctgggaagctggaggtggtacgcatgacgcagcagcaggagaaccccaagttcctgtcccatttcaagaggaagttcatcatccaccggggcaagaggaaggcggtccagggcgcccaacagcccagcctctaccagatccgcaccaacggcagcgccctctgcacccggtgcatccagatcaacaccgactccagcctcctcaactccgagttctgcttcatcctcaaggttccctttgagagtgaggacaaccagggcatcgtgtatgcctgggtgggccgggcatcagaccctgacgaagccaagttggcagaagacatcctgaacaccatgtttgacacctcctacagcaagcaggttatcaacgaaggtgaggagcctgagaacttcttctgggtgggcattggggcacagaagccctatgatgacgatgccgagtacatgaaacacacacgtctcttccggtgctccaacgagaagggctactttgcagtgactgagaaatgctccgacttttgccaagatgacctggcagatgatgacatcatgttgctagacaatggccaagaggtctacatgtgggtggggacccagactagccaggtggagatcaagctgagcctgaaggcctgccaggtatatatccagcacatgcggtccaaggaacatgagcggccgcgccggctgcgcctggtccgcaagggcaatgagcagcacgcctttacccgctgcttccacgcctggagcgccttctgcaaggccctggcctaagacaggctggcacagccccaggcttggtgaggaagaggaaggggcctcatccactgtctgctagcaaagaatgtactcaggtgacaccacctgctccagccacgtccagtgccacagtccccagtagcctcaagcagcaccaatggggatgaccctgacaggtgccctcaggggtctgggaaatccaactctctccacagtgtgagtgcacgtgtgaagccccctcactcttccgctagggataaagcagatgtggatgccctttaagagatattaaatgcttttattttcaatatta

SEQ ID NO: 363765 - DNA, 3536 bp, Homo sapiens
cccagcccgcggctccccccagcgccctcgccccggcgctccctagcccggcgcggcccggcagcgagagcggcgccatggaggccaccggggtgctgccgttcgtgcgtggcgtggacctcagcggcaacgacttcaagggcggctacttccctgagaatgtcaaggccatgaccagcctgcggtggctgaagctgaaccgcactggcctctgctacctgcccgaggagctggccgccctgcagaagctggaacacttgtctgtgagccacaacaacctgaccacgcttcatggggagctgtccagcctgccatcgctgcgcgccatcgtggcccgagccaacagtctgaagaattccggagtccccgatgacatcttcaagctagatgatctctcagtcctggacttgagccacaaccagctgacagagtgcccgcgggagctggagaacgccaagaacatgctggtgctgaacctcagccacaacagcatcgacaccatccccaaccagctcttcatcaacctcactgacctactatacctggacctcagcgagaaccgcctggagagcctgcccccgcagatgcgccgcctggtgcacctgcagacgctcgtgctcaatggaaaccccctgctgcatgcacagctccggcagctcccagcgatgacggccctgcagaccctgcacctgcggagcacccagcgcacccagagcaacctgcccaccagcctggagggtctgagcaacctcgcaggtcaggcagccccaggagcccctctgagctcgggccccctctgggccctcttgcttccttgggtggaaggggttgaaccctgctcttcggaccaatacccagagggacaaggctggagttatgttacagtgacttttgcgattatgatgatgccttaacactgactttatgcctagaaaactcccccgcaacccccatgtgagggagtttgtccaaatggagaaacttgggcgcacagcagttgtcacttgcctaagccacacagctcagaggtggcagagctggggttcacactagggctggctgccctggcacctggtgtatgggccccagctgatgcaccccaccctgcaccccagacgtggatctgtcctgcaatgacctgacacgggtgcccgagtgtctgtacaccctccccagcctgcgccgcctcaacctcagcagcaaccagatcacggagctgtccctgtgcatagaccagtgggtgcacgtggaaactctgaacctgtcccgaaatcagctcacctcactgccctcagccatttgcaagctgagcaagctgaagaagctgtacctgaattccaacaagctggactttgacgggctgccctcaggcattggcaagctcaccaacctggaagagttcatggctgccaacaacaacctggagctggtccctgaaagtctctgcaggtgcccaaagctgaggaaacttgtcctgaacaagaaccacctggtgaccctcccagaagccatccatttcctgacggagatcgaggtcctggatgtgcgggagaaccccaacctggtcatgccgcccaagcccgcagaccgtgccgctgagtggtacaacatcgacttctcgctgcagaaccagctgcggctagcgggtgcctctcctgctaccgtggctgcagctgcagctgcagggagtgggcccaaggaccctatggctcgcaagatgcgactgcggaggcgcaaggattcagcccaggatgaccaggccaagcaggtgctgaagggcatgtcagatgttgcccaggagaagaacaaaaagcaggaggagagcgcagatgcccgggcccccagcgggaaggtgcggcgttgggaccagggcctggagaagccccgccttgactactccgagttcttcacggaggacgtgggccagctgcccggactgaccatctggcagatagagaacttcgtgcctgtgctggtggaggaagccttccacggcaagttctacgaggctgactgctacattgtgctcaagacctttctggatgacagcggctccctcaactgggagatctactactggattggcggggaggccacactcgacaagaaagcttgctctgccatccacgctgtcaacttgcgcaactacctgggtgctgagtgccgcactgtccgggaggagatgggcgatgagagcgaggagttcctgcaggtgtttgacaacgacatctcctacattgagggtggaacagccagtggcttctacactgtggaagacacacactatgtcaccaggatgtatcgtgtgtatgggaaaaagaacatcaagttggagcctgtgcccctcaaggggacctctctggacccaaggtttgttttcctgctggaccgagggctagacatctacgtatggcggggggcccaggccacactgagcagcaccaccaaggccaggctctttgcagagaaaattaacaagaatgagcggaaagggaaggctgagatcacactgctggtgcagggccaggagctcccagagttctgggaggcactgggtggggagccctctgagatcaagaagcacgtgcctgaagacttctggccgccgcagcccaagctgtacaaggtgggcctgggcttgggctacctggagctgccacagatcaactacaagctctccgtggaacataagcagcgtcccaaggtggagctgatgccaagaatgcggctgctgcagagtctgctggacacgcgctgcgtgtacattctggactgttggtccgacgtgttcatctggctcggccgcaagtccccgcgcctggtgcgcgctgccgccctcaagctgggtcaggagctgtgcgggatgctgcaccggccacgccatgccacggtcagccgcagcctcgagggcaccgaggcgcaggtgttcaaggccaagttcaagaattgggacgatgtgttgacggtggactacacacgcaatgcggaggccgtgctgcagagcccgggtctctccgggaaggtgaaacgcgacgccgagaagaaagaccagatgaaggctgacctcactgcgcttttcctgccgcggcagccgcccatgtcgctggccgaggcggagcagctgatggaggagtggaacgaagacctagacggcatggagggtttcgtgctggagggcaagaagtttgcgcggctgccggaagaggagtttggccacttctacacgcaggactgctacgtcttcctctgcaggtactgggtgcctgtggagtacgaggaggaggaaaagaaggaagacaaggaggagaaggccgagggcaaagaaggcgaggaagcaaccgctgaggcagaggagaagcagccagaggaggacttccagtgcatcgtgtacttctggcagggccgtgaagcctccaatatgggctggctcaccttcaccttcagcctgcaaaagaagttcgagagcctcttccctgggaagctggaggtgtgcctggcagccccgcgagcccgaggccaggcggaggggtgtggtg

SEQ ID NO: 363766 - DNA, 796 bp, Homo sapiens
  misc_feature (70)..(70): n is a, c, g, or t
ggtgggcattggcccacccagaagaagttctcaggctcctcaccttcgttgataacctgcttgctgtagnaggtgtcaaacatggttatcaacgaaggtgaggagcctgagaacttcttctgggtgggcattggggcacagaagccctatgatgacgatgccgagtacatgaaacacacacgtctcttccggtgctccaacgagaagggctactttgcagtgactgagaaatgctccgacttttgccaagatgacctggcagatgatgacatcatgttgctagacaatggccaagaggtctacatgtgggtggggacccagactagccaggtggagatcaagctgagcctgaaggcctgccaggtatatatccagcacatgcggtccaaggaacatgagcggccgcgccggctgcgcctggtccgcaagggcaatgagcagcacgcctttacccgctgcttccacgcctggagcgccttctgcaaggccctggcctaagacaggctggcacagccccaggcttggtgaggaagaggaaggggcctcatccactgtctgctagcaaagaatgtactcaggtgacaccacctgctccagccacgtccagtgccacagtccccagtagcctcaagcagcaccaatggggatgaccctgacaggtgccctcaggggtctgggaaatccaactctctccacagtgtgagtgcacgtgtgaagccccctcactcttccgctagggataaagcagatgtggatgccctttaagagatattaaatgcttttattttcaatatta

SEQ ID NO: 363767 - DNA, 566 bp, Homo sapiens
atatttggaccaggaatgatgctggccagatgactgacttaatgtatgctagacaactggccaagaggtctacatgtgggtggggacccagactagccaggtggagatcaagctgagcctgaaggcctgccaggtatatatccagcacatgcggtccaaggaacatgagcggccgcgccggctgcgcctggtccgcaagggcaatgagcagcacgcctttacccgctgcttccacgcctggagcgccttctgcaaggccctggcctaagacaggctggcacagccccaggcttggtgaggaagaggaaggggcctcatccactgtctgctagcaaagaatgtactcaggtgacaccacctgctccagccacgtccagtgccacagtccccagtagcctcaagcagcaccaatggggatgaccctgacaggtgccctcaggggtctgggaaatccaactctctccacagtgtgagtgcacgtgtgaagccccctcactcttccgctagggataaagcagatgtggatgccctttaagagatattaaatgcttttattttcaatatta

SEQ ID NO: 363768 - DNA, 1122 bp, Homo sapiens
ccacgcgtccgcactcgacaagaaagcttgctctgccatccacgctgtcaacttgcgcacaatgtagcagtcaacttcgtgcctgtgctggtggaggaagccttccacggcaagttctacgaggctgactgctacattgtgctcaagacctttctggatgacagcggctccctcaactgggagatctactactggattggcggggaggccacactcgacaagaaagcttgctctgccatccacgctgtcaacttgcgcaactacctgggtgctgagtgccgcactgtccgggaggagatgggcgatgagagcgaggagttcctgcaggtgtttgacaacgacatctcctacattgagggtggaacagccagtggcttctacactgtggaagacacacactatgtcaccaggatgtatcgtgtgtatgggaaaaagaacatcaagttggagcctgtgcccctcaaggggacctctctggacccaaggtttgttttcctgctggaccgagggctagacatctacgtatggcggggggcccaggccacactgagcagcaccaccaaggccaggctctttgcagagaaaattaacaagaatgagcggaaagggaaggctgagatcacactgctggtgcagggccaggagctcccagagttctgggaggcactgggtggggagccctctgagatcaagaagcacgtgcctgaagacttctggccgccgcagcccaagctgtacaaggtgagccctgctgctgaggcccacctggagcgccttctgcaaggccctggcctaagacaggctggcacagccccaggcttggtgaggaagaggaaggggcctcatccactgtctgctagcaaagaatgtactcaggtgacaccacctgctccagccacgtccagtgccacagtccccagtagcctcaagcagcaccaatggggatgaccctgacaggtgccctcaggggtctgggaaatccaactctctccacagtgtgagtgcacgtgtgaagccccctcactcttccgctagggataaagcagatgtggatgccctttaagagatattaaatgcttttattttcaatattaaaaatcagtatttttaatattaaaatgg

SEQ ID NO: 363769 - DNA, 965 bp, Homo sapiens
  misc_feature (64)..(65): n is a, c, g, or t
  misc_feature (76)..(76): n is a, c, g, or t
  misc_feature (79)..(79): n is a, c, g, or t
  misc_feature (81)..(81): n is a, c, g, or t
aggttgacaggttattggagtcagggtaggcgggacggtgcacaggttcaagcgacgatctatnnaccatcatccntcnantgctcacagctctcaatggagtcaattctatcgtatggctggggcctcatcagtgttaatgaaagttacaaaggggctgggcgcggtggctcatacctgtaatcccagcactttgggtggattacctgagctcaggggttcgagaccagcctgggcaacacggtgaaaccctctctgtactaaaaatacaaaaaattagccgggcatggcagcgtgtgcctgtagtcccagctactcaggaggctgaggcagaagaatttcttgaacccgggaggcagaggctgcagtgagccgagatcgcactactgcactccggcctgggcgacagagcaagactccatctccaaaaaaaaaaagaaagtgctgtcggaaggtatacatgggagagcctggaaagggtttcacccgggggatggggaatgatattaggtcctgagggatgttgggttttgacaggatcagggtagaagggaggatgttcaaggtggaggaactcagaacagcaaaggccctgaggagtacagaagtatgagagcggctctaggagcagaggagaggatcaagagttgaattttgagatgactgtttgacatccaagaagggacatcaagcaggcaaataagtatatgactctagagcacttggaagaaatcagggctggaggtgggaatctgggcatcaccaacacattgactcatactgaaaacttagggccagatgatgtcatctaggaagggtgtggcatagaagactccccacacagaggtctggggcatttcaatgcacctggagtagagcaggcagaagagtctgagaggagaggccagcgagggaggagggaaaccagaggatgtatttccaaaggaagaagaaagtgtccaggc

SEQ ID NO: 363770 - DNA, 453 bp, Homo sapiens
gctccctgagggaatgtagtatggtgttttgcagccttcacccctgaggaagcaaagggcctgtatcaaatgagctgctattttgaaagaagctttgttacttcatagtgcctggtcattgtcagattttgtgaaacagtagtaatgaatgaaaaccaatgtttattgagcacctgctgtaccattaggctgtgtgccaggcatttgacaggcattatctcagctttattggtggccacattttacaggtaagcaaactgggttgctcaaaggagttgagaacgtgtctatgtcagatagctgggatttttgcacacaggtgatcccaaagcctgcaggtgtaaccattacactacactgcgtcttctcagagatgcctcctataggaaccttgctggcctcaatgggccgtccagtctgctgaaactttgcaggccagcccccctctgccct

SEQ ID NO: 363771 - DNA, 2945 bp, Homo sapiens
  misc_feature (64)..(65): n is a, c, g, or t
  misc_feature (76)..(76): n is a, c, g, or t
  misc_feature (79)..(79): n is a, c, g, or t
  misc_feature (81)..(81): n is a, c, g, or t
  misc_feature (2189)..(2189): n is a, c, g, or t
aggttgacaggttattggagtcagggtaggcgggacggtgcacaggttcaagcgacgatctatnnaccatcatccntcnantgctcacagctctcaatggagtcaattctatcgtatggctggggcctcatcagtgttaatgaaagttacaaaggggctgggcgcggtggctcatacctgtaatcccagcactttgggtggattacctgagctcaggggttcgagaccagcctgggcaacacggtgaaaccctctctgtactaaaaatacaaaaaattagccgggcatggcagcgtgtgcctgtagtcccagctactcaggaggctgaggcagaagaatttcttgaacccgggaggcagaggctgcagtgagccgagatcgcactactgcactccggcctgggcgacagagcaagactccatctccaaaaaaaaaaagaaagtgctgtcggaaggtatacatgggagagcctggaaagggtttcacccgggggatggggaatgatattaggtcctgagggatgttgggttttgacaggatcagggtagaagggaggatgttcaaggtggaggaactcagaacagcaaaggccctgaggagtacagaagtatgagagcggctctaggagcagagggtgtggctgcagcgtggagagaggtgaggttgagaagttgaggccagaccaggcgctgtgaatgccaagctggggagtggaccaaatctgcaggcggcggtggagaattgtgtgtttactgggagatggccagaaccctcccgcagaagggttaggaggcgcttggaaaccctgcctggggacatggagttcatgagacagcagattgggcaaagctgcaacagccatattcattcagatgcaccaggggcacttactgcgccagccactggccaggtccctgatgttgtggcacgtgctacagttgtggtcctgacctttctcctgtctagttgtgatgcccgtatctattctcaggggccctgggtgaccagagtgtccttgagagtgagtctcaggctgtctgcttatctacccagagcctggggcttggcctcaaaggcgcattgcacgcgaatctcaaagacacaagtcagtgtaagccccattgctgagtgcctcccacagcactgtctgtggtcccagctgctgggatctggtcctgccttgggccaggttgctgcccaacaacgaagtgcacatgctgcccccacgcatgccaggattggatcctgtgcttctgactgctgctctctgacagccgcgtggcctgaagttggatgccaagtcagctgggtcctctcacctgggaccctcaggcccaagtgtcagtcggtggactatgggatgtttggagcctctgggaggggcctcaggcagtggttgttttggtcacccatggtagccacagctggcagagctctgctccctgtgaatgagctctgaactcagcctgacccatggcagaagctcaggggatgttggggtactggataggtggatgaggggcttgcctgcaccgcctagttctggacctgccgctgtttgtccatgtggtgttaatgggcattgcctcctgagggccttactgtcctcttgtgaggagggtgttattctctccatcttgcagttaagaaaactgaggtaggctgggcacagtagctcacacctgtaatcctagcactttgggaagccgaggagggcagttcatgcgaacctaggagttcaagaccagcctgggcaacatggcgaaaccccatctctccagaaaagtacatttagccaaatgtggtggcgtgtgctcagcctccagaagttatgaaatttccacctacttgtgaaatcctaacccacttgtgtttgttcattcccctaatggcccatatcacatcccgcctgttaaggaaagagcaggtcctcggaggctgagtacaagtagctccagctactcgggaggcttaagcaggagaatctcttgaggctgggaggctgaggctgcaagtgagccatgattgcaccactgcactccagcctggacgacagagttagactctgcttccaaaaaaaaggccaggtgtggtgtctcatgcctgtaatcccagcactttgggaggccgaggcgggtggatcacctgaggtcaggagtttgagaccagcctgaccaacatggtgaaanctcgtctctattaaaaatacaaaattagctaggcttggttgtgttcacctgtaatcccagttacttgggagggtgaggcaggaggatcgtttgaactggtgaggtggaggttgcaatgagccgagattgaaccactgcactctagcctgggtgacagagcgagagtcagtctcaaaaaaataaataaaaaataaaagacccaaaccaaaacaaaaaaagattcagagaggttgagtaatttgtccagggtcacacagctattgagaaagaaagctagggttctggtcccaggtcaacgtggttctcgttctgcttccttgctgcttcccagctccctgagggaatgtagtatggtgttttgcagccttcacccctgaggaagcaaagggcctgtatcaaatgagctgctattttgaaagaagctttgttacttcatagtgcctggtcattgtcagattttgtgaaacagtagtaatgaatgaaaaccaatgtttattgagcacctgctgtaccattaggctgtgtgccaggcatttgacaggcattatctcagctttattggtggccacattttacaggtaagcaaactgggttgctcaaaggagttgagaacgtgtctatgtcagatagctgggatttttgcacacaggtgatcccaaagcctgcaggtgtaaccattacactacactgcgtcttctcagagacacgcaatcacctctccaccatgctggtcatagaagaagggcgatccccaaa

SEQ ID NO: 363772 - DNA, 2825 bp, Homo sapiens
gggcagccattttaattcatatttgagtgggcggtggcgattggtgttggcggtctggctcagctgggcagggggtaactttactgatttgggggtggtttttagtttaatttttcttttctagcttcccatcgacggtcagtgcgcacgttgtaatcagctgaggccatgtcaggagacggagccacggagcaggcagctgagtatgtcccagagaaggtgaagaaagcggaaaagaaattagaagagaatccatatgaccttgatgcttggagcattctcattcgagaggcacagaatcaacctatagacaaagcacggaagacttatgaacgccttgttgcccagttccccagttctggcagattctggaaactgtacattgaagcagagattaaagctaaaaattatgacaaggttgaaaagctatttcagagatgccttatgaaggttttgcacattgatttatggaagtgttatctttcatatgtccgagaaaccaagggtaaactaccaagttacaaagaaaaaatggctcaagcatatgactttgcactggataaaattggaatggaaattatgtcctatcagatttgggtggattacatcaatttcctaaaaggcgtggaagctgtaggatcttatgcagaaaatcaaagaataacagctgtccgaagagtttatcaacgaggttgtgttaatccgatgatcaacattgaacagctctggagagactataacaagtatgaagagggtatcaatattcatttagctaaaaaaatgattgaagatcggagtagagattatatgaatgctagacgtgtagcaaaggaatatgagacagtaatgaaaggcttggaccgtaatgctccctcggtgcctcctcagaatactcctcaagaagctcaacaagtagatatgtggaagaaatatatacagtgggaaaagagcaaccctcttcgtacagaggatcagacccttataacaaaaagagttatgtttgcttatgaacagtgcctgcttgtgctgggccatcaccctgatatttggtatgaagctgcccagtatcttgagcagtcaagtaaactgctcgcagaaaagggagatatgaataatgccaaattatttagtgatgaagctgctaatatatatgaaagagccataagcactttattgaagaagaatatgcttctttattttgcatatgcagattatgaagagagtcgcatgaagtatgaaaaggttcacagtatatataacagacttctggcaattgaggatattgaccctaccttggtatatatccaatatatgaaatttgcacggagagcagaaggcatcaaatctggaagaatgatatttaaaaaagcaagagaagataccagaacccgccaccatgtctatgttactgcagcactcatggaatattactgtagtaaggacaaatctgttgcctttaagatttttgagctggggctaaaaaaatatggagacattccagagtatgtcctggcctatattgactatctttctcacctcaatgaggacaataatacccgagttttgtttgaacgagttttaacatctggaagccttcctcctgagaagtctggagaaatctgggcccgatttctagcatttgaaagtaatattggtgatctagctagtatactcaaagtggagaaaagacggtttacagcattcaaagaagagtatgaagggaaagaaacggctttactagtagatagatacaagttcatggatttatatccttgctctgcaagtgaattaaaagcacttggttataaggatgtctcccgtgctaagctagcagctataattccggacccagttgtagctccttctatagtgcctgttctgaaagatgaagtggatagaaaaccagaataccctaaaccagacactcagcagatgattccatttcagccacgacatttagcacctccaggtttacaccctgtacctggtggagtgttcccagtccctcctgcagctgttgttttaatgaaacttctccctcctcctatctgtttccagggtccttttgtacaagtggatgaactgatggaaattttccgaagatgcaagataccaaatactgttgaggaagctgtgaggatcattactggtggggccccagagctagctgtagaaggcaacggccccgtggaaagtaatgcagtactcaccaaggccgtcaaaaggcccaacgaggattcagatgaagatgaagaaaagggagccgttgtcccccctgttcatgacatttacagagcacggcagcagaagcggattcggtagggttttaaacgcctctgcagaaaactcctgtccaggattccttttgcctcaagtggtatgtttaaaagagacaacgctttgttacaaggttcttggaaacaaagttgtattgtcattggtgcctctatcacatggttcttgagaaaaaacaaaccaacctgtgtgaattttagaatacggaacagacctatgctctaagcaaaattaggttttcaaaaatgtgagaacagtacaaagtggcagaaccacattttgttccctcttcaagggtgtcttgtatgtgccgcttgaagatttgtgagtttttcaacagttttattttaaaaactggatggcttatgattgtaaagcattttatcacattttctgaaaacaattgttcttggtttgcttatgtagagtcctgccttattgtttgtttttatttatggcagaatgtatgaaatccgttttgtagtttcaaattttaaaagtcctttaaaaaataaaaggattcagaaaca

SEQ ID NO: 363773 - DNA, 1911 bp, Homo sapiens
  misc_feature (904)..(904): n is a, c, g, or t
  misc_feature (1007)..(1007): n is a, c, g, or t
  misc_feature (1505)..(1505): n is a, c, g, or t
ctgggttaatttttcttttgaacagctttattgaagtataatttgtatactataagtccatccattaggtgtacagttcagtggttgttagtagtagattcaatggttgttgttactgttagattcttaagttttaaaagataacttagagtttagcaagaagtgtcattttcccacttccagatatagaggacctcctgagactcttaaaatttaatacacctctgtcaacaattcttaattcatttacatttccatagttacctgccaacctagatattgtacctctgcaagagttaaagtagctaaatatagcatagtcctggtgcctcaaaataagaaactcaattatttctaagtttgagtttgccatccttccatgttcaatgtatttaaaaaatagcagtagtctgactaatgtcagcagatatgtacttgtcattatttttaaaaggcaaatgggatacctggttcagacggcactgttataaatggttttgcattagaactgcagtatagtagaggagggctgaactagaagggaaaaaaacatggcttgcagttactgctctgctactcaatcaccaagagccagatcaaatctcttaatctttctgaagctcaagtttcctcatctataaaaatcaagtgtgataatagttaaacctttctgcataggatttttgtaaggatgaagtgagataatgcatatgaaaatattgttgcatcgtaaaagtgaattaaaaaaattaaaatctttttcaatatcctagaggacaataatacccgagttttgtttgaacgagttttaacatctggaagccttcctcctgagaagtctgggtaagccattgtgaaaagttgttgatcaggttctaaagacagctttcttacctgaattgtngtctatggggtgaatgtttgcttgagtatgagtttcaagagaaatttcctttccttctcaagttttattttacctatcagcagtacttttatacctgtttaanattatttttaaatttctgcacagtgattagaattgtttttaagagatgccatagcaatttattatcatctttcttgtatactatatatccctaaccagaaattgtggctcatgtctgtaatcccagcattttgggaggccaaggtggaaagatgactttagcccaggagtttgagaccagcctgggcaacatagtgagacccaatctatacaaaaaatgttaaaaattagctgggtgtggtggtgcatgcctgtagtcccagatactgggaggcggaggtgggagctggaggactgcttgagcccaggaggttgaggctccagtgagctgtgatcacacctctgcactccagcctgggtgacagagtgagactctgtctcaacaacaacaaaaaagatacctctctctctctccctagaaattgatattaacatgttaagagaggcattctgaaattttcacctcccttactcaaaagcaaagactcttgtaaattcnaagtttgttttacatattatgtctctgacttacggttttgtctcttgttagttttaccatacagaggaacaacactgtcaagtggtacagcggaaatattatagtaaggctttggagtcttgggttcaatatccagctagatggcaaatttcatagctataccaatcttcactttcttattaacaataatgtccaccagtgtaggattttttgtgatagccacatatctggtatataagaggcacttaatagattactttagtacaaaggtgcataatgacatttaagtagtctcagagcattaattttagctgttagaacaacgatgaggcaccagtttttccccagtgatccacgttaatgggaaacaatagcgtaatcatattagattttggagtattttcta

SEQ ID NO: 363774 - DNA, 750 bp, Homo sapiens
gggcagccattttaattcatatttgagtgggcggtggcgattggtgttggcggtctggctcagctgggcagggggtaactttactgatttgggggtggtttttagtttaatttttcttttctagcttcccatcgacggtcagtgcgcacgttgtaatcagctgaggccatgtcaggagacggagccacggagcaggcagctgagtatgtcccagagaaggtgaagaaagcggaaaagaaattagaagagaatccatatgaccttgatgcttggagcattctcattcgagaggcacaggtttagtgatataggattacatttccttctctatgggtccaatcacactacttggttctgcagtgaataatattttcataatcctaacattgtaaatgctgtttattggttttcaattttagaatcaacctatagacaaagcacggaagacttatgaacgccttgttgcccagttccccagttctggcagattctggaaactgtacattgaagcagaggttactattttattttattttttcttatatcagtattgcagcattcactgtagtgatagaaaacaagttaggaacatagccaattaggacaaggaggatttaaatgtgtcttacctttattttgtaaaataggtataaaggagtaattaaaatgaatttttgaaatttgggtcttttacaagctgatgattgttgcattttggagttgcaacaacattaaaacagtttcaatggt

SEQ ID NO: 363775 - DNA, 791 bp, Homo sapiens
  misc_feature (732)..(735): n is a, c, g, or t
  misc_feature (743)..(743): n is a, c, g, or t
  misc_feature (765)..(766): n is a, c, g, or t
  misc_feature (769)..(769): n is a, c, g, or t
  misc_feature (774)..(774): n is a, c, g, or t
cggacgcgtggggaactgatggaaacagataggaggagggagaagtttccatcagttggtccttttgtacaagtggatgaactgatggaaattttccgaagatgcaagataccaaatactgttgaggaagctgtgaggatcattactggtggggccccagagctagctgtagaaggcaacggccccgtggaaagtaatgcagtactcaccaaggccgtcaaaaggcccaacgaggattcagatgaagatgaagaaaagggagccgttgtcccccctgttcatgacatttacagagcacggcagcagaagcggattcggtagggttttaaacgcctctgcagaaaactcctgtccaggattccttttgcctcaagtggtatgtttaaaagagacaacgctttgttacaaggttcttggaaacaaagttgtattgtcattggtgcctctatcacatggttcttgagaaaaaacaaaccaacctgtgtgaattttagaatacggaacagacctatgctctaagcaaaattaggttttcaaaaatgtgagaacagtacaaagtggcagaaccacattttgttccctcttcaagggtgtcttgtatgtgccgcttgaagatttgtgagtttttcaacagttttattttaaaaactggatggcttatgattgtaaagcattttatcacattttctgaaaacaatgtctgggaggtatgtagagtccggcttatggggnnnnattatggngacggtgaatcggtgggttcannttnaagcnttaaaataaggtcggag

SEQ ID NO: 363776 - DNA, 1042 bp, Homo sapiens
gggcagccattttaattcatatttgagtgggcggtggcgattggtgttggcggtctggctcagctgggcagggggtaactttactgatttgggggtggtttttagtttaatttttcttttctagcttcccatcgacggtcagtgcgcacgttgtaatcagctgaggccatgtcaggagacggagccacggagcaggcagctgagtatgtcccagagaaggtgaagaaagcggaaaagaaattagaagagaatccatatgaccttgatgcttggagcattctcattcgagaggcacagaatcaacctatagacaaagcacggaagacttatgaacgccttgttgcccagttccccagttctggcagattctggaaactgtacattgaagcagagatcagaggtttatgaacttgatttcttgactttcctgatagctggagcgtctcaaatgattgcacacatttcttagtctcaattttaattaacctttagaaagatctatgccactcagcaattttgaggagagacaggggagatgacctaatgggaggtagagtagcaaaaccaattgagccatgaatgttaactagtgattttgatacttctggctaaattactcacttttctcaaaaagcaaataccctgctgtatttttcttacccaaaaattacagattattctttgaaaggtaatgtttggcatgctgttgacaagttatttacagagtttagatgtttattaagtaaagtaggctgagtctataaatgttaagtgatggttgttgatagatgccctatatattgggacaaaatcaaatctgagccaaggttttacctttgagattcttgactgaaattagtattgtctaatttatctagcatttatttaactttttaaatcctcataggcctggctaagaatttgagaggatttaaaagtagattttaaagtggggatgtttatgttcagagaaaaataccaatgaattactccgaagagaaacttaccgttcaaaatcagctgtaattttctttctcttgtt

SEQ ID NO: 363777 - DNA, 2715 bp, Homo sapiens
gggcagccattttaattcatatttgagtgggcggtggcgattggtgttggcggtctggctcagctgggcagggggtaactttactgatttgggggtggtttttagtttaatttttcttttctagcttcccatcgacggtcagtgcgcacgttgtaatcagctgaggccatgtcaggagacggagccacggagcaggcagctgagtatgtcccagagaaggtgaagaaagcggaaaagaaattagaagagaatccatatgaccttgatgcttggagcattctcattcgagaggcacagaatcaacctatagacaaagcacggaagacttatgaacgccttgttgcccagttccccagttctggcagattctggaaactgtacattgaagcagagattaaagctaaaaattatgacaaggttgaaaagctatttcagagatgccttatgaaggttttgcacattgatttatggaagtgttatctttcatatgtccgagaaaccaagggtaaactaccaagttacaaagaaaaaatggctcaagcatatgactttgcactggataaaattggaatggaaattatgtcctatcagatttgggtggattacatcaatttcctaaaaggcgtggaagctgtaggatcttatgcagaaaatcaaagaataacagctgtccgaagagtttatcaacgaggttgtgttaatccgatgatcaacattgaacagctctggagagactataacaagtatgaagagggtatcaatattcatttagctaaaaaaatgattgaagatcggagtagagattatatgaatgctagacgtgtagcaaaggaatatgagacagtaatgaaaggcttggaccgtaatgctccctcggtgcctcctcagaatactcctcaagaagctcaacaagtagatatgtggaagaaatatatacagtgggaaaagagcaaccctcttcgtacagaggatcagacccttataacaaaaagaggatatgaataatgccaaattatttagtgatgaagctgctaatatatatgaaagagccataagcactttattgaagaagaatatgcttctttattttgcatatgcagattatgaagagagtcgcatgaagtatgaaaaggttcacagtatatataacagacttctggcaattgaggatattgaccctaccttggtatatatccaatatatgaaatttgcacggagagcagaaggcatcaaatctggaagaatgatatttaaaaaagcaagagaagataccagaacccgccaccatgtctatgttactgcagcactcatggaatattactgtagtaaggacaaatctgttgcctttaagatttttgagctggggctaaaaaaatatggagacattccagagtatgtcctggcctatattgactatctttctcacctcaatgaggacaataatacccgagttttgtttgaacgagttttaacatctggaagccttcctcctgagaagtctggagaaatctgggcccgatttctagcatttgaaagtaatattggtgatctagctagtatactcaaagtggagaaaagacggtttacagcattcaaagaagagtatgaagggaaagaaacggctttactagtagatagatacaagttcatggatttatatccttgctctgcaagtgaattaaaagcacttggttataaggatgtctcccgtgctaagctagcagctataattccggacccagttgtagctccttctatagtgcctgttctgaaagatgaagtggatagaaaaccagaataccctaaaccagacactcagcagatgattccatttcagccacgacatttagcacctccaggtttacaccctgtacctggtggagtgttcccagtccctcctgcagctgttgttttaatgaaacttctccctcctcctatctgtttccagggtccttttgtacaagtggatgaactgatggaaattttccgaagatgcaagataccaaatactgttgaggaagctgtgaggatcattactggtggggccccagagctagctgtagaaggcaacggccccgtggaaagtaatgcagtactcaccaaggccgtcaaaaggcccaacgaggattcagatgaagatgaagaaaagggagccgttgtcccccctgttcatgacatttacagagcacggcagcagaagcggattcggtagggttttaaacgcctctgcagaaaactcctgtccaggattccttttgcctcaagtggtatgtttaaaagagacaacgctttgttacaaggttcttggaaacaaagttgtattgtcattggtgcctctatcacatggttcttgagaaaaaacaaaccaacctgtgtgaattttagaatacggaacagacctatgctctaagcaaaattaggttttcaaaaatgtgagaacagtacaaagtggcagaaccacattttgttccctcttcaagggtgtcttgtatgtgccgcttgaagatttgtgagtttttcaacagttttattttaaaaactggatggcttatgattgtaaagcattttatcacattttctgaaaacaattgttcttggtttgcttatgtagagtcctgccttattgtttgtttttatttatggcagaatgtatgaaatccgttttgtagtttcaaattttaaaagtcctttaaaaaataaaaggattcagaaaca

SEQ ID NO: 363778 - DNA, 2921 bp, Homo sapiens
gggcagccattttaattcatatttgagtgggcggtggcgattggtgttggcggtctggctcagctgggcagggggtaactttactgatttgggggtggtttttagtttaatttttcttttctagcttcccatcgacggtcagtgcgcacgttgtaatcagctgaggccatgtcaggagacggagccacggagcaggtagagacgaggtctcactgtgtttcccaggctggtcttgaactcctggacttaagtgatcctcctgcctcagccttccaaactgttggattacaggcagctgagtatgtcccagagaaggtgaagaaagcggaaaagaaattagaagagaatccatatgaccttgatgcttggagcattctcattcgagaggcacagaatcaacctatagacaaagcacggaagacttatgaacgccttgttgcccagttccccagttctggcagattctggaaactgtacattgaagcagagattaaagctaaaaattatgacaaggttgaaaagctatttcagagatgccttatgaaggttttgcacattgatttatggaagtgttatctttcatatgtccgagaaaccaagggtaaactaccaagttacaaagaaaaaatggctcaagcatatgactttgcactggataaaattggaatggaaattatgtcctatcagatttgggtggattacatcaatttcctaaaaggcgtggaagctgtaggatcttatgcagaaaatcaaagaataacagctgtccgaagagtttatcaacgaggttgtgttaatccgatgatcaacattgaacagctctggagagactataacaagtatgaagagggtatcaatattcatttagctaaaaaaatgattgaagatcggagtagagattatatgaatgctagacgtgtagcaaaggaatatgagacagtaatgaaaggcttggaccgtaatgctccctcggtgcctcctcagaatactcctcaagaagctcaacaagtagatatgtggaagaaatatatacagtgggaaaagagcaaccctcttcgtacagaggatcagacccttataacaaaaagagttatgtttgcttatgaacagtgcctgcttgtgctgggccatcaccctgatatttggtatgaagctgcccagtatcttgagcagtcaagtaaactgctcgcagaaaagggagatatgaataatgccaaattatttagtgatgaagctgctaatatatatgaaagagccataagcactttattgaagaagaatatgcttctttattttgcatatgcagattatgaagagagtcgcatgaagtatgaaaaggttcacagtatatataacagacttctggcaattgaggatattgaccctaccttggtatatatccaatatatgaaatttgcacggagagcagaaggcatcaaatctggaagaatgatatttaaaaaagcaagagaagataccagaacccgccaccatgtctatgttactgcagcactcatggaatattactgtagtaaggacaaatctgttgcctttaagatttttgagctggggctaaaaaaatatggagacattccagagtatgtcctggcctatattgactatctttctcacctcaatgaggacaataatacccgagttttgtttgaacgagttttaacatctggaagccttcctcctgagaagtctggagaaatctgggcccgatttctagcatttgaaagtaatattggtgatctagctagtatactcaaagtggagaaaagacggtttacagcattcaaagaagagtatgaagggaaagaaacggctttactagtagatagatacaagttcatggatttatatccttgctctgcaagtgaattaaaagcacttggttataaggatgtctcccgtgctaagctagcagctataattccggacccagttgtagctccttctatagtgcctgttctgaaagatgaagtggatagaaaaccagaataccctaaaccagacactcagcagatgattccatttcagccacgacatttagcacctccaggtttacaccctgtacctggtggagtgttcccagtccctcctgcagctgttgttttaatgaaacttctccctcctcctatctgtttccagggtccttttgtacaagtggatgaactgatggaaattttccgaagatgcaagataccaaatactgttgaggaagctgtgaggatcattactggtggggccccagagctagctgtagaaggcaacggccccgtggaaagtaatgcagtactcaccaaggccgtcaaaaggcccaacgaggattcagatgaagatgaagaaaagggagccgttgtcccccctgttcatgacatttacagagcacggcagcagaagcggattcggtagggttttaaacgcctctgcagaaaactcctgtccaggattccttttgcctcaagtggtatgtttaaaagagacaacgctttgttacaaggttcttggaaacaaagttgtattgtcattggtgcctctatcacatggttcttgagaaaaaacaaaccaacctgtgtgaattttagaatacggaacagacctatgctctaagcaaaattaggttttcaaaaatgtgagaacagtacaaagtggcagaaccacattttgttccctcttcaagggtgtcttgtatgtgccgcttgaagatttgtgagtttttcaacagttttattttaaaaactggatggcttatgattgtaaagcattttatcacattttctgaaaacaattgttcttggtttgcttatgtagagtcctgccttattgtttgtttttatttatggcagaatgtatgaaatccgttttgtagtttcaaattttaaaagtcctttaaaaaataaaaggattcagaaaca

SEQ ID NO: 363779 - DNA, 2792 bp, Homo sapiens
  misc_feature (2733)..(2736): n is a, c, g, or t
  misc_feature (2744)..(2744): n is a, c, g, or t
  misc_feature (2766)..(2767): n is a, c, g, or t
  misc_feature (2770)..(2770): n is a, c, g, or t
  misc_feature (2775)..(2775): n is a, c, g, or t
gggcagccattttaattcatatttgagtgggcggtggcgattggtgttggcggtctggctcagctgggcagggggtaactttactgatttgggggtggtttttagtttaatttttcttttctagcttcccatcgacggtcagtgcgcacgttgtaatcagctgaggccatgtcaggagacggagccacggagcaggcagctgagtatgtcccagagaaggtgaagaaagcggaaaagaaattagaagagaatccatatgaccttgatgcttggagcattctcattcgagaggcacagaatcaacctatagacaaagcacggaagacttatgaacgccttgttgcccagttccccagttctggcagattctggaaactgtacattgaagcagagattaaagctaaaaattatgacaaggttgaaaagctatttcagagatgccttatgaaggttttgcacattgatttatggaagtgttatctttcatatgtccgagaaaccaagggtaaactaccaagttacaaagaaaaaatggctcaagcatatgactttgcactggataaaattggaatggaaattatgtcctatcagatttgggtggattacatcaatttcctaaaaggcgtggaagctgtaggatcttatgcagaaaatcaaagaataacagctgtccgaagagtttatcaacgaggttgtgttaatccgatgatcaacattgaacagctctggagagactataacaagtatgaagagggtatcaatattcatttagctaaaaaaatgattgaagatcggagtagagattatatgaatgctagacgtgtagcaaaggaatatgagacagtaatgaaaggcttggaccgtaatgctccctcggtgcctcctcagaatactcctcaagaagctcaacaagtagatatgtggaagaaatatatacagtgggaaaagagcaaccctcttcgtacagaggatcagacccttataacaaaaagagttatgtttgcttatgaacagtgcctgcttgtgctgggccatcaccctgatatttggtatgaagctgcccagtatcttgagcagtcaagtaaactgctcgcagaaaagggagatatgaataatgccaaattatttagtgatgaagctgctaatatatatgaaagagccataagcactttattgaagaagaatatgcttctttattttgcatatgcagattatgaagagagtcgcatgaagtatgaaaaggttcacagtatatataacagacttctggcaattgaggatattgaccctaccttggtatatatccaatatatgaaatttgcacggagagcagaaggcatcaaatctggaagaatgatatttaaaaaagcaagagaagataccagaacccgccaccatgtctatgttactgcagcactcatggaatattactgtagtaaggacaaatctgttgcctttaagatttttgagctggggctaaaaaaatatggagacattccagagtatgtcctggcctatattgactatctttctcacctcaatgaggacaataatacccgagttttgtttgaacgagttttaacatctggaagccttcctcctgagaagtctggagaaatctgggcccgatttctagcatttgaaagtaatattggtgatctagctagtatactcaaagtggagaaaagacggtttacagcattcaaagaagagtatgaagggaaagaaacggctttactagtagatagatacaagttcatggatttatatccttgctctgcaagtgaattaaaagcacttggttataaggatgtctcccgtgctaagctagcagctataattccggacccagttgtagctccttctatagtgcctgttctgaaagatgaagtggatagaaaaccagaataccctaaaccagacactcagcagatgattccatttcagccacgacatttagcacctccaggtttacaccctgtacctggtggagtgttcccagtccctcctgcagctgttgttttaatgaaacttctccctcctcctatctgtttccagggtccttttgtacaagtggatgaactgatggaaattttccgaagatgcaagataccaaatactgttgaggaagctgtgaggatcattactggtggggccccagagctagctgtagaaggcaacggccccgtggaaagtaatgcagtactcaccaaggccgtcaaaaggcccaacgaggattcagatgaagatgaagaaaagggagccgttgtcccccctgttcatgacatttacagagcacggcagcagaagcggattcggtagggttttaaacgcctctgcagaaaactcctgtccaggattccttttgcctcaagtggtatgtttaaaagagacaacgctttgttacaaggttcttggaaacaaagttgtattgtcattggtgcctctatcacatggttcttgagaaaaaacaaaccaacctgtgtgaattttagaatacggaacagacctatgctctaagcaaaattaggttttcaaaaatgtgagaacagtacaaagtggcagaaccacattttgttccctcttcaagggtgtcttgtatgtgccgcttgaagatttgtgagtttttcaacagttttattttaaaaactggatggcttatgattgtaaagcattttatcacattttctgaaaacaatgtctgggaggtatgtagagtccggcttatggggnnnnattatggngacggtgaatcggtgggttcannttnaagcnttaaaataaggtcggag

SEQ ID NO: 363780 - DNA, 2627 bp, Homo sapiens
  misc_feature (1674)..(1674): n is a, c, g, or t
  misc_feature (1777)..(1777): n is a, c, g, or t
gggcagccattttaattcatatttgagtgggcggtggcgattggtgttggcggtctggctcagctgggcagggggtaactttactgatttgggggtggtttttagtttaatttttcttttctagcttcccatcgacggtcagtgcgcacgttgtaatcagctgaggccatgtcaggagacggagccacggagcaggcagctgagtatgtcccagagaaggtgaagaaagcggaaaagaaattagaagagaatccatatgaccttgatgcttggagcattctcattcgagaggcacagaatcaacctatagacaaagcacggaagacttatgaacgccttgttgcccagttccccagttctggcagattctggaaactgtacattgaagcagagattaaagctaaaaattatgacaaggttgaaaagctatttcagagatgccttatgaaggttttgcacattgatttatggaagtgttatctttcatatgtccgagaaaccaagggtaaactaccaagttacaaagaaaaaatggctcaagcatatgactttgcactggataaaattggaatggaaattatgtcctatcagatttgggtggattacatcaatttcctaaaaggcgtggaagctgtaggatcttatgcagaaaatcaaagaataacagctgtccgaagagtttatcaacgaggttgtgttaatccgatgatcaacattgaacagctctggagagactataacaagtatgaagagggtatcaatattcatttagctaaaaaaatgattgaagatcggagtagagattatatgaatgctagacgtgtagcaaaggaatatgagacagtaatgaaaggcttggaccgtaatgctccctcggtgcctcctcagaatactcctcaagaagctcaacaagtagatatgtggaagaaatatatacagtgggaaaagagcaaccctcttcgtacagaggatcagacccttataacaaaaagagttatgtttgcttatgaacagtgcctgcttgtgctgggccatcaccctgatatttggtatgaagctgcccagtatcttgagcagtcaagtaaactgctcgcagaaaagggagatatgaataatgccaaattatttagtgatgaagctgctaatatatatgaaagagccataagcactttattgaagaagaatatgcttctttattttgcatatgcagattatgaagagagtcgcatgaagtatgaaaaggttcacagtatatataacagacttctggcaattgaggatattgaccctaccttggtatatatccaatatatgaaatttgcacggagagcagaaggcatcaaatctggaagaatgatatttaaaaaagcaagagaagataccagaacccgccaccatgtctatgttactgcagcactcatggaatattactgtagtaaggacaaatctgttgcctttaagatttttgagctggggctaaaaaaatatggagacattccagagtatgtcctggcctatattgactatctttctcacctcaatgaggacaataatacccgagttttgtttgaacgagttttaacatctggaagccttcctcctgagaagtctgggtaagccattgtgaaaagttgttgatcaggttctaaagacagctttcttacctgaattgtngtctatggggtgaatgtttgcttgagtatgagtttcaagagaaatttcctttccttctcaagttttattttacctatcagcagtacttttatacctgtttaanattatttttaaatttctgcacagtgattagaattgtttttaagagatgccatagcaatttattatcatctttcttgtatactatatatccctaaccagaaattgtggctcatgtctgtaatcccagcattttgggaggccaaggtggaaagatgactttagcccaggagtttgagaccagcctgggcaacatagtgagacccaatctatacaaaaaatgttaaaaattagctgggtgtggtggtgcatgcctgtagtcccagatactgggaggcggaggtgggagctggaggactgcttgagcccaggaggttgaggctccagtgagctgtgatcacacctctgcactccagcctgggtgacagagtgagactctgtctcaacaacaacaaaaaagatacctctctctctctccctagaaattgatattaacatgttaagagaggcattctgaaattttcacctcccttactcttacggttttgtctcttgttagttttaccatacagaggaacaacactgtcaagtggtacagcggaaatattatagtaaggctttggagtcttgggttcaatatccagctagatggcaaatttcatagctataccaatcttcactttcttattaacaataatgtccaccagtgtaggattttttgtgatagccacatatctggtatataagaggcacttaatagattactttagtacaaaggtgcataatgacatttaagtagtctcagagcattaattttagctgttagaacaacgatgaggcaccagtttttccccagtgatccacgttaatgggaaacaatagcgtaatcatattagattttggagtattttcta

SEQ ID NO: 363781 - DNA, 1216 bp, Homo sapiens
gggcagccattttaattcatatttgagtgggcggtggcgattggtgttggcggtctggctcagctgggcagggggtaactttactgatttgggggtggtttttagtttaatttttcttttctagcttcccatcgacggtcagtgcgcacgttgtaatcagctgaggccatgtcaggagacggagccacggagcaggcagctgagtatgtcccagagaaggtgaagaaagcggaaaagaaattagaagagaatccatatgaccttgatgcttggagcattctcattcgagaggcacaggtttagtgatataggattacatttccttctctatgggtccaatcacactacttggttctgcagtgaataatattttcataatcctaacattgtaaatgctgtttattggttttcaattttagaatcaacctatagacaaagcacggaagacttatgaacgccttgttgcccagttccccagttctggcagattctggaaactgtacattgaagcagaggttactattttattttattttttcttatatcagtattgcagcattcactgtagtgatagaaaacaagttaggaacatagccaattaggacaaggaggatttaaatgtgtcttacctttattttgtaaaataggtataaaggagtaattaaaatgaatttttgaaatttgggtcttttacaagctgatgattgttgcattttggagttgcaacaacattaaaacagtttcaatggtattggagtgctttagccttttatttacttgtcatgtgtcaatttattgcctcctgtgtcatttatttagaactcatttttctttttattcctacttacaaactaatatgaatgggagtatatgaaaatacagaaatgttaacttagtttttcatagagtattttgagtgtctggtgaaatgaaacattttaagagaagaattacttcacattttaattttgtgaaaatgcatggtttatcaatgtaagcacttcaataatttaacgatttttctgtaagatagtttatattatgcaagaataagctaatgtgattcaaacctatttaatcctatttaatcataattttacccaatgatactttgatatttttttcttgctttttatatcttgaaatttgaacccaggcatgtatattttaaagagtaaggaccccattcatgattatggttaggaggaaaatgtta

SEQ ID NO: 363782 - DNA, 1094 bp, Homo sapiens
gggcagccattttaattcatatttgagtgggcggtggcgattggtgttggcggtctggctcagctgggcagggggtaactttactgatttgggggtggtttttagtttaatttttcttttctagcttcccatcgacggtcagtgcgcacgttgtaatcagctgaggccatgtcaggagacggagccacggagcaggcagctgagtatgtcccagagaaggtgaagaaagcggaaaagaaattagaagagaatccatatgaccttgatgcttggagcattctcattcgagaggcacagaatcaacctatagacaaagcacggaagacttatgaacgccttgttgcccagttccccagttctggcagattctggaaactgtacattgaagcagaggttactattttattttattttttcttatatcagtattgcagcattcactgtagtgatagaaaacaagttaggaacatagccaattaggacaaggaggatttaaatgtgtcttacctttattttgtaaaataggtataaaggagtaattaaaatgaatttttgaaatttgggtcttttacaagctgatgattgttgcattttggagttgcaacaacattaaaacagtttcaatggtattggagtgctttagccttttatttacttgtcatgtgtcaatttattgcctcctgtgtcatttatttagaactcatttttctttttattcctacttacaaactaatatgaatgggagtatatgaaaatacagaaatgttaacttagtttttcatagagtattttgagtgtctggtgaaatgaaacattttaagagaagaattacttcacattttaattttgtgaaaatgcatggtttatcaatgtaagcacttcaataatttaacgatttttctgtaagatagtttatattatgcaagaataagctaatgtgattcaaacctatttaatcctatttaatcataattttacccaatgatactttgatatttttttcttgctttttatatcttgaaatttgaacccaggcatgtatattttaaagagtaaggaccccattcatgattatggttaggaggaaaatgtta

SEQ ID NO: 363783 - DNA, 628 bp, Homo sapiens
gggcagccattttaattcatatttgagtgggcggtggcgattggtgttggcggtctggctcagctgggcagggggtaactttactgatttgggggtggtttttagtttaatttttcttttctagcttcccatcgacggtcagtgcgcacgttgtaatcagctgaggccatgtcaggagacggagccacggagcaggcagctgagtatgtcccagagaaggtgaagaaagcggaaaagaaattagaagagaatccatatgaccttgatgcttggagcattctcattcgagaggcacagaatcaacctatagacaaagcacggaagacttatgaacgccttgttgcccagttccccagttctggcagattctggaaactgtacattgaagcagaggttactattttattttattttttcttatatcagtattgcagcattcactgtagtgatagaaaacaagttaggaacatagccaattaggacaaggaggatttaaatgtgtcttacctttattttgtaaaataggtataaaggagtaattaaaatgaatttttgaaatttgggtcttttacaagctgatgattgttgcattttggagttgcaacaacattaaaacagtttcaatggt

SEQ ID NO: 363784 - DNA, 2947 bp, Homo sapiens
gggcagccattttaattcatatttgagtgggcggtggcgattggtgttggcggtctggctcagctgggcagggggtaactttactgatttgggggtggtttttagtttaatttttcttttctagcttcccatcgacggtcagtgcgcacgttgtaatcagctgaggccatgtcaggagacggagccacggagcaggcagctgagtatgtcccagagaaggtgaagaaagcggaaaagaaattagaagagaatccatatgaccttgatgcttggagcattctcattcgagaggcacaggtttagtgatataggattacatttccttctctatgggtccaatcacactacttggttctgcagtgaataatattttcataatcctaacattgtaaatgctgtttattggttttcaattttagaatcaacctatagacaaagcacggaagacttatgaacgccttgttgcccagttccccagttctggcagattctggaaactgtacattgaagcagagattaaagctaaaaattatgacaaggttgaaaagctatttcagagatgccttatgaaggttttgcacattgatttatggaagtgttatctttcatatgtccgagaaaccaagggtaaactaccaagttacaaagaaaaaatggctcaagcatatgactttgcactggataaaattggaatggaaattatgtcctatcagatttgggtggattacatcaatttcctaaaaggcgtggaagctgtaggatcttatgcagaaaatcaaagaataacagctgtccgaagagtttatcaacgaggttgtgttaatccgatgatcaacattgaacagctctggagagactataacaagtatgaagagggtatcaatattcatttagctaaaaaaatgattgaagatcggagtagagattatatgaatgctagacgtgtagcaaaggaatatgagacagtaatgaaaggcttggaccgtaatgctccctcggtgcctcctcagaatactcctcaagaagctcaacaagtagatatgtggaagaaatatatacagtgggaaaagagcaaccctcttcgtacagaggatcagacccttataacaaaaagagttatgtttgcttatgaacagtgcctgcttgtgctgggccatcaccctgatatttggtatgaagctgcccagtatcttgagcagtcaagtaaactgctcgcagaaaagggagatatgaataatgccaaattatttagtgatgaagctgctaatatatatgaaagagccataagcactttattgaagaagaatatgcttctttattttgcatatgcagattatgaagagagtcgcatgaagtatgaaaaggttcacagtatatataacagacttctggcaattgaggatattgaccctaccttggtatatatccaatatatgaaatttgcacggagagcagaaggcatcaaatctggaagaatgatatttaaaaaagcaagagaagataccagaacccgccaccatgtctatgttactgcagcactcatggaatattactgtagtaaggacaaatctgttgcctttaagatttttgagctggggctaaaaaaatatggagacattccagagtatgtcctggcctatattgactatctttctcacctcaatgaggacaataatacccgagttttgtttgaacgagttttaacatctggaagccttcctcctgagaagtctggagaaatctgggcccgatttctagcatttgaaagtaatattggtgatctagctagtatactcaaagtggagaaaagacggtttacagcattcaaagaagagtatgaagggaaagaaacggctttactagtagatagatacaagttcatggatttatatccttgctctgcaagtgaattaaaagcacttggttataaggatgtctcccgtgctaagctagcagctataattccggacccagttgtagctccttctatagtgcctgttctgaaagatgaagtggatagaaaaccagaataccctaaaccagacactcagcagatgattccatttcagccacgacatttagcacctccaggtttacaccctgtacctggtggagtgttcccagtccctcctgcagctgttgttttaatgaaacttctccctcctcctatctgtttccagggtccttttgtacaagtggatgaactgatggaaattttccgaagatgcaagataccaaatactgttgaggaagctgtgaggatcattactggtggggccccagagctagctgtagaaggcaacggccccgtggaaagtaatgcagtactcaccaaggccgtcaaaaggcccaacgaggattcagatgaagatgaagaaaagggagccgttgtcccccctgttcatgacatttacagagcacggcagcagaagcggattcggtagggttttaaacgcctctgcagaaaactcctgtccaggattccttttgcctcaagtggtatgtttaaaagagacaacgctttgttacaaggttcttggaaacaaagttgtattgtcattggtgcctctatcacatggttcttgagaaaaaacaaaccaacctgtgtgaattttagaatacggaacagacctatgctctaagcaaaattaggttttcaaaaatgtgagaacagtacaaagtggcagaaccacattttgttccctcttcaagggtgtcttgtatgtgccgcttgaagatttgtgagtttttcaacagttttattttaaaaactggatggcttatgattgtaaagcattttatcacattttctgaaaacaattgttcttggtttgcttatgtagagtcctgccttattgtttgtttttatttatggcagaatgtatgaaatccgttttgtagtttcaaattttaaaagtcctttaaaaaataaaaggattcagaaaca

SEQ ID NO: 363785 - DNA, 2055 bp, Homo sapiens
ctgggttaatttttcttttgaacagctttattgaagtataatttgtatactataagtccatccattaggtgtacagttcagtggttgttagtagtagattcaatggttgttgttactgttagattcttaagttttaaaagataacttagagtttagcaagaagtgtcattttcccacttccagatatagaggacctcctgagactcttaaaatttaatacacctctgtcaacaattcttaattcatttacatttccatagttacctgccaacctagatattgtacctctgcaagagttaaagtagctaaatatagcatagtcctggtgcctcaaaataagaaactcaattatttctaagtttgagtttgccatccttccatgttcaatgtatttaaaaaatagcagtagtctgactaatgtcagcagatatgtacttgtcattatttttaaaaggcaaatgggatacctggttcagacggcactgttataaatggttttgcattagaactgcagtatagtagaggagggctgaactagaagggaaaaaaacatggcttgcagttactgctctgctactcaatcaccaagagccagatcaaatctcttaatctttctgaagctcaagtttcctcatctataaaaatcaagtgtgataatagttaaacctttctgcataggatttttgtaaggatgaagtgagataatgcatatgaaaatattgttgcatcgtaaaagtgaattaaaaaaattaaaatctttttcaatatcctagaggacaataatacccgagttttgtttgaacgagttttaacatctggaagccttcctcctgagaagtctggagaaatctgggcccgatttctagcatttgaaagtaatattggtgatctagctagtatactcaaagtggagaaaagacggtttacagcattcaaagaagagtatgaagggaaagaaacggctttactagtagatagatacaagttcatggatttatatccttgctctgcaagtgaattaaaagcacttggttataaggatgtctcccgtgctaagctagcagctataattccggacccagttgtagctccttctatagtgcctgttctgaaagatgaagtggatagaaaaccagaataccctaaaccagacactcagcagatgattccatttcagccacgacatttagcacctccaggtttacaccctgtacctggtggagtgttcccagtccctcctgcagctgttgttttaatgaaacttctccctcctcctatctgtttccagggtccttttgtacaagtggatgaactgatggaaattttccgaagatgcaagataccaaatactgttgaggaagctgtgaggatcattactggtggggccccagagctagctgtagaaggcaacggccccgtggaaagtaatgcagtactcaccaaggccgtcaaaaggcccaacgaggattcagatgaagatgaagaaaagggagccgttgtcccccctgttcatgacatttacagagcacggcagcagaagcggattcggtagggttttaaacgcctctgcagaaaactcctgtccaggattccttttgcctcaagtggtatgtttaaaagagacaacgctttgttacaaggttcttggaaacaaagttgtattgtcattggtgcctctatcacatggttcttgagaaaaaacaaaccaacctgtgtgaattttagaatacggaacagacctatgctctaagcaaaattaggttttcaaaaatgtgagaacagtacaaagtggcagaaccacattttgttccctcttcaagggtgtcttgtatgtgccgcttgaagatttgtgagtttttcaacagttttattttaaaaactggatggcttatgattgtaaagcattttatcacattttctgaaaacaattgttcttggtttgcttatgtagagtcctgccttattgtttgtttttatttatggcagaatgtatgaaatccgttttgtagtttcaaattttaaaagtcctttaaaaaataaaaggattcagaaaca

SEQ ID NO: 363786 - DNA, 2928 bp, Homo sapiens
gggcagccattttaattcatatttgagtgggcggtggcgattggtgttggcggtctggctcagctgggcagggggtaactttactgatttgggggtggtttttagtttaatttttcttttctagcttcccatcgacggtcagtgcgcacgttgtaatcagctgaggccatgtcaggagacggagccacggagcaggcagctgagtatgtcccagagaaggtgaagaaagcggaaaagaaattagaagagaatccatatgaccttgatgcttggagcattctcattcgagaggcacagaatcaacctatagacaaagcacggaagacttatgaacgccttgttgcccagttccccagttctggcagattctggaaactgtacattgaagcagagattaaagctaaaaattatgacaaggttgaaaagctatttcagagatgccttatgaaggttttgcacattgatttatggaagtgttatctttcatatgtccgagaaaccaagggtaaactaccaagttacaaagaaaaaatggctcaagcatatgactttgcactggataaaattggaatggaaattatgtcctatcagatttgggtggattacatcaatttcctaaaaggcgtggaagctgtaggatcttatgcagaaaatcaaagaataacagctgtccgaagagtttatcaacgaggttgtgttaatccgatgatcaacattgaacagctctggagagactataacaagtatgaagagggtatcaatattcatttagctaaaaaaatgattgaagatcggagtagagattatatgaatgctagacgtgtagcaaaggaatatgagacagtaatgaaaggcttggaccgtaatgctccctcggtgcctcctcagaatactcctcaagaagctcaacaagtagatatgtggaagaaatatatacagtgggaaaagagcaaccctcttcgtacagaggatcagacccttataacaaaaagagttatgtttgcttatgaacagtgcctgcttgtgctgggccatcaccctgatatttggtatgaagctgcccagtatcttgagcagtcaagtaaactgctcgcagaaaagggagatatgaataatgccaaattatttagtgatgaagctgctaatatatatgaaagagccataagcactttattgaagaagaatatgcttctttattttgcatatgcagattatgaagagagtcgcatgaagtatgaaaaggttcacagtatatataacagacttctggcaattgaggatattgaccctaccttggtatatatccaatatatgaaatttgcacggagagcagaaggcatcaaatctggaagaatgatatttaaaaaagcaagagaagataccagaacccgccaccatgtctatgttactgcagcactcatggaatattactgtagtaaggacaaatctgttgcctttaagatttttgagctggggctaaaaaaatatggagacattccagagtatgtcctggcctatattgactatctttctcacctcaatgaggacaataatacccgagttttgtttgaacgagttttaacatctggaagccttcctcctgagaagtctggagaaatctgggcccgatttctagcatttgaaagtaatattggtgatctagctagtatactcaaagtggagaaaagacggtttacagcattcaaagaagagtatgaagggaaagaaacggctttactagtagatagatacaagttcatggatttatatccttgctctgcaagtgaattaaaagcacttggttataaggatgtctcccgtgctaagctagcagctataattccggacccagttgtagctccttctatagtgcctgttctgaaagatgaagtggatagaaaaccagaataccctaaaccagacactcagcagatgattccatttcagccacgacatttagcacctccaggtttacaccctgtacctggtggagtgttcccagtccctcctgcagctgttgttttaatgaaacttctccctcctcctatctgtttccagggtccttttgtacaagtggatgaactgatggaaattttccgaagatgcaagataccaaatactgttgaggaagctgtgaggatcattactggtggggccccagagctagctgtagaaggcaacggccccgtggaaagtaatgcagtactcaccaaggccgtcaaaaggcccaacgaggattcagatgaagatgaagaaaagggagccgttgtcccccctgttcatgacatttacagagcacggcagcagaagcggattcggtagggttttaaacgcctctgcagaaaactcctgtccaggattccttttgcctcaagtggtatgtttaaaagagacaacgctttgttacaaggttcttggaaacaaagttgtattgtcattggtgcctctatcacatggttcttgagaaaaaacaaaccaacctgtgtgaattttagaatacggaacagacctatgctctaagcaaaattaggttttcaaaaatgtgagaacagtacaaagtggcagaaccacattttgttccctcttcaagggtgtcttgtatgtgccgcttgaagatttgtgagtttttcaacagttttattttaaaaactggatggcttatgattgtaaagcattttatcacattttctgaaaacaattgttcttggtttgcttatgtagagtcctgccttattgtttgtttttatttatggcagaatgtatgaaatccgttttgtagtttcaaattttaaaagtcctttaaaaaataaaaggattcagaaacatcatgcttcctctgcttctttcagattttatttacaataactacttatgttatttatccaataccatttaaaaataaatgtcaggacaaggaaaaaaaaaaaa

SEQ ID NO: 363787 - DNA, 321 bp, Homo sapiens
atagtaatcacattctgtcctttttagacagtgttactataagagagacatatatgcattttacccatgtctcctccaccacttgcaatcacttgaggaattacatactgttcctctgctgtgaataaaaaagaactcagaaaacttctgttgaactgaatgcagattctccctttttactcttaacctcttcttctttagacaatcctggcctagaaatgtccagtatactgggataaggataaattatccatatttattataggtaatcattcatatcgatcaagttttaatcacctctgcacactaaaaatcagggga

SEQ ID NO: 363788 - DNA, 899 bp, Homo sapiens
  misc_feature (55)..(55): n is a, c, g, or t
  misc_feature (93)..(93): n is a, c, g, or t
agtgggggggtaagtggtgtactgggtatggggcacggccccggtgatggagcgnggggagtgccgcgcaccggtgtctcgggcgcacattangtatagtcgcggggtaggggtggtttgcgcggaggggggggcgcgagcaacaaggaaggtgggttacatgcggagagaagcggcccggtggataggtcctataggtggggagcaaggcgccagtaggtttagattttggcagaagggagaggtgggggggaagcgtaggcgtgagagtaggggcgggggggaggccggtgcgagggatcgggggggcgctaggtgagcgcatgtggttagggcgtaaagtcggtggcttatgtgtttgtttttttgtttacaccaaagctaatttttaatgaaattggtttacagaagtaaaaaacaaaaattggaaagcaaagtaataaaacttagtttatataaacaggttgaatgatatatttatcaaatctcacagacatcaggcaaattatagcctggtgacaaaagtgttcatagtgaattagttactcttgtaatacttctataattagttcatcaggaatttcatccacttcactgttataactgagaagactgttctctgcagcttcagctaattcagcatcttcagtagcttctaaaaaataagcatcatcaatgccattatcccagacagcatcagcagatgcacctgttgacagcctgctaggtgatggtttatgaggattctgggtttcattgctcctagtttcatctgcttcatctgttgtaaactcttcttcctttttgaaaagaaacaggagacatattccaacaggtaagggaaaccggaacatcggggagaaaagaccgaaaccccgctgtgccaggggcggcgctcc

SEQ ID NO: 363789 - DNA, 2558 bp, Homo sapiens
cccggattggctgttcggagcggcgaggggcttggcgggagcttccagtcgctcgagagcggagagcggcaccatggccccgcgggggcggcggcggccgcggcctcacaggtctgagagcgcaagacgttcaaagaacactttagaaagaacacattccatgaaagataaagctggtcaaaagtgcaagcctattgacgtgttcgactttcctgataattctgatgtctcaagcattggcaggctgggtgaaaatgagaaagatgaagaaacttatgagacctttgatcctcctttacatagcacagctatatatgctgatgaagaagaattctccaaacattgtggactgtctctctcttcaactcctccaggaaaagaagcaaaaagaagttcagacacttctggaaatgaagcaagtgaaatcgaatctgtaaaaattagtgcaaaaaagccaggaagaaagctcaggcccattagtgatgactctgaaagcattgaagaaagtgatacaaggagaaaagttaaatcagcagagaaaataagtacacaacgtcatgaggttattcgaaccacagcgtcttcagaactttcagagaaaccagctgagtctgtcacttctaaaaagacaggaccccttagtgcccagccctctgttgaaaaagagaacttggcaatagaaagtcaatcgaaaactcagaaaaaagggaagatatctcatgacaaaaggaagaaatcaagaagtaaagccataggctcagatacttctgacattgtgcacatttggtgtccagaaggaatgaaaaccagtgacatcaaggagttgaatattgttttgcctgaatttgagaaaacccacctagagcatcaacaaagaatagaatctaaagtttgtaaggcagccatcgccacattttatgttaatgttaaagaacaattcatcaaaatgcttaaagaaagccagatgttgacaaatctgaaaaggaagaatgctaagatgatttcagatatcgaaaagaaaaggcagcgtatgattgaagtccaggatgaactgcttcggttagagccacagctgaaacaactacaaacaaaatatgatgaacttaaagagagaaagtcttcccttaggaatgcagcatatttcttatctaatttaaaacagctttatcaagattattcagatgttcaagctcaagaaccaaacgtaaaggaaacgtatgattcatccagccttccagctctgttatttaaagcaagaacacttctgggagccgaaagccatctgcgaaatatcaaccatcagttagagaagctccttgaccagggatgagaagagcagtctactaaaatgtgcctataggaagactagtctcatgctgttaccttctgaaactgtacctttataaatcaattgttttgcaaagaagttatggcctacttagaatctaaaatttgttattcaaattaaatggctgtgaacaatgttaaatagcatcagtttgtccaatagttttaaaggccataatcatcttttctggttaatatcttgagtaattttaaaatgttgacaccttaatcggtcccaggtatgagctataataaacttgtaaaattaagttgatgtgaacataattttgattaattaataaggcgatttctcctgaatttacaccaaagctaatttttaatgaaattggtttacagaagtaaaaaacaaaaattggaaagcaaagtaataaaacttagtttatataaacaggttgaatgatatatttatcaaatctcacagacatcaggcaaattatagcctggtgacaaaagtgttcatagtgaattagttactcttgtaatacttctataattagttcatcaggaatttcatccacttcactgttataactgagaagactgttctctgcagcttcagctaattcagcatcttcagtagcttctaaaaaataagcatcatcaatgccattatcccagacagcatcagcagatgcacctgttgacagcctgctaggtgatggtttatgaggattctgggtttcattgctcctagtttcatctgcttcatctgttgtaaactcttcttcctttatttcagtggtgaagggatagagagtgggataggaaaatatttactcaggatatgtgatttaaccttatactctatgttgaagtaaggtattaagtgacagatactaaagtgaatatgcaggaggaatgctgtctccgatatctcaccgtgggaatgagtgcactgattcaaacgttgctgcactgaagctcagacacacttgaaactccaaatttgaaattacctacagttctgtgcacatacttttcaatactccccgacggaagagcaagggtggatttaattttttaacaagtggacagtccagctgaagacaaatcagaagataaatttgctatcttgacaatggacttagtacccatgctttaaattttaaagtatttagcaaatcgtaaacatggattgaaaaaagattaaaaacagttgccaaaatatgactggattgtatattacataa

SEQ ID NO: 363790 - DNA, 2195 bp, Homo sapiens
cccggattggctgttcggagcggcgaggggcttggcgggagcttccagtcgctcgagagcggagagcggcaccatggccccgcgggggcggcggcggccgcggcctcacaggtctgagagcgcaagacgttcaaagaacactttagaaagaacacattccatgaaagataaagctggtcaaaagtgcaagcctattgacgtgttcgactttcctgataattctgatgtctcaagcattggcaggctgggtgaaaatgagaaagatgaagaaacttatgagacctttgatcctcctttacatagcacagctatatatgctgatgaagaagaattctccaaacattgtggactgtctctctcttcaactcctccaggaaaagaagcaaaaagaagttcagacacttctggaaatgaagcaagtgaaatcgaatctgtaaaaattagtgcaaaaaagccaggaagaaagctcaggcccattagtgatgactctgaaagcattgaagaaagtgatacaaggagaaaagttaaatcagcagagaaaataagtacacaacgtcatgaggttattcgaaccacagcgtcttcagaactttcagagaaaccagctgagtctgtcacttctaaaaagacaggaccccttagtgcccagccctctgttgaaaaagagaacttggcaatagaaagtcaatcgaaaactcagaaaaaagggaagatatctcatgacaaaaggaagaaatcaagaagtaaagccataggctcagatacttctgacattgtgcacatttggtgtccagaaggaatgaaaaccagtgacatcaaggagttgaatattgttttgcctgaatttgagaaaacccacctagagcatcaacaaagaatagaatctaaagtttgtaaggcagccatcgccacattttatgttaatgttaaagaacaattcatcaaaatgcttaaagaaagccagatgttgacaaatctgaaaaggaagaatgctaagatgatttcagatatcgaaaagaaaaggcagcgtatgattgaagtccaggatgaactgcttcggttagagccacagctgaaacaactacaaacaaaatatgatgaacttaaagagagaaagtcttcccttaggaatgcagcatatttcttatctaatttaaaacagctttatcaagattattcagatgttcaagctcaagaaccaaacgtaaaggaaacgtatgattcatccagccttccagctctgttatttaaagcaagaacacttctgggagccgaaagccatctgcgaaatatcaaccatcagttagagaagctccttgaccagggatgagaagagcagtctactaaaatgtgcctataggaagactagtctcatgctgttaccttctgaaactgtacctttataaatcaattgttttgcaaagaagttatggcctacttagaatctaaaatttgttattcaaattaaatggctgtgaacaatgttaaatagcatcagtttgtccaatagttttaaaggccataatcatcttttctggttaatatcttgagtaattttaaaatgttgacaccttaatcggtcccaggtatgagctataataaacttgtaaaattaagttgatgtgaacataattttgattaattaataaggcgatttctcctgaatttacaccaaagctaatttttaatgaaattggtttacagaagtaaaaaacaaaaattggaaagcaaagtaataaaacttagtttatataaacaggttgaatgatatatttatcaaatctcacagacatcaggcaaattatagcctggtgacaaaagtgttcatagtgaattagttactcttgtaatacttctataattagttcatcaggaatttcatccacttcactgttataactgagaagactgttctctgcagcttcagctaattcagcatcttcagtagcttctaaaaaataagcatcatcaatgccattatcccagacagcatcagcagatgcacctgttgacagcctgctaggtgatggtttatgaggattctgggtttcattgctcctagtttcatctgcttcatctgttgtaaactcttcttcctttttgaaaagaaacaggagacatattccaacaggtaagggaaaccggaacatcggggagaaaagaccgaaaccccgctgtgccaggggcggcgctcc

SEQ ID NO: 363791 - DNA, 2148 bp, Homo sapiens
cccggattggctgttcggagcggcgaggggcttggcgggagcttccagtcgctcgagagcggagagcggcaccatggccccgcgggggcggcggcggccgcggcctcacaggtctgagagcgcaagacgttcaaagaacactttagaaagaacacattccatgaaagataaagctggtcaaaagtgcaagcctattgacgtgttcgactttcctgataattctgatgtctcaagcattggcaggctgggtgaaaatgagaaagatgaagaaacttatgagacctttgatcctcctttacatagcacagctatatatgctgatgaagaagaattctccaaacattgtggactgtctctctcttcaactcctccaggaaaagaagcaaaaagaagttcagacacttctggaaatgaagcaagtgaaatcgaatctgtaaaaattagtgcaaaaaagccaggaagaaagctcaggcccattagtgatgactctgaaagcattgaagaaagtgatacaaggagaaaagttaaatcagcagagaaaataagtacacaacgtcatgaggttattcgaaccacagcgtcttcagaactttcagagaaaccagctgagtctgtcacttctaaaaagacaggaccccttagtgcccagccctctgttgaaaaagagaacttggcaatagaaagtcaatcgaaaactcagaaaaaagggaagatatctcatgacaaaaggaagaaatcaagaagtaaagccataggctcagatacttctgacattgtgcacatttggtgtccagaaggaatgaaaaccagtgacatcaaggagttgaatattgttttgcctgaatttgagaaaacccacctagagcatcaacaaagaatagaatctaaagtttgtaaggcagccatcgccacattttatgttaatgttaaagaacaattcatcaaaatgcttaaagaaagccagatgttgacaaatctgaaaaggaagaatgctaagatgatttcagatatcgaaaagaaaaggcagcgtatgattgaagtccaggatgaactgcttcggttagagccacagctgaaacaactacaaacaaaatatgatgaacttaaagagagaaagtcttcccttaggaatgcagcatatttcttatctaatttaaaacagctttatcaagattattcagatgttcaagctcaagaaccaaacgtaaaggaaacgtatgattcatccagccttccagctctgttatttaaagcaagaacacttctgggagccgaaagccatctgcgaaatatcaaccatcagttagagaagctccttgaccagggatgagaagagcagtctactaaaatgtgcctataggaagactagtctcatgctgttaccttctgaaactgtacctttataaatcaattgttttgcaaagaagttatggcctacttagaatctaaaatttgttattcaaattaaatggctgtgaacaatgttaaatagcatcagtttgtccaatagttttaaaggccataatcatcttttctggttaatatcttgagtaattttaaaatgttgacaccttaatcggtcccaggtatgagctataataaacttgtaaaattaagttgatgtgaacataattttgattaattaataaggcgatttctcctgaatttacaccaaagctaatttttaatgaaattggtttacagaagtaaaaaacaaaaattggaaagcaaagtaataaaacttagtttatataaacaggttgaatgatatatttatcaaatctcacagacatcaggcaaattatagcctggtgacaaaagtgttcatagtgaattagttactcttgtaatacttctataattagttcatcaggaatttcatccacttcactgttataactgagaagactgttctctgcagcttcagctaattcagcatcttcagtagcttctaaaaaataagcatcatcaatgccattatcccagacagcatcagcagatgcacctgttgacagcctgctaggtgatggtttatgaggattctgggtttcattgctcctagtttcatctgcttcatctgttgtaaactcttcttcctttttgaaaagaggcagtagacaactcccaaggcggtttttacccccaatt

SEQ ID NO: 363792 - DNA, 2496 bp, Homo sapiens
cccggattggctgttcggagcggcgaggggcttggcgggagcttccagtcgctcgagagcggagagcggcaccatggccccgcgggggcggcggcggccgcggcctcacaggtctgagagcgcaagacgttcaaagaacactttagaaagaacacattccatgaaagataaagctggtcaaaagtgcaagcctattgacgtgttcgactttcctgataattctgatgtctcaagcattggcaggctgggtgaaaatgagaaagatgaagaaacttatgagacctttgatcctcctttacatagcacagctatatatgctgatgaagaagaattctccaaacattgtggactgtctctctcttcaactcctccaggaaaagaagcaaaaagaagttcagacacttctggaaatgaagcaagtgaaatcgaatctgtaaaaattagtgcaaaaaagccaggaagaaagctcaggcccattagtgatgactctgaaagcattgaagaaagtgatacaaggagaaaagttaaatcagcagagaaaataagtacacaacgtcatgaggttattcgaaccacagcgtcttcagaactttcagagaaaccagctgagtctgtcacttctaaaaagacaggaccccttagtgcccagccctctgttgaaaaagagaacttggcaatagaaagtcaatcgaaaactcagaaaaaagggaagatatctcatgacaaaaggaagaaatcaagaagtaaagccataggctcagatacttctgacattgtgcacatttggtgtccagaaggaatgaaaaccagtgacatcaaggagttgaatattgttttgcctgaatttgagaaaacccacctagagcatcaacaaagaatagaatctaaagtttgtaaggcagccatcgccacattttatgttaatgttaaagaacaattcatcaaaatgcttaaagaaagccagatgttgacaaatctgaaaaggaagaatgctaaggttagagccacagctgaaacaactacaaacaaaatatgatgaacttaaagagagaaagtcttcccttaggaatgcagcatatttcttatctaatttaaaacagctttatcaagattattcagatgttcaagctcaagaaccaaacgtaaaggaaacgtatgattcatccagccttccagctctgttatttaaagcaagaacacttctgggagccgaaagccatctgcgaaatatcaaccatcagttagagaagctccttgaccagggatgagaagagcagtctactaaaatgtgcctataggaagactagtctcatgctgttaccttctgaaactgtacctttataaatcaattgttttgcaaagaagttatggcctacttagaatctaaaatttgttattcaaattaaatggctgtgaacaatgttaaatagcatcagtttgtccaatagttttaaaggccataatcatcttttctggttaatatcttgagtaattttaaaatgttgacaccttaatcggtcccaggtatgagctataataaacttgtaaaattaagttgatgtgaacataattttgattaattaataaggcgatttctcctgaatttacaccaaagctaatttttaatgaaattggtttacagaagtaaaaaacaaaaattggaaagcaaagtaataaaacttagtttatataaacaggttgaatgatatatttatcaaatctcacagacatcaggcaaattatagcctggtgacaaaagtgttcatagtgaattagttactcttgtaatacttctataattagttcatcaggaatttcatccacttcactgttataactgagaagactgttctctgcagcttcagctaattcagcatcttcagtagcttctaaaaaataagcatcatcaatgccattatcccagacagcatcagcagatgcacctgttgacagcctgctaggtgatggtttatgaggattctgggtttcattgctcctagtttcatctgcttcatctgttgtaaactcttcttcctttatttcagtggtgaagggatagagagtgggataggaaaatatttactcaggatatgtgatttaaccttatactctatgttgaagtaaggtattaagtgacagatactaaagtgaatatgcaggaggaatgctgtctccgatatctcaccgtgggaatgagtgcactgattcaaacgttgctgcactgaagctcagacacacttgaaactccaaatttgaaattacctacagttctgtgcacatacttttcaatactccccgacggaagagcaagggtggatttaattttttaacaagtggacagtccagctgaagacaaatcagaagataaatttgctatcttgacaatggacttagtacccatgctttaaattttaaagtatttagcaaatcgtaaacatggattgaaaaaagattaaaaacagttgccaaaatatgactggattgtatattacataa

SEQ ID NO: 363793 - DNA, 2546 bp, Homo sapiens
gcgggaagggtctcggcttgctgcagacggtgcacaaagccatacgccaagacgatctgaagagaacaggagttcccccgggcctgggaaggctgcctggaggaggagcgcaagacgttcaaagaacactttagaaagaacacattccatgaaagataaagctggtcaaaagtgcaagcctattgacgtgttcgactttcctgataattctgatgtctcaagcattggcaggctgggtgaaaatgagaaagatgaagaaacttatgagacctttgatcctcctttacatagcacagctatatatgctgatgaagaagaattctccaaacattgtggactgtctctctcttcaactcctccaggaaaagaagcaaaaagaagttcagacacttctggaaatgaagcaagtgaaatcgaatctgtaaaaattagtgcaaaaaagccaggaagaaagctcaggcccattagtgatgactctgaaagcattgaagaaagtgatacaaggagaaaagttaaatcagcagagaaaataagtacacaacgtcatgaggttattcgaaccacagcgtcttcagaactttcagagaaaccagctgagtctgtcacttctaaaaagacaggaccccttagtgcccagccctctgttgaaaaagagaacttggcaatagaaagtcaatcgaaaactcagaaaaaagggaagatatctcatgacaaaaggaagaaatcaagaagtaaagccataggctcagatacttctgacattgtgcacatttggtgtccagaaggaatgaaaaccagtgacatcaaggagttgaatattgttttgcctgaatttgagaaaacccacctagagcatcaacaaagaatagaatctaaagtttgtaaggcagccatcgccacattttatgttaatgttaaagaacaattcatcaaaatgcttaaagaaagccagatgttgacaaatctgaaaaggaagaatgctaagatgatttcagatatcgaaaagaaaaggcagcgtatgattgaagtccaggatgaactgcttcggttagagccacagctgaaacaactacaaacaaaatatgatgaacttaaagagagaaagtcttcccttaggaatgcagcatatttcttatctaatttaaaacagctttatcaagattattcagatgttcaagctcaagaaccaaacgtaaaggaaacgtatgattcatccagccttccagctctgttatttaaagcaagaacacttctgggagccgaaagccatctgcgaaatatcaaccatcagttagagaagctccttgaccagggatgagaagagcagtctactaaaatgtgcctataggaagactagtctcatgctgttaccttctgaaactgtacctttataaatcaattgttttgcaaagaagttatggcctacttagaatctaaaatttgttattcaaattaaatggctgtgaacaatgttaaatagcatcagtttgtccaatagttttaaaggccataatcatcttttctggttaatatcttgagtaattttaaaatgttgacaccttaatcggtcccaggtatgagctataataaacttgtaaaattaagttgatgtgaacataattttgattaattaataaggcgatttctcctgaatttacaccaaagctaatttttaatgaaattggtttacagaagtaaaaaacaaaaattggaaagcaaagtaataaaacttagtttatataaacaggttgaatgatatatttatcaaatctcacagacatcaggcaaattatagcctggtgacaaaagtgttcatagtgaattagttactcttgtaatacttctataattagttcatcaggaatttcatccacttcactgttataactgagaagactgttctctgcagcttcagctaattcagcatcttcagtagcttctaaaaaataagcatcatcaatgccattatcccagacagcatcagcagatgcacctgttgacagcctgctaggtgatggtttatgaggattctgggtttcattgctcctagtttcatctgcttcatctgttgtaaactcttcttcctttatttcagtggtgaagggatagagagtgggataggaaaatatttactcaggatatgtgatttaaccttatactctatgttgaagtaaggtattaagtgacagatactaaagtgaatatgcaggaggaatgctgtctccgatatctcaccgtgggaatgagtgcactgattcaaacgttgctgcactgaagctcagacacacttgaaactccaaatttgaaattacctacagttctgtgcacatacttttcaatactccccgacggaagagcaagggtggatttaattttttaacaagtggacagtccagctgaagacaaatcagaagataaatttgctatcttgacaatggacttagtacccatgctttaaattttaaagtatttagcaaatcgtaaacatggattgaaaaaagattaaaaacagttgccaaaatatgactggattgtatattacataa

SEQ ID NO: 363794 - DNA, 2525 bp, Homo sapiens
cccggattggctgttcggagcggcgaggggcttggcgggagcttccagtcgctcgagagcggagagcggcaccatggccccgcgggggcggcggcggccgcggcctcacaggtctgagagcgcaagacgttcaaagaacactttagaaagaacacattccatgaaagataaagctggtcaaaagtgcaagcctattgacgtgttcgactttcctgataattctgatgtctcaagcattggcaggctgggtgaaaatgagaaagatgaagaaacttatgagacctttgatcctcctttacatagcacagctatatatgctgatgaagaagaattctccaaacattgtggactgtctctctcttcaactcctccaggaaaagaagcaaaaagaagttcagacacttctggaaatgaagcaagtgaaatcgaatctgtaaaaattagtgcaaaaaagccaggaagaaagctcaggcccattagtgatgactctgaaagcattgaagaaagtgatacaaggagaaaagttaaatcagcagagaaaataagtacacaacgtcatgaggttattcgaaccacagcgtcttcagaactttcagagaaaccagctgagtctgtcacttctaaaaagacaggaccccttagtgcccagccctctgttgaaaaagagaacttggcaatagaaagtcaatcgaaaactcagaaaaaagggaagatatctcatgacaaaaggaagaaatcaagaagtaaagccataggctcagaaggaatgaaaaccagtgacatcaaggagttgaatattgttttgcctgaatttgagaaaacccacctagagcatcaacaaagaatagaatctaaagtttgtaaggcagccatcgccacattttatgttaatgttaaagaacaattcatcaaaatgcttaaagaaagccagatgttgacaaatctgaaaaggaagaatgctaagatgatttcagatatcgaaaagaaaaggcagcgtatgattgaagtccaggatgaactgcttcggttagagccacagctgaaacaactacaaacaaaatatgatgaacttaaagagagaaagtcttcccttaggaatgcagcatatttcttatctaatttaaaacagctttatcaagattattcagatgttcaagctcaagaaccaaacgtaaaggaaacgtatgattcatccagccttccagctctgttatttaaagcaagaacacttctgggagccgaaagccatctgcgaaatatcaaccatcagttagagaagctccttgaccagggatgagaagagcagtctactaaaatgtgcctataggaagactagtctcatgctgttaccttctgaaactgtacctttataaatcaattgttttgcaaagaagttatggcctacttagaatctaaaatttgttattcaaattaaatggctgtgaacaatgttaaatagcatcagtttgtccaatagttttaaaggccataatcatcttttctggttaatatcttgagtaattttaaaatgttgacaccttaatcggtcccaggtatgagctataataaacttgtaaaattaagttgatgtgaacataattttgattaattaataaggcgatttctcctgaatttacaccaaagctaatttttaatgaaattggtttacagaagtaaaaaacaaaaattggaaagcaaagtaataaaacttagtttatataaacaggttgaatgatatatttatcaaatctcacagacatcaggcaaattatagcctggtgacaaaagtgttcatagtgaattagttactcttgtaatacttctataattagttcatcaggaatttcatccacttcactgttataactgagaagactgttctctgcagcttcagctaattcagcatcttcagtagcttctaaaaaataagcatcatcaatgccattatcccagacagcatcagcagatgcacctgttgacagcctgctaggtgatggtttatgaggattctgggtttcattgctcctagtttcatctgcttcatctgttgtaaactcttcttcctttatttcagtggtgaagggatagagagtgggataggaaaatatttactcaggatatgtgatttaaccttatactctatgttgaagtaaggtattaagtgacagatactaaagtgaatatgcaggaggaatgctgtctccgatatctcaccgtgggaatgagtgcactgattcaaacgttgctgcactgaagctcagacacacttgaaactccaaatttgaaattacctacagttctgtgcacatacttttcaatactccccgacggaagagcaagggtggatttaattttttaacaagtggacagtccagctgaagacaaatcagaagataaatttgctatcttgacaatggacttagtacccatgctttaaattttaaagtatttagcaaatcgtaaacatggattgaaaaaagattaaaaacagttgccaaaatatgactggattgtatattacataa

SEQ ID NO: 363795 - DNA, 2218 bp, Homo sapiens
cccggattggctgttcggagcggcgaggggcttggcgggagcttccagtcgctcgagagcggagagcggcaccatggccccgcgggggcggcggcggccgcggcctcacaggtctgagagcgcaagacgttcaaagaacactttagaaagaacacattccatgaaagataaagctggtcaaaagtgcaagcctattgacgtgttcgactttcctgataattctgatgtctcaagcattggcaggctgggtgaaaatgagaaagatgaagaaacttatgagacctttgatcctcctttacatagcacagctatatatgctgatgaagaagaattctccaaacattgtggactgtctctctcttcaactcctccaggaaaagaagcaaaaagaagttcagacacttctggaaatgaagcaagtgaaatcgaatctgtaaaaattagtgcaaaaaagccaggaagaaagctcaggcccattagtgatgactctgaaagcattgaagaaagtgatacaaggagaaaagttaaatcagcagagaaaataagtacacaacgtcatgaggttattcgaaccacagcgtcttcagaactttcagagaaaccagctgagtctgtcacttctaaaaagacaggaccccttagtgcccagccctctgttgaaaaagagaacttggcaatagaaagtcaatcgaaaactcagaaaaaagggaagatatctcatgacaaaaggaagaaatcaagaagtaaagccataggctcagatacttctgacattgtgcacatttggtgtccagaaggaatgaaaaccagtgacatcaaggagttgaatattgttttgcctgaatttgagaaaacccacctagagcatcaacaaagaatagaatctaaagtttgtaaggcagccatcgccacattttatgttaatgttaaagaacaattcatcaaaatgcttaaagaaagccagatgttgacaaatctgaaaaggaagaatgctaagatgatttcagatatcgaaaagaaaaggcagcgtatgattgaagtccaggatgaactgcttcggttagagccacagctgaaacaactacaaacaaaatatgatgaacttaaagagagaaagtcttcccttaggaatgcagcatatttcttatctaatttaaaacagctttatcaagattattcagatgttcaagctcaagaaccaaacgtaaaggaaacgtatgattcatccagccttccagctctgttatttaaagcaagaacacttctgggagccgaaagccatctgcgaaatatcaaccatcagttagagaagctccttgaccagggatgagaagagcagtctactaaaatgtgcctataggaagactagtctcatgctgttaccttctgaaactgtacctttataaatcaattgttttgcaaagaagttatggcctacttagaatctaaaatttgttattcaaattaaatggctgtgaacaatgttaaatagcatcagtttgtccaatagttttaaaggccataatcatcttttctggttaatatcttgagtaattttaaaatgttgacaccttaatcggtcccaggtatgagctataataaacttgtaaaattaaaaaaaaaaaaaaaaaaaaaaaaaaaaaaaaaaaaaaaaaaaaaaaaaaaaaaaaaaaaaaaaaaaaaaaaaaaaaaaaagaaacaaaaaaaaaaagagggggggcgccggacaaaataattacttctcgcaggggagggacacgacaactaagtagcgaacacccaagttgttgtgttatgtaaaagaagaagggcgcgcacccaaagataagaggcgggtgatatataaaataaatagcagcagcaacgagggaggaagagcgagcaattatacaaaacacacgtgcaggaggaggcaaaaaacaatcaatccgctttgacggacatatcgtgtctagtaggaaagacagcaacaccaccaactcaactaggtgtcgggggggggaaacaacaactatagagaggaacaacaaaccccaccacagaagaaaatatagaaaaagacgatgcccgaagcgagcaaaataaataaaaacatacttcgacgacggatgcagctagcatgtgaccaaacaaaacaagcacacgcatatatctagcctacccgaacggaaaagaacgtagcgcccgagggacgcaatcagtcatagaacaaaagact

SEQ ID NO: 363796 - DNA, 1655 bp, Homo sapiens
cccggattggctgttcggagcggcgaggggcttggcgggagcttccagtcgctcgagagcggagagcggcaccatggccccgcgggggcggcggcggccgcggcctcacaggtctgagagcgcaagacgttcaaagaacactttagaaagaacacattccatgaaagataaagctggtcaaaagtgcaagcctattgacgtgttcgactttcctgataattctgatgtctcaagcattggcaggctgggtgaaaatgagaaagatgaagaaacttatgagacctttgatcctcctttacatagcacagctatatatgctgatgaagaagaattctccaaacattgtggactgtctctctcttcaactcctccaggaaaagaagcaaaaagaagttcagacacttctggaaatgaagcaagtgaaatcgaatctgtaaaaattagtgcaaaaaagccaggaagaaagctcaggcccattagtgatgactctgaaagcattgaagaaagtgatacaaggagaaaagttaaatcagcagagaaaataagtacacaacgtcatgaggttattcgaaccacagcgtcttcagaactttcagagaaaccagctgagtctgtcacttctaaaaagacaggaccccttagtgcccagccctctgttgaaaaagagaacttggcaatagaaagtcaatcgaaaactcagaaaaaagggaagatatctcatgacaaaaggaagaaatcaagaagtaaagccataggctcagatacttctgacattgtgcacatttggtgtccagaaggaatgaaaaccagtgacatcaaggagttgaatattgttttgcctgaatttgagaaaacccacctagagcatcaacaaagaatagaatctaaagtttgtaaggcagccatcgccacattttatgttaatgttaaagaacaattcatcaaaatgcttaaagaaagccagatgttgacaaatctgaaaaggaagaatgctaagatgatttcagatatcgaaaagaaaaggcagcgtatgattgaagtccaggatgaactgcttcggttagagccacagctgaaacaactacaaacaaaatatgatgaacttaaagagagaaagtcttcccttaggaatgcagcatatttcttatctaatttaaaacagctttatcaagattattcagatgttcaagctcaagaaccaaacgtaaaggaaacgtatgattcatccagccttccagctctgttatttaaagcaagaacacttctgggagccgaaagccatctgcgaaatatcaaccatcagttagagaagctccttgaccagggatgagaagagcagtctactaaaatgtgcctataggaagactagtctcatgctgttaccttctgaaactgtacctttataaatcaattgttttgcaaagaagttatggcctacttagaatctaaaatttgttattcaaattaaatggctgtgaacaatgttaaatagcatcagtttgtccaatagttttaaaggccataatcatcttttctggttaatatcttgagtaattttaaaatgttgacaccttaatcggtcccaggtatgagctataataaacttgtaaaattctaggcctaatcctagaaatttcactagcagtgatgagaac

SEQ ID NO: 363797 - DNA, 2476 bp, Homo sapiens
atgggcagtactcagacaaggactcttaggacaccccccacaggcacctgtgctctcctgagcagcttattccagaaaactcagaaaaaagggaagatatctcatgacaaaaggaagaaatcaagaagtaaagccataggctcagcagaaataggagaaccagcgagacagcagttagagtgaaagtgtatgtaggggtttgcgagactgtgcacagggataagaaatacttctgacattgtgcacatttggtgtccagaaggaatgaaaaccagtgacatcaaggagttgaatattgttttgcctgaatttgagaaaacccacctagagcatcaacaaagaatagaatctaaagtttgtaaggcagccatcgccacattttatgttaatgttaaagaacaattcatcaaaatgcttaaagaaagccagatgttgacaaatctgaaaaggaagaatgctaagatgaagaaactcagccactgagagatgaaacagtttgccccaagtcacacattttcatccaggcactgacagtcttccactggttttattagactttggaaagtggacaagatttgataagaggaaggagcactgggaaggctttttctccatggtttctgtgttagactgtagtgcctggctccgctggtgcgagcctctgaatgtcaaccaggcatacatttgatccagtagttcccaagacttgaacggcttgatgaatttcagcatttataaggaatattcttctgtggatatcactgctaattattcattgtgcattgtatttcagagattttttttcctacattttaaactgaaacccagaatcttttacacattcgtagtttcagagccaaagcaagtcatctagttggccagccccggttcttcacactcgctcagcgtacttacaacctcagtttcaccacgataggctggtacattttattatttgtcacttatttttgttttaggttagagccacagctgaaacaactacaaacaaaatatgatgaacttaaagagagaaagtcttcccttaggaatgcagcatatttcttatctaatttaaaacagctttatcaagattattcagatgttcaagctcaagaaccaaacgtaaaggaaacgtatgattcatccagccttccagctctgttatttaaagcaagaacacttctgggagccgaaagccatctgcgaaatatcaaccatcagttagagaagctccttgaccagggatgagaagagcagtctactaaaatgtgcctataggaagactagtctcatgctgttaccttctgaaactgtacctttataaatcaattgttttgcaaagaagttatggcctacttagaatctaaaatttgttattcaaattaaatggctgtgaacaatgttaaatagcatcagtttgtccaatagttttaaaggccataatcatcttttctggttaatatcttgagtaattttaaaatgttgacaccttaatcggtcccaggtatgagctataataaacttgtaaaattaagttgatgtgaacataattttgattaattaataaggcgatttctcctgaatttacaccaaagctaatttttaatgaaattggtttacagaagtaaaaaacaaaaattggaaagcaaagtaataaaacttagtttatataaacaggttgaatgatatatttatcaaatctcacagacatcaggcaaattatagcctggtgacaaaagtgttcatagtgaattagttactcttgtaatacttctataattagttcatcaggaatttcatccacttcactgttataactgagaagactgttctctgcagcttcagctaattcagcatcttcagtagcttctaaaaaataagcatcatcaatgccattatcccagacagcatcagcagatgcacctgttgacagcctgctaggtgatggtttatgaggattctgggtttcattgctcctagtttcatctgcttcatctgttgtaaactcttcttcctttatttcagtggtgaagggatagagagtgggataggaaaatatttactcaggatatgtgatttaaccttatactctatgttgaagtaaggtattaagtgacagatactaaagtgaatatgcaggaggaatgctgtctccgatatctcaccgtgggaatgagtgcactgattcaaacgttgctgcactgaagctcagacacacttgaaactccaaatttgaaattacctacagttctgtgcacatacttttcaatactccccgacggaagagcaagggtggatttaattttttaacaagtggacagtccagctgaagacaaatcagaagataaatttgctatcttgacaatggacttagtacccatgctttaaattttaaagtatttagcaaatcgtaaacatggattgaaaaaagattaaaaacagttgccaaaatatgactggattgtatattacataa

SEQ ID NO: 363798 - DNA, 1719 bp, Homo sapiens
cccggattggctgttcggagcggcgaggggcttggcgggagcttccagtcgctcgagagcggagagcggcaccatggccccgcgggggcggcggcggccgcggcctcacaggtctgagagcgcaagacgttcaaagaacactttagaaagaacacattccatgaaagataaagctggtcaaaagtgcaagcctattgacgtgttcgactttcctgataattctgatgtctcaagcattggcaggctgggtgaaaatgagaaagatgaagaaacttatgagacctttgatcctcctttacatagcacagctatatatgctgatgaagaagaattctccaaacattgtggactgtctctctcttcaactcctccaggaaaagaagcaaaaagaagttcagacacttctggaaatgaagcaagtgaaatcgaatctgtaaaaattagtgcaaaaaagccaggaagaaagctcaggcccattagtgatgactctgaaagcattgaagaaagtgatacaaggagaaaagttaaatcagcagagaaaataagtacacaacgtcatgaggttattcgaaccacagcgtcttcagaactttcagagaaaccagctgagtctgtcacttctaaaaagacaggaccccttagtgcccagccctctgttgaaaaagagaacttggcaatagaaagtcaatcgaaaactcagaaaaaagggaagatatctcatgacaaaaggaagaaatcaagaagtaaagccataggctcagatacttctgacattgtgcacatttggtgtccagaaggaatgaaaaccagtgacatcaaggagttgaatattgttttgcctgaatttgagaaaacccacctagagcatcaacaaagaatagaatctaaagtttgtaaggcagccatcgccacattttatgttaatgttaaagaacaattcatcaaaatgcttaaagaaagccagatgttgacaaatctgaaaaggaagaatgctaagatgaagaaactcagccactgagagatgaaacagtttgccccaagtcacacattttcatccaggcactgacagtcttccactggttttattagactttggaaagtggacaagatttgataagaggaaggagcactgggaaggctttttctccatggtttctgtgttagactgtagtgcctggctccgctggtgcgagcctctgaatgtcaaccaggcatacatttgatccagtagttcccaagacttgaacggcttgatgaatttcagcatttataaggaatattcttctgtggatatcactgctaattattcattgtgcattgtatttcagagattttttttcctacattttaaactgaaacccagaatcttttacacattcgtagtttcagagccaaagcaagtcatctagttggccagccccggttcttcacactcgctcagcgtacttacaacctcagtttcaccacgataggctggtacattttattatttgtcacttatttttgttttaggttagagccacagctgaaacaactacaaacaaaatatgatgaacttaaagagagaaagtcttcccttaggaatgcagcatatttcttatctaatttaaaacagctttatcaagattattcagatgttcaagctcaagaaccaaacgtaaaggaaacggtaactccaattttactttttaccatgcttcagaagatgattgtgggagg

SEQ ID NO: 363799 - DNA, 1931 bp, Homo sapiens
tattttatgttgggtttgtattctaattttaacatgaatcattaagaacatttggattggcagcctttgagacatttaattgattctcccaataaataatttcttgagatgatagatttgggttttcttttttccttaagaacttttatggatctggtgttctcattccattagttatttcagttaaagtaaaacctgtcttacagttttctgtgttttaaaatagacatgatatcaagcagattctacacagcacgagcagacctgcccaaaccaagccttgacatgtcccagatgtgatttcctgtctccagtaatagagatgatacaattctttgaatcagctggtcttctgggataagaagatcagttcaagctttgcagagcagctccctagcaactttgtgatcaattatattctaagggaaatggattaaaaccaattgtcttaatggtcctagttaaaaatgagaggaggagtagttaatggaaagctcaatcaaaatttgcattagtcataagattgggctatctaaggacaaggttatgagtttttgatattgctaattatataattttctttcaacagtatgattcatccagccttccagctctgttatttaaagcaagaacacttctgggagccgaaagccatctgcgaaatatcaaccatcagttagagaagctccttgaccagggatgagaagagcagtctactaaaatgtgcctataggaagactagtctcatgctgttaccttctgaaactgtacctttataaatcaattgttttgcaaagaagttatggcctacttagaatctaaaatttgttattcaaattaaatggctgtgaacaatgttaaatagcatcagtttgtccaatagttttaaaggccataatcatcttttctggttaatatcttgagtaattttaaaatgttgacaccttaatcggtcccaggtatgagctataataaacttgtaaaattaagttgatgtgaacataattttgattaattaataaggcgatttctcctgaatttacaccaaagctaatttttaatgaaattggtttacagaagtaaaaaacaaaaattggaaagcaaagtaataaaacttagtttatataaacaggttgaatgatatatttatcaaatctcacagacatcaggcaaattatagcctggtgacaaaagtgttcatagtgaattagttactcttgtaatacttctataattagttcatcaggaatttcatccacttcactgttataactgagaagactgttctctgcagcttcagctaattcagcatcttcagtagcttctaaaaaataagcatcatcaatgccattatcccagacagcatcagcagatgcacctgttgacagcctgctaggtgatggtttatgaggattctgggtttcattgctcctagtttcatctgcttcatctgttgtaaactcttcttcctttatttcagtggtgaagggatagagagtgggataggaaaatatttactcaggatatgtgatttaaccttatactctatgttgaagtaaggtattaagtgacagatactaaagtgaatatgcaggaggaatgctgtctccgatatctcaccgtgggaatgagtgcactgattcaaacgttgctgcactgaagctcagacacacttgaaactccaaatttgaaattacctacagttctgtgcacatacttttcaatactccccgacggaagagcaagggtggatttaattttttaacaagtggacagtccagctgaagacaaatcagaagataaatttgctatcttgacaatggacttagtacccatgctttaaattttaaagtatttagcaaatcgtaaacatggattgaaaaaagattaaaaacagttgccaaaatatgactggattgtatattacataa

SEQ ID NO: 363800 - DNA, 1515 bp, Homo sapiens
cccggattggctgttcggagcggcgaggggcttggcgggagcttccagtcgctcgagagcggagagcggcaccatggccccgcgggggcggcggcggccgcggcctcacaggtctgagagcgcaagacgttcaaagaacactttagaaagaacacattccatgaaagataaagctggtcaaaagtgcaagcctattgacgtgttcgactttcctgataattctgatgtctcaagcattggcaggctgggtgaaaatgagaaagatgaagctccttgaccagggatgagaagagcagtctactaaaatgtgcctataggaagactagtctcatgctgttaccttctgaaactgtacctttataaatcaattgttttgcaaagaagttatggcctacttagaatctaaaatttgttattcaaattaaatggctgtgaacaatgttaaatagcatcagtttgtccaatagttttaaaggccataatcatcttttctggttaatatcttgagtaattttaaaatgttgacaccttaatcggtcccaggtatgagctataataaacttgtaaaattaagttgatgtgaacataattttgattaattaataaggcgatttctcctgaatttacaccaaagctaatttttaatgaaattggtttacagaagtaaaaaacaaaaattggaaagcaaagtaataaaacttagtttatataaacaggttgaatgatatatttatcaaatctcacagacatcaggcaaattatagcctggtgacaaaagtgttcatagtgaattagttactcttgtaatacttctataattagttcatcaggaatttcatccacttcactgttataactgagaagactgttctctgcagcttcagctaattcagcatcttcagtagcttctaaaaaataagcatcatcaatgccattatcccagacagcatcagcagatgcacctgttgacagcctgctaggtgatggtttatgaggattctgggtttcattgctcctagtttcatctgcttcatctgttgtaaactcttcttcctttatttcagtggtgaagggatagagagtgggataggaaaatatttactcaggatatgtgatttaaccttatactctatgttgaagtaaggtattaagtgacagatactaaagtgaatatgcaggaggaatgctgtctccgatatctcaccgtgggaatgagtgcactgattcaaacgttgctgcactgaagctcagacacacttgaaactccaaatttgaaattacctacagttctgtgcacatacttttcaatactccccgacggaagagcaagggtggatttaattttttaacaagtggacagtccagctgaagacaaatcagaagataaatttgctatcttgacaatggacttagtacccatgctttaaattttaaagtatttagcaaatcgtaaacatggattgaaaaaagattaaaaacagttgccaaaatatgactggattgtatattacataa

SEQ ID NO: 363801 - DNA, 359 bp, Homo sapiens
tggcaaaatacaaaatttgccgcctttgcccctcatttttttgttggtccataaaacccaagttatccctttttattttatagatgaagaaactcagccactgagagatgaaacagtttgccccaagtcacacattttcatccaggcactgacagtcttccactggttttattagactttggaaagtggacaagatttgataagaggaaggagcactgggaaggctttttctccatggtttctgtgttagactgtagtgcctggctccgctggtgcgagcctctgaatgtcaaccaggcatacatttgatccagtagttcccaagacttgaacggcttgatgaatttcagcatttataa

SEQ ID NO: 363802 - DNA, 314 bp, Homo sapiens
ccatcagttagagaagctccttgaccagggatgagaagagcagtctactaaaatgtgcctataggaagactagtctcatgctgttaccttctgaaactgtacctttataaatcaattgttttgcaaagaagttatggcctacttagaatctaaaatttgttattcaaattaaatggctgtgaacaatgttaaatagcatcagtttgtccaatagttttaaaggccataatcatcttttctggttaatatcttgagtaattttaaaatgttgacaccttaatcggtcccaggtatgagctataataaacttgtaa

SEQ ID NO: 363803 - DNA, 703 bp, Homo sapiens
cccggattggctgttcggagcggcgaggggcttggcgggagcttccagtcgctcgagagcggagagcggcaccatggccccgcgggggcggcggcggccgcggcctcacaggtctgagagcgcaagacgttcaaagaacactttagaaagaacacattccatgaaagataaagctggtcaaaagtgcaagcctattgacgtgttcgactttcctgataattctgatgtctcaagcattggcaggctgggtgaaaatgagaaagatgaagaaacttatgagacctttgatcctcctttacatagcacagctatatatgctgatgaagaagaattctccaaacattgtggactgtctctctcttcaactcctccaggaaaagaagcaaaaagaagttcagacacttctggaaatgaagcaagtgaaatcgaatctgtaaaaattagtgcaaaaaagccaggaagaaagctcaggcccattagtgatgactctgaaagcattgaagaaagtgatacaaggagaaaagttaaatcagcagagaaaataagtacacaacgtcatgaggttattcgaaccacagcgtcttcagaactttcagagaaaccagctgagtctgtcacttctaaaaagacaggaccccttagtgcccagcccttttggggttttttttggggtaaacaaaataaatttatatgagggggcgcc

SEQ ID NO: 363804 - DNA, 1614 bp, Homo sapiens
cccggattggctgttcggagcggcgaggggcttggcgggagcttccagtcgctcgagagcggagagcggcaccatggccccgcgggggcggcggcggccgcggcctcacaggtctgagagcgcaagacgttcaaagaacactttagaaagaacacattccatgaaagataaagctggtcaaaagtgcaagcctattgacgtgttcgactttcctgataattctgatgtctcaagcattggcaggctgggtgaaaatgagaaagatgaagaaacttatgagacctttgatcctcctttacatagcacagctatatatgctgatgaagaagaattctccaaacattgtggactgtctctctcttcaactcctccaggaaaagaagcaaaaagaagttcagacacttctggaaatgaagcaagtgaaatcgaatctgtaaaaattagtgcaaaaaagccaggaagaaagctcaggcccattagtgatgactctgaaagcattgaagaaagtgatacaaggagaaaagttaaatcagcagagaaaataagtacacaacgtcatgaggttattcgaaccacagcgtcttcagaactttcagagaaaccagctgagtctgtcacttctaaaaagacaggaccccttagtgcccagccctctgttgaaaaagagaacttggcaatagaaagtcaatcgaaaactcagaaaaaagggaagatatctcatgacaaaaggaagaaatcaagaagtaaagccataggctcagatacttctgacattgtgcacatttggtgtccagaaggaatgaaaaccagtgacatcaaggagttgaatattgttttgcctgaatttgagaaaacccacctagagcatcaacaaagaatagaatctaaagtttgtaaggcagccatcgccacattttatgttaatgttaaagaacaattcatcaaaatgcttaaagaaagccagatgttgacaaatctgaaaaggaagaatgctaagatgatttcagatatcgaaaagaaaaggcagcgtatgattgaagtccaggatgaactgcttcggttagagccacagctgaaacaactacaaacaaaatatgatgaacttaaagagagaaagtcttcccttaggaatgcagcatatttcttatctaatttaaaacagctttatcaagattattcagatgttcaagctcaagaaccaaacgtaaaggaaacgtatgattcatccagccttccagctctgttatttaaagcaagaacacttctgggagccgaaagccatctgcgaaatatcaaccatcagttagagaagctccttgaccagggatgagaagagcagtctactaaaatgtgcctataggaagactagtctcatgctgttaccttctgaaactgtacctttataaatcaattgttttgcaaagaagttatggcctacttagaatctaaaatttgttattcaaattaaatggctgtgaacaatgttaaatagcatcagtttgtccaatagttttaaaggccataatcatcttttctggttaatatcttgagtaattttaaaatgttgacaccttaatcggtcccaggtatgagctataataaacttgtaaaatt

SEQ ID NO: 363805 - DNA, 2160 bp, Homo sapiens
  misc_feature (2118)..(2118): n is a, c, g, or t
  misc_feature (2126)..(2126): n is a, c, g, or t
  misc_feature (2144)..(2144): n is a, c, g, or t
  misc_feature (2148)..(2148): n is a, c, g, or t
cccggattggctgttcggagcggcgaggggcttggcgggagcttccagtcgctcgagagcggagagcggcaccatggccccgcgggggcggcggcggccgcggcctcacaggtctgagagcgcaagacgttcaaagaacactttagaaagaacacattccatgaaagataaagctggtcaaaagtgcaagcctattgacgtgttcgactttcctgataattctgatgtctcaagcattggcaggctgggtgaaaatgagaaagatgaagaaacttatgagacctttgatcctcctttacatagcacagctatatatgctgatgaagaagaattctccaaacattgtggactgtctctctcttcaactcctccaggaaaagaagcaaaaagaagttcagacacttctggaaatgaagcaagtgaaatcgaatctgtaaaaattagtgcaaaaaagccaggaagaaagctcaggcccattagtgatgactctgaaagcattgaagaaagtgatacaaggagaaaagttaaatcagcagagaaaataagtacacaacgtcatgaggttattcgaaccacagcgtcttcagaactttcagagaaaccagctgagtctgtcacttctaaaaagacaggaccccttagtgcccagccctctgttgaaaaagagaacttggcaatagaaagtcaatcgaaaactcagaaaaaagggaagatatctcatgacaaaaggaagaaatcaagaagtaaagccataggctcagatacttctgacattgtgcacatttggtgtccagaaggaatgaaaaccagtgacatcaaggagttgaatattgttttgcctgaatttgagaaaacccacctagagcatcaacaaagaatagaatctaaagtttgtaaggcagccatcgccacattttatgttaatgttaaagaacaattcatcaaaatgcttaaagaaagccagatgttgacaaatctgaaaaggaagaatgctaagatgatttcagatatcgaaaagaaaaggcagcgtatgattgaagtccaggatgaactgcttcggttagagccacagctgaaacaactacaaacaaaatatgatgaacttaaagagagaaagtcttcccttaggaatgcagcatatttcttatctaatttaaaacagctttatcaagattattcagatgttcaagctcaagaaccaaacgtaaaggaaacgtatgattcatccagccttccagctctgttatttaaagcaagaacacttctgggagccgaaagccatctgcgaaatatcaaccatcagttagagaagctccttgaccagggatgagaagagcagtctactaaaatgtgcctataggaagactagtctcatgctgttaccttctgaaactgtacctttataaatcaattgttttgcaaagaagttatggcctacttagaatctaaaatttgttattcaaattaaatggctgtgaacaatgttaaatagcatcagtttgtccaatagttttaaaggccataatcatcttttctggttaatatcttgagtaattttaaaatgttgacaccttaatcggtcccaggtatgagctataataaacttgtaaaattaagttgatgtgaacataattttgattaattaataaggcgatttctcctgaatttacaccaaagctaatttttaatgaaattggtttacagaagtaaaaaacaaaaattggaaagcaaagtaataaaacttagtttatataaacaggttgaatgatatatttatcaaatctcacagacatcaggcaaattatagcctggtgacaaaagtgttcatagtgaattagttactcttgtaatacttctataattagttcatcaggaatttcatccacttcactgttataactgagaagactgttctctgcagcttcagctaattcagcatcttcagtagcttctaaaaaataagcatcatcaatgccattatcccagacagcatcagcagatgcacctgttgacagcctgctaggtgatggtttatgaggattctgggtttcattgctcctagtttcatctgcttcatctgttgtaaactcttcttcctttttgaaaagaaacaggagnacaatctncagcagggtgagaggggnaaancctcggaaaaaa

SEQ ID NO: 363806 - DNA, 3011 bp, Homo sapiens
cccggattggctgttcggagcggcgaggggcttggcgggagcttccagtcgctcgagagcggagagcggcaccatggccccgcgggggcggcggcggccgcggcctcacaggtctgagagcgcaagacgttcaaagaacactttagaaagaacacattccatgaaagataaagctggtcaaaagtgcaagcctattgacgtgttcgactttcctgataattctgatgtctcaagcattggcaggctgggtgaaaatgagaaagatgaagaaacttatgagacctttgatcctcctttacatagcacagctatatatgctgatgaagaagaattctccaaacattgtggactgtctctctcttcaactcctccaggaaaagaagcaaaaagaagttcagacacttctggaaatgaagcaagtgaaatcgaatctgtaaaaattagtgcaaaaaagccaggaagaaagctcaggcccattagtgatgactctgaaagcattgaagaaagtgatacaaggagaaaagttaaatcagcagagaaaataagtacacaacgtcatgaggttattcgaaccacagcgtcttcagaactttcagagaaaccagctgagtctgtcacttctaaaaagacaggaccccttagtgcccagccctctgttgaaaaagagaacttggcaatagaaagtcaatcgaaaactcagaaaaaagggaagatatctcatgacaaaaggaagaaatcaagaagtaaagccataggctcagatacttctgacattgtgcacatttggtgtccagaaggaatgaaaaccagtgacatcaaggagttgaatattgttttgcctgaatttgagaaaacccacctagagcatcaacaaagaatagaatctaaagtttgtaaggcagccatcgccacattttatgttaatgttaaagaacaattcatcaaaatgcttaaagaaagccagatgttgacaaatctgaaaaggaagaatgctaagatgaagaaactcagccactgagagatgaaacagtttgccccaagtcacacattttcatccaggcactgacagtcttccactggttttattagactttggaaagtggacaagatttgataagaggaaggagcactgggaaggctttttctccatggtttctgtgttagactgtagtgcctggctccgctggtgcgagcctctgaatgtcaaccaggcatacatttgatccagtagttcccaagacttgaacggcttgatgaatttcagcatttataaggaatattcttctgtggatatcactgctaattattcattgtgcattgtatttcagagattttttttcctacattttaaactgaaacccagaatcttttacacattcgtagtttcagagccaaagcaagtcatctagttggccagccccggttcttcacactcgctcagcgtacttacaacctcagtttcaccacgataggctggtacattttattatttgtcacttatttttgttttaggttagagccacagctgaaacaactacaaacaaaatatgatgaacttaaagagagaaagtcttcccttaggaatgcagcatatttcttatctaatttaaaacagctttatcaagattattcagatgttcaagctcaagaaccaaacgtaaaggaaacgtatgattcatccagccttccagctctgttatttaaagcaagaacacttctgggagccgaaagccatctgcgaaatatcaaccatcagttagagaagctccttgaccagggatgagaagagcagtctactaaaatgtgcctataggaagactagtctcatgctgttaccttctgaaactgtacctttataaatcaattgttttgcaaagaagttatggcctacttagaatctaaaatttgttattcaaattaaatggctgtgaacaatgttaaatagcatcagtttgtccaatagttttaaaggccataatcatcttttctggttaatatcttgagtaattttaaaatgttgacaccttaatcggtcccaggtatgagctataataaacttgtaaaattaagttgatgtgaacataattttgattaattaataaggcgatttctcctgaatttacaccaaagctaatttttaatgaaattggtttacagaagtaaaaaacaaaaattggaaagcaaagtaataaaacttagtttatataaacaggttgaatgatatatttatcaaatctcacagacatcaggcaaattatagcctggtgacaaaagtgttcatagtgaattagttactcttgtaatacttctataattagttcatcaggaatttcatccacttcactgttataactgagaagactgttctctgcagcttcagctaattcagcatcttcagtagcttctaaaaaataagcatcatcaatgccattatcccagacagcatcagcagatgcacctgttgacagcctgctaggtgatggtttatgaggattctgggtttcattgctcctagtttcatctgcttcatctgttgtaaactcttcttcctttatttcagtggtgaagggatagagagtgggataggaaaatatttactcaggatatgtgatttaaccttatactctatgttgaagtaaggtattaagtgacagatactaaagtgaatatgcaggaggaatgctgtctccgatatctcaccgtgggaatgagtgcactgattcaaacgttgctgcactgaagctcagacacacttgaaactccaaatttgaaattacctacagttctgtgcacatacttttcaatactccccgacggaagagcaagggtggatttaattttttaacaagtggacagtccagctgaagacaaatcagaagataaatttgctatcttgacaatggacttagtacccatgctttaaattttaaagtatttagcaaatcgtaaacatggattgaaaaaagattaaaaacagttgccaaaatatgactggattgtatattacataa

SEQ ID NO: 363807 - DNA, 2488 bp, Homo sapiens
cccggattggctgttcggagcggcgaggggcttggcgggagcttccagtcgctcgagagcggagagcggcaccatggccccgcgggggcggcggcggccgcggcctcacaggtctgagagcgcaagacgttcaaagaacactttagaaagaacacattccatgaaagataaagctggtcaaaagtgcaagcctattgacgtgttcgactttcctgataattctgatgtctcaagcattggcaggctgggtgaaaatgagaaagatgaagaaacttatgagacctttgatcctcctttacatagcacagctatatatgctgatgaagaagaattctccaaacattgtggactgtctctctcttcaactcctccaggaaaagaagcaaaaagaagttcagacacttctggaaatgaagcaagtgaaatcgaatctgtaaaaattagtgcaaaaaagccaggaagaaagctcaggcccattagtgatgactctgaaagcattgaagaaagtgatacaaggagaaaagttaaatcagcagagaaaataagtacacaacgtcatgaggttattcgaaccacagcgtcttcagaactttcagagaaaccagctgagtctgtcacttctaaaaagacaggaccccttagtgcccagccctctgttgaaaaagagaacttggcaatagaaagtcaatcgatacttctgacattgtgcacatttggtgtccagaaggaatgaaaaccagtgacatcaaggagttgaatattgttttgcctgaatttgagaaaacccacctagagcatcaacaaagaatagaatctaaagtttgtaaggcagccatcgccacattttatgttaatgttaaagaacaattcatcaaaatgcttaaagaaagccagatgttgacaaatctgaaaaggaagaatgctaagatgatttcagatatcgaaaagaaaaggcagcgtatgattgaagtccaggatgaactgcttcggttagagccacagctgaaacaactacaaacaaaatatgatgaacttaaagagagaaagtcttcccttaggaatgcagcatatttcttatctaatttaaaacagctttatcaagattattcagatgttcaagctcaagaaccaaacgtaaaggaaacgtatgattcatccagccttccagctctgttatttaaagcaagaacacttctgggagccgaaagccatctgcgaaatatcaaccatcagttagagaagctccttgaccagggatgagaagagcagtctactaaaatgtgcctataggaagactagtctcatgctgttaccttctgaaactgtacctttataaatcaattgttttgcaaagaagttatggcctacttagaatctaaaatttgttattcaaattaaatggctgtgaacaatgttaaatagcatcagtttgtccaatagttttaaaggccataatcatcttttctggttaatatcttgagtaattttaaaatgttgacaccttaatcggtcccaggtatgagctataataaacttgtaaaattaagttgatgtgaacataattttgattaattaataaggcgatttctcctgaatttacaccaaagctaatttttaatgaaattggtttacagaagtaaaaaacaaaaattggaaagcaaagtaataaaacttagtttatataaacaggttgaatgatatatttatcaaatctcacagacatcaggcaaattatagcctggtgacaaaagtgttcatagtgaattagttactcttgtaatacttctataattagttcatcaggaatttcatccacttcactgttataactgagaagactgttctctgcagcttcagctaattcagcatcttcagtagcttctaaaaaataagcatcatcaatgccattatcccagacagcatcagcagatgcacctgttgacagcctgctaggtgatggtttatgaggattctgggtttcattgctcctagtttcatctgcttcatctgttgtaaactcttcttcctttatttcagtggtgaagggatagagagtgggataggaaaatatttactcaggatatgtgatttaaccttatactctatgttgaagtaaggtattaagtgacagatactaaagtgaatatgcaggaggaatgctgtctccgatatctcaccgtgggaatgagtgcactgattcaaacgttgctgcactgaagctcagacacacttgaaactccaaatttgaaattacctacagttctgtgcacatacttttcaatactccccgacggaagagcaagggtggatttaattttttaacaagtggacagtccagctgaagacaaatcagaagataaatttgctatcttgacaatggacttagtacccatgctttaaattttaaagtatttagcaaatcgtaaacatggattgaaaaaagattaaaaacagttgccaaaatatgactggattgtatattacataa

SEQ ID NO: 363808 - DNA, 2126 bp, Homo sapiens
tgctgttttttctttcacacagccaggaagaaagctcaggcccattagtgatgactctgaaagcattgaagaaagtgatacaaggagaaaagttaaatcagcagagaaaataagtacacaacgtcatgaggttattcgaaccacagcgtcttcagaactttcagagaaaccagctgagtctgtcacttctaaaaagacaggaccccttagtgcccagccctctgttgaaaaagagaacttggcaatagaaagtcaatcgaaaactcagaaaaaagggaagatatctcatgacaaaaggaagaaatcaagaagtaaagccataggctcagatacttctgacattgtgcacatttggtgtccagaaggaatgaaaaccagtgacatcaaggagttgaatattgttttgcctgaatttgagaaaacccacctagagcatcaacaaagaatagaatctaaagtttgtaaggcagccatcgccacattttatgttaatgttaaagaacaattcatcaaaatgcttaaagaaagccagatgttgacaaatctgaaaaggaagaatgctaagatgatttcagatatcgaaaagaaaaggcagcgtatgattgaagtccaggatgaactgcttcggttagagccacagctgaaacaactacaaacaaaatatgatgaacttaaagagagaaagtcttcccttaggaatgcagcatatttcttatctaatttaaaacagctttatcaagattattcagatgttcaagctcaagaaccaaacgtaaaggaaacgtatgattcatccagccttccagctctgttatttaaagcaagaacacttctgggagccgaaagccatctgcgaaatatcaaccatcagttagagaagctccttgaccagggatgagaagagcagtctactaaaatgtgcctataggaagactagtctcatgctgttaccttctgaaactgtacctttataaatcaattgttttgcaaagaagttatggcctacttagaatctaaaatttgttattcaaattaaatggctgtgaacaatgttaaatagcatcagtttgtccaatagttttaaaggccataatcatcttttctggttaatatcttgagtaattttaaaatgttgacaccttaatcggtcccaggtatgagctataataaacttgtaaaattaagttgatgtgaacataattttgattaattaataaggcgatttctcctgaatttacaccaaagctaatttttaatgaaattggtttacagaagtaaaaaacaaaaattggaaagcaaagtaataaaacttagtttatataaacaggttgaatgatatatttatcaaatctcacagacatcaggcaaattatagcctggtgacaaaagtgttcatagtgaattagttactcttgtaatacttctataattagttcatcaggaatttcatccacttcactgttataactgagaagactgttctctgcagcttcagctaattcagcatcttcagtagcttctaaaaaataagcatcatcaatgccattatcccagacagcatcagcagatgcacctgttgacagcctgctaggtgatggtttatgaggattctgggtttcattgctcctagtttcatctgcttcatctgttgtaaactcttcttcctttatttcagtggtgaagggatagagagtgggataggaaaatatttactcaggatatgtgatttaaccttatactctatgttgaagtaaggtattaagtgacagatactaaagtgaatatgcaggaggaatgctgtctccgatatctcaccgtgggaatgagtgcactgattcaaacgttgctgcactgaagctcagacacacttgaaactccaaatttgaaattacctacagttctgtgcacatacttttcaatactccccgacggaagagcaagggtggatttaattttttaacaagtggacagtccagctgaagacaaatcagaagataaatttgctatcttgacaatggacttagtacccatgctttaaattttaaagtatttagcaaatcgtaaacatggattgaaaaaagattaaaaacagttgccaaaatatgactggattgtatattacataa

SEQ ID NO: 363809 - DNA, 2067 bp, Homo sapiens
cccggattggctgttcggagcggcgaggggcttggcgggagcttccagtcgctcgagagcggagagcggcaccatggccccgcgggggcggcggcggccgcggcctcacaggtctgagagcgcaagacgttcaaagaacactttagaaagaacacattccatgaaagataaagctggtcaaaagtgcaagcctattgacgtgttcgactttcctgataattctgatgtctcaagcattggcaggctgggtgaaaatgagaaagatgaagaaacttatgagacctttgatcctcctttacatagcacagctatatatgctgatgaagaagaattctccaaacattgtggactgtctctctcttcaactcctccaggaaaagaagcaaaaagaagttcagacacttctggaaatgaagcaagtgaaatcgaatctgtaaaaattagtgcaaaaaagccaggaagaaagctcaggcccattagtgatgactctgaaagcattgaagaaagtgatacaaggagaaaagttaaatcagcagagaaaataagtacacaacgtcatgaggttattcgaaccacagcgtcttcagaactttcagagaaaccagctgagtctgtcacttctaaaaagacaggaccccttagtgcccagccctctgttgaaaaagagaacttggcaatagaaagtcaatcgaaaactcagaaaaaagggaagatatctcatgacaaaaggaagaaatcaagaagtaaagccataggctcagatacttctgacattgtgcacatttggtgtccagaaggaatgaaaaccagtgacatcaaggagttgaatattgttttgcctgaatttgagaaaacccacctagagcatcaacaaagaatagaatctaaagtttgtaaggcagccatcgccacattttatgttaatgttaaagaacaattcatcaaaatgcttaaagaaagccagatgttgacaaatctgaaaaggaagaatgctaagatgaagaaactcagccactgagagatgaaacagtttgccccaagtcacacattttcatccaggcactgacagtcttccactggttttattagactttggaaagtggacaagatttgataagaggaaggagcactgggaaggctttttctccatggtttctgtgttagactgtagtgcctggctccgctggtgcgagcctctgaatgtcaaccaggcatacatttgatccagtagttcccaagacttgaacggcttgatgaatttcagcatttataaggaatattcttctgtggatatcactgctaattattcattgtgcattgtatttcagagattttttttcctacattttaaactgaaacccagaatcttttacacattcgtagtttcagagccaaagcaagtcatctagttggccagccccggttcttcacactcgctcagcgtacttacaacctcagtttcaccacgataggctggtacattttattatttgtcacttatttttgttttaggttagagccacagctgaaacaactacaaacaaaatatgatgaacttaaagagagaaagtcttcccttaggaatgcagcatatttcttatctaatttaaaacagctttatcaagattattcagatgttcaagctcaagaaccaaacgtaaaggaaacgtatgattcatccagccttccagctctgttatttaaagcaagaacacttctgggagccgaaagccatctgcgaaatatcaaccatcagttagagaagctccttgaccagggatgagaagagcagtctactaaaatgtgcctataggaagactagtctcatgctgttaccttctgaaactgtacctttataaatcaattgttttgcaaagaagttatggcctacttagaatctaaaatttgttattcaaattaaatggctgtgaacaatgttaaatagcatcagtttgtccaatagttttaaaggccataatcatcttttctggttaatatcttgagtaattttaaaatgttgacaccttaatcggtcccaggtatgagctataataaacttgtaaaatt

SEQ ID NO: 363810 - DNA, 1009 bp, Homo sapiens
  misc_feature (956)..(957): n is a, c, g, or t
  misc_feature (960)..(960): n is a, c, g, or t
  misc_feature (980)..(980): n is a, c, g, or t
  misc_feature (988)..(988): n is a, c, g, or t
  misc_feature (999)..(999): n is a, c, g, or t
cccggattggctgttcggagcggcgaggggcttggcgggagcttccagtcgctcgagagcggagagcggcaccatggccccgcgggggcggcggcggccgcggcctcacaggtctgagagcgcaagacgttcaaagaacactttagaaagaacacattccatgaaagataaagctggtcaaaagtgcaagcctattgacgtgttcgactttcctgataattctgatgtctcaagcattggcaggctgggtgaaaatgagaaagatgaagaaacttatgagacctttgatcctcctttacatagcacagctatatatgctgatgaagaagaattctccaaacattgtggactgtctctctcttcaactcctccaggaaaagaagcaaaaagaagttcagacacttctggaaatgaagcaagtgaaatcgaatctgtaaaaattagtgcaaaaaagccaggaagaaagctcaggcccattagtgatgactctgaaagcattgaagaaagtgatacaaggagaaaagttaaatcagcagagaaaataagtacacaacgtcatgaggttattcgaaccacagcgtcttcagaactttcagagaaaccagctgagtctgtcacttctaaaaagacaggaccccttagtgcccagccctctgttgaaaaagagaacttggcaatagaaagtcaatcgaaaactcagaaaaaagggaagatatctcatgacaaaaggaagaaatcaagaagtaaagccataggctcagatacttctgacattgtgcacatttggtgtccagaaggaatgaaaaccagtgacatcaaggagttgaatattgttttgcctgaatttgagaaaacccacctagagcatcaacaaagaatagaatctaaagtttgtaaggcagccatcgccacattttatgttaatgttaaagaacaattcatcaaaatgcttaaannaanccagatgcggccgccccacngaaaaaanaaaaccccccngccacgaggg

SEQ ID NO: 363811 - DNA, 670 bp, Homo sapiens
cccggattggctgttcggagcggcgaggggcttggcgggagcttccagtcgctcgagagcggagagcggcaccatggccccgcgggggcggcggcggccgcggcctcacaggtctgagagcgcaagacgttcaaagaacactttagaaagaacacattccatgaaagataaagctggtcaaaagtgcaagcctattgacgtgttcgactttcctgataattctgatgtctcaagcattggcaggctgggtgaaaatgagaaagatgaagaaacttatgagacctttgatcctcctttacatagcacagctatatatgctgatgaagaagaattctccaaacattgtggactgtctctctcttcaactcctccaggaaaagaagcaaaaagaagttcagacacttctggaaatgaagcaagtgaaatcgaatctgtaaaaattagtgcaaaaaagccaggaagaaagctcaggcccattagtgatgactctgaaagcattgaagaaagtgatacaaggagaaaagttaaatcagcagagaaaataagtacacaacgtcatgaggttattcgaaccacagcgtcttcagaactttcagagaaaccagctgagtctgtcacttctaaagcgaccctggccgcctctgtgaaaggactgcatgagtcatcgaac

SEQ ID NO: 363812 - DNA, 267 bp, Homo sapiens
ctcagtcaccacaggagtgtgccttctcagttcaaaggtaaattccagtgaatgtagcatctagttaattggtcaattaggtaccattgtgggatgtgaattaccaaataggttttattctttagaataaggtgtttcttttcatctcaattttgtaaatgatgttatattacatagtcagaaatatatatattggcaaaattagttaccagtataagcttcaaaatgtcactattttcacaaattttttttttttttttttttttt

SEQ ID NO: 363813 - DNA, 535 bp, Homo sapiens
ggagtttaatgaaggcacaggtcaattaatagtctttgatagaaactgagtggctgtctatagtcacgccaccctgaaaacacctaatcgcatctgaaactaagcagttgacaagagaatgcagatacaattcaataaacctgaaaaccttacaaaatatgcaagacttcatggtagcaataaaagccttgttgaccttagtaacagccaagggtactggcaaacaagaacccagcagaccaactaacaactgtagaagacaatatcaacaaagataatggactgacaggctctttaatggagaacttgcatatgagagaattagagatcagtggaaaagaggtgaagctctcaactacttttacaaaatagttcctttataattcctgtaaaaataaaatacgggctgggcgcagtggctcacacctgttatccccagcactttggtaggccaaagccggtggatcacttaaggtcaggagttcaaaaccagcctggccaaatgatgaaatcccgtctctactaaaaatgcaaa

SEQ ID NO: 363814 - DNA, 395 bp, Homo sapiens
ttttctgttcccttaccgtgacttttagaatctgggtccaacaaattaactttatctgagaagtctgcctcctccacggcctgggcagggttaatcatatgctgttacacatctagcattcatcctggttgtaaaacagttgcatgtctgcacctccttcattacaaatttgatattcatagaaagcagtgaccttcatttttttttttaggattaacatgatttatttcattatcagtcttacaggttgctgaggttggcaaagccaggatagtaacttaaatccaaagcacttttgttgagtgacaacccgattagcaaggccctgttactgaacagagggcagtggagggagcgtgagcattagaggggaagagggcggacaggaagggagc

SEQ ID NO: 363815 - DNA, 408 bp, Homo sapiens
gatggtatttggaggtgggcctttgggagataattaggattaaataatatcatgagggttggttcctcatgatggtatttgtgtttttaagaggaagagacactggagaccactctctctcagccatctggccatctgaggacatagcactaagtcaggaggagatcttggactttggcctccagaactgggagaaatacatttctgttgttttacgcacccagtctgtggtacttttttgtggcagcccaagcagatgaggacattatccctctcccaaaaaagatacacagagtcctgcatgtgacctctttcatccgtgactgatggttatttctcttctagaggactcacactctcatttttatatcctatgaattaaatatggagatataaagttaaccactg

SEQ ID NO: 363816 - DNA, 1261 bp, Homo sapiens
ccccccaccccaccaccatgctgtctcattgctaaagaggctcgtggccggcttccaaaggcgcagtaccctttaaaaaggatttatgcatgagctcagctaaaagcaacccggttaagaagtggctcgcttgctgctctgaggaaggagcagcgtctcccctgcgcccgctttcctttctcggagttggtttgtcagctgtgtcctcgctcatccggcggccctgcccctctgcacggagcgatgcatctacacgcgggtgtgcagagtgtgaaaagcattccagctaccgggaaaaaaacaggggctgagtgaggtgtccggggaccaagtggtatcccgattacaacacaaaaataaaatcaaacagctttccttttctcttactctgatgttcatttactaacactttttgtagcaagaaacaaatgttcccaagcacagtgatctgaaaaaaaaaaaaaaaaaatcccaattgatctgccccctcctactttcaaactgtctaatccaagtgggatttgaagtcctttgctcaattgaatgcactatttgaagatagtttatttttatttttaacattgtcatttgggttttgattcagctatgattcccccataaatagaacatactcatgacttttgtataattctcattaaattattcaagactttaagaggaaagacatgccatgctaattcttttaaaaaaggaaactgccgaataacttctgtagttgtttaattagtttagggggaaaaaaaaaccttcaaaagcgtatattcaaactttgattctagttgcctttcgtctaagtcatgggaagccacgtgagtgatctttgccatctccaggagtggatggttagagggagggaataggaatccccatcagctgagggagcttaacttggctgtaagatgtggtcttggtgcagccaacacgtgggaacatgtgcctggtgctgagaaccttggaaatatgacaagatattgaggaagaacctcttctgtgacctgcagagaatcttttggaacaggccttgaatgaatccccattggacatgtgtgctttgatgcgagggaattctctctactaaaagtaaatgtgggtagtctgagggctatgataaaagaagccctgaaaccctccctccagagcaaaggggaaagggagaagcctgaagaaggactaaaaaatacttaactttggcaatcaaaaaaaaaaagcttttataaataataacttgcctgttaattaa

SEQ ID NO: 363817 - DNA, 480 bp, Homo sapiens
tgagacagagtctcactctgttgcctaggctggatggagtgcagtggcgtgatctcggttcactgcaagctctgcctcccaggttcacgccattctcctgcctcagcctcccgagtagctgagactataggtgctcaccaccacgcccggctaattttttgtatttttagtagagacggagtttcaccgtattagccaggatggtcttgatctcctgacctcgtgattcgcctgcctcagcctcccaaagtgctgggattacaggcatgagccacagtgcctggccttttgctgaatattttcaatccaagtttggttgaatccacagatgtggaaaccgcagatatggagggccaactgtatcatgtcaaatgtaattaagttttacttacacagtagtatcctgaatctaaaattaattaattagttaaagccaactagaaactagcaaactagaaaacagatttcaagattctcaac

SEQ ID NO: 363818 - DNA, 4665 bp, Homo sapiens
ggcacgaggctgcagccaactccgctccccgcgcactcggctgcccaggcgctcggaacccagcagcggcgctcctccgcggtgccggtcgcccgcgatgcccgcttagcagcgtgtagcagcggccagcatcaccacacccgcggcaccgcgctgccggccgcagagccgggccagagccttgcccccctcccccagcccccaccccgccccccgccctgaaatgacttgttaatcggcgcagacaccaccaaggggactcaccgaagtggaatccaagtggaatttggatttggagaagagtttcttgaacatttaccctcttccttgttggttttctttttctttttcttctttttttttttggcttcttttttcctctccccttctccgctcgtcattggagatgaacacatcgcgtttgcatcccagaaagtagtcgccgcgactatttcccccaaagagacaagcacacatgtaggaatgacaaaggcttgcgaaggagagagcgcagcccgcggcccggagagatcccctcgataatggattactaaatgggatacacgctgtaccagttcgctccgagccccggccgcctgtccgtcgatgcaccgaaaagggtgaagtagagaaataaagtctccccgctgaactactatgaggtcagaagccttgctgctatatttcacactgctacactttgctggggctggtttcccagaagattctgagccaatcagtatttcgcatggcaactatacaaaacagtatccggtgtttgtgggccacaagccaggacggaacaccacacagaggcacaggctggacatccagatgattatgatcatgaacggaaccctctacattgctgctagggaccatatttatactgttgatatagacacatcacacacggaagaaatttattgtagcaaaaaactgacatggaaatctagacaggccgatgtagacacatgcagaatgaagggaaaacataaggatgagtgccacaactttattaaagttcttctaaagaaaaacgatgatgcattgtttgtctgtggaactaatgccttcaacccttcctgcagaaactataagatggatacattggaaccattcggggatgaattcagcggaatggccagatgcccatatgatgccaaacatgccaacgttgcactgtttgcagatggaaaactatactcagccacagtgactgacttccttgccattgacgcagtcatttaccggagtcttggagaaagccctaccctgcggaccgtcaagcacgattcaaaatggttgaaagaaccatactttgttcaagccgtggattacggagattatatctacttcttcttcagggaaatagcagtggagtataacaccatgggaaaggtagttttcccaagagtggctcaggtttgtaagaatgatatgggaggatctcaaagagtcctggagaaacagtggacgtcgttcctgaaggcgcgcttgaactgctcagttcctggagactctcatttttatttcaacattctccaggcagttacagatgtgattcgtatcaacgggcgtgatgttgtcctggcaacgttttctacaccttataacagcatccctgggtctgcagtctgtgcctatgacatgcttgacattgccagtgtttttactgggagattcaaggaacagaagtctcctgattccacctggacaccagttcctgatgaacgagttcctaagcccaggccaggttgctgtgctggctcatcctccttagaaagatatgcaacctccaatgagttccctgatgataccctgaacttcatcaagacgcacccgctcatggatgaggcagtgccctccatcttcaacaggccatggttcctgagaacaatggtcagataccgccttaccaaaattgcagtggacacagctgctgggccatatcagaatcacactgtggtttttctgggatcagagaagggaatcatcttgaagtttttggccagaataggaaatagtggttttctaaatgacagccttttcctggaggagatgagtgtttacaactctgaaaaatgcagctatgatggagtcgaagacaaaaggatcatgggcatgcagctggacagagcaagcagctctctgtatgttgcgttctctacctgtgtgataaaggttccccttggccggtgtgaacgacatgggaagtgtaaaaaaacctgtattgcctccagagacccatattgtggatggataaaggaaggtggtgcctgcagccatttatcacccaacagcagactgacttttgagcaggacatagagcgtggcaatacagatggtctgggggactgtcacaattcctttgtggcactgaatgacatttcaactcctctaccagataatgaaatgtcttacaacacagtgtatgggcattccagttccctcttgcccagcacaaccacatcagattcgacggctcaagaggggtatgagtctaggggaggaatgctggactggaagcatctgcttgactcacctgacagcacagaccctttgggggcagtgtcttcccataatcaccaagacaagaagggagtgattcgggaaagttacctcaaaggccacgaccagctggttcccgtcaccctcttggccattgcagtcatcctggctttcgtcatgggggccgtcttctcgggcatcaccgtctactgcgtctgtgatcatcggcgcaaagacgtggctgtggtgcagcgcaaggagaaggagctcacccactcgcgccggggctccatgagcagcgtcaccaagctcagcggcctctttggggacactcaatccaaagacccaaagccggaggccatcctcacgccactcatgcacaacggcaagctcgccactcccggcaacacggccaagatgctcattaaagcagaccagcaccacctggacctgacggccctccccaccccagagtcaaccccaacgctgcagcagaagcggaagcccagccgcggcagccgcgagtgggagaggaaccagaacctcatcaatgcctgcacaaaggacatgccccccatgggctcccctgtgattcccacggacctgcccctgcgggcctcccccagccacatccccagcgtggtggtcctgcccatcacgcagcagggctaccagcatgagtacgtggaccagcccaaaatgagcgaggtggcccagatggcgctggaggaccaggccgccacactggagtataagaccatcaaggaacatctcagcagcaagagtcccaaccatggggtgaaccttgtggagaacctggacagcctgccccccaaagttccacagcgggaggcctccctgggtcccccgggagcctccctgtctcagaccggtctaagcaagcggctggaaatgcaccactcctcttcctacggggttgactataagaggagctaccccacgaactcgctcacgagaagccaccaggccaccactctcaaaagaaacaacactaactcctccaattcctctcacctctccagaaaccagagctttggcaggggagacaacccgccgcccgccccgcagagggtggactccatccaggtgcacagctcccagccatctggccaggccgtgactgtctcgaggcagcccagcctcaacgcctacaactcactgacaaggtcggggctgaagcgtacgccctcgctaaagccggacgtaccccccaaaccatcctttgctcccctttccacatccatgaagcccaatgatgcgtgtacataatcccagggggagggggtcaggtgtcgaaccagcaggcaaggcgaggtgcccgctcagctcagcaaggttctcaactgcctcgagtacccaccagaccaagaaggcctgcggcagagccgaggacgctgggtcctcctctctgggacacaggggtactcacgaaaactgggccgcgtggtttggtgaaggtttgcaacggcggggactcaccttcattctcttccttcactttcccccacaccctacaacaggtcggacccacaaaagacttcagttatcatcacaaacatgagccaaaagcacatacctaccccatcccccaccccccacacacacacacacatgcacacaacacatacacacacacgcacagaggtgaacagaaactgaaacattttgtccacaacttcacgggacgtggccagactgggtttgcgttccaacctgcaaaacacaaatacattttttaaaatcaagaaaatttaaaaagacaaaaaaaaaagaattcattgataattctaactcagactttaacaatggcagaagtttactatgcgcaaatactgtgaaatgcccgccagtgttacagctttctgttgcagcagataaatgccatgttgggcaactatgtcatagatttctgctcctcctctcttttaatgaaataacgtgaccgttaacgcaagtaactctttatttattgttcaccctttttttccttaaggaaaggactcttccaaatatcatcctatgaacagctcttcagaaagcccattgaaagttaaactatttaacgtgaaatccattaactggaataattgagtttctttatttttacaataaattcactgagtaaataagttg

SEQ ID NO: 363819 - DNA, 1944 bp, Homo sapiens
acaggaaatggctagagtttctgctgtaactctcaacctagccattcttctcatattatcctatggtagcttatctgaacctcagaaatctatccttttctaatttgaatcattttagtcaacgcagcctcagaaacggaaaccatctattgaaataatacacaaaagggacagccgtaatagcgtgtagccgttgaagcctccattccaatgaaaagacagtgggaatagatccctttggaaaccactaactaatcccagaaagaggaatgcctgtgaagttgagttgaacctgaagactagacacactgtagaacctccataggaagggtgcagagtaactgagttacttgtgatagggacaagacttacccactaccagaaacctgccccatcggtcacaaatgggattcccagagtggacactttctgtgtttagtgctgccatgggaatatcaaagaaggacactggcctttcttgagcacctatgtgtcagacactgtgcaagatgctttcaccattatgtcactatcctcccaacaccgagaggtatctttatccccactgggtgcacaggaagaggttaagtgattccctgaggcccacccagcaagtatgagagataggatctggcccttcattttctaactacaagttcaatgggctttctgctgaacacaccccacaccaccaccaccaccaccaccaccaccaccactaagccgtgtcatttctagggccatctcctctcagtcttacagccagcttgggtgtcccacctccaggcctctgcgcaaagggaatgtgggtctctctggtgatgttttcctaactgtatttgtgatgaaaacagggcattccagttccctcttgcccagcacaaccacatcagattcgacggctcaagaggggtatgagtctaggggaggaatgctggactggaagcatctgcttgactcacctgacagcacagaccctttgggggcagtgtcttcccataatcaccaagacaagaagggtaaggccttggaaatgcctcttcctctcgggggagagggagggaaaagtggggaggactgtgtaactgcttccagctgaattttggcagcatttaaggaacctccaatgcgctatgattgaaagtttctcgaaaaagactgcaaccccatcctctatgtgaggcttgatcctaaattattctctgaccaaggaaaaaccacacaaaacaaataatatgtcctctgagcttcctctacccgaaaaaggtgtggcttggcccgaagcagatgctggcttctgacatcccttgccactcttcttagtctcattctgtgatttttggaccgtcttttcccaccataatgtgatggaatgcagttcgggctttggcaagtgaatgcaattgaagtaaaggccctgttaatcagtgaattgagaaatagcaggacaaagtcttttctggctggtagcatctctcactgttgcatggtgctgaatttgaatagagccatgttcctcagacgtactgtaattgcccttagaggatagtagctaagacaaaaatatgttatttaatcaagcagaattgctatgcatttacaacggaaaggaagccacactaaatgaaagggactctactgtgaactgtcctaaattctcctttgctttctttgcttagctgcagacaggaaatgtcatctcttttcttgccatttgctgcttctggtaacacatcctactttagttgcagctgcaaccaaagaggcctttacttgtccaaaaaacagtcttgtaaatcagagactgaaaagcccagttatgttgctgagctgtttctccccattcagaattgtttacttctatatgttttcaagagtttcatccaagcgggagtttgagtttcaagggcagagcagccactgtgacccttggaagacagtcgc

SEQ ID NO: 363820 - DNA, 964 bp, Homo sapiens
  misc_feature (17)..(17): n is a, c, g, or t
  misc_feature (369)..(369): n is a, c, g, or t
tgagttgctccacaganactgtaactatgcagtatctttaatcaaattgagttttgatttttgtctttattgcaaaaagcaatatacaacacttaggggatgtccattttagttctttttaccagagagtagatcaaggtccctaagttggagggtaacatagaatgccagggtggcttgcacagattcagggcccagaggcagctagtgaggatggcagagattgtgcatacaaagtgtgcttttgtttgaggaaataaaaagctaagcagtctgtatggaaatgactttatgtggctcggagctgattccctgaaggatttatgactctgtattaaatgccacagccttatcttttaaaacatgctnctctaatgctgagttttcctctttttttcttttctttctttttttttttgttactgattttagaaacagtattaagcaccttgttgttttgtttctgttttcaaggaatgcagattctactaagatctccttgcaaaatgaatgcatttaattttccctatgtgtttttcctctgcaggtagttttcccaagagtggctcaggtttgtaagaatgatatgggaggatctcaaagagtcctggagaaacagtggacgtcgttcctgaaggcgcgcttgaactgctcagttcctggagactctcatttttatttcaacattctccaggcagttacagatgtgattcgtatcaacgggcgtgatgttgtcctggcaacgttttctacaccttataacaggtaatcatgccctagctgtgttgacctcatcaattcttcctggcttccttctcccagggggttctcttctaataaaccatatttgcaactgactgaaaattgcattcattgtgtgtagctaagaagcacttaacacttagttttcatcaacaaattaaaagtagtttataagcactattaagttaggttttaggggaag

SEQ ID NO: 363821 - DNA, 801 bp, Homo sapiens
ggcacgaggctgcagccaactccgctccccgcgcactcggctgcccaggcgctcggaacccagcagcggcgctcctccgcggtgccggtcgcccgcgatgcccgcttagcagcgtgtagcagcggccagcatcaccacacccgcggcaccgcgctgccggccgcagagccgggccagagccttgcccccctcccccagcccccaccccgccccccgccctgaaatgacttgttaatcggcgcagacaccaccaaggggactcaccgaagtggaatccaagtggaatttggatttggagaagagtttcttgaacatttaccctcttccttgttggttttctttttctttttcttctttttttttttggcttcttttttcctctccccttctccgctcgtcattggagatgaacacatcgcgtttgcatcccagaaagtagtcgccgcgactatttcccccaaagagacaagcacacatgtaggaatgacaaaggcttgcgaaggagagagcgcagcccgcggcccggagagatcccctcgataatggattactaaatgggatacacgctgtaccagttcgctccgagccccggccgcctgtccgtcgatgcaccgaaaaggtacgccccgggcgcccgggcgcgccccacctcccgggcagctggactccagcctgagggtcccggggccgtggctagcgcgtgctgtcggctttgtggtgcctgcgttttattttgtcttgtgtctctgtttcccgagccttgcccggtcctgggggagcagccgtgagccctgcctgcct

SEQ ID NO: 363822 - DNA, 1143 bp, Homo sapiens
ggcacgaggctgcagccaactccgctccccgcgcactcggctgcccaggcgctcggaacccagcagcggcgctcctccgcggtgccggtcgcccgcgatgcccgcttagcagcgtgtagcagcggccagcatcaccacacccgcggcaccgcgctgccggccgcagagccgggccagagccttgcccccctcccccagcccccaccccgccccccgccctgaaatgacttgttaatcggcgcagacaccaccaaggggactcaccgaagtggaatccaagtggaatttggatttggagaagagtttcttgaacatttaccctcttccttgttggttttctttttctttttcttctttttttttttggcttcttttttcctctccccttctccgctcgtcattggagatgaacacatcgcgtttgcatcccagaaagtagtcgccgcgactatttcccccaaagagacaagcacacatgtaggaatgacaaaggcttgcgaaggagagagcgcagcccgcggcccggagagatcccctcgataatggattactaaatgggatacacgctgtaccagttcgctccgagccccggccgcctgtccgtcgatgcaccgaaaagagaacctgtgtgctgtggaaggtccccaggctacagggtgcagagatgtccactgggcacatgctgacagatccttcaaaaaatggtacttaaagaagattagatcaacatttctgagaaaagcatctcttttgccttctcattggttcagtaaacccagttaaaggcaaagtttccagccctcagagcctgccatgggattcctgtatcattagatattgttaacattagcacttttggagtattatttcacagacatggtttcaatgttcagaaccaaaaggtggagaaatggtgtcagataaccttagagaggatcattttcttggtaatctctcctttcttaaaataaactagatattgctgacaatgtgaaatttgtgactaaccttcagtagatatgttgattttgcttttaaaataaaaaccaaggatgcttagaagtagccataagaggaaatattttgaaaatgaatgacctaaagtaatcaatggatatgtataacatttatattttaaaatga

SEQ ID NO: 363823 - DNA, 4614 bp, Homo sapiens
ggcacgaggctgcagccaactccgctccccgcgcactcggctgcccaggcgctcggaacccagcagcggcgctcctccgcggtgccggtcgcccgcgatgcccgcttagcagcgtgtagcagcggccagcatcaccacacccgcggcaccgcgctgccggccgcagagccgggccagagccttgcccccctcccccagcccccaccccgccccccgccctgaaatgacttgttaatcggcgcagacaccaccaaggggactcaccgaagtggaatccaagtggaatttggatttggagaagagtttcttgaacatttaccctcttccttgttggttttctttttctttttcttctttttttttttggcttcttttttcctctccccttctccgctcgtcattggagatgaacacatcgcgtttgcatcccagaaagtagtcgccgcgactatttcccccaaagagacaagcacacatgtaggaatgacaaaggcttgcgaaggagagagcgcagcccgcggcccggagagatcccctcgataatggattactaaatgggatacacgctgtaccagttcgctccgagccccggccgcctgtccgtcgatgcaccgaaaagggtgaagtagagaaataaagtctccccgctgaactactatgaggtcagaagccttgctgctatatttcacactgctacactttgctggggctggtttcccagaagattctgagccaatcagtatttcgcatggcaactatacaaaacagtatccggtgtttgtgggccacaagccaggacggaacaccacacagaggcacaggctggacatccagatgattatgatcatgaacggaaccctctacattgctgctagggaccatatttatactgttgatatagacacatcacacacggaagaaatttattgtagcaaaaaactgacatggaaatctagacaggccgatgtagacacatgcagaatgaagggaaaacataaggatgagtgccacaactttattaaagttcttctaaagaaaaacgatgatgcattgtttgtctgtggaactaatgccttcaacccttcctgcagaaactataagatggatacattggaaccattcggggatgaattcagcggaatggccagatgcccatatgatgccaaacatgccaacgttgcactgtttgcagatggaaaactatactcagccacagtgactgacttccttgccattgacgcagtcatttaccggagtcttggagaaagccctaccctgcggaccgtcaagcacgattcaaaatggttgaaagaaccatactttgttcaagccgtggattacggagattatatctacttcttcttcagggaaatagcagtggagtataacaccatgggaaaggtagttttcccaagagtggctcaggtttgtaagaatgatatgggaggatctcaaagagtcctggagaaacagtggacgtcgttcctgaaggcgcgcttgaactgctcagttcctggagactctcatttttatttcaacattctccaggcagttacagatgtgattcgtatcaacgggcgtgatgttgtcctggcaacgttttctacaccttataacagcatccctgggtctgcagtctgtgcctatgacatgcttgacattgccagtgtttttactgggagattcaaggaacagaagtctcctgattccacctggacaccagttcctgatgaacgagttcctaagcccaggccaggttgctgtgctggctcatcctccttagaaagatatgcaacctccaatgagttccctgatgataccctgaacttcatcaagacgcacccgctcatggatgaggcagtgccctccatcttcaacaggccatggttcctgagaacaatggtcagataccgccttaccaaaattgcagtggacacagctgctgggccatatcagaatcacactgtggtttttctgggatcagagaagggaatcatcttgaagtttttggccagaataggaaatagtggttttctaaatgacagccttttcctggaggagatgagtgtttacaactctgaaaaatgcagctatgatggagtcgaagacaaaaggatcatgggcatgcagctggacagagcaagcagctctctgtatgttgcgttctctacctgtgtgataaaggttccccttggccggtgtgaacgacatgggaagtgtaaaaaaacctgtattgcctccagagacccatattgtggatggataaaggaaggtggtgcctgcagccatttatcacccaacagcagactgacttttgagcaggacatagagcgtggcaatacagatggtctgggggactgtcacaattcctttgtggcactgaatgggcattccagttccctcttgcccagcacaaccacatcagattcgacggctcaagaggggtatgagtctaggggaggaatgctggactggaagcatctgcttgactcacctgacagcacagaccctttgggggcagtgtcttcccataatcaccaagacaagaagggagtgattcgggaaagttacctcaaaggccacgaccagctggttcccgtcaccctcttggccattgcagtcatcctggctttcgtcatgggggccgtcttctcgggcatcaccgtctactgcgtctgtgatcatcggcgcaaagacgtggctgtggtgcagcgcaaggagaaggagctcacccactcgcgccggggctccatgagcagcgtcaccaagctcagcggcctctttggggacactcaatccaaagacccaaagccggaggccatcctcacgccactcatgcacaacggcaagctcgccactcccggcaacacggccaagatgctcattaaagcagaccagcaccacctggacctgacggccctccccaccccagagtcaaccccaacgctgcagcagaagcggaagcccagccgcggcagccgcgagtgggagaggaaccagaacctcatcaatgcctgcacaaaggacatgccccccatgggctcccctgtgattcccacggacctgcccctgcgggcctcccccagccacatccccagcgtggtggtcctgcccatcacgcagcagggctaccagcatgagtacgtggaccagcccaaaatgagcgaggtggcccagatggcgctggaggaccaggccgccacactggagtataagaccatcaaggaacatctcagcagcaagagtcccaaccatggggtgaaccttgtggagaacctggacagcctgccccccaaagttccacagcgggaggcctccctgggtcccccgggagcctccctgtctcagaccggtctaagcaagcggctggaaatgcaccactcctcttcctacggggttgactataagaggagctaccccacgaactcgctcacgagaagccaccaggccaccactctcaaaagaaacaacactaactcctccaattcctctcacctctccagaaaccagagctttggcaggggagacaacccgccgcccgccccgcagagggtggactccatccaggtgcacagctcccagccatctggccaggccgtgactgtctcgaggcagcccagcctcaacgcctacaactcactgacaaggtcggggctgaagcgtacgccctcgctaaagccggacgtaccccccaaaccatcctttgctcccctttccacatccatgaagcccaatgatgcgtgtacataatcccagggggagggggtcaggtgtcgaaccagcaggcaaggcgaggtgcccgctcagctcagcaaggttctcaactgcctcgagtacccaccagaccaagaaggcctgcggcagagccgaggacgctgggtcctcctctctgggacacaggggtactcacgaaaactgggccgcgtggtttggtgaaggtttgcaacggcggggactcaccttcattctcttccttcactttcccccacaccctacaacaggtcggacccacaaaagacttcagttatcatcacaaacatgagccaaaagcacatacctaccccatcccccaccccccacacacacacacacatgcacacaacacatacacacacacgcacagaggtgaacagaaactgaaacattttgtccacaacttcacgggacgtggccagactgggtttgcgttccaacctgcaaaacacaaatacattttttaaaatcaagaaaatttaaaaagacaaaaaaaaaagaattcattgataattctaactcagactttaacaatggcagaagtttactatgcgcaaatactgtgaaatgcccgccagtgttacagctttctgttgcagcagataaatgccatgttgggcaactatgtcatagatttctgctcctcctctcttttaatgaaataacgtgaccgttaacgcaagtaactctttatttattgttcaccctttttttccttaaggaaaggactcttccaaatatcatcctatgaacagctcttcagaaagcccattgaaagttaaactatttaacgtgaaatccattaactggaataattgagtttctttatttttacaataaattcactgagtaaataagttg

SEQ ID NO: 363824 - DNA, 7277 bp, Homo sapiens
ggcacgaggctgcagccaactccgctccccgcgcactcggctgcccaggcgctcggaacccagcagcggcgctcctccgcggtgccggtcgcccgcgatgcccgcttagcagcgtgtagcagcggccagcatcaccacacccgcggcaccgcgctgccggccgcagagccgggccagagccttgcccccctcccccagcccccaccccgccccccgccctgaaatgacttgttaatcggcgcagacaccaccaaggggactcaccgaagtggaatccaagtggaatttggatttggagaagagtttcttgaacatttaccctcttccttgttggttttctttttctttttcttctttttttttttggcttcttttttcctctccccttctccgctcgtcattggagatgaacacatcgcgtttgcatcccagaaagtagtcgccgcgactatttcccccaaagagacaagcacacatgtaggaatgacaaaggcttgcgaaggagagagcgcagcccgcggcccggagagatcccctcgataatggattactaaatgggatacacgctgtaccagttcgctccgagccccggccgcctgtccgtcgatgcaccgaaaagggtgaagtagagaaataaagtctccccgctgaactactatgaggtcagaagccttgctgctatatttcacactgctacactttgctggggctggtttcccagaagattctgagccaatcagtatttcgcatggcaactatacaaaacagtatccggtgtttgtgggccacaagccaggacggaacaccacacagaggcacaggctggacatccagatgattatgatcatgaacggaaccctctacattgctgctagggaccatatttatactgttgatatagacacatcacacacggaagaaatttattgtagcaaaaaactgacatggaaatctagacaggccgatgtagacacatgcagaatgaagggaaaacataaggatgagtgccacaactttattaaagttcttctaaagaaaaacgatgatgcattgtttgtctgtggaactaatgccttcaacccttcctgcagaaactataagatggatacattggaaccattcggggatgaattcagcggaatggccagatgcccatatgatgccaaacatgccaacgttgcactgtttgcagatggaaaactatactcagccacagtgactgacttccttgccattgacgcagtcatttaccggagtcttggagaaagccctaccctgcggaccgtcaagcacgattcaaaatggttgaaagaaccatactttgttcaagccgtggattacggagattatatctacttcttcttcagggaaatagcagtggagtataacaccatgggaaaggtagttttcccaagagtggctcaggtttgtaagaatgatatgggaggatctcaaagagtcctggagaaacagtggacgtcgttcctgaaggcgcgcttgaactgctcagttcctggagactctcatttttatttcaacattctccaggcagttacagatgtgattcgtatcaacgggcgtgatgttgtcctggcaacgttttctacaccttataacagcatccctgggtctgcagtctgtgcctatgacatgcttgacattgccagtgtttttactgggagattcaaggaacagaagtctcctgattccacctggacaccagttcctgatgaacgagttcctaagcccaggccaggttgctgtgctggctcatcctccttagaaagatatgcaacctccaatgagttccctgatgataccctgaacttcatcaagacgcacccgctcatggatgaggcagtgccctccatcttcaacaggccatggttcctgagaacaatggtcagataccgccttaccaaaattgcagtggacacagctgctgggccatatcagaatcacactgtggtttttctgggatcagagaagggaatcatcttgaagtttttggccagaataggaaatagtggttttctaaatgacagccttttcctggaggagatgagtgtttacaactctgaaaaatgcagctatgatggagtcgaagacaaaaggatcatgggcatgcagctggacagagcaagcagctctctgtatgttgcgttctctacctgtgtgataaaggttccccttggccggtgtgaacgacatgggaagtgtaaaaaaacctgtattgcctccagagacccatattgtggatggataaaggaaggtggtgcctgcagccatttatcacccaacagcagactgacttttgagcaggacatagagcgtggcaatacagatggtctgggggactgtcacaattcctttgtggcactgaatgggcattccagttccctcttgcccagcacaaccacatcagattcgacggctcaagaggggtatgagtctaggggaggaatgctggactggaagcatctgcttgactcacctgacagcacagaccctttgggggcagtgtcttcccataatcaccaagacaagaagggagtgattcgggaaagttacctcaaaggccacgaccagctggttcccgtcaccctcttggccattgcagtcatcctggctttcgtcatgggggccgtcttctcgggcatcaccgtctactgcgtctgtgatcatcggcgcaaagacgtggctgtggtgcagcgcaaggagaaggagctcacccactcgcgccggggctccatgagcagcgtcaccaagctcagcggcctctttggggacactcaatccaaagacccaaagccggaggccatcctcacgccactcatgcacaacggcaagctcgccactcccggcaacacggccaagatgctcattaaagcagaccagcaccacctggacctgacggccctccccaccccagagtcaaccccaacgctgcagcagaagcggaagcccagccgcggcagccgcgagtgggagaggaaccagaacctcatcaatgcctgcacaaaggacatgccccccatgggctcccctgtgattcccacggacctgcccctgcgggcctcccccagccacatccccagcgtggtggtcctgcccatcacgcagcagggctaccagcatgagtacgtggaccagcccaaaatgagcgaggtggcccagatggcgctggaggaccaggccgccacactggagtataagaccatcaaggaacatctcagcagcaagagtcccaaccatggggtgaaccttgtggagaacctggacagcctgccccccaaagttccacagcgggaggcctccctgggtcccccgggagcctccctgtctcagaccggtctaagcaagcggctggaaatgcaccactcctcttcctacggggttgactataagaggagctaccccacgaactcgctcacgagaagccaccaggccaccactctcaaaagaaacaacactaactcctccaattcctctcacctctccagaaaccagagctttggcaggggagacaacccgccgcccgccccgcagagggtggactccatccaggtgcacagctcccagccatctggccaggccgtgactgtctcgaggcagcccagcctcaacgcctacaactcactgacaaggtcggggctgaagcgtacgccctcgctaaagccggacgtaccccccaaaccatcctttgctcccctttccacatccatgaagcccaatgatgcgtgtacataatcccagggggagggggtcaggtgtcgaaccagcaggcaaggcgaggtgcccgctcagctcagcaaggttctcaactgcctcgagtacccaccagaccaagaaggcctgcggcagagccgaggacgctgggtcctcctctctgggacacaggggtactcacgaaaactgggccgcgtggtttggtgaaggtttgcaacggcggggactcaccttcattctcttccttcactttcccccacaccctacaacaggtcggacccacaaaagacttcagttatcatcacaaacatgagccaaaagcacatacctaccccatcccccaccccccacacacacacacacatgcacacaacacatacacacacacgcacagaggtgaacagaaactgaaacattttgtccacaacttcacgggacgtggccagactgggtttgcgttccaacctgcaaaacacaaatacattttttaaaatcaagaaaatttaaaaagacaaaaaaaaaagaattcattgataattctaactcagactttaacaatggcagaagtttactatgcgcaaatactgtgaaatgcccgccagtgttacagctttctgttgcagcagataaatgccatgttgggcaactatgtcatagatttctgctcctcctctcttttaatgaaataacgtgaccgttaacgcaagtaactctttatttattgttcaccctttttttccttaaggaaaggactcttccaaatatcatcctatgaacagctcttcagaaagcccattgaaagttaaactatttaacgtgaaatccattaactggaataattgagtttctttatttttacaataaattcactgagtaaataagttggagctggaattctgagctttgtgtttggactgtctggtctgtagctaaaggaaaaagttaggaggggaatatttatttaaatctatcagttcattgcctggtcaggtctctggcctataaacatgcaaaaaaactaattcatgttaaagtccttccagatcctaatttctaaagcaatcaggagagaaagcttttagaatggcacatcatatctcattgatgccaacatggttttgtccatggttctgactttctgtgaaggcaccagcttgcaatatgccatcccatttcaccttgcatgtgagacagcaaacaaaatccacaaatggtgtgaactaatatgctggctgctaccttgcataaattaatgatttgatcacacgggttcttcgtggggttacatctgtgaatagcctgttttccacatgtaaatttgtgccttacaccttgagttgtgtacacttgtaaactctttatgatcaactgttcccccttttgaaataagtgcagatatttatttaaccctcccttccccaccctctgccccacttccagccctctgaaagattggagtcaagcagatggaagaatgcagtggtgatagttgtcatgcgacagcctgagaacgctgggcagcaccacaccctccaattcacactgccttctagttgtgccaactggaaccaccctttggctgtgctgcgaagcatggaccccagtgttgttgtgggtgtgtcaaatcccctttcatcctcaagagctccctgcttcccttagattatttcaatacggtgatatccttatttgctagcagaaaagggactaacgtcccattcctcttttctgctgcgtccactggctagagagcaggcggtgcgcggttgggcagacacctgggaggagtctccaagccatgtgcacagcacacacgtgcagtgcacacaaagaaatgacatggaaatagatgcaggcaggctggtccctgctgtgattaacgagtaactccaagtacaaggccgaccacaatggatgctgcaaaaacgttgactggggcaaaggattttttattttattttttattttgttaattatgtttttaggggatgggaggtggtgtgtgtttttctcctcttggttttcatttgctcaagcacacaaaagggacttttgtttactctatcatgaacaaaggaactgtccacatactgtaaaccatgagcagtgttgttgttgtttttttaaacagtatatttggtggtctctttgtctgcttttatttccagttcgatcttctgggtttagttttgtctttaaaaagaattcaaaaaaagactgacaatgacagttttgagttggatagtgaaaaagtggagcctccataatcagtgtggttgccttcagacctgagtacttagctgagggtgggtgagagccctttgttccaaaagtccattagttttgctgttgtttaggagtaggtggttgttgttgtttttactttttttttttttggcttttgtaatggaatccatgttcacatcctgtgaactctgtctcctgaaaccctgaagtatttcctagaacctgaaatattgttttcttccttgaattttctctagaaatgcagaaattaggaaggtgatgggtctgtatccccctgcccccttctttcccatgcttgactcccgagagtactggcagtgcagcacccatcattgacgtaagcggctgtcttgtccagtgtttgtaggcatcactgcctcagctgttaaggagacctgtgtcaaaacttacatccacattcctacacccccacaacccatcacttctggtgttaaccctaaaatacccacatgtattgagctggtcttctgcatttaagtatttctccccagtttttttccccactgtgtgtggggggagggtccataaacccgagtgtgcctttgctttccacccttgctagacactggtagatgcaacaaactcagatttatatttgttgtaaagttgtaaaaatattgtgatgtcaccaattttccttccatctccacatcccctaacatctgattcacgacttaatgtatgttgtaagaaaagaaaaaagaaaagaaaaaaagggaaaaaagaaaagcaaggaaaaggctctttattacttaaaagtaataaaacctgactgttctatattaaaaaaaaaaaaaaaaaaaaaaaaaaaaaaaaaaaaaaaaaaaaaaaaaaaaaaaaaaaaaaaaaaaaaaaaaaaaaaaaaaaaaaaaaaaaaaaaaaaaaaaacaaacaaaaaaacgggggggggggcgcagaaaacagtaccccccgcggcgggggcagaacaacaataagccccaccatattagagaggaggccgcacatgagggagtgataataaaccaacgcgagcggcgcgacgtcagaacaaacaagcgtggggggagggaaaaaaacactcagcagcagtggaagtacagtggaagaaaaacaccccacctgggggcgggggggcaagatggcagaaaacccccccacggagaagaaaagacagcgtcggaaagaaaaaaacaggcggagggcattggggggggacaccacacgatttggcgcgggagtggaaagatgtgcgccaggagcgtcgagaaaaatcacgg

SEQ ID NO: 363825 - DNA, 6708 bp, Homo sapiens
ttcttttctttcttacgaattccagacaaaaacgcccttgtactcagctcacacagaaggggatgtttaaatatagccccacacctgagctgctgattctctttctccccttccaaggctagattggcagcaaattgtaaagacaacccaattctcagcaaaacaggaaggtgaacagaagcaagaaatgtaaactttagcttaagtacattttagactttaatttaccatcattatgagggaaaagagtggcttctggaaataattttacctttgtcgtcatccatcctgtcgatcaaataatcacagttaagatggaaatatattttcaaaagagagatggcgatggagatcattttttttgttagccctcttgatgaacagatgtggcatgttgaataccaagtatttggtacgtgtatttgaagataatgaaagggcacacgaatccatctgtgttctagtctttgggccaatttaactttcagagccctcccttctgagctacatatatgcagatgctatagttctagtgtcagagagaagagctaatacaggaaagttttcataaacggtgttccttggagcacaatgccatgatttatcagaaggtgctaaatgggatccggagacatctcttgaaggctgcgctcttttcttcttgcatgtggatatcatgaacatggatatgggcttatctgccctgataagacataactcattaagcagaaaatgaactgttttgactctgtgtttgaccttgtattaatttttctttgcctatagggaccatatttatactgttgatatagacacatcacacacggaagaaatttattgtagcaaaaaactgacatggaaatctagacaggccgatgtagacacatgcagaatgaagggaaaacataaggatgagtgccacaactttattaaagttcttctaaagaaaaacgatgatgcattgtttgtctgtggaactaatgccttcaacccttcctgcagaaactataaggagctgctgctgtgaagtctaagatttgatgactgcttcaagggttagttttcacttcttggaaagaggaagtcaccatggcttttgcctctggacctttccaacctcacaaaccgaaacatttgtacttcactacttcttgcctttgaccagctatagatggatacattggaaccattcggggatgaattcagcggaatggccagatgcccatatgatgccaaacatgccaacgttgcactgtttgcagatggaaaactatactcagccacagtgactgacttccttgccattgacgcagtcatttaccggagtcttggagaaagccctaccctgcggaccgtcaagcacgattcaaaatggttgaaagaaccatactttgttcaagccgtggattacggagattatatctacttcttcttcagggaaatagcagtggagtataacaccatgggaaaggtagttttcccaagagtggctcaggtttgtaagaatgatatgggaggatctcaaagagtcctggagaaacagtggacgtcgttcctgaaggcgcgcttgaactgctcagttcctggagactctcatttttatttcaacattctccaggcagttacagatgtgattcgtatcaacgggcgtgatgttgtcctggcaacgttttctacaccttataacagcatccctgggtctgcagtctgtgcctatgacatgcttgacattgccagtgtttttactgggagattcaaggaacagaagtctcctgattccacctggacaccagttcctgatgaacgagttcctaagcccaggccaggttgctgtgctggctcatcctccttagaaagatatgcaacctccaatgagttccctgatgataccctgaacttcatcaagacgcacccgctcatggatgaggcagtgccctccatcttcaacaggccatggttcctgagaacaatggtcagataccgccttaccaaaattgcagtggacacagctgctgggccatatcagaatcacactgtggtttttctgggatcagagaagggaatcatcttgaagtttttggccagaataggaaatagtggttttctaaatgacagccttttcctggaggagatgagtgtttacaactctgaaaaatgcagctatgatggagtcgaagacaaaaggatcatgggcatgcagctggacagagcaagcagctctctgtatgttgcgttctctacctgtgtgataaaggttccccttggccggtgtgaacgacatgggaagtgtaaaaaaacctgtattgcctccagagacccatattgtggatggataaaggaaggtggtgcctgcagccatttatcacccaacagcagactgacttttgagcaggacatagagcgtggcaatacagatggtctgggggactgtcacaattcctttgtggcactgaatggagtgattcgggaaagttacctcaaaggccacgaccagctggttcccgtcaccctcttggccattgcagtcatcctggctttcgtcatgggggccgtcttctcgggcatcaccgtctactgcgtctgtgatcatcggcgcaaagacgtggctgtggtgcagcgcaaggagaaggagctcacccactcgcgccggggctccatgagcagcgtcaccaagctcagcggcctctttggggacactcaatccaaagacccaaagccggaggccatcctcacgccactcatgcacaacggcaagctcgccactcccggcaacacggccaagatgctcattaaagcagaccagcaccacctggacctgacggccctccccaccccagagtcaaccccaacgctgcagcagaagcggaagcccagccgcggcagccgcgagtgggagaggaaccagaacctcatcaatgcctgcacaaaggacatgccccccatgggctcccctgtgattcccacggacctgcccctgcgggcctcccccagccacatccccagcgtggtggtcctgcccatcacgcagcagggctaccagcatgagtacgtggaccagcccaaaatgagcgaggtggcccagatggcgctggaggaccaggccgccacactggagtataagaccatcaaggaacatctcagcagcaagagtcccaaccatggggtgaaccttgtggagaacctggacagcctgccccccaaagttccacagcgggaggcctccctgggtcccccgggagcctccctgtctcagaccggtctaagcaagcggctggaaatgcaccactcctcttcctacggggttgactataagaggagctaccccacgaactcgctcacgagaagccaccaggccaccactctcaaaagaaacaacactaactcctccaattcctctcacctctccagaaaccagagctttggcaggggagacaacccgccgcccgccccgcagagggtggactccatccaggtgcacagctcccagccatctggccaggccgtgactgtctcgaggcagcccagcctcaacgcctacaactcactgacaaggtcggggctgaagcgtacgccctcgctaaagccggacgtaccccccaaaccatcctttgctcccctttccacatccatgaagcccaatgatgcgtgtacataatcccagggggagggggtcaggtgtcgaaccagcaggcaaggcgaggtgcccgctcagctcagcaaggttctcaactgcctcgagtacccaccagaccaagaaggcctgcggcagagccgaggacgctgggtcctcctctctgggacacaggggtactcacgaaaactgggccgcgtggtttggtgaaggtttgcaacggcggggactcaccttcattctcttccttcactttcccccacaccctacaacaggtcggacccacaaaagacttcagttatcatcacaaacatgagccaaaagcacatacctaccccatcccccaccccccacacacacacacacatgcacacaacacatacacacacacgcacagaggtgaacagaaactgaaacattttgtccacaacttcacgggacgtggccagactgggtttgcgttccaacctgcaaaacacaaatacattttttaaaatcaagaaaatttaaaaagacaaaaaaaaaagaattcattgataattctaactcagactttaacaatggcagaagtttactatgcgcaaatactgtgaaatgcccgccagtgttacagctttctgttgcagcagataaatgccatgttgggcaactatgtcatagatttctgctcctcctctcttttaatgaaataacgtgaccgttaacgcaagtaactctttatttattgttcaccctttttttccttaaggaaaggactcttccaaatatcatcctatgaacagctcttcagaaagcccattgaaagttaaactatttaacgtgaaatccattaactggaataattgagtttctttatttttacaataaattcactgagtaaataagttggagctggaattctgagctttgtgtttggactgtctggtctgtagctaaaggaaaaagttaggaggggaatatttatttaaatctatcagttcattgcctggtcaggtctctggcctataaacatgcaaaaaaactaattcatgttaaagtccttccagatcctaatttctaaagcaatcaggagagaaagcttttagaatggcacatcatatctcattgatgccaacatggttttgtccatggttctgactttctgtgaaggcaccagcttgcaatatgccatcccatttcaccttgcatgtgagacagcaaacaaaatccacaaatggtgtgaactaatatgctggctgctaccttgcataaattaatgatttgatcacacgggttcttcgtggggttacatctgtgaatagcctgttttccacatgtaaatttgtgccttacaccttgagttgtgtacacttgtaaactctttatgatcaactgttcccccttttgaaataagtgcagatatttatttaaccctcccttccccaccctctgccccacttccagccctctgaaagattggagtcaagcagatggaagaatgcagtggtgatagttgtcatgcgacagcctgagaacgctgggcagcaccacaccctccaattcacactgccttctagttgtgccaactggaaccaccctttggctgtgctgcgaagcatggaccccagtgttgttgtgggtgtgtcaaatcccctttcatcctcaagagctccctgcttcccttagattatttcaatacggtgatatccttatttgctagcagaaaagggactaacgtcccattcctcttttctgctgcgtccactggctagagagcaggcggtgcgcggttgggcagacacctgggaggagtctccaagccatgtgcacagcacacacgtgcagtgcacacaaagaaatgacatggaaatagatgcaggcaggctggtccctgctgtgattaacgagtaactccaagtacaaggccgaccacaatggatgctgcaaaaacgttgactggggcaaaggattttttattttattttttattttgttaattatgtttttaggggatgggaggtggtgtgtgtttttctcctcttggttttcatttgctcaagcacacaaaagggacttttgtttactctatcatgaacaaaggaactgtccacatactgtaaaccatgagcagtgttgttgttgtttttttaaacagtatatttggtggtctctttgtctgcttttatttccagttcgatcttctgggtttagttttgtctttaaaaagaattcaaaaaaagactgacaatgacagttttgagttggatagtgaaaaagtggagcctccataatcagtgtggttgccttcagacctgagtacttagctgagggtgggtgagagccctttgttccaaaagtccattagttttgctgttgtttaggagtaggtggttgttgttgtttttactttttttttttttggcttttgtaatggaatccatgttcacatcctgtgaactctgtctcctgaaaccctgaagtatttcctagaacctgaaatattgttttcttccttgaattttctctagaaatgcagaaattaggaaggtgatgggtctgtatccccctgcccccttctttcccatgcttgactcccgagagtactggcagtgcagcacccatcattgacgtaagcggctgtcttgtccagtgtttgtaggcatcactgcctcagctgttaaggagacctgtgtcaaaacttacatccacattcctacacccccacaacccatcacttctggtgttaaccctaaaatacccacatgtattgagctggtcttctgcatttaagtatttctccccagtttttttccccactgtgtgtggggggagggtccataaacccgagtgtgcctttgctttccacccttgctagacactggtagatgcaacaaactcagatttatatttgttgtaaagttgtaaaaatattgtgatgtcaccaattttccttccatctccacatcccctaacatctgattcacgacttaatgtatgttgtaagaaaagaaaaaagaaaagaaaaaaagggaaaaaagaaaagcaaggaaaaggctctttattacttaaaagtaataaaacctgactgttctatatta

SEQ ID NO: 363826 - DNA, 4288 bp, Homo sapiens
  misc_feature (4157)..(4157): n is a, c, g, or t
  misc_feature (4159)..(4159): n is a, c, g, or t
  misc_feature (4165)..(4166): n is a, c, g, or t
  misc_feature (4193)..(4193): n is a, c, g, or t
ggcacgaggctgcagccaactccgctccccgcgcactcggctgcccaggcgctcggaacccagcagcggcgctcctccgcggtgccggtcgcccgcgatgcccgcttagcagcgtgtagcagcggccagcatcaccacacccgcggcaccgcgctgccggccgcagagccgggccagagccttgcccccctcccccagcccccaccccgccccccgccctgaaatgacttgttaatcggcgcagacaccaccaaggggactcaccgaagtggaatccaagtggaatttggatttggagaagagtttcttgaacatttaccctcttccttgttggttttctttttctttttcttctttttttttttggcttcttttttcctctccccttctccgctcgtcattggagatgaacacatcgcgtttgcatcccagaaagtagtcgccgcgactatttcccccaaagagacaagcacacatgtaggaatgacaaaggcttgcgaaggagagagcgcagcccgcggcccggagagatcccctcgataatggattactaaatgggatacacgctgtaccagttcgctccgagccccggccgcctgtccgtcgatgcaccgaaaagggtgaagtagagaaataaagtctccccgctgaactactatgaggtcagaagccttgctgctatatttcacactgctacactttgctggggctggtttcccagaagattctgagccaatcagtatttcgcatggcaactatacaaaacagtatccggtgtttgtgggccacaagccaggacggaacaccacacagaggcacaggctggacatccagatgattatgatcatgaacggaaccctctacattgctgctagggaccatatttatactgttgatatagacacatcacacacggaagaaatttattgtagcaaaaaactgacatggaaatctagacaggccgatgtagacacatgcagaatgaagggaaaacataaggatgagtgccacaactttattaaagttcttctaaagaaaaacgatgatgcattgtttgtctgtggaactaatgccttcaacccttcctgcagaaactataagatggatacattggaaccattcggggatgaattcagcggaatggccagatgcccatatgatgccaaacatgccaacgttgcactgtttgcagatggaaaactatactcagccacagtgactgacttccttgccattgacgcagtcatttaccggagtcttggagaaagccctaccctgcggaccgtcaagcacgattcaaaatggttgaaagaaccatactttgttcaagccgtggattacggagattatatctacttcttcttcagggaaatagcagtggagtataacaccatgggaaaggtagttttcccaagagtggctcaggtttgtaagaatgatatgggaggatctcaaagagtcctggagaaacagtggacgtcgttcctgaaggcgcgcttgaactgctcagttcctggagactctcatttttatttcaacattctccaggcagttacagatgtgattcgtatcaacgggcgtgatgttgtcctggcaacgttttctacaccttataacagcatccctgggtctgcagtctgtgcctatgacatgcttgacattgccagtgtttttactgggagattcaaggaacagaagtctcctgattccacctggacaccagttcctgatgaacgagttcctaagcccaggccaggttgctgtgctggctcatcctccttagaaagatatgcaacctccaatgagttccctgatgataccctgaacttcatcaagacgcacccgctcatggatgaggcagtgccctccatcttcaacaggccatggttcctgagaacaatggtcagataccgccttaccaaaattgcagtggacacagctgctgggccatatcagaatcacactgtggtttttctgggatcagagaagggaatcatcttgaagtttttggccagaataggaaatagtggttttctaaatgacagccttttcctggaggagatgagtgtttacaactctgaaaaatgcagctatgatggagtcgaagacaaaaggatcatgggcatgcagctggacagagcaagcagctctctgtatgttgcgttctctacctgtgtgataaaggttccccttggccggtgtgaacgacatgggaagtgtaaaaaaacctgtattgcctccagagacccatattgtggatggataaaggaaggtggtgcctgcagccatttatcacccaacagcagactgacttttgagcaggacatagagcgtggcaatacagatggtctgggggactgtcacaattcctttgtggcactgaatgggcattccagttccctcttgcccagcacaaccacatcagattcgacggctcaagaggggtatgagtctaggggaggaatgctggactggaagcatctgcttgactcacctgacagcacagaccctttgggggcagtgtcttcccataatcaccaagacaagaagggagtgattcgggaaagttacctcaaaggccacgaccagctggttcccgtcaccctcttggccattgcagtcatcctggctttcgtcatgggggccgtcttctcgggcatcaccgtctactgcgtctgtgatcatcggcgcaaagacgtggctgtggtgcagcgcaaggagaaggagctcacccactcgcgccggggctccatgagcagcgtcaccaagctcagcggcctctttggggacactcaatccaaagacccaaagccggaggccatcctcacgccactcatgcacaacggcaagctcgccactcccggcaacacggccaagatgctcattaaagcagaccagcaccacctggacctgacggccctccccaccccagagtcaaccccaacgctgcagcagaagcggaagcccagccgcggcagccgcgagtgggagaggaaccagaacctcatcaatgcctgcacaaaggacatgccccccatgggctcccctgtgattcccacggacctgcccctgcgggcctcccccagccacatccccagcgtggtggtcctgcccatcacgcagcagggctaccagcatgagtacgtggaccagcccaaaatgagcgaggtggcccagatggcgctggaggaccaggccgccacactggagtataagaccatcaaggaacatctcagcagcaagagtcccaaccatggggtgaaccttgtggagaacctggacagcctgccccccaaagttccacagcgggaggcctccctgggtcccccgggagcctccctgtctcagaccggtctaagcaagcggctggaaatgcaccactcctcttcctacggggttgactataagaggagctaccccacgaactcgctcacgagaagccaccaggccaccactctcaaaagaaacaacactaactcctccaattcctctcacctctccagaaaccagagctttggcaggggagacaacccgccgcccgccccgcagagggtggactccatccaggtgcacagctcccagccatctggccaggccgtgactgtctcgaggcagcccagcctcaacgcctacaactcactgacaaggtcggggctgaagcgtacgccctcgctaaagccggacgtaccccccaaaccatcctttgctcccctttccacatccatgaagcccaatgatgcgtgtacataatcccagggggagggggtcaggtgtcgaaccagcaggcaaggcgaggtgcccgctcagctcagcaaggttctcaactgcctcgagtacccaccagaccaagaaggcctgcggcagagccgaggacgctgggtcctcctctctgggacacaggggtactcacgaaaactgggccgcgtggtttggtgaaggtttgcaacggcggggactcaccttcattctcttccttcactttcccccacaccctacaacaggtcggacccacaaaagacttcagttatcatcacaaacatgagccaaaagcacatacctaccccatcccccaccccccacacacacacacacatgcacacaacacatacacacacacgcacagaggtgaacagaaactgaaacattttgtccacacncngacggnngaggtggtcacgcaacacatctttaanccgattaagcaaaaaaacgggcgcgggggaaggagcggagccgctgaaagagggcaggagaagggagagagcaaacacgccagcgcaacgcccgg

SEQ ID NO: 363827 - DNA, 5262 bp, Homo sapiens
  misc_feature (46)..(46): n is a, c, g, or t
tttatgtcataacgggcggcgttaattcaagttacatggcccgtcngtcctgacaagttaacatactccttataacagcatccctgggtctgcagtctgtgcctatgacatgcttgacattgccagtgtttttactgggagattcaaggaacagaagtctcctgattccacctggacaccagttcctgatgaacgagttcctaagcccaggccaggttgctgtgctggctcatcctccttagaaagatatgcaacctccaatgagttccctgatgataccctgaacttcatcaagacgcacccgctcatggatgaggcagtgccctccatcttcaacaggccatggttcctgagaacaatggtcagataccgccttaccaaaattgcagtggacacagctgctgggccatatcagaatcacactgtggtttttctgggatcagagaagggaatcatcttgaagtttttggccagaataggaaatagtggttttctaaatgacagccttttcctggaggagatgagtgtttacaactctgaaaaatgcagctatgatggagtcgaagacaaaaggatcatgggcatgcagctggacagagcaagcagctctctgtatgttgcgttctctacctgtgtgataaaggttccccttggccggtgtgaacgacatgggaagtgtaaaaaaacctgtattgcctccagagacccatattgtggatggataaaggaaggtggtgcctgcagccatttatcacccaacagcagactgacttttgagcaggacatagagcgtggcaatacagatggtctgggggactgtcacaattcctttgtggcactgaatgggcattccagttccctcttgcccagcacaaccacatcagattcgacggctcaagaggggtatgagtctaggggaggaatgctggactggaagcatctgcttgactcacctgacagcacagaccctttgggggcagtgtcttcccataatcaccaagacaagaagggagtgattcgggaaagttacctcaaaggccacgaccagctggttcccgtcaccctcttggccattgcagtcatcctggctttcgtcatgggggccgtcttctcgggcatcaccgtctactgcgtctgtgatcatcggcgcaaagacgtggctgtggtgcagcgcaaggagaaggagctcacccactcgcgccggggctccatgagcagcgtcaccaagctcagcggcctctttggggacactcaatccaaagacccaaagccggaggccatcctcacgccactcatgcacaacggcaagctcgccactcccggcaacacggccaagatgctcattaaagcagaccagcaccacctggacctgacggccctccccaccccagagtcaaccccaacgctgcagcagaagcggaagcccagccgcggcagccgcgagtgggagaggaaccagaacctcatcaatgcctgcacaaaggacatgccccccatgggctcccctgtgattcccacggacctgcccctgcgggcctcccccagccacatccccagcgtggtggtcctgcccatcacgcagcagggctaccagcatgagtacgtggaccagcccaaaatgagcgaggtggcccagatggcgctggaggaccaggccgccacactggagtataagaccatcaaggaacatctcagcagcaagagtcccaaccatggggtgaaccttgtggagaacctggacagcctgccccccaaagttccacagcgggaggcctccctgggtcccccgggagcctccctgtctcagaccggtctaagcaagcggctggaaatgcaccactcctcttcctacggggttgactataagaggagctaccccacgaactcgctcacgagaagccaccaggccaccactctcaaaagaaacaacactaactcctccaattcctctcacctctccagaaaccagagctttggcaggggagacaacccgccgcccgccccgcagagggtggactccatccaggtgcacagctcccagccatctggccaggccgtgactgtctcgaggcagcccagcctcaacgcctacaactcactgacaaggtcggggctgaagcgtacgccctcgctaaagccggacgtaccccccaaaccatcctttgctcccctttccacatccatgaagcccaatgatgcgtgtacataatcccagggggagggggtcaggtgtcgaaccagcaggcaaggcgaggtgcccgctcagctcagcaaggttctcaactgcctcgagtacccaccagaccaagaaggcctgcggcagagccgaggacgctgggtcctcctctctgggacacaggggtactcacgaaaactgggccgcgtggtttggtgaaggtttgcaacggcggggactcaccttcattctcttccttcactttcccccacaccctacaacaggtcggacccacaaaagacttcagttatcatcacaaacatgagccaaaagcacatacctaccccatcccccaccccccacacacacacacacatgcacacaacacatacacacacacgcacagaggtgaacagaaactgaaacattttgtccacaacttcacgggacgtggccagactgggtttgcgttccaacctgcaaaacacaaatacattttttaaaatcaagaaaatttaaaaagacaaaaaaaaaagaattcattgataattctaactcagactttaacaatggcagaagtttactatgcgcaaatactgtgaaatgcccgccagtgttacagctttctgttgcagcagataaatgccatgttgggcaactatgtcatagatttctgctcctcctctcttttaatgaaataacgtgaccgttaacgcaagtaactctttatttattgttcaccctttttttccttaaggaaaggactcttccaaatatcatcctatgaacagctcttcagaaagcccattgaaagttaaactatttaacgtgaaatccattaactggaataattgagtttctttatttttacaataaattcactgagtaaataagttggagctggaattctgagctttgtgtttggactgtctggtctgtagctaaaggaaaaagttaggaggggaatatttatttaaatctatcagttcattgcctggtcaggtctctggcctataaacatgcaaaaaaactaattcatgttaaagtccttccagatcctaatttctaaagcaatcaggagagaaagcttttagaatggcacatcatatctcattgatgccaacatggttttgtccatggttctgactttctgtgaaggcaccagcttgcaatatgccatcccatttcaccttgcatgtgagacagcaaacaaaatccacaaatggtgtgaactaatatgctggctgctaccttgcataaattaatgatttgatcacacgggttcttcgtggggttacatctgtgaatagcctgttttccacatgtaaatttgtgccttacaccttgagttgtgtacacttgtaaactctttatgatcaactgttcccccttttgaaataagtgcagatatttatttaaccctcccttccccaccctctgccccacttccagccctctgaaagattggagtcaagcagatggaagaatgcagtggtgatagttgtcatgcgacagcctgagaacgctgggcagcaccacaccctccaattcacactgccttctagttgtgccaactggaaccaccctttggctgtgctgcgaagcatggaccccagtgttgttgtgggtgtgtcaaatcccctttcatcctcaagagctccctgcttcccttagattatttcaatacggtgatatccttatttgctagcagaaaagggactaacgtcccattcctcttttctgctgcgtccactggctagagagcaggcggtgcgcggttgggcagacacctgggaggagtctccaagccatgtgcacagcacacacgtgcagtgcacacaaagaaatgacatggaaatagatgcaggcaggctggtccctgctgtgattaacgagtaactccaagtacaaggccgaccacaatggatgctgcaaaaacgttgactggggcaaaggattttttattttattttttattttgttaattatgtttttaggggatgggaggtggtgtgtgtttttctcctcttggttttcatttgctcaagcacacaaaagggacttttgtttactctatcatgaacaaaggaactgtccacatactgtaaaccatgagcagtgttgttgttgtttttttaaacagtatatttggtggtctctttgtctgcttttatttccagttcgatcttctgggtttagttttgtctttaaaaagaattcaaaaaaagactgacaatgacagttttgagttggatagtgaaaaagtggagcctccataatcagtgtggttgccttcagacctgagtacttagctgagggtgggtgagagccctttgttccaaaagtccattagttttgctgttgtttaggagtaggtggttgttgttgtttttactttttttttttttggcttttgtaatggaatccatgttcacatcctgtgaactctgtctcctgaaaccctgaagtatttcctagaacctgaaatattgttttcttccttgaattttctctagaaatgcagaaattaggaaggtgatgggtctgtatccccctgcccccttctttcccatgcttgactcccgagagtactggcagtgcagcacccatcattgacgtaagcggctgtcttgtccagtgtttgtaggcatcactgcctcagctgttaaggagacctgtgtcaaaacttacatccacattcctacacccccacaacccatcacttctggtgttaaccctaaaatacccacatgtattgagctggtcttctgcatttaagtatttctccccagtttttttccccactgtgtgtggggggagggtccataaacccgagtgtgcctttgctttccacccttgctagacactggtagatgcaacaaactcagatttatatttgttgtaaagttgtaaaaatattgtgatgtcaccaattttccttccatctccacatcccctaacatctgattcacgacttaatgtatgttgtaagaaaagaaaaaagaaaagaaaaaaagggaaaaaagaaaagcaaggaaaaggctctttattacttaaaagtaataaaacctgactgttctatatta

SEQ ID NO: 363828 - DNA, 4162 bp, Homo sapiens
ggcacgaggctgcagccaactccgctccccgcgcactcggctgcccaggcgctcggaacccagcagcggcgctcctccgcggtgccggtcgcccgcgatgcccgcttagcagcgtgtagcagcggccagcatcaccacacccgcggcaccgcgctgccggccgcagagccgggccagagccttgcccccctcccccagcccccaccccgccccccgccctgaaatgacttgttaatcggcgcagacaccaccaaggggactcaccgaagtggaatccaagtggaatttggatttggagaagagtttcttgaacatttaccctcttccttgttggttttctttttctttttcttctttttttttttggcttcttttttcctctccccttctccgctcgtcattggagatgaacacatcgcgtttgcatcccagaaagtagtcgccgcgactatttcccccaaagagacaagcacacatgtaggaatgacaaaggcttgcgaaggagagagcgcagcccgcggcccggagagatcccctcgataatggattactaaatgggatacacgctgtaccagttcgctccgagccccggccgcctgtccgtcgatgcaccgaaaagggtgaagtagagaaataaagtctccccgctgaactactatgaggtcagaagccttgctgctatatttcacactgctacactttgctggggctggtttcccagaagattctgagccaatcagtatttcgcatggcaactatacaaaacagtatccggtgtttgtgggccacaagccaggacggaacaccacacagaggcacaggctggacatccagatgattatgatcatgaacggaaccctctacattgctgctagggaccatatttatactgttgatatagacacatcacacacggaagaaatttattgtagcaaaaaactgacatggaaatctagacaggccgatgtagacacatgcagaatgaagggaaaacataaggatgagtgccacaactttattaaagttcttctaaagaaaaacgatgatgcattgtttgtctgtggaactaatgccttcaacccttcctgcagaaactataagatggatacattggaaccattcggggatgaattcagcggaatggccagatgcccatatgatgccaaacatgccaacgttgcactgtttgcagatggaaaactatactcagccacagtgactgacttccttgccattgacgcagtcatttaccggagtcttggagaaagccctaccctgcggaccgtcaagcacgattcaaaatggttgaaagaaccatactttgttcaagccgtggattacggagattatatctacttcttcttcagggaaatagcagtggagtataacaccatgggaaaggtagttttcccaagagtggctcaggtttgtaagaatgatatgggaggatctcaaagagtcctggagaaacagtggacgtcgttcctgaaggcgcgcttgaactgctcagttcctggagactctcatttttatttcaacattctccaggcagttacagatgtgattcgtatcaacgggcgtgatgttgtcctggcaacgttttctacaccttataacagcatccctgggtctgcagtctgtgcctatgacatgcttgacattgccagtgtttttactgggagattcaaggaacagaagtctcctgattccacctggacaccagttcctgatgaacgagttcctaagcccaggccaggttgctgtgctggctcatcctccttagaaagatatgcaacctccaatgagttccctgatgataccctgaacttcatcaagacgcacccgctcatggatgaggcagtgccctccatcttcaacaggccatggttcctgagaacaatggtcagataccgccttaccaaaattgcagtggacacagctgctgggccatatcagaatcacactgtggtttttctgggatcagagaagggaatcatcttgaagtttttggccagaataggaaatagtggttttctaaatgacagccttttcctggaggagatgagtgtttacaactctgaaaaatgcagctatgatggagtcgaagacaaaaggatcatgggcatgcagctggacagagcaagcagctctctgtatgttgcgttctctacctgtgtgataaaggttccccttggccggtgtgaacgacatgggaagtgtaaaaaaacctgtattgcctccagagacccatattgtggatggataaaggaaggtggtgcctgcagccatttatcacccaacagcagactgacttttgagcaggacatagagcgtggcaatacagatggtctgggggactgtcacaattcctttgtggcactgaatgggcattccagttccctcttgcccagcacaaccacatcagattcgacggctcaagaggggtatgagtctaggggaggaatgctggactggaagcatctgcttgactcacctgacagcacagaccctttgggggcagtgtcttcccataatcaccaagacaagaagggagtgattcgggaaagttacctcaaaggccacgaccagctggttcccgtcaccctcttggccattgcagtcatcctggctttcgtcatgggggccgtcttctcgggcatcaccgtctactgcgtctgtgatcatcggcgcaaagacgtggctgtggtgcagcgcaaggagaaggagctcacccactcgcgccggggctccatgagcagcgtcaccaagctcagcggcctctttggggacactcaatccaaagacccaaagccggaggccatcctcacgccactcatgcacaacggcaagctcgccactcccggcaacacggccaagatgctcattaaagcagaccagcaccacctggacctgacggccctccccaccccagagtcaaccccaacgctgcagcagaagcggaagcccagccgcggcagccgcgagtgggagaggaaccagaacctcatcaatgcctgcacaaaggacatgccccccatgggctcccctgtgattcccacggacctgcccctgcgggcctcccccagccacatccccagcgtggtggtcctgcccatcacgcagcagggctaccagcatgagtacgtggaccagcccaaaatgagcgaggtggcccagatggcgctggaggaccaggccgccacactggagtataagaccatcaaggaacatctcagcagcaagagtcccaaccatggggtgaaccttgtggagaacctggacagcctgccccccaaagttccacagcgggaggcctccctgggtcccccgggagcctccctgtctcagaccggtctaagcaagcggctggaaatgcaccactcctcttcctacggggttgactataagaggagctaccccacgaactcgctcacgagaagccaccaggccaccactctcaaaagaaacaacactaactcctccaattcctctcacctctccagaaaccagagctttggcaggggagacaacccgccgcccgccccgcagagggtggactccatccaggtgcacagctcccagccatctggccaggccgtgactgtctcgaggcagcccagcctcaacgcctacaactcactgacaaggtcggggctgaagcgtacgccctcgctaaagccggacgtaccccccaaaccatcctttgctcccctttccacatccatgaagcccaatgatgcgtgtacataatcccagggggagggggtcaggtgtcgaaccagcaggcaaggcgaggtgcccgctcagctcagcaaggttctcaactgcctcgagtacccaccagaccaagaaggcctgcggcagagccgaggacgctgggtcctcctctctgggacacaggggtactcacgaaaactgggccgcgtggtttggtgaaggtttgcaacggcggggactcaccttcattctcttccttcactttcccccacaccctacaacaggtcggacccacaaaagacttcagttatcatcacaaacatgagccaaaagcacatacctaccccatcccccaccccccacacacacacacacatgcacacgcagacacgcaaccacccaggccaaagacacagagaacggtccgtacggtgcgttggcccaa

SEQ ID NO: 363829 - DNA, 6819 bp, Homo sapiens
ttcttttctttcttacgaattccagacaaaaacgcccttgtactcagctcacacagaaggggatgtttaaatatagccccacacctgagctgctgattctctttctccccttccaaggctagattggcagcaaattgtaaagacaacccaattctcagcaaaacaggaaggtgaacagaagcaagaaatgtaaactttagcttaagtacattttagactttaatttaccatcattatgagggaaaagagtggcttctggaaataattttacctttgtcgtcatccatcctgtcgatcaaataatcacagttaagatggaaatatattttcaaaagagagatggcgatggagatcattttttttgttagccctcttgatgaacagatgtggcatgttgaataccaagtatttggtacgtgtatttgaagataatgaaagggcacacgaatccatctgtgttctagtctttgggccaatttaactttcagagccctcccttctgagctacatatatgcagatgctatagttctagtgtcagagagaagagctaatacaggaaagttttcataaacggtgttccttggagcacaatgccatgatttatcagaaggtgctaaatgggatccggagacatctcttgaaggctgcgctcttttcttcttgcatgtggatatcatgaacatggatatgggcttatctgccctgataagacataactcattaagcagaaaatgaactgttttgactctgtgtttgaccttgtattaatttttctttgcctatagggaccatatttatactgttgatatagacacatcacacacggaagaaatttattgtagcaaaaaactgacatggaaatctagacaggccgatgtagacacatgcagaatgaagggaaaacataaggatgagtgccacaactttattaaagttcttctaaagaaaaacgatgatgcattgtttgtctgtggaactaatgccttcaacccttcctgcagaaactataaggagctgctgctgtgaagtctaagatttgatgactgcttcaagggttagttttcacttcttggaaagaggaagtcaccatggcttttgcctctggacctttccaacctcacaaaccgaaacatttgtacttcactacttcttgcctttgaccagctatagatggatacattggaaccattcggggatgaattcagcggaatggccagatgcccatatgatgccaaacatgccaacgttgcactgtttgcagatggaaaactatactcagccacagtgactgacttccttgccattgacgcagtcatttaccggagtcttggagaaagccctaccctgcggaccgtcaagcacgattcaaaatggttgaaagaaccatactttgttcaagccgtggattacggagattatatctacttcttcttcagggaaatagcagtggagtataacaccatgggaaaggtagttttcccaagagtggctcaggtttgtaagaatgatatgggaggatctcaaagagtcctggagaaacagtggacgtcgttcctgaaggcgcgcttgaactgctcagttcctggagactctcatttttatttcaacattctccaggcagttacagatgtgattcgtatcaacgggcgtgatgttgtcctggcaacgttttctacaccttataacagcatccctgggtctgcagtctgtgcctatgacatgcttgacattgccagtgtttttactgggagattcaaggaacagaagtctcctgattccacctggacaccagttcctgatgaacgagttcctaagcccaggccaggttgctgtgctggctcatcctccttagaaagatatgcaacctccaatgagttccctgatgataccctgaacttcatcaagacgcacccgctcatggatgaggcagtgccctccatcttcaacaggccatggttcctgagaacaatggtcagataccgccttaccaaaattgcagtggacacagctgctgggccatatcagaatcacactgtggtttttctgggatcagagaagggaatcatcttgaagtttttggccagaataggaaatagtggttttctaaatgacagccttttcctggaggagatgagtgtttacaactctgaaaaatgcagctatgatggagtcgaagacaaaaggatcatgggcatgcagctggacagagcaagcagctctctgtatgttgcgttctctacctgtgtgataaaggttccccttggccggtgtgaacgacatgggaagtgtaaaaaaacctgtattgcctccagagacccatattgtggatggataaaggaaggtggtgcctgcagccatttatcacccaacagcagactgacttttgagcaggacatagagcgtggcaatacagatggtctgggggactgtcacaattcctttgtggcactgaatgggcattccagttccctcttgcccagcacaaccacatcagattcgacggctcaagaggggtatgagtctaggggaggaatgctggactggaagcatctgcttgactcacctgacagcacagaccctttgggggcagtgtcttcccataatcaccaagacaagaagggagtgattcgggaaagttacctcaaaggccacgaccagctggttcccgtcaccctcttggccattgcagtcatcctggctttcgtcatgggggccgtcttctcgggcatcaccgtctactgcgtctgtgatcatcggcgcaaagacgtggctgtggtgcagcgcaaggagaaggagctcacccactcgcgccggggctccatgagcagcgtcaccaagctcagcggcctctttggggacactcaatccaaagacccaaagccggaggccatcctcacgccactcatgcacaacggcaagctcgccactcccggcaacacggccaagatgctcattaaagcagaccagcaccacctggacctgacggccctccccaccccagagtcaaccccaacgctgcagcagaagcggaagcccagccgcggcagccgcgagtgggagaggaaccagaacctcatcaatgcctgcacaaaggacatgccccccatgggctcccctgtgattcccacggacctgcccctgcgggcctcccccagccacatccccagcgtggtggtcctgcccatcacgcagcagggctaccagcatgagtacgtggaccagcccaaaatgagcgaggtggcccagatggcgctggaggaccaggccgccacactggagtataagaccatcaaggaacatctcagcagcaagagtcccaaccatggggtgaaccttgtggagaacctggacagcctgccccccaaagttccacagcgggaggcctccctgggtcccccgggagcctccctgtctcagaccggtctaagcaagcggctggaaatgcaccactcctcttcctacggggttgactataagaggagctaccccacgaactcgctcacgagaagccaccaggccaccactctctttggcaggggagacaacccgccgcccgccccgcagagggtggactccatccaggtgcacagctcccagccatctggccaggccgtgactgtctcgaggcagcccagcctcaacgcctacaactcactgacaaggtcggggctgaagcgtacgccctcgctaaagccggacgtaccccccaaaccatcctttgctcccctttccacatccatgaagcccaatgatgcgtgtacataatcccagggggagggggtcaggtgtcgaaccagcaggcaaggcgaggtgcccgctcagctcagcaaggttctcaactgcctcgagtacccaccagaccaagaaggcctgcggcagagccgaggacgctgggtcctcctctctgggacacaggggtactcacgaaaactgggccgcgtggtttggtgaaggtttgcaacggcggggactcaccttcattctcttccttcactttcccccacaccctacaacaggtcggacccacaaaagacttcagttatcatcacaaacatgagccaaaagcacatacctaccccatcccccaccccccacacacacacacacatgcacacaacacatacacacacacgcacagaggtgaacagaaactgaaacattttgtccacaacttcacgggacgtggccagactgggtttgcgttccaacctgcaaaacacaaatacattttttaaaatcaagaaaatttaaaaagacaaaaaaaaaagaattcattgataattctaactcagactttaacaatggcagaagtttactatgcgcaaatactgtgaaatgcccgccagtgttacagctttctgttgcagcagataaatgccatgttgggcaactatgtcatagatttctgctcctcctctcttttaatgaaataacgtgaccgttaacgcaagtaactctttatttattgttcaccctttttttccttaaggaaaggactcttccaaatatcatcctatgaacagctcttcagaaagcccattgaaagttaaactatttaacgtgaaatccattaactggaataattgagtttctttatttttacaataaattcactgagtaaataagttggagctggaattctgagctttgtgtttggactgtctggtctgtagctaaaggaaaaagttaggaggggaatatttatttaaatctatcagttcattgcctggtcaggtctctggcctataaacatgcaaaaaaactaattcatgttaaagtccttccagatcctaatttctaaagcaatcaggagagaaagcttttagaatggcacatcatatctcattgatgccaacatggttttgtccatggttctgactttctgtgaaggcaccagcttgcaatatgccatcccatttcaccttgcatgtgagacagcaaacaaaatccacaaatggtgtgaactaatatgctggctgctaccttgcataaattaatgatttgatcacacgggttcttcgtggggttacatctgtgaatagcctgttttccacatgtaaatttgtgccttacaccttgagttgtgtacacttgtaaactctttatgatcaactgttcccccttttgaaataagtgcagatatttatttaaccctcccttccccaccctctgccccacttccagccctctgaaagattggagtcaagcagatggaagaatgcagtggtgatagttgtcatgcgacagcctgagaacgctgggcagcaccacaccctccaattcacactgccttctagttgtgccaactggaaccaccctttggctgtgctgcgaagcatggaccccagtgttgttgtgggtgtgtcaaatcccctttcatcctcaagagctccctgcttcccttagattatttcaatacggtgatatccttatttgctagcagaaaagggactaacgtcccattcctcttttctgctgcgtccactggctagagagcaggcggtgcgcggttgggcagacacctgggaggagtctccaagccatgtgcacagcacacacgtgcagtgcacacaaagaaatgacatggaaatagatgcaggcaggctggtccctgctgtgattaacgagtaactccaagtacaaggccgaccacaatggatgctgcaaaaacgttgactggggcaaaggattttttattttattttttattttgttaattatgtttttaggggatgggaggtggtgtgtgtttttctcctcttggttttcatttgctcaagcacacaaaagggacttttgtttactctatcatgaacaaaggaactgtccacatactgtaaaccatgagcagtgttgttgttgtttttttaaacagtatatttggtggtctctttgtctgcttttatttccagttcgatcttctgggtttagttttgtctttaaaaagaattcaaaaaaagactgacaatgacagttttgagttggatagtgaaaaagtggagcctccataatcagtgtggttgccttcagacctgagtacttagctgagggtgggtgagagccctttgttccaaaagtccattagttttgctgttgtttaggagtaggtggttgttgttgtttttactttttttttttttggcttttgtaatggaatccatgttcacatcctgtgaactctgtctcctgaaaccctgaagtatttcctagaacctgaaatattgttttcttccttgaattttctctagaaatgcagaaattaggaaggtgatgggtctgtatccccctgcccccttctttcccatgcttgactcccgagagtactggcagtgcagcacccatcattgacgtaagcggctgtcttgtccagtgtttgtaggcatcactgcctcagctgttaaggagacctgtgtcaaaacttacatccacattcctacacccccacaacccatcacttctggtgttaaccctaaaatacccacatgtattgagctggtcttctgcatttaagtatttctccccagtttttttccccactgtgtgtggggggagggtccataaacccgagtgtgcctttgctttccacccttgctagacactggtagatgcaacaaactcagatttatatttgttgtaaagttgtaaaaatattgtgatgtcaccaattttccttccatctccacatcccctaacatctgattcacgacttaatgtatgttgtaagaaaagaaaaaagaaaagaaaaaaagggaaaaaagaaaagcaaggaaaaggctctttattacttaaaagtaataaaacctgactgttctatatta

SEQ ID NO: 363830 - DNA, 5271 bp, Homo sapiens
acaggaaatggctagagtttctgctgtaactctcaacctagccattcttctcatattatcctatggtagcttatctgaacctcagaaatctatccttttctaatttgaatcattttagtcaacgcagcctcagaaacggaaaccatctattgaaataatacacaaaagggacagccgtaatagcgtgtagccgttgaagcctccattccaatgaaaagacagtgggaatagatccctttggaaaccactaactaatcccagaaagaggaatgcctgtgaagttgagttgaacctgaagactagacacactgtagaacctccataggaagggtgcagagtaactgagttacttgtgatagggacaagacttacccactaccagaaacctgccccatcggtcacaaatgggattcccagagtggacactttctgtgtttagtgctgccatgggaatatcaaagaaggacactggcctttcttgagcacctatgtgtcagacactgtgcaagatgctttcaccattatgtcactatcctcccaacaccgagaggtatctttatccccactgggtgcacaggaagaggttaagtgattccctgaggcccacccagcaagtatgagagataggatctggcccttcattttctaactacaagttcaatgggctttctgctgaacacaccccacaccaccaccaccaccaccaccaccaccaccactaagccgtgtcatttctagggccatctcctctcagtcttacagccagcttgggtgtcccacctccaggcctctgcgcaaagggaatgtgggtctctctggtgatgttttcctaactgtatttgtgatgaaaacagggcattccagttccctcttgcccagcacaaccacatcagattcgacggctcaagaggggtatgagtctaggggaggaatgctggactggaagcatctgcttgactcacctgacagcacagaccctttgggggcagtgtcttcccataatcaccaagacaagaagggagtgattcgggaaagttacctcaaaggccacgaccagctggttcccgtcaccctcttggccattgcagtcatcctggctttcgtcatgggggccgtcttctcgggcatcaccgtctactgcgtctgtgatcatcggcgcaaagacgtggctgtggtgcagcgcaaggagaaggagctcacccactcgcgccggggctccatgagcagcgtcaccaagctcagcggcctctttggggacactcaatccaaagacccaaagccggaggccatcctcacgccactcatgcacaacggcaagctcgccactcccggcaacacggccaagatgctcattaaagcagaccagcaccacctggacctgacggccctccccaccccagagtcaaccccaacgctgcagcagaagcggaagcccagccgcggcagccgcgagtgggagaggaaccagaacctcatcaatgcctgcacaaaggacatgccccccatgggctcccctgtgattcccacggacctgcccctgcgggcctcccccagccacatccccagcgtggtggtcctgcccatcacgcagcagggctaccagcatgagtacgtggaccagcccaaaatgagcgaggtggcccagatggcgctggaggaccaggccgccacactggagtataagaccatcaaggaacatctcagcagcaagagtcccaaccatggggtgaaccttgtggagaacctggacagcctgccccccaaagttccacagcgggaggcctccctgggtcccccgggagcctccctgtctcagaccggtctaagcaagcggctggaaatgcaccactcctcttcctacggggttgactataagaggagctaccccacgaactcgctcacgagaagccaccaggccaccactctcaaaagaaacaacactaactcctccaattcctctcacctctccagaaaccagagctttggcaggggagacaacccgccgcccgccccgcagagggtggactccatccaggtgcacagctcccagccatctggccaggccgtgactgtctcgaggcagcccagcctcaacgcctacaactcactgacaaggtcggggctgaagcgtacgccctcgctaaagccggacgtaccccccaaaccatcctttgctcccctttccacatccatgaagcccaatgatgcgtgtacataatcccagggggagggggtcaggtgtcgaaccagcaggcaaggcgaggtgcccgctcagctcagcaaggttctcaactgcctcgagtacccaccagaccaagaaggcctgcggcagagccgaggacgctgggtcctcctctctgggacacaggggtactcacgaaaactgggccgcgtggtttggtgaaggtttgcaacggcggggactcaccttcattctcttccttcactttcccccacaccctacaacaggtcggacccacaaaagacttcagttatcatcacaaacatgagccaaaagcacatacctaccccatcccccaccccccacacacacacacacatgcacacaacacatacacacacacgcacagaggtgaacagaaactgaaacattttgtccacaacttcacgggacgtggccagactgggtttgcgttccaacctgcaaaacacaaatacattttttaaaatcaagaaaatttaaaaagacaaaaaaaaaagaattcattgataattctaactcagactttaacaatggcagaagtttactatgcgcaaatactgtgaaatgcccgccagtgttacagctttctgttgcagcagataaatgccatgttgggcaactatgtcatagatttctgctcctcctctcttttaatgaaataacgtgaccgttaacgcaagtaactctttatttattgttcaccctttttttccttaaggaaaggactcttccaaatatcatcctatgaacagctcttcagaaagcccattgaaagttaaactatttaacgtgaaatccattaactggaataattgagtttctttatttttacaataaattcactgagtaaataagttggagctggaattctgagctttgtgtttggactgtctggtctgtagctaaaggaaaaagttaggaggggaatatttatttaaatctatcagttcattgcctggtcaggtctctggcctataaacatgcaaaaaaactaattcatgttaaagtccttccagatcctaatttctaaagcaatcaggagagaaagcttttagaatggcacatcatatctcattgatgccaacatggttttgtccatggttctgactttctgtgaaggcaccagcttgcaatatgccatcccatttcaccttgcatgtgagacagcaaacaaaatccacaaatggtgtgaactaatatgctggctgctaccttgcataaattaatgatttgatcacacgggttcttcgtggggttacatctgtgaatagcctgttttccacatgtaaatttgtgccttacaccttgagttgtgtacacttgtaaactctttatgatcaactgttcccccttttgaaataagtgcagatatttatttaaccctcccttccccaccctctgccccacttccagccctctgaaagattggagtcaagcagatggaagaatgcagtggtgatagttgtcatgcgacagcctgagaacgctgggcagcaccacaccctccaattcacactgccttctagttgtgccaactggaaccaccctttggctgtgctgcgaagcatggaccccagtgttgttgtgggtgtgtcaaatcccctttcatcctcaagagctccctgcttcccttagattatttcaatacggtgatatccttatttgctagcagaaaagggactaacgtcccattcctcttttctgctgcgtccactggctagagagcaggcggtgcgcggttgggcagacacctgggaggagtctccaagccatgtgcacagcacacacgtgcagtgcacacaaagaaatgacatggaaatagatgcaggcaggctggtccctgctgtgattaacgagtaactccaagtacaaggccgaccacaatggatgctgcaaaaacgttgactggggcaaaggattttttattttattttttattttgttaattatgtttttaggggatgggaggtggtgtgtgtttttctcctcttggttttcatttgctcaagcacacaaaagggacttttgtttactctatcatgaacaaaggaactgtccacatactgtaaaccatgagcagtgttgttgttgtttttttaaacagtatatttggtggtctctttgtctgcttttatttccagttcgatcttctgggtttagttttgtctttaaaaagaattcaaaaaaagactgacaatgacagttttgagttggatagtgaaaaagtggagcctccataatcagtgtggttgccttcagacctgagtacttagctgagggtgggtgagagccctttgttccaaaagtccattagttttgctgttgtttaggagtaggtggttgttgttgtttttactttttttttttttggcttttgtaatggaatccatgttcacatcctgtgaactctgtctcctgaaaccctgaagtatttcctagaacctgaaatattgttttcttccttgaattttctctagaaatgcagaaattaggaaggtgatgggtctgtatccccctgcccccttctttcccatgcttgactcccgagagtactggcagtgcagcacccatcattgacgtaagcggctgtcttgtccagtgtttgtaggcatcactgcctcagctgttaaggagacctgtgtcaaaacttacatccacattcctacacccccacaacccatcacttctggtgttaaccctaaaatacccacatgtattgagctggtcttctgcatttaagtatttctccccagtttttttccccactgtgtgtggggggagggtccataaacccgagtgtgcctttgctttccacccttgctagacactggtagatgcaacaaactcagatttatatttgttgtaaagttgtaaaaatattgtgatgtcaccaattttccttccatctccacatcccctaacatctgattcacgacttaatgtatgttgtaagaaaagaaaaaagaaaagaaaaaaagggaaaaaagaaaagcaaggaaaaggctctttattacttaaaagtaataaaacctgactgttctatatta

SEQ ID NO: 363831 - DNA, 4277 bp, Homo sapiens
acgccatatgcgatgtctattgcaggagtgattcgggaaagttacctcaaaggccacgaccagctggttcccgtcaccctcttggccattgcagtcatcctggctttcgtcatgggggccgtcttctcgggcatcaccgtctactgcgtctgtgatcatcggcgcaaagacgtggctgtggtgcagcgcaaggagaaggagctcacccactcgcgccggggctccatgagcagcgtcaccaagctcagcggcctctttggggacactcaatccaaagacccaaagccggaggccatcctcacgccactcatgcacaacggcaagctcgccactcccggcaacacggccaagatgctcattaaagcagaccagcaccacctggacctgacggccctccccaccccagagtcaaccccaacgctgcagcagaagcggaagcccagccgcggcagccgcgagtgggagaggaaccagaacctcatcaatgcctgcacaaaggacatgccccccatgggctcccctgtgattcccacggacctgcccctgcgggcctcccccagccacatccccagcgtggtggtcctgcccatcacgcagcagggctaccagcatgagtacgtggaccagcccaaaatgagcgaggtggcccagatggcgctggaggaccaggccgccacactggagtataagaccatcaaggaacatctcagcagcaagagtcccaaccatggggtgaaccttgtggagaacctggacagcctgccccccaaagttccacagcgggaggcctccctgggtcccccgggagcctccctgtctcagaccggtctaagcaagcggctggaaatgcaccactcctcttcctacggggttgactataagaggagctaccccacgaactcgctcacgagaagccaccaggccaccactctcaaaagaaacaacactaactcctccaattcctctcacctctccagaaaccagagctttggcaggggagacaacccgccgcccgccccgcagagggtggactccatccaggtgcacagctcccagccatctggccaggccgtgactgtctcgaggcagcccagcctcaacgcctacaactcactgacaaggtcggggctgaagcgtacgccctcgctaaagccggacgtaccccccaaaccatcctttgctcccctttccacatccatgaagcccaatgatgcgtgtacataatcccagggggagggggtcaggtgtcgaaccagcaggcaaggcgaggtgcccgctcagctcagcaaggttctcaactgcctcgagtacccaccagaccaagaaggcctgcggcagagccgaggacgctgggtcctcctctctgggacacaggggtactcacgaaaactgggccgcgtggtttggtgaaggtttgcaacggcggggactcaccttcattctcttccttcactttcccccacaccctacaacaggtcggacccacaaaagacttcagttatcatcacaaacatgagccaaaagcacatacctaccccatcccccaccccccacacacacacacacatgcacacaacacatacacacacacgcacagaggtgaacagaaactgaaacattttgtccacaacttcacgggacgtggccagactgggtttgcgttccaacctgcaaaacacaaatacattttttaaaatcaagaaaatttaaaaagacaaaaaaaaaagaattcattgataattctaactcagactttaacaatggcagaagtttactatgcgcaaatactgtgaaatgcccgccagtgttacagctttctgttgcagcagataaatgccatgttgggcaactatgtcatagatttctgctcctcctctcttttaatgaaataacgtgaccgttaacgcaagtaactctttatttattgttcaccctttttttccttaaggaaaggactcttccaaatatcatcctatgaacagctcttcagaaagcccattgaaagttaaactatttaacgtgaaatccattaactggaataattgagtttctttatttttacaataaattcactgagtaaataagttggagctggaattctgagctttgtgtttggactgtctggtctgtagctaaaggaaaaagttaggaggggaatatttatttaaatctatcagttcattgcctggtcaggtctctggcctataaacatgcaaaaaaactaattcatgttaaagtccttccagatcctaatttctaaagcaatcaggagagaaagcttttagaatggcacatcatatctcattgatgccaacatggttttgtccatggttctgactttctgtgaaggcaccagcttgcaatatgccatcccatttcaccttgcatgtgagacagcaaacaaaatccacaaatggtgtgaactaatatgctggctgctaccttgcataaattaatgatttgatcacacgggttcttcgtggggttacatctgtgaatagcctgttttccacatgtaaatttgtgccttacaccttgagttgtgtacacttgtaaactctttatgatcaactgttcccccttttgaaataagtgcagatatttatttaaccctcccttccccaccctctgccccacttccagccctctgaaagattggagtcaagcagatggaagaatgcagtggtgatagttgtcatgcgacagcctgagaacgctgggcagcaccacaccctccaattcacactgccttctagttgtgccaactggaaccaccctttggctgtgctgcgaagcatggaccccagtgttgttgtgggtgtgtcaaatcccctttcatcctcaagagctccctgcttcccttagattatttcaatacggtgatatccttatttgctagcagaaaagggactaacgtcccattcctcttttctgctgcgtccactggctagagagcaggcggtgcgcggttgggcagacacctgggaggagtctccaagccatgtgcacagcacacacgtgcagtgcacacaaagaaatgacatggaaatagatgcaggcaggctggtccctgctgtgattaacgagtaactccaagtacaaggccgaccacaatggatgctgcaaaaacgttgactggggcaaaggattttttattttattttttattttgttaattatgtttttaggggatgggaggtggtgtgtgtttttctcctcttggttttcatttgctcaagcacacaaaagggacttttgtttactctatcatgaacaaaggaactgtccacatactgtaaaccatgagcagtgttgttgttgtttttttaaacagtatatttggtggtctctttgtctgcttttatttccagttcgatcttctgggtttagttttgtctttaaaaagaattcaaaaaaagactgacaatgacagttttgagttggatagtgaaaaagtggagcctccataatcagtgtggttgccttcagacctgagtacttagctgagggtgggtgagagccctttgttccaaaagtccattagttttgctgttgtttaggagtaggtggttgttgttgtttttactttttttttttttggcttttgtaatggaatccatgttcacatcctgtgaactctgtctcctgaaaccctgaagtatttcctagaacctgaaatattgttttcttccttgaattttctctagaaatgcagaaattaggaaggtgatgggtctgtatccccctgcccccttctttcccatgcttgactcccgagagtactggcagtgcagcacccatcattgacgtaagcggctgtcttgtccagtgtttgtaggcatcactgcctcagctgttaaggagacctgtgtcaaaacttacatccacattcctacacccccacaacccatcacttctggtgttaaccctaaaatacccacatgtattgagctggtcttctgcatttaagtatttctccccagtttttttccccactgtgtgtggggggagggtccataaacccgagtgtgcctttgctttccacccttgctagacactggtagatgcaacaaactcagatttatatttgttgtaaagttgtaaaaatattgtgatgtcaccaattttccttccatctccacatcccctaacatctgattcacgacttaatgtatgttgtaagaaaagaaaaaagaaaagaaaaaaagggaaaaaagaaaagcaaggaaaaggctctttattacttaaaagtaataaaacctgactgttctatatta

SEQ ID NO: 363832 - DNA, 1481 bp, Homo sapiens
ttcttttctttcttacgaattccagacaaaaacgcccttgtactcagctcacacagaaggggatgtttaaatatagccccacacctgagctgctgattctctttctccccttccaaggctagattggcagcaaattgtaaagacaacccaattctcagcaaaacaggaaggtgaacagaagcaagaaatgtaaactttagcttaagtacattttagactttaatttaccatcattatgagggaaaagagtggcttctggaaataattttacctttgtcgtcatccatcctgtcgatcaaataatcacagttaagatggaaatatattttcaaaagagagatggcgatggagatcattttttttgttagccctcttgatgaacagatgtggcatgttgaataccaagtatttggtacgtgtatttgaagataatgaaagggcacacgaatccatctgtgttctagtctttgggccaatttaactttcagagccctcccttctgagctacatatatgcagatgctatagttctagtgtcagagagaagagctaatacaggaaagttttcataaacggtgttccttggagcacaatgccatgatttatcagaaggtgctaaatgggatccggagacatctcttgaaggctgcgctcttttcttcttgcatgtggatatcatgaacatggatatgggcttatctgccctgataagacataactcattaagcagaaaatgaactgttttgactctgtgtttgaccttgtattaatttttctttgcctatagggaccatatttatactgttgatatagacacatcacacacggaagaaatttattgtagcaaagtaagttgttttaaaactatatttgtaaaatgaaggacctttggatagttcttgaacagaatatgtattttaagtgcattaagatgatgtagctaatcataatttagagatgccaacatgcattttgtgaaatcctaattagggaataggttaggatttgatacatgttcagaaacagttatgtacttcatattttattcatcaaatatatgtgtacatatacattttgaagttttacataatttctacatttcttttataaaaatattgcctcatttatccaggaaaacatcagttttcataagtaaaattttgttccacaaatgtattctacaaaggtttcaatgttatatttccatgtcttgcagtattaagtttgatttgactgctgtggttcaggaacttgatcgttacccatttcagacagacataaagtataacctaagctttcctcataactccacatggggatattttaattaataaaacctgtgccataggagtagaagatcccttcactccattaatctatgtgaaggagtataacctgaattaaatctttgtccacctagagtgaatgttctctttatgtgttagaaaatgacttctggattttaaaaaaaaagccgtcttt

SEQ ID NO: 363833 - DNA, 1888 bp, Homo sapiens
ttcttttctttcttacgaattccagacaaaaacgcccttgtactcagctcacacagaaggggatgtttaaatatagccccacacctgagctgctgattctctttctccccttccaaggctagattggcagcaaattgtaaagacaacccaattctcagcaaaacaggaaggtgaacagaagcaagaaatgtaaactttagcttaagtacattttagactttaatttaccatcattatgagggaaaagagtggcttctggaaataattttacctttgtcgtcatccatcctgtcgatcaaataatcacagttaagatggaaatatattttcaaaagagagatggcgatggagatcattttttttgttagccctcttgatgaacagatgtggcatgttgaataccaagtatttggtacgtgtatttgaagataatgaaagggcacacgaatccatctgtgttctagtctttgggccaatttaactttcagagccctcccttctgagctacatatatgcagatgctatagttctagtgtcagagagaagagctaatacaggaaagttttcataaacggtgttccttggagcacaatgccatgatttatcagaaggtgctaaatgggatccggagacatctcttgaaggctgcgctcttttcttcttgcatgtggatatcatgaacatggatatgggcttatctgccctgataagacataactcattaagcagaaaatgaactgttttgactctgtgtttgaccttgtattaatttttctttgcctatagggaccatatttatactgttgatatagacacatcacacacggaagaaatttattgtagcaaaaaactgacatggaaatctagacaggccgatgtagacacatgcagaatgaagggaaaacataaggatgagtgccacaactttattaaagttcttctaaagaaaaacgatgatgcattgtttgtctgtggaactaatgccttcaacccttcctgcagaaactataaggagctgctgctgtgaagtctaagatttgatgactgcttcaagggttagttttcacttcttggaaagaggaagtcaccatggcttttgcctctggacctttccaacctcacaaaccgaaacatttgtacttcactacttcttgcctttgaccagctatagatggatacattggaaccattcggggatgaattcagcggaatggccagatgcccatatgatgccaaacatgccaacgttgcactgtttgcagatggaaaactatactcagccacagtgactgacttccttgccattgacgcagtcatttaccggagtcttggagaaagccctaccctgcggaccgtcaagcacgattcaaaatggttgaaagaaccatactttgttcaagccgtggattacggagattatatctacttcttcttcagggaaatagcagtggagtataacaccatgggaaaggtagttttcccaagagtggctcaggtttgtaagaatgatatgggaggatctcaaagagtcctggagaaacagtggacgtcgttcctgaaggcgcgcttgaactgctcagttcctggagactctcatttttatttcaacattctccaggcagttacagatgtgattcgtatcaacgggcgtgatgttgtcctggcaacgttttctacaccttataacaggtaatcatgccctagctgtgttgacctcatcaattcttcctggcttccttctcccagggggttctcttctaataaaccatatttgcaactgactgaaaattgcattcattgtgtgtagctaagaagcacttaacacttagttttcatcaacaaattaaaagtagtttataagcactattaagttaggttttaggggaag

SEQ ID NO: 363834 - DNA, 1624 bp, Homo sapiens
ttcttttctttcttacgaattccagacaaaaacgcccttgtactcagctcacacagaaggggatgtttaaatatagccccacacctgagctgctgattctctttctccccttccaaggctagattggcagcaaattgtaaagacaacccaattctcagcaaaacaggaaggtgaacagaagcaagaaatgtaaactttagcttaagtacattttagactttaatttaccatcattatgagggaaaagagtggcttctggaaataattttacctttgtcgtcatccatcctgtcgatcaaataatcacagttaagatggaaatatattttcaaaagagagatggcgatggagatcattttttttgttagccctcttgatgaacagatgtggcatgttgaataccaagtatttggtacgtgtatttgaagataatgaaagggcacacgaatccatctgtgttctagtctttgggccaatttaactttcagagccctcccttctgagctacatatatgcagatgctatagttctagtgtcagagagaagagctaatacaggaaagttttcataaacggtgttccttggagcacaatgccatgatttatcagaaggtgctaaatgggatccggagacatctcttgaaggctgcgctcttttcttcttgcatgtggatatcatgaacatggatatgggcttatctgccctgataagacataactcattaagcagaaaatgaactgttttgactctgtgtttgaccttgtattaatttttctttgcctatagggaccatatttatactgttgatatagacacatcacacacggaagaaatttattgtagcaaaaaactgacatggaaatctagacaggccgatgtagacacatgcagaatgaagggaaaacataaggatgagtgccacaactttattaaagttcttctaaagaaaaacgatgatgcattgtttgtctgtggaactaatgccttcaacccttcctgcagaaactataagatggatacattggaaccattcggggatgaattcagcggaatggccagatgcccatatgatgccaaacatgccaacgttgcactgtttgcagatggaaaactatactcagccacagtgactgacttccttgccattgacgcagtcatttaccggagtcttggagaaagccctaccctgcggaccgtcaagcacgattcaaaatggttgaaagaaccatactttgttcaagccgtggattacggagattatatctacttcttcttcagggaaatagcagtggagtataacaccatgggaaaggtagttttcccaagagtggctcaggtttgtaagaatgatatgggagggtccataaacccgagtgtgcctttgctttccacccttgctagacactggtagatgcaacaaactcagatttatatttgttgtaaagttgtaaaaatattgtgatgtcaccaattttccttccatctccacatcccctaacatctgattcacgacttaatgtatgttgtaagaaaagaaaaaagaaaagaaaaaaagggaaaaaagaaaagcaaggaaaaggctctttattacttaaaagtaataaaacctgactgttctatatta

SEQ ID NO: 363835 - DNA, 6803 bp, Homo sapiens
ggcacgaggctgcagccaactccgctccccgcgcactcggctgcccaggcgctcggaacccagcagcggcgctcctccgcggtgccggtcgcccgcgatgcccgcttagcagcgtgtagcagcggccagcatcaccacacccgcggcaccgcgctgccggccgcagagccgggccagagccttgcccccctcccccagcccccaccccgccccccgccctgaaatgacttgttaatcggcgcagacaccaccaaggggactcaccgaagtggaatccaagtggaatttggatttggagaagagtttcttgaacatttaccctcttccttgttggttttctttttctttttcttctttttttttttggcttcttttttcctctccccttctccgctcgtcattggagatgaacacatcgcgtttgcatcccagaaagtagtcgccgcgactatttcccccaaagagacaagcacacatgtaggaatgacaaaggcttgcgaaggagagagcgcagcccgcggcccggagagatcccctcgataatggattactaaatgggatacacgctgtaccagttcgctccgagccccggccgcctgtccgtcgatgcaccgaaaagggtgaagtagagaaataaagtctccccgctgaactactatgaggtcagaagccttgctgctatatttcacactgctacactttgctggggctggtttcccagaagattctgagccaatcagtatttcgcatggcaactatacaaaacagtatccggtgtttgtgggccacaagccaggacggaacaccacacagaggcacaggctggacatccagatgattatgatcatgaacggaaccctctacattgctgctagggaccatatttatactgttgatatagacacatcacacacggaagaaatttattgtagcaaaaaactgacatggaaatctagacaggccgatgtagacacatgcagaatgaagggaaaacataaggatgagtgccacaactttattaaagttcttctaaagaaaaacgatgatgcattgtttgtctgtggaactaatgccttcaacccttcctgcagaaactataagatggatacattggaaccattcggggatgaattcagcggaatggccagatgcccatatgatgccaaacatgccaacgttgcactgtttgcagatggaaaactatactcagccacagtgactgacttccttgccattgacgcagtcatttaccggagtcttggagaaagccctaccctgcggaccgtcaagcacgattcaaaatggttgaaagaaccatactttgttcaagccgtggattacggagattatatctacttcttcttcagggaaatagcagtggagtataacaccatgggaaaggtagttttcccaagagtggctcaggtttgtaagaatgatatgggaggatctcaaagagtcctggagaaacagtggacgtcgttcctgaaggcgcgcttgaactgctcagttcctggagactctcatttttatttcaacattctccaggcagttacagatgtgattcgtatcaacgggcgtgatgttgtcctggcaacgttttctacaccttataacagcatccctgggtctgcagtctgtgcctatgacatgcttgacattgccagtgtttttactgggagattcaaggaacagaagtctcctgattccacctggacaccagttcctgatgaacgagttcctaagcccaggccaggttgctgtgctggctcatcctccttagaaagatatgcaacctccaatgagttccctgatgataccctgaacttcatcaagacgcacccgctcatggatgaggcagtgccctccatcttcaacaggccatggttcctgagaacaatggtcagataccgccttaccaaaattgcagtggacacagctgctgggccatatcagaatcacactgtggtttttctgggatcagagaagggaatcatcttgaagtttttggccagaataggaaatagtggttttctaaatgacagccttttcctggaggagatgagtgtttacaactctgaaaaatgcagctatgatggagtcgaagacaaaaggatcatgggcatgcagctggacagagcaagcagctctctgtatgttgcgttctctacctgtgtgataaaggttccccttggccggtgtgaacgacatgggaagtgtaaaaaaacctgtattgcctccagagacccatattgtggatggataaaggaaggtggtgcctgcagccatttatcacccaacagcagactgacttttgagcaggacatagagcgtggcaatacagatggtctgggggactgtcacaattcctttgtggcactgaatgggcattccagttccctcttgcccagcacaaccacatcagattcgacggctcaagaggggtatgagtctaggggaggaatgctggactggaagcatctgcttgactcacctgacagcacagaccctttgggggcagtgtcttcccataatcaccaagacaagaagggagtgattcgggaaagttacctcaaaggccacgaccagctggttcccgtcaccctcttggccattgcagtcatcctggctttcgtcatgggggccgtcttctcgggcatcaccgtctactgcgtctgtgatcatcggcgcaaagacgtggctgtggtgcagcgcaaggagaaggagctcacccactcgcgccggggctccatgagcagcgtcaccaagctcagcggcctctttggggacactcaatccaaagacccaaagccggaggccatcctcacgccactcatgcacaacggcaagctcgccactcccggcaacacggccaagatgctcattaaagcagaccagcaccacctggacctgacggccctccccaccccagagtcaaccccaacgctgcagcagaagcggaagcccagccgcggcagccgcgagtgggagaggaaccagaacctcatcaatgcctgcacaaaggacatgccccccatgggctcccctgtgattcccacggacctgcccctgcgggcctcccccagccacatccccagcgtggtggtcctgcccatcacgcagcagggctaccagcatgagtacgtggaccagcccaaaatgagcgaggtggcccagatggcgctggaggaccaggccgccacactggagtataagaccatcaaggaacatctcagcagcaagagtcccaaccatggggtgaaccttgtggagaacctggacagcctgccccccaaagttccacagcgggaggcctccctgggtcccccgggagcctccctgtctcagaccggtctaagcaagcggctggaaatgcaccactcctcttcctacggggttgactataagaggagctaccccacgaactcgctcacgagaagccaccaggccaccactctcaaaagaaacaacactaactcctccaattcctctcacctctccagaaaccagagctttggcaggggagacaacccgccgcccgccccgcagagggtggactccatccaggtgcacagctcccagccatctggccaggccgtgactgtctcgaggcagcccagcctcaacgcctacaactcactgacaaggtcggggctgaagcgtacgccctcgctaaagccggacgtaccccccaaaccatcctttgctcccctttccacatccatgaagcccaatgatgcgtgtacataatcccagggggagggggtcaggtgtcgaaccagcaggcaaggcgaggtgcccgctcagctcagcaaggttctcaactgcctcgagtacccaccagaccaagaaggcctgcggcagagccgaggacgctgggtcctcctctctgggacacaggggtactcacgaaaactgggccgcgtggtttggtgaaggtttgcaacggcggggactcaccttcattctcttccttcactttcccccacaccctacaacaggtcggacccacaaaagacttcagttatcatcacaaacatgagccaaaagcacatacctaccccatcccccaccccccacacacacacacacatgcacacaacacatacacacacacgcacagaggtgaacagaaactgaaacattttgtccacaacttcacgggacgtggccagactgggtttgcgttccaacctgcaaaacacaaatacattttttaaaatcaagaaaatttaaaaagacaaaaaaaaaagaattcattgataattctaactcagactttaacaatggcagaagtttactatgcgcaaatactgtgaaatgcccgccagtgttacagctttctgttgcagcagataaatgccatgttgggcaactatgtcatagatttctgctcctcctctcttttaatgaaataacgtgaccgttaacgcaagtaactctttatttattgttcaccctttttttccttaaggaaaggactcttccaaatatcatcctatgaacagctcttcagaaagcccattgaaagttaaactatttaacgtgaaatccattaactggaataattgagtttctttatttttacaataaattcactgagtaaataagttggagctggaattctgagctttgtgtttggactgtctggtctgtagctaaaggaaaaagttaggaggggaatatttatttaaatctatcagttcattgcctggtcaggtctctggcctataaacatgcaaaaaaactaattcatgttaaagtccttccagatcctaatttctaaagcaatcaggagagaaagcttttagaatggcacatcatatctcattgatgccaacatggttttgtccatggttctgactttctgtgaaggcaccagcttgcaatatgccatcccatttcaccttgcatgtgagacagcaaacaaaatccacaaatggtgtgaactaatatgctggctgctaccttgcataaattaatgatttgatcacacgggttcttcgtggggttacatctgtgaatagcctgttttccacatgtaaatttgtgccttacaccttgagttgtgtacacttgtaaactctttatgatcaactgttcccccttttgaaataagtgcagatatttatttaaccctcccttccccaccctctgccccacttccagccctctgaaagattggagtcaagcagatggaagaatgcagtggtgatagttgtcatgcgacagcctgagaacgctgggcagcaccacaccctccaattcacactgccttctagttgtgccaactggaaccaccctttggctgtgctgcgaagcatggaccccagtgttgttgtgggtgtgtcaaatcccctttcatcctcaagagctccctgcttcccttagattatttcaatacggtgatatccttatttgctagcagaaaagggactaacgtcccattcctcttttctgctgcgtccactggctagagagcaggcggtgcgcggttgggcagacacctgggaggagtctccaagccatgtgcacagcacacacgtgcagtgcacacaaagaaatgacatggaaatagatgcaggcaggctggtccctgctgtgattaacgagtaactccaagtacaaggccgaccacaatggatgctgcaaaaacgttgactggggcaaaggattttttattttattttttattttgttaattatgtttttaggggatgggaggtggtgtgtgtttttctcctcttggttttcatttgctcaagcacacaaaagggacttttgtttactctatcatgaacaaaggaactgtccacatactgtaaaccatgagcagtgttgttgttgtttttttaaacagtatatttggtggtctctttgtctgcttttatttccagttcgatcttctgggtttagttttgtctttaaaaagaattcaaaaaaagactgacaatgacagttttgagttggatagtgaaaaagtggagcctccataatcagtgtggttgccttcagacctgagtacttagctgagggtgggtgagagccctttgttccaaaagtccattagttttgctgttgtttaggagtaggtggttgttgttgtttttactttttttttttttggcttttgtaatggaatccatgttcacatcctgtgaactctgtctcctgaaaccctgaagtatttcctagaacctgaaatattgttttcttccttgaattttctctagaaatgcagaaattaggaaggtgatgggtctgtatccccctgcccccttctttcccatgcttgactcccgagagtactggcagtgcagcacccatcattgacgtaagcggctgtcttgtccagtgtttgtaggcatcactgcctcagctgttaaggagacctgtgtcaaaacttacatccacattcctacacccccacaacccatcacttctggtgttaaccctaaaatacccacatgtattgagctggtcttctgcatttaagtatttctccccagtttttttccccactgtgtgtggggggagggtccataaacccgagtgtgcctttgctttccacccttgctagacactggtagatgcaacaaactcagatttatatttgttgtaaagttgtaaaaatattgtgatgtcaccaattttccttccatctccacatcccctaacatctgattcacgacttaatgtatgttgtaagaaaagaaaaaagaaaagaaaaaaagggaaaaaagaaaagcaaggaaaaggctctttattacttaaaagtaataaaacctgactgttctatatta

SEQ ID NO: 363836 - DNA, 6873 bp, Homo sapiens
ttcttttctttcttacgaattccagacaaaaacgcccttgtactcagctcacacagaaggggatgtttaaatatagccccacacctgagctgctgattctctttctccccttccaaggctagattggcagcaaattgtaaagacaacccaattctcagcaaaacaggaaggtgaacagaagcaagaaatgtaaactttagcttaagtacattttagactttaatttaccatcattatgagggaaaagagtggcttctggaaataattttacctttgtcgtcatccatcctgtcgatcaaataatcacagttaagatggaaatatattttcaaaagagagatggcgatggagatcattttttttgttagccctcttgatgaacagatgtggcatgttgaataccaagtatttggtacgtgtatttgaagataatgaaagggcacacgaatccatctgtgttctagtctttgggccaatttaactttcagagccctcccttctgagctacatatatgcagatgctatagttctagtgtcagagagaagagctaatacaggaaagttttcataaacggtgttccttggagcacaatgccatgatttatcagaaggtgctaaatgggatccggagacatctcttgaaggctgcgctcttttcttcttgcatgtggatatcatgaacatggatatgggcttatctgccctgataagacataactcattaagcagaaaatgaactgttttgactctgtgtttgaccttgtattaatttttctttgcctatagggaccatatttatactgttgatatagacacatcacacacggaagaaatttattgtagcaaaaaactgacatggaaatctagacaggccgatgtagacacatgcagaatgaagggaaaacataaggatgagtgccacaactttattaaagttcttctaaagaaaaacgatgatgcattgtttgtctgtggaactaatgccttcaacccttcctgcagaaactataaggagctgctgctgtgaagtctaagatttgatgactgcttcaagggttagttttcacttcttggaaagaggaagtcaccatggcttttgcctctggacctttccaacctcacaaaccgaaacatttgtacttcactacttcttgcctttgaccagctatagatggatacattggaaccattcggggatgaattcagcggaatggccagatgcccatatgatgccaaacatgccaacgttgcactgtttgcagatggaaaactatactcagccacagtgactgacttccttgccattgacgcagtcatttaccggagtcttggagaaagccctaccctgcggaccgtcaagcacgattcaaaatggttgaaagaaccatactttgttcaagccgtggattacggagattatatctacttcttcttcagggaaatagcagtggagtataacaccatgggaaaggtagttttcccaagagtggctcaggtttgtaagaatgatatgggaggatctcaaagagtcctggagaaacagtggacgtcgttcctgaaggcgcgcttgaactgctcagttcctggagactctcatttttatttcaacattctccaggcagttacagatgtgattcgtatcaacgggcgtgatgttgtcctggcaacgttttctacaccttataacagcatccctgggtctgcagtctgtgcctatgacatgcttgacattgccagtgtttttactgggagattcaaggaacagaagtctcctgattccacctggacaccagttcctgatgaacgagttcctaagcccaggccaggttgctgtgctggctcatcctccttagaaagatatgcaacctccaatgagttccctgatgataccctgaacttcatcaagacgcacccgctcatggatgaggcagtgccctccatcttcaacaggccatggttcctgagaacaatggtcagataccgccttaccaaaattgcagtggacacagctgctgggccatatcagaatcacactgtggtttttctgggatcagagaagggaatcatcttgaagtttttggccagaataggaaatagtggttttctaaatgacagccttttcctggaggagatgagtgtttacaactctgaaaaatgcagctatgatggagtcgaagacaaaaggatcatgggcatgcagctggacagagcaagcagctctctgtatgttgcgttctctacctgtgtgataaaggttccccttggccggtgtgaacgacatgggaagtgtaaaaaaacctgtattgcctccagagacccatattgtggatggataaaggaaggtggtgcctgcagccatttatcacccaacagcagactgacttttgagcaggacatagagcgtggcaatacagatggtctgggggactgtcacaattcctttgtggcactgaatgggcattccagttccctcttgcccagcacaaccacatcagattcgacggctcaagaggggtatgagtctaggggaggaatgctggactggaagcatctgcttgactcacctgacagcacagaccctttgggggcagtgtcttcccataatcaccaagacaagaagggagtgattcgggaaagttacctcaaaggccacgaccagctggttcccgtcaccctcttggccattgcagtcatcctggctttcgtcatgggggccgtcttctcgggcatcaccgtctactgcgtctgtgatcatcggcgcaaagacgtggctgtggtgcagcgcaaggagaaggagctcacccactcgcgccggggctccatgagcagcgtcaccaagctcagcggcctctttggggacactcaatccaaagacccaaagccggaggccatcctcacgccactcatgcacaacggcaagctcgccactcccggcaacacggccaagatgctcattaaagcagaccagcaccacctggacctgacggccctccccaccccagagtcaaccccaacgctgcagcagaagcggaagcccagccgcggcagccgcgagtgggagaggaaccagaacctcatcaatgcctgcacaaaggacatgccccccatgggctcccctgtgattcccacggacctgcccctgcgggcctcccccagccacatccccagcgtggtggtcctgcccatcacgcagcagggctaccagcatgagtacgtggaccagcccaaaatgagcgaggtggcccagatggcgctggaggaccaggccgccacactggagtataagaccatcaaggaacatctcagcagcaagagtcccaaccatggggtgaaccttgtggagaacctggacagcctgccccccaaagttccacagcgggaggcctccctgggtcccccgggagcctccctgtctcagaccggtctaagcaagcggctggaaatgcaccactcctcttcctacggggttgactataagaggagctaccccacgaactcgctcacgagaagccaccaggccaccactctcaaaagaaacaacactaactcctccaattcctctcacctctccagaaaccagagctttggcaggggagacaacccgccgcccgccccgcagagggtggactccatccaggtgcacagctcccagccatctggccaggccgtgactgtctcgaggcagcccagcctcaacgcctacaactcactgacaaggtcggggctgaagcgtacgccctcgctaaagccggacgtaccccccaaaccatcctttgctcccctttccacatccatgaagcccaatgatgcgtgtacataatcccagggggagggggtcaggtgtcgaaccagcaggcaaggcgaggtgcccgctcagctcagcaaggttctcaactgcctcgagtacccaccagaccaagaaggcctgcggcagagccgaggacgctgggtcctcctctctgggacacaggggtactcacgaaaactgggccgcgtggtttggtgaaggtttgcaacggcggggactcaccttcattctcttccttcactttcccccacaccctacaacaggtcggacccacaaaagacttcagttatcatcacaaacatgagccaaaagcacatacctaccccatcccccaccccccacacacacacacacatgcacacaacacatacacacacacgcacagaggtgaacagaaactgaaacattttgtccacaacttcacgggacgtggccagactgggtttgcgttccaacctgcaaaacacaaatacattttttaaaatcaagaaaatttaaaaagacaaaaaaaaaagaattcattgataattctaactcagactttaacaatggcagaagtttactatgcgcaaatactgtgaaatgcccgccagtgttacagctttctgttgcagcagataaatgccatgttgggcaactatgtcatagatttctgctcctcctctcttttaatgaaataacgtgaccgttaacgcaagtaactctttatttattgttcaccctttttttccttaaggaaaggactcttccaaatatcatcctatgaacagctcttcagaaagcccattgaaagttaaactatttaacgtgaaatccattaactggaataattgagtttctttatttttacaataaattcactgagtaaataagttggagctggaattctgagctttgtgtttggactgtctggtctgtagctaaaggaaaaagttaggaggggaatatttatttaaatctatcagttcattgcctggtcaggtctctggcctataaacatgcaaaaaaactaattcatgttaaagtccttccagatcctaatttctaaagcaatcaggagagaaagcttttagaatggcacatcatatctcattgatgccaacatggttttgtccatggttctgactttctgtgaaggcaccagcttgcaatatgccatcccatttcaccttgcatgtgagacagcaaacaaaatccacaaatggtgtgaactaatatgctggctgctaccttgcataaattaatgatttgatcacacgggttcttcgtggggttacatctgtgaatagcctgttttccacatgtaaatttgtgccttacaccttgagttgtgtacacttgtaaactctttatgatcaactgttcccccttttgaaataagtgcagatatttatttaaccctcccttccccaccctctgccccacttccagccctctgaaagattggagtcaagcagatggaagaatgcagtggtgatagttgtcatgcgacagcctgagaacgctgggcagcaccacaccctccaattcacactgccttctagttgtgccaactggaaccaccctttggctgtgctgcgaagcatggaccccagtgttgttgtgggtgtgtcaaatcccctttcatcctcaagagctccctgcttcccttagattatttcaatacggtgatatccttatttgctagcagaaaagggactaacgtcccattcctcttttctgctgcgtccactggctagagagcaggcggtgcgcggttgggcagacacctgggaggagtctccaagccatgtgcacagcacacacgtgcagtgcacacaaagaaatgacatggaaatagatgcaggcaggctggtccctgctgtgattaacgagtaactccaagtacaaggccgaccacaatggatgctgcaaaaacgttgactggggcaaaggattttttattttattttttattttgttaattatgtttttaggggatgggaggtggtgtgtgtttttctcctcttggttttcatttgctcaagcacacaaaagggacttttgtttactctatcatgaacaaaggaactgtccacatactgtaaaccatgagcagtgttgttgttgtttttttaaacagtatatttggtggtctctttgtctgcttttatttccagttcgatcttctgggtttagttttgtctttaaaaagaattcaaaaaaagactgacaatgacagttttgagttggatagtgaaaaagtggagcctccataatcagtgtggttgccttcagacctgagtacttagctgagggtgggtgagagccctttgttccaaaagtccattagttttgctgttgtttaggagtaggtggttgttgttgtttttactttttttttttttggcttttgtaatggaatccatgttcacatcctgtgaactctgtctcctgaaaccctgaagtatttcctagaacctgaaatattgttttcttccttgaattttctctagaaatgcagaaattaggaaggtgatgggtctgtatccccctgcccccttctttcccatgcttgactcccgagagtactggcagtgcagcacccatcattgacgtaagcggctgtcttgtccagtgtttgtaggcatcactgcctcagctgttaaggagacctgtgtcaaaacttacatccacattcctacacccccacaacccatcacttctggtgttaaccctaaaatacccacatgtattgagctggtcttctgcatttaagtatttctccccagtttttttccccactgtgtgtggggggagggtccataaacccgagtgtgcctttgctttccacccttgctagacactggtagatgcaacaaactcagatttatatttgttgtaaagttgtaaaaatattgtgatgtcaccaattttccttccatctccacatcccctaacatctgattcacgacttaatgtatgttgtaagaaaagaaaaaagaaaagaaaaaaagggaaaaaagaaaagcaaggaaaaggctctttattacttaaaagtaataaaacctgactgttctatatta

SEQ ID NO: 363837 - DNA, 5949 bp, Homo sapiens
  misc_feature (17)..(17): n is a, c, g, or t
  misc_feature (369)..(369): n is a, c, g, or t
tgagttgctccacaganactgtaactatgcagtatctttaatcaaattgagttttgatttttgtctttattgcaaaaagcaatatacaacacttaggggatgtccattttagttctttttaccagagagtagatcaaggtccctaagttggagggtaacatagaatgccagggtggcttgcacagattcagggcccagaggcagctagtgaggatggcagagattgtgcatacaaagtgtgcttttgtttgaggaaataaaaagctaagcagtctgtatggaaatgactttatgtggctcggagctgattccctgaaggatttatgactctgtattaaatgccacagccttatcttttaaaacatgctnctctaatgctgagttttcctctttttttcttttctttctttttttttttgttactgattttagaaacagtattaagcaccttgttgttttgtttctgttttcaaggaatgcagattctactaagatctccttgcaaaatgaatgcatttaattttccctatgtgtttttcctctgcaggtagttttcccaagagtggctcaggtttgtaagaatgatatgggaggatctcaaagagtcctggagaaacagtggacgtcgttcctgaaggcgcgcttgaactgctcagttcctggagactctcatttttatttcaacattctccaggcagttacagatgtgattcgtatcaacgggcgtgatgttgtcctggcaacgttttctacaccttataacagcatccctgggtctgcagtctgtgcctatgacatgcttgacattgccagtgtttttactgggagattcaaggaacagaagtctcctgattccacctggacaccagttcctgatgaacgagttcctaagcccaggccaggttgctgtgctggctcatcctccttagaaagatatgcaacctccaatgagttccctgatgataccctgaacttcatcaagacgcacccgctcatggatgaggcagtgccctccatcttcaacaggccatggttcctgagaacaatggtcagataccgccttaccaaaattgcagtggacacagctgctgggccatatcagaatcacactgtggtttttctgggatcagagaagggaatcatcttgaagtttttggccagaataggaaatagtggttttctaaatgacagccttttcctggaggagatgagtgtttacaactctgaaaaatgcagctatgatggagtcgaagacaaaaggatcatgggcatgcagctggacagagcaagcagctctctgtatgttgcgttctctacctgtgtgataaaggttccccttggccggtgtgaacgacatgggaagtgtaaaaaaacctgtattgcctccagagacccatattgtggatggataaaggaaggtggtgcctgcagccatttatcacccaacagcagactgacttttgagcaggacatagagcgtggcaatacagatggtctgggggactgtcacaattcctttgtggcactgaatgggcattccagttccctcttgcccagcacaaccacatcagattcgacggctcaagaggggtatgagtctaggggaggaatgctggactggaagcatctgcttgactcacctgacagcacagaccctttgggggcagtgtcttcccataatcaccaagacaagaagggagtgattcgggaaagttacctcaaaggccacgaccagctggttcccgtcaccctcttggccattgcagtcatcctggctttcgtcatgggggccgtcttctcgggcatcaccgtctactgcgtctgtgatcatcggcgcaaagacgtggctgtggtgcagcgcaaggagaaggagctcacccactcgcgccggggctccatgagcagcgtcaccaagctcagcggcctctttggggacactcaatccaaagacccaaagccggaggccatcctcacgccactcatgcacaacggcaagctcgccactcccggcaacacggccaagatgctcattaaagcagaccagcaccacctggacctgacggccctccccaccccagagtcaaccccaacgctgcagcagaagcggaagcccagccgcggcagccgcgagtgggagaggaaccagaacctcatcaatgcctgcacaaaggacatgccccccatgggctcccctgtgattcccacggacctgcccctgcgggcctcccccagccacatccccagcgtggtggtcctgcccatcacgcagcagggctaccagcatgagtacgtggaccagcccaaaatgagcgaggtggcccagatggcgctggaggaccaggccgccacactggagtataagaccatcaaggaacatctcagcagcaagagtcccaaccatggggtgaaccttgtggagaacctggacagcctgccccccaaagttccacagcgggaggcctccctgggtcccccgggagcctccctgtctcagaccggtctaagcaagcggctggaaatgcaccactcctcttcctacggggttgactataagaggagctaccccacgaactcgctcacgagaagccaccaggccaccactctcaaaagaaacaacactaactcctccaattcctctcacctctccagaaaccagagctttggcaggggagacaacccgccgcccgccccgcagagggtggactccatccaggtgcacagctcccagccatctggccaggccgtgactgtctcgaggcagcccagcctcaacgcctacaactcactgacaaggtcggggctgaagcgtacgccctcgctaaagccggacgtaccccccaaaccatcctttgctcccctttccacatccatgaagcccaatgatgcgtgtacataatcccagggggagggggtcaggtgtcgaaccagcaggcaaggcgaggtgcccgctcagctcagcaaggttctcaactgcctcgagtacccaccagaccaagaaggcctgcggcagagccgaggacgctgggtcctcctctctgggacacaggggtactcacgaaaactgggccgcgtggtttggtgaaggtttgcaacggcggggactcaccttcattctcttccttcactttcccccacaccctacaacaggtcggacccacaaaagacttcagttatcatcacaaacatgagccaaaagcacatacctaccccatcccccaccccccacacacacacacacatgcacacaacacatacacacacacgcacagaggtgaacagaaactgaaacattttgtccacaacttcacgggacgtggccagactgggtttgcgttccaacctgcaaaacacaaatacattttttaaaatcaagaaaatttaaaaagacaaaaaaaaaagaattcattgataattctaactcagactttaacaatggcagaagtttactatgcgcaaatactgtgaaatgcccgccagtgttacagctttctgttgcagcagataaatgccatgttgggcaactatgtcatagatttctgctcctcctctcttttaatgaaataacgtgaccgttaacgcaagtaactctttatttattgttcaccctttttttccttaaggaaaggactcttccaaatatcatcctatgaacagctcttcagaaagcccattgaaagttaaactatttaacgtgaaatccattaactggaataattgagtttctttatttttacaataaattcactgagtaaataagttggagctggaattctgagctttgtgtttggactgtctggtctgtagctaaaggaaaaagttaggaggggaatatttatttaaatctatcagttcattgcctggtcaggtctctggcctataaacatgcaaaaaaactaattcatgttaaagtccttccagatcctaatttctaaagcaatcaggagagaaagcttttagaatggcacatcatatctcattgatgccaacatggttttgtccatggttctgactttctgtgaaggcaccagcttgcaatatgccatcccatttcaccttgcatgtgagacagcaaacaaaatccacaaatggtgtgaactaatatgctggctgctaccttgcataaattaatgatttgatcacacgggttcttcgtggggttacatctgtgaatagcctgttttccacatgtaaatttgtgccttacaccttgagttgtgtacacttgtaaactctttatgatcaactgttcccccttttgaaataagtgcagatatttatttaaccctcccttccccaccctctgccccacttccagccctctgaaagattggagtcaagcagatggaagaatgcagtggtgatagttgtcatgcgacagcctgagaacgctgggcagcaccacaccctccaattcacactgccttctagttgtgccaactggaaccaccctttggctgtgctgcgaagcatggaccccagtgttgttgtgggtgtgtcaaatcccctttcatcctcaagagctccctgcttcccttagattatttcaatacggtgatatccttatttgctagcagaaaagggactaacgtcccattcctcttttctgctgcgtccactggctagagagcaggcggtgcgcggttgggcagacacctgggaggagtctccaagccatgtgcacagcacacacgtgcagtgcacacaaagaaatgacatggaaatagatgcaggcaggctggtccctgctgtgattaacgagtaactccaagtacaaggccgaccacaatggatgctgcaaaaacgttgactggggcaaaggattttttattttattttttattttgttaattatgtttttaggggatgggaggtggtgtgtgtttttctcctcttggttttcatttgctcaagcacacaaaagggacttttgtttactctatcatgaacaaaggaactgtccacatactgtaaaccatgagcagtgttgttgttgtttttttaaacagtatatttggtggtctctttgtctgcttttatttccagttcgatcttctgggtttagttttgtctttaaaaagaattcaaaaaaagactgacaatgacagttttgagttggatagtgaaaaagtggagcctccataatcagtgtggttgccttcagacctgagtacttagctgagggtgggtgagagccctttgttccaaaagtccattagttttgctgttgtttaggagtaggtggttgttgttgtttttactttttttttttttggcttttgtaatggaatccatgttcacatcctgtgaactctgtctcctgaaaccctgaagtatttcctagaacctgaaatattgttttcttccttgaattttctctagaaatgcagaaattaggaaggtgatgggtctgtatccccctgcccccttctttcccatgcttgactcccgagagtactggcagtgcagcacccatcattgacgtaagcggctgtcttgtccagtgtttgtaggcatcactgcctcagctgttaaggagacctgtgtcaaaacttacatccacattcctacacccccacaacccatcacttctggtgttaaccctaaaatacccacatgtattgagctggtcttctgcatttaagtatttctccccagtttttttccccactgtgtgtggggggagggtccataaacccgagtgtgcctttgctttccacccttgctagacactggtagatgcaacaaactcagatttatatttgttgtaaagttgtaaaaatattgtgatgtcaccaattttccttccatctccacatcccctaacatctgattcacgacttaatgtatgttgtaagaaaagaaaaaagaaaagaaaaaaagggaaaaaagaaaagcaaggaaaaggctctttattacttaaaagtaataaaacctgactgttctatatta

SEQ ID NO: 363838 - DNA, 5772 bp, Homo sapiens
  misc_feature (17)..(17): n is a, c, g, or t
  misc_feature (369)..(369): n is a, c, g, or t
tgagttgctccacaganactgtaactatgcagtatctttaatcaaattgagttttgatttttgtctttattgcaaaaagcaatatacaacacttaggggatgtccattttagttctttttaccagagagtagatcaaggtccctaagttggagggtaacatagaatgccagggtggcttgcacagattcagggcccagaggcagctagtgaggatggcagagattgtgcatacaaagtgtgcttttgtttgaggaaataaaaagctaagcagtctgtatggaaatgactttatgtggctcggagctgattccctgaaggatttatgactctgtattaaatgccacagccttatcttttaaaacatgctnctctaatgctgagttttcctctttttttcttttctttctttttttttttgttactgattttagaaacagtattaagcaccttgttgttttgtttctgttttcaaggaatgcagattctactaagatctccttgcaaaatgaatgcatttaattttccctatgtgtttttcctctgcaggtagttttcccaagagtggctcaggtttgtaagaatgatatgggaggatctcaaagagtcctggagaaacagtggacgtcgttcctgaaggcgcgcttgaactgctcagttcctggagactctcatttttatttcaacattctccaggcagttacagatgtgattcgtatcaacgggcgtgatgttgtcctggcaacgttttctacaccttataacagcatccctgggtctgcagtctgtgcctatgacatgcttgacattgccagtgtttttactgggagattcaaggaacagaagtctcctgattccacctggacaccagttcctgatgaacgagttcctaagcccaggccaggttgctgtgctggctcatcctccttagaaagatatgcaacctccaatgagttccctgatgataccctgaacttcatcaagacgcacccgctcatggatgaggcagtgccctccatcttcaacaggccatggttcctgagaacaatggtcagatgcagctatgatggagtcgaagacaaaaggatcatgggcatgcagctggacagagcaagcagctctctgtatgttgcgttctctacctgtgtgataaaggttccccttggccggtgtgaacgacatgggaagtgtaaaaaaacctgtattgcctccagagacccatattgtggatggataaaggaaggtggtgcctgcagccatttatcacccaacagcagactgacttttgagcaggacatagagcgtggcaatacagatggtctgggggactgtcacaattcctttgtggcactgaatgggcattccagttccctcttgcccagcacaaccacatcagattcgacggctcaagaggggtatgagtctaggggaggaatgctggactggaagcatctgcttgactcacctgacagcacagaccctttgggggcagtgtcttcccataatcaccaagacaagaagggagtgattcgggaaagttacctcaaaggccacgaccagctggttcccgtcaccctcttggccattgcagtcatcctggctttcgtcatgggggccgtcttctcgggcatcaccgtctactgcgtctgtgatcatcggcgcaaagacgtggctgtggtgcagcgcaaggagaaggagctcacccactcgcgccggggctccatgagcagcgtcaccaagctcagcggcctctttggggacactcaatccaaagacccaaagccggaggccatcctcacgccactcatgcacaacggcaagctcgccactcccggcaacacggccaagatgctcattaaagcagaccagcaccacctggacctgacggccctccccaccccagagtcaaccccaacgctgcagcagaagcggaagcccagccgcggcagccgcgagtgggagaggaaccagaacctcatcaatgcctgcacaaaggacatgccccccatgggctcccctgtgattcccacggacctgcccctgcgggcctcccccagccacatccccagcgtggtggtcctgcccatcacgcagcagggctaccagcatgagtacgtggaccagcccaaaatgagcgaggtggcccagatggcgctggaggaccaggccgccacactggagtataagaccatcaaggaacatctcagcagcaagagtcccaaccatggggtgaaccttgtggagaacctggacagcctgccccccaaagttccacagcgggaggcctccctgggtcccccgggagcctccctgtctcagaccggtctaagcaagcggctggaaatgcaccactcctcttcctacggggttgactataagaggagctaccccacgaactcgctcacgagaagccaccaggccaccactctcaaaagaaacaacactaactcctccaattcctctcacctctccagaaaccagagctttggcaggggagacaacccgccgcccgccccgcagagggtggactccatccaggtgcacagctcccagccatctggccaggccgtgactgtctcgaggcagcccagcctcaacgcctacaactcactgacaaggtcggggctgaagcgtacgccctcgctaaagccggacgtaccccccaaaccatcctttgctcccctttccacatccatgaagcccaatgatgcgtgtacataatcccagggggagggggtcaggtgtcgaaccagcaggcaaggcgaggtgcccgctcagctcagcaaggttctcaactgcctcgagtacccaccagaccaagaaggcctgcggcagagccgaggacgctgggtcctcctctctgggacacaggggtactcacgaaaactgggccgcgtggtttggtgaaggtttgcaacggcggggactcaccttcattctcttccttcactttcccccacaccctacaacaggtcggacccacaaaagacttcagttatcatcacaaacatgagccaaaagcacatacctaccccatcccccaccccccacacacacacacacatgcacacaacacatacacacacacgcacagaggtgaacagaaactgaaacattttgtccacaacttcacgggacgtggccagactgggtttgcgttccaacctgcaaaacacaaatacattttttaaaatcaagaaaatttaaaaagacaaaaaaaaaagaattcattgataattctaactcagactttaacaatggcagaagtttactatgcgcaaatactgtgaaatgcccgccagtgttacagctttctgttgcagcagataaatgccatgttgggcaactatgtcatagatttctgctcctcctctcttttaatgaaataacgtgaccgttaacgcaagtaactctttatttattgttcaccctttttttccttaaggaaaggactcttccaaatatcatcctatgaacagctcttcagaaagcccattgaaagttaaactatttaacgtgaaatccattaactggaataattgagtttctttatttttacaataaattcactgagtaaataagttggagctggaattctgagctttgtgtttggactgtctggtctgtagctaaaggaaaaagttaggaggggaatatttatttaaatctatcagttcattgcctggtcaggtctctggcctataaacatgcaaaaaaactaattcatgttaaagtccttccagatcctaatttctaaagcaatcaggagagaaagcttttagaatggcacatcatatctcattgatgccaacatggttttgtccatggttctgactttctgtgaaggcaccagcttgcaatatgccatcccatttcaccttgcatgtgagacagcaaacaaaatccacaaatggtgtgaactaatatgctggctgctaccttgcataaattaatgatttgatcacacgggttcttcgtggggttacatctgtgaatagcctgttttccacatgtaaatttgtgccttacaccttgagttgtgtacacttgtaaactctttatgatcaactgttcccccttttgaaataagtgcagatatttatttaaccctcccttccccaccctctgccccacttccagccctctgaaagattggagtcaagcagatggaagaatgcagtggtgatagttgtcatgcgacagcctgagaacgctgggcagcaccacaccctccaattcacactgccttctagttgtgccaactggaaccaccctttggctgtgctgcgaagcatggaccccagtgttgttgtgggtgtgtcaaatcccctttcatcctcaagagctccctgcttcccttagattatttcaatacggtgatatccttatttgctagcagaaaagggactaacgtcccattcctcttttctgctgcgtccactggctagagagcaggcggtgcgcggttgggcagacacctgggaggagtctccaagccatgtgcacagcacacacgtgcagtgcacacaaagaaatgacatggaaatagatgcaggcaggctggtccctgctgtgattaacgagtaactccaagtacaaggccgaccacaatggatgctgcaaaaacgttgactggggcaaaggattttttattttattttttattttgttaattatgtttttaggggatgggaggtggtgtgtgtttttctcctcttggttttcatttgctcaagcacacaaaagggacttttgtttactctatcatgaacaaaggaactgtccacatactgtaaaccatgagcagtgttgttgttgtttttttaaacagtatatttggtggtctctttgtctgcttttatttccagttcgatcttctgggtttagttttgtctttaaaaagaattcaaaaaaagactgacaatgacagttttgagttggatagtgaaaaagtggagcctccataatcagtgtggttgccttcagacctgagtacttagctgagggtgggtgagagccctttgttccaaaagtccattagttttgctgttgtttaggagtaggtggttgttgttgtttttactttttttttttttggcttttgtaatggaatccatgttcacatcctgtgaactctgtctcctgaaaccctgaagtatttcctagaacctgaaatattgttttcttccttgaattttctctagaaatgcagaaattaggaaggtgatgggtctgtatccccctgcccccttctttcccatgcttgactcccgagagtactggcagtgcagcacccatcattgacgtaagcggctgtcttgtccagtgtttgtaggcatcactgcctcagctgttaaggagacctgtgtcaaaacttacatccacattcctacacccccacaacccatcacttctggtgttaaccctaaaatacccacatgtattgagctggtcttctgcatttaagtatttctccccagtttttttccccactgtgtgtggggggagggtccataaacccgagtgtgcctttgctttccacccttgctagacactggtagatgcaacaaactcagatttatatttgttgtaaagttgtaaaaatattgtgatgtcaccaattttccttccatctccacatcccctaacatctgattcacgacttaatgtatgttgtaagaaaagaaaaaagaaaagaaaaaaagggaaaaaagaaaagcaaggaaaaggctctttattacttaaaagtaataaaacctgactgttctatatta

SEQ ID NO: 363839 - DNA, 6819 bp, Homo sapiens
ttcttttctttcttacgaattccagacaaaaacgcccttgtactcagctcacacagaaggggatgtttaaatatagccccacacctgagctgctgattctctttctccccttccaaggctagattggcagcaaattgtaaagacaacccaattctcagcaaaacaggaaggtgaacagaagcaagaaatgtaaactttagcttaagtacattttagactttaatttaccatcattatgagggaaaagagtggcttctggaaataattttacctttgtcgtcatccatcctgtcgatcaaataatcacagttaagatggaaatatattttcaaaagagagatggcgatggagatcattttttttgttagccctcttgatgaacagatgtggcatgttgaataccaagtatttggtacgtgtatttgaagataatgaaagggcacacgaatccatctgtgttctagtctttgggccaatttaactttcagagccctcccttctgagctacatatatgcagatgctatagttctagtgtcagagagaagagctaatacaggaaagttttcataaacggtgttccttggagcacaatgccatgatttatcagaaggtgctaaatgggatccggagacatctcttgaaggctgcgctcttttcttcttgcatgtggatatcatgaacatggatatgggcttatctgccctgataagacataactcattaagcagaaaatgaactgttttgactctgtgtttgaccttgtattaatttttctttgcctatagggaccatatttatactgttgatatagacacatcacacacggaagaaatttattgtagcaaaaaactgacatggaaatctagacaggccgatgtagacacatgcagaatgaagggaaaacataaggatgagtgccacaactttattaaagttcttctaaagaaaaacgatgatgcattgtttgtctgtggaactaatgccttcaacccttcctgcagaaactataaggagctgctgctgtgaagtctaagatttgatgactgcttcaagggttagttttcacttcttggaaagaggaagtcaccatggcttttgcctctggacctttccaacctcacaaaccgaaacatttgtacttcactacttcttgcctttgaccagctatagatggatacattggaaccattcggggatgaattcagcggaatggccagatgcccatatgatgccaaacatgccaacgttgcactgtttgcagatggaaaactatactcagccacagtgactgacttccttgccattgacgcagtcatttaccggagtcttggagaaagccctaccctgcggaccgtcaagcacgattcaaaatggttgaaagaaccatactttgttcaagccgtggattacggagattatatctacttcttcttcagggaaatagcagtggagtataacaccatgggaaaggtagttttcccaagagtggctcaggtttgtaagaatgatatgggaggatctcaaagagtcctggagaaacagtggacgtcgttcctgaaggcgcgcttgaactgctcagttcctggagactctcatttttatttcaacattctccaggcagttacagatgtgattcgtatcaacgggcgtgatgttgtcctggcaacgttttctacaccttataacagcatccctgggtctgcagtctgtgcctatgacatgcttgacattgccagtgtttttactgggagattcaaggaacagaagtctcctgattccacctggacaccagttcctgatgaacgagttcctaagcccaggccaggttgctgtgctggctcatcctccttagaaagatatgcaacctccaatgagttccctgatgataccctgaacttcatcaagacgcacccgctcatggatgaggcagtgccctccatcttcaacaggccatggttcctgagaacaatggtcagataccgccttaccaaaattgcagtggacacagctgctgggccatatcagaatcacactgtggtttttctgggatcagagaagggaatcatcttgaagtttttggccagaataggaaatagtggttttctaaatgacagccttttcctggaggagatgagtgtttacaactctgaaaaatgcagctatgatggagtcgaagacaaaaggatcatgggcatgcagctggacagagcaagcagctctctgtatgttgcgttctctacctgtgtgataaaggttccccttggccggtgtgaacgacatgggaagtgtaaaaaaacctgtattgcctccagagacccatattgtggatggataaaggaaggtggtgcctgcagccatttatcacccaacagcagactgacttttgagcaggacatagagcgtggcaatacagatggtctgggggactgtcacaattcctttgtggcactgaatgggcattccagttccctcttgcccagcacaaccacatcagattcgacggctcaagaggggtatgagtctaggggaggaatgctggactggaagcatctgcttgactcacctgacagcacagaccctttgggggcagtgtcttcccataatcaccaagacaagaagggagtgattcgggaaagttacctcaaaggccacgaccagctggttcccgtcaccctcttggccattgcagtcatcctggctttcgtcatgggggccgtcttctcgggcatcaccgtctactgcgtctgtgatcatcggcgcaaagacgtggctgtggtgcagcgcaaggagaaggagctcacccactcgcgccggggctccatgagcagcgtcaccaagctcagcggcctctttggggacactcaatccaaagacccaaagccggaggccatcctcacgccactcatgcacaacggcaagctcgccactcccggcaacacggccaagatgctcattaaagcagaccagcaccacctggacctgacggccctccccaccccagagtcaaccccaacgctgcagcagaagcggaagcccagccgcggcagccgcgagtgggagaggaaccagaacctcatcaatgcctgcacaaaggacatgccccccatgggctcccctgtgattcccacggacctgcccctgcgggcctcccccagccacatccccagcgtggtggtcctgcccatcacgcagcagggctaccagcatgagtacgtggaccagccctataagaccatcaaggaacatctcagcagcaagagtcccaaccatggggtgaaccttgtggagaacctggacagcctgccccccaaagttccacagcgggaggcctccctgggtcccccgggagcctccctgtctcagaccggtctaagcaagcggctggaaatgcaccactcctcttcctacggggttgactataagaggagctaccccacgaactcgctcacgagaagccaccaggccaccactctcaaaagaaacaacactaactcctccaattcctctcacctctccagaaaccagagctttggcaggggagacaacccgccgcccgccccgcagagggtggactccatccaggtgcacagctcccagccatctggccaggccgtgactgtctcgaggcagcccagcctcaacgcctacaactcactgacaaggtcggggctgaagcgtacgccctcgctaaagccggacgtaccccccaaaccatcctttgctcccctttccacatccatgaagcccaatgatgcgtgtacataatcccagggggagggggtcaggtgtcgaaccagcaggcaaggcgaggtgcccgctcagctcagcaaggttctcaactgcctcgagtacccaccagaccaagaaggcctgcggcagagccgaggacgctgggtcctcctctctgggacacaggggtactcacgaaaactgggccgcgtggtttggtgaaggtttgcaacggcggggactcaccttcattctcttccttcactttcccccacaccctacaacaggtcggacccacaaaagacttcagttatcatcacaaacatgagccaaaagcacatacctaccccatcccccaccccccacacacacacacacatgcacacaacacatacacacacacgcacagaggtgaacagaaactgaaacattttgtccacaacttcacgggacgtggccagactgggtttgcgttccaacctgcaaaacacaaatacattttttaaaatcaagaaaatttaaaaagacaaaaaaaaaagaattcattgataattctaactcagactttaacaatggcagaagtttactatgcgcaaatactgtgaaatgcccgccagtgttacagctttctgttgcagcagataaatgccatgttgggcaactatgtcatagatttctgctcctcctctcttttaatgaaataacgtgaccgttaacgcaagtaactctttatttattgttcaccctttttttccttaaggaaaggactcttccaaatatcatcctatgaacagctcttcagaaagcccattgaaagttaaactatttaacgtgaaatccattaactggaataattgagtttctttatttttacaataaattcactgagtaaataagttggagctggaattctgagctttgtgtttggactgtctggtctgtagctaaaggaaaaagttaggaggggaatatttatttaaatctatcagttcattgcctggtcaggtctctggcctataaacatgcaaaaaaactaattcatgttaaagtccttccagatcctaatttctaaagcaatcaggagagaaagcttttagaatggcacatcatatctcattgatgccaacatggttttgtccatggttctgactttctgtgaaggcaccagcttgcaatatgccatcccatttcaccttgcatgtgagacagcaaacaaaatccacaaatggtgtgaactaatatgctggctgctaccttgcataaattaatgatttgatcacacgggttcttcgtggggttacatctgtgaatagcctgttttccacatgtaaatttgtgccttacaccttgagttgtgtacacttgtaaactctttatgatcaactgttcccccttttgaaataagtgcagatatttatttaaccctcccttccccaccctctgccccacttccagccctctgaaagattggagtcaagcagatggaagaatgcagtggtgatagttgtcatgcgacagcctgagaacgctgggcagcaccacaccctccaattcacactgccttctagttgtgccaactggaaccaccctttggctgtgctgcgaagcatggaccccagtgttgttgtgggtgtgtcaaatcccctttcatcctcaagagctccctgcttcccttagattatttcaatacggtgatatccttatttgctagcagaaaagggactaacgtcccattcctcttttctgctgcgtccactggctagagagcaggcggtgcgcggttgggcagacacctgggaggagtctccaagccatgtgcacagcacacacgtgcagtgcacacaaagaaatgacatggaaatagatgcaggcaggctggtccctgctgtgattaacgagtaactccaagtacaaggccgaccacaatggatgctgcaaaaacgttgactggggcaaaggattttttattttattttttattttgttaattatgtttttaggggatgggaggtggtgtgtgtttttctcctcttggttttcatttgctcaagcacacaaaagggacttttgtttactctatcatgaacaaaggaactgtccacatactgtaaaccatgagcagtgttgttgttgtttttttaaacagtatatttggtggtctctttgtctgcttttatttccagttcgatcttctgggtttagttttgtctttaaaaagaattcaaaaaaagactgacaatgacagttttgagttggatagtgaaaaagtggagcctccataatcagtgtggttgccttcagacctgagtacttagctgagggtgggtgagagccctttgttccaaaagtccattagttttgctgttgtttaggagtaggtggttgttgttgtttttactttttttttttttggcttttgtaatggaatccatgttcacatcctgtgaactctgtctcctgaaaccctgaagtatttcctagaacctgaaatattgttttcttccttgaattttctctagaaatgcagaaattaggaaggtgatgggtctgtatccccctgcccccttctttcccatgcttgactcccgagagtactggcagtgcagcacccatcattgacgtaagcggctgtcttgtccagtgtttgtaggcatcactgcctcagctgttaaggagacctgtgtcaaaacttacatccacattcctacacccccacaacccatcacttctggtgttaaccctaaaatacccacatgtattgagctggtcttctgcatttaagtatttctccccagtttttttccccactgtgtgtggggggagggtccataaacccgagtgtgcctttgctttccacccttgctagacactggtagatgcaacaaactcagatttatatttgttgtaaagttgtaaaaatattgtgatgtcaccaattttccttccatctccacatcccctaacatctgattcacgacttaatgtatgttgtaagaaaagaaaaaagaaaagaaaaaaagggaaaaaagaaaagcaaggaaaaggctctttattacttaaaagtaataaaacctgactgttctatatta

SEQ ID NO: 363840 - DNA, 6508 bp, Homo sapiens
ttcttttctttcttacgaattccagacaaaaacgcccttgtactcagctcacacagaaggggatgtttaaatatagccccacacctgagctgctgattctctttctccccttccaaggctagattggcagcaaattgtaaagacaacccaattctcagcaaaacaggaaggtgaacagaagcaagaaatgtaaactttagcttaagtacattttagactttaatttaccatcattatgagggaaaagagtggcttctggaaataattttacctttgtcgtcatccatcctgtcgatcaaataatcacagttaagatggaaatatattttcaaaagagagatggcgatggagatcattttttttgttagccctcttgatgaacagatgtggcatgttgaataccaagtatttggtacgtgtatttgaagataatgaaagggcacacgaatccatctgtgttctagtctttgggccaatttaactttcagagccctcccttctgagctacatatatgcagatgctatagttctagtgtcagagagaagagctaatacaggaaagttttcataaacggtgttccttggagcacaatgccatgatttatcagaaggtgctaaatgggatccggagacatctcttgaaggctgcgctcttttcttcttgcatgtggatatcatgaacatggatatgggcttatctgccctgataagacataactcattaagcagaaaatgaactgttttgactctgtgtttgaccttgtattaatttttctttgcctatagggaccatatttatactgttgatatagacacatcacacacggaagaaatttattgtagcaaaaaactgacatggaaatctagacaggccgatgtagacacatgcagaatgaagggaaaacataaggatgagtgccacaactttattaaagttcttctaaagaaaaacgatgatgcattgtttgtctgtggaactaatgccttcaacccttcctgcagaaactataaggagctgctgctgtgaagtctaagatttgatgactgcttcaagggttagttttcacttcttggaaagaggaagtcaccatggcttttgcctctggacctttccaacctcacaaaccgaaacatttgtacttcactacttcttgcctttgaccagctatagatggatacattggaaccattcggggatgaattcagcggaatggccagatgcccatatgatgccaaacatgccaacgttgcactgtttgcagatggaaaactatactcagccacagtgactgacttccttgccattgacgcagtcatttaccggagtcttggagaaagccctaccctgcggaccgtcaagcacgattcaaaatggttgaaagaaccatactttgttcaagccgtggattacggagattatatctacttcttcttcagggaaatagcagtggagtataacaccatgggaaaggtagttttcccaagagtggctcaggtttgtaagaatgatatgggaggatctcaaagagtcctggagaaacagtggacgtcgttcctgaaggcgcgcttgaactgctcagttcctggagactctcatttttatttcaacattctccaggcagttacagatgtgattcgtatcaacgggcgtgatgttgtcctggcaacgttttctacaccttataacagcatccctgggtctgcagtctgtgcctatgacatgcttgacattgccagtgtttttactgggagattcaaggaacagaagtctcctgattccacctggacaccagttcctgatgaacgagttcctaagcccaggccaggttgctgtgctggctcatcctccttagaaagatatgcaacctccaatgagttccctgatgataccctgaacttcatcaagacgcacccgctcatggatgaggcagtgccctccatcttcaacaggccatggttcctgagaacaatggtcagataccgccttaccaaaattgcagtggacacagctgctgggccatatcagaatcacactgtggtttttctgggatcagagaagggaatcatcttgaagtttttggccagaataggaaatagtggttttctaaatgacagccttttcctggaggagatgagtgtttacaactctgaaaaatgcagctatgatggagtcgaagacaaaaggatcatgggcatgcagctggacagagcaagcagctctctgtatgttgcgttctctacctgtgtgataaaggttccccttggccggtgtgaacgacatgggaagtgtaaaaaaacctgtattgcctccagagacccatattgtggatggataaaggaaggtggtgcctgcagccatttatcacccaacagcagactgacttttgagcaggacatagagcgtggcaatacagatggtctgggggactgtcacaattcctttgtggcactgaatgggcattccagttccctcttgcccagcacaaccacatcagattcgacggctcaagaggggtatgagtctaggggaggaatgctggactggaagcatctgcttgactcacctgacagcacagaccctttgggggcagtgtcttcccataatcaccaagacaagaagggagtgattcgggaaagttacctcaaaggccacgaccagctggttcccgtcaccctcttggccattgcagtcatcctggctttcgtcatgggggccgtcttctcgggcatcaccgtctactgcgtctgtgatcatcggcgcaaagacgtggctgtggtgcagcgcaaggagaaggagctcacccactcgcgccggggctccatgagcagcgtcaccaagctcagcggcctctttggggacactcaatccaaagacccaaagccggaggccatcctcacgccactcatgcacaacggcaagctcgccactcccggcaacacggccaagatgctcattaaagcagaccagcaccacctggacctgacggccctccccaccccagagtcaaccccaacgctgcagcagaagcggaagcccagccgcggcagccgcgagtgggagaggaaccagaacctcatcaatgcctgcacaaaggacatgccccccatgggctcccctgtgattcccacggacctgcccctgcgggcctcccccagccacatccccagcgtggtggtcctgcccatcacgcagcagggctaccagcatgagtacgtggaccagcccaaaatgagcgaggtggcccagatggcgctggaggaccaggccgccacactggagtataagaccatcaaggaacatctcagcagcaagagtcccaaccatggggtgaaccttgtggagaacctggacagcctgccccccaaagttccacagcgggaggcctccctgggtcccccgggagcctccctgtctcagaccggtctaagcaagcggctggaaatgcaccactcctcttcctacggggttgactataagaggagctaccccacgaactcgctcacgagaagccaccaggccaccactctcaaaagaaacaacactaactcctccaattcctctcacctctccagaaaccagagctttggcaggggagacaacccgccgcccgccccgcagagggtggactccatccaggtgcacagctcccagccatctggccaggccgtgactgtctcgaggcagcccagcctcaacgcctacaactcactgacaaggtcggggctgaagcgtacgccctcgctaaagccggacgtaccccccaaaccatcctttgctcccctttccacacacacacatgcacacaacacatacacacacacgcacagaggtgaacagaaactgaaacattttgtccacaacttcacgggacgtggccagactgggtttgcgttccaacctgcaaaacacaaatacattttttaaaatcaagaaaatttaaaaagacaaaaaaaaaagaattcattgataattctaactcagactttaacaatggcagaagtttactatgcgcaaatactgtgaaatgcccgccagtgttacagctttctgttgcagcagataaatgccatgttgggcaactatgtcatagatttctgctcctcctctcttttaatgaaataacgtgaccgttaacgcaagtaactctttatttattgttcaccctttttttccttaaggaaaggactcttccaaatatcatcctatgaacagctcttcagaaagcccattgaaagttaaactatttaacgtgaaatccattaactggaataattgagtttctttatttttacaataaattcactgagtaaataagttggagctggaattctgagctttgtgtttggactgtctggtctgtagctaaaggaaaaagttaggaggggaatatttatttaaatctatcagttcattgcctggtcaggtctctggcctataaacatgcaaaaaaactaattcatgttaaagtccttccagatcctaatttctaaagcaatcaggagagaaagcttttagaatggcacatcatatctcattgatgccaacatggttttgtccatggttctgactttctgtgaaggcaccagcttgcaatatgccatcccatttcaccttgcatgtgagacagcaaacaaaatccacaaatggtgtgaactaatatgctggctgctaccttgcataaattaatgatttgatcacacgggttcttcgtggggttacatctgtgaatagcctgttttccacatgtaaatttgtgccttacaccttgagttgtgtacacttgtaaactctttatgatcaactgttcccccttttgaaataagtgcagatatttatttaaccctcccttccccaccctctgccccacttccagccctctgaaagattggagtcaagcagatggaagaatgcagtggtgatagttgtcatgcgacagcctgagaacgctgggcagcaccacaccctccaattcacactgccttctagttgtgccaactggaaccaccctttggctgtgctgcgaagcatggaccccagtgttgttgtgggtgtgtcaaatcccctttcatcctcaagagctccctgcttcccttagattatttcaatacggtgatatccttatttgctagcagaaaagggactaacgtcccattcctcttttctgctgcgtccactggctagagagcaggcggtgcgcggttgggcagacacctgggaggagtctccaagccatgtgcacagcacacacgtgcagtgcacacaaagaaatgacatggaaatagatgcaggcaggctggtccctgctgtgattaacgagtaactccaagtacaaggccgaccacaatggatgctgcaaaaacgttgactggggcaaaggattttttattttattttttattttgttaattatgtttttaggggatgggaggtggtgtgtgtttttctcctcttggttttcatttgctcaagcacacaaaagggacttttgtttactctatcatgaacaaaggaactgtccacatactgtaaaccatgagcagtgttgttgttgtttttttaaacagtatatttggtggtctctttgtctgcttttatttccagttcgatcttctgggtttagttttgtctttaaaaagaattcaaaaaaagactgacaatgacagttttgagttggatagtgaaaaagtggagcctccataatcagtgtggttgccttcagacctgagtacttagctgagggtgggtgagagccctttgttccaaaagtccattagttttgctgttgtttaggagtaggtggttgttgttgtttttactttttttttttttggcttttgtaatggaatccatgttcacatcctgtgaactctgtctcctgaaaccctgaagtatttcctagaacctgaaatattgttttcttccttgaattttctctagaaatgcagaaattaggaaggtgatgggtctgtatccccctgcccccttctttcccatgcttgactcccgagagtactggcagtgcagcacccatcattgacgtaagcggctgtcttgtccagtgtttgtaggcatcactgcctcagctgttaaggagacctgtgtcaaaacttacatccacattcctacacccccacaacccatcacttctggtgttaaccctaaaatacccacatgtattgagctggtcttctgcatttaagtatttctccccagtttttttccccactgtgtgtggggggagggtccataaacccgagtgtgcctttgctttccacccttgctagacactggtagatgcaacaaactcagatttatatttgttgtaaagttgtaaaaatattgtgatgtcaccaattttccttccatctccacatcccctaacatctgattcacgacttaatgtatgttgtaagaaaagaaaaaagaaaagaaaaaaagggaaaaaagaaaagcaaggaaaaggctctttattacttaaaagtaataaaacctgactgttctatatta

SEQ ID NO: 363841 - DNA, 6295 bp, Homo sapiens
ttcttttctttcttacgaattccagacaaaaacgcccttgtactcagctcacacagaaggggatgtttaaatatagccccacacctgagctgctgattctctttctccccttccaaggctagattggcagcaaattgtaaagacaacccaattctcagcaaaacaggaaggtgaacagaagcaagaaatgtaaactttagcttaagtacattttagactttaatttaccatcattatgagggaaaagagtggcttctggaaataattttacctttgtcgtcatccatcctgtcgatcaaataatcacagttaagatggaaatatattttcaaaagagagatggcgatggagatcattttttttgttagccctcttgatgaacagatgtggcatgttgaataccaagtatttggtacgtgtatttgaagataatgaaagggcacacgaatccatctgtgttctagtctttgggccaatttaactttcagagccctcccttctgagctacatatatgcagatgctatagttctagtgtcagagagaagagctaatacaggaaagttttcataaacggtgttccttggagcacaatgccatgatttatcagaaggtgctaaatgggatccggagacatctcttgaaggctgcgctcttttcttcttgcatgtggatatcatgaacatggatatgggcttatctgccctgataagacataactcattaagcagaaaatgaactgttttgactctgtgtttgaccttgtattaatttttctttgcctatagggaccatatttatactgttgatatagacacatcacacacggaagaaatttattgtagcaaaaaactgacatggaaatctagacaggccgatgtagacacatgcagaatgaagggaaaacataaggatgagtgccacaactttattaaagttcttctaaagaaaaacgatgatgcattgtttgtctgtggaactaatgccttcaacccttcctgcagaaactataaggagctgctgctgtgaagtctaagatttgatgactgcttcaagggttagttttcacttcttggaaagaggaagtcaccatggcttttgcctctggacctttccaacctcacaaaccgaaacatttgtacttcactacttcttgcctttgaccagctatagatggatacattggaaccattcggggatgaattcagcggaatggccagatgcccatatgatgccaaacatgccaacgttgcactgtttgcagatggaaaactatactcagccacagtgactgacttccttgccattgacgcagtcatttaccggagtcttggagaaagccctaccctgcggaccgtcaagcacgattcaaaatggttgaaagaaccatactttgttcaagccgtggattacggagattatatctacttcttcttcagggaaatagcagtggagtataacaccatgggaaaggtagttttcccaagagtggctcaggtttgtaagaatgatatgggaggatctcaaagagtcctggagaaacagtggacgtcgttcctgaaggcgcgcttgaactgctcagttcctggagactctcatttttatttcaacattctccaggcagttacagatgtgattcgtatcaacgggcgtgatgttgtcctggcaacgttttctacaccttataacagcatccctgggtctgcagtctgtgcctatgacatgcttgacattgccagtgtttttactgggagattcaaggaacagaagtctcctgattccacctggacaccagttcctgatgaacgagttcctaagcccaggccaggttgctgtgctggctcatcctccttagaaagatatgcaacctccaatgagttccctgatgataccctgaacttcatcaagacgcacccgctcatggatgaggcagtgccctccatcttcaacaggccatggttcctgagaacaatggtcagataccgccttaccaaaattgcagtggacacagctgctgggccatatcagaatcacactgtggtttttctgggatcagagaagggaatcatcttgaagtttttggccagaataggaaatagtggttttctaaatgacagccttttcctggaggagatgagtgtttacaactctgaaaaatgcagctatgatggagtcgaagacaaaaggatcatgggcatgcagctggacagagcaagcagctctctgtatgttgcgttctctacctgtgtgataaaggttccccttggccggtgtgaacgacatgggaagtgtaaaaaaacctgtattgcctccagagacccatattgtggatggataaaggaaggtggtgcctgcagccatttatcacccaacagcagactgacttttgagcaggacatagagcgtggcaatacagatggtctgggggactgtcacaattcctttgtggcactgaatgggcattccagttccctcttgcccagcacaaccacatcagattcgacggctcaagaggggtatgagtctaggggaggaatgctggactggaagcatctgcttgactcacctgacagcacagaccctttgggggcagtgtcttcccataatcaccaagacaagaagggagtgattcgggaaagttacctcaaaggccacgaccagctggttcccgtcaccctcttggccattgcagtcatcctggctttcgtcatgggggccgtcttctcgggcatcaccgtctactgcgtctgtgatcatcggcgcaaagacgtggctgtggtgcagcgcaaggagaaggagctcacccactcgcgccggggctccatgagcagcgtcaccaagctcagcggcctctttggggacactcaatccaaagacccaaagccggaggccatcctcacgccactcatgcacaacggcaagctcgccactcccggcaacacggccaagatgctcattaaagcagaccagcaccacctggacctgacggccctccccaccccagagtcaaccccaacgctgcagcagaagcggaagcccagccgcggcagccgcgagtgggagaggaaccagaacctcatcaatgcctgcacaaaggacatgccccccatgggctcccctgtgattcccacggacctgcccctgcgggcctcccccagccacatccccagcgtggtggtcctgcccatcacgcagcagggctaccagcatgagtacgtggaccagcccaaaatgagcgaggtggcccagatggcgctggaggaccaggccgccacactggagtataagaccatcaaggaacatctcagcagcaagagtcccaaccatggggtgaaccttgtggagaacctggacagcctgccccccaaagttccacagcgggaggcctccctgggtcccccgggagcctccctgtctcagaccggtctaagcaagcggctggaaatgcaccactcctcttcctacggggttgactataagaggagcctacaacaggtcggacccacaaaagacttcagttatcatcacaaacatgagccaaaagcacatacctaccccatcccccaccccccacacacacacacacatgcacacaacacatacacacacacgcacagaggtgaacagaaactgaaacattttgtccacaacttcacgggacgtggccagactgggtttgcgttccaacctgcaaaacacaaatacattttttaaaatcaagaaaatttaaaaagacaaaaaaaaaagaattcattgataattctaactcagactttaacaatggcagaagtttactatgcgcaaatactgtgaaatgcccgccagtgttacagctttctgttgcagcagataaatgccatgttgggcaactatgtcatagatttctgctcctcctctcttttaatgaaataacgtgaccgttaacgcaagtaactctttatttattgttcaccctttttttccttaaggaaaggactcttccaaatatcatcctatgaacagctcttcagaaagcccattgaaagttaaactatttaacgtgaaatccattaactggaataattgagtttctttatttttacaataaattcactgagtaaataagttggagctggaattctgagctttgtgtttggactgtctggtctgtagctaaaggaaaaagttaggaggggaatatttatttaaatctatcagttcattgcctggtcaggtctctggcctataaacatgcaaaaaaactaattcatgttaaagtccttccagatcctaatttctaaagcaatcaggagagaaagcttttagaatggcacatcatatctcattgatgccaacatggttttgtccatggttctgactttctgtgaaggcaccagcttgcaatatgccatcccatttcaccttgcatgtgagacagcaaacaaaatccacaaatggtgtgaactaatatgctggctgctaccttgcataaattaatgatttgatcacacgggttcttcgtggggttacatctgtgaatagcctgttttccacatgtaaatttgtgccttacaccttgagttgtgtacacttgtaaactctttatgatcaactgttcccccttttgaaataagtgcagatatttatttaaccctcccttccccaccctctgccccacttccagccctctgaaagattggagtcaagcagatggaagaatgcagtggtgatagttgtcatgcgacagcctgagaacgctgggcagcaccacaccctccaattcacactgccttctagttgtgccaactggaaccaccctttggctgtgctgcgaagcatggaccccagtgttgttgtgggtgtgtcaaatcccctttcatcctcaagagctccctgcttcccttagattatttcaatacggtgatatccttatttgctagcagaaaagggactaacgtcccattcctcttttctgctgcgtccactggctagagagcaggcggtgcgcggttgggcagacacctgggaggagtctccaagccatgtgcacagcacacacgtgcagtgcacacaaagaaatgacatggaaatagatgcaggcaggctggtccctgctgtgattaacgagtaactccaagtacaaggccgaccacaatggatgctgcaaaaacgttgactggggcaaaggattttttattttattttttattttgttaattatgtttttaggggatgggaggtggtgtgtgtttttctcctcttggttttcatttgctcaagcacacaaaagggacttttgtttactctatcatgaacaaaggaactgtccacatactgtaaaccatgagcagtgttgttgttgtttttttaaacagtatatttggtggtctctttgtctgcttttatttccagttcgatcttctgggtttagttttgtctttaaaaagaattcaaaaaaagactgacaatgacagttttgagttggatagtgaaaaagtggagcctccataatcagtgtggttgccttcagacctgagtacttagctgagggtgggtgagagccctttgttccaaaagtccattagttttgctgttgtttaggagtaggtggttgttgttgtttttactttttttttttttggcttttgtaatggaatccatgttcacatcctgtgaactctgtctcctgaaaccctgaagtatttcctagaacctgaaatattgttttcttccttgaattttctctagaaatgcagaaattaggaaggtgatgggtctgtatccccctgcccccttctttcccatgcttgactcccgagagtactggcagtgcagcacccatcattgacgtaagcggctgtcttgtccagtgtttgtaggcatcactgcctcagctgttaaggagacctgtgtcaaaacttacatccacattcctacacccccacaacccatcacttctggtgttaaccctaaaatacccacatgtattgagctggtcttctgcatttaagtatttctccccagtttttttccccactgtgtgtggggggagggtccataaacccgagtgtgcctttgctttccacccttgctagacactggtagatgcaacaaactcagatttatatttgttgtaaagttgtaaaaatattgtgatgtcaccaattttccttccatctccacatcccctaacatctgattcacgacttaatgtatgttgtaagaaaagaaaaaagaaaagaaaaaaagggaaaaaagaaaagcaaggaaaaggctctttattacttaaaagtaataaaacctgactgttctatatta

SEQ ID NO: 363842 - DNA, 419 bp, Homo sapiens
aaaaaaatagccaggcttcatgcattgtgcctatctcccaagtagctgggattacaggtgtgcaccaccacgcctgactaattttgtatttttagtagagacagggtttcaccatgttagtcaggctggtctcgaactcctgacctcaggtgatccacccgcgttggcctcccaacgtgctgggattataggcgtgagccaccacgccccgcctaaaatccatattcaaagaagcaatttcagttcctttctaagctttgtcagtcaaggggctccactgacttcctaggccctgtaatttaaccagtctttaaggttttgcaggaaagtcccttcttccaagtggtttttccaaatcgcacaatggcaaagccaaacagaggaagaaacattaaaaaaaaaaaaagaccattatttct

SEQ ID NO: 363843 - DNA, 419 bp, Homo sapiens
agtaaagacagggtttcaccatgttggtcaggctggtctcaaactcctgacctcaggtgatccaccaccacgcctgactaattttgtatttttagtagagacagggtttcaccatgttagtcaggctggtctcgaactcctgacctcaggtgatccacccgcgttggcctcccaacgtgctgggattataggcgtgagccaccacgccccgcctaaaatccatattcaaagaagcaatttcagttcctttctaagctttgtcagtcaaggggctccactgacttcctaggccctgtaatttaaccagtctttaaggttttgcaggaaagtcccttcttccaagtggtttttccaaatcgcacaatggcaaagccaaacagaggaagaaacattaaaaaaaaaaaaagaccattatttct

SEQ ID NO: 363844 - DNA, 406 bp, Homo sapiens
  misc_feature (31)..(31): n is a, c, g, or t
gaagtaactgcaacacaaggaacagtaagantgtcctgttcccctgccagagggataagtgaaggaaactgaatgaaggtgaactgtgaagtgcccggggccctctgtcgttatcctccgaaactcctgacctcaggtgatccacccgcgttggcctcccaacgtgctgggattataggcgtgagccaccacgccccgcctaaaatccatattcaaagaagcaatttcagttcctttctaagctttgtcagtcaaggggctccactgacttcctaggccctgtaatttaaccagtctttaaggttttgcaggaaagtcccttcttccaagtggtttttccaaatcgcacaatggcaaagccaaacagaggaagaaacattaaaaaaaaaaaaagaccattatttct

SEQ ID NO: 363845 - DNA, 425 bp, Homo sapiens
atccatttctgttattttaagcaaccaaacttgtggtagtttcaccagtctcaggaaatgaatacgaatggaaagtcaaagattccaagaaatgagtggcggggtgcggtggctcacacttgtaatcacagcatttgcgggaagattgcttgggctcaggacttggagaccttgtgtctgtgagaaacttattataggcgtgagccaccacgccccgcctaaaatccatattcaaagaagcaatttcagttcctttctaagctttgtcagtcaaggggctccactgacttcctaggccctgtaatttaaccagtctttaaggttttgcaggaaagtcccttcttccaagtggtttttccaaatcgcacaatggcaaagccaaacagaggaagaaacattaaaaaaaaaaaaagaccattatttct

SEQ ID NO: 363846 - DNA, 477 bp, Homo sapiens
ctgacacctggctacccacaggtggaggatttcactccccaagtataaggacccttcagttgaggcagtgagagccggcctcttcagggttccctttcagtctcctgaggtttgctgagtgggattctttcagaagattaaagaggaggcaggcagagtgaatggaaaccgtctgctccgtgtcccccacccctctaggggtcttggagttcaaggctctctatcctccagccagctggtgagcttgttgctcattggagtggctgcttggggcaagggcctgggtctggtgtccagcatccacatcatcggcggagtcattgctgtgggagtcttccttctccttattgcagtggctggactggtgggtgctgtcaaccaccaccaagtcctgctgttcttttacatgatcatccttggtttggtcttcatcttccagcctgggcgacagaatgagactctgtctcaaaaaaaaaa

SEQ ID NO: 363847 - DNA, 2077 bp, Homo sapiens
caatccagaggcaggggagggacggtgcaggcgcagagtattgggtttggctggcctcgatttaaagagacagaagctgtcggggtcctggaagacggtccccaataccctccccccaagtccttgggaccacttgggtccccagagctggggagatggtttgtggcggctttgcctgctccaagaatgcgctttgcgctctcaacgtggtctacatgctggtgagcttgttgctcattggagtggctgcttggggcaagggcctgggtctggtgtccagcatccacatcatcggcggagtcattgctgtgggagtcttccttctccttattgcagtggctggactggtgggtgctgtcaaccaccaccaagtcctgctgttcttttacatgatcatccttggtttggtcttcatcttccaatttgtaatctcttgctcatgtctggctattaaccgaagcaaacaggtaagacagtaccctttcaagtacttacttgctttttaaaattttcctcttaacctcgaactccttccttagtctggccccaactacccaaagatcatccttaggtgcactgcttctggcctcttgggctatttgcttcctctgggatgtctggttaattttccatgaggatgatctagagaacctcaaaaggtagatatttatcgtgtctataattgttgcacaccgttatgcttctgtttgacttcctttgctgggctagggaaattgaggcacttgaactgataacaggatgtagggagacttaatttccctctacccatatctttcagacagatgtcatcaatgcttcttggtgggtcatgagcaacaagactcgggatgaactggaaagaagttttgattgttgtggcttattcaacctcacaaccctgtatcaacaagattatgatttctgcactgcaatctgcaagagccagagccccacatgccagatgtgtggagaaaagtttcttaagcattcagacgaagccctgaaaatcctagggggtgttggactcttctttagctttacagagatccttggtgtttggctagcaatgagatttcggaatcagaaggatcctagagccaaccccagtgcctttctatgagactttggatccttctgacttttcttctgctctctctaagctttctcttcctcccttagggaatatctagggtctgtaaccgttttggtttgagaaaaaggaaaggccccttgtcacatcctctaaaattgatggaatagcaagactttatgccttgacatattttagtgggagccagactataaggaataaaaggaaaaactttcttcctctctctccaagaggatatgggaagcttctgtgagtgcataggatgggggctggagtcattcttagctgtttcccttcctctgtccatatactggatcacctcaacataccctggtgtggctctaagggtaaatcagggatagggccaaggagaaaacaaccaagaactctttcctgtaataagcaggatccagtttgagaaagtttagcgaatataaaagtaaaagccatttaaaaatctatattctttttttttttttgacacagagtcttgctctgttgcccaggctggagtgcaatggcatgatctcggctcaccgcaacctctgcctcccgggttcaagcgatcctcctgcctcagtctcccaagtagctgggattacaggtgtgcaccaccacgcctgactaattttgtatttttagtagagacagggtttcaccatgttagtcaggctggtctcgaactcctgacctcaggtgatccacccgcgttggcctcccaacgtgctgggattataggcgtgagccaccacgccccgcctaaaatccatattcaaagaagcaatttcagttcctttctaagctttgtcagtcaaggggctccactgacttcctaggccctgtaatttaaccagtctttaaggttttgcaggaaagtcccttcttccaagtggtttttccaaatcgcacaatggcaaagccaaacagaggaagaaacattaaaaaaaaaaaaagaccattatttct

SEQ ID NO: 363848 - DNA, 1673 bp, Homo sapiens
atcggtatcctctgatttgggagctaagttgaattttgaattcaagagatgccacgagagagggaaagagcttcccctaagcagcctccaagggcccgagcgtggcagctccttctgcttccaaaatgctgacttgtacatacatgctggtgagcttgttgctcattggagtggctgcttggggcaagggcctgggtctggtgtccagcatccacatcatcggcggagtcattgctgtgggagtcttccttctccttattgcagtggctggactggtgggtgctgtcaaccaccaccaagtcctgctgttcttttacatgatcatccttggtttggtcttcatcttccaatttgtaatctcttgctcatgtctggctattaaccgaagcaaacagacagatgtcatcaatgcttcttggtgggtcatgagcaacaagactcgggatgaactggaaagaagttttgattgttgtggcttattcaacctcacaaccctgtatcaacaagattatgatttctgcactgcaatctgcaagagccagagccccacatgccagatgtgtggagaaaagtttcttaagcattcagacgaagccctgaaaatcctagggggtgttggactcttctttagctttacagagatccttggtgtttggctagcaatgagatttcggaatcagaaggatcctagagccaaccccagtgcctttctatgagactttggatccttctgacttttcttctgctctctctaagctttctcttcctcccttagggaatatctagggtctgtaaccgttttggtttgagaaaaaggaaaggccccttgtcacatcctctaaaattgatggaatagcaagactttatgccttgacatattttagtgggagccagactataaggaataaaaggaaaaactttcttcctctctctccaagaggatatgggaagcttctgtgagtgcataggatgggggctggagtcattcttagctgtttcccttcctctgtccatatactggatcacctcaacataccctggtgtggctctaagggtaaatcagggatagggccaaggagaaaacaaccaagaactctttcctgtaataagcaggatccagtttgagaaagtttagcgaatataaaagtaaaagccatttaaaaatctatattctttttttttttttgacacagagtcttgctctgttgcccaggctggagtgcaatggcatgatctcggctcaccgcaacctctgcctcccgggttcaagcgatcctcctgcctcagtctcccaagtagctgggattacaggtgtgcaccaccacgcctgactaattttgtatttttagtagagacagggtttcaccatgttagtcaggctggtctcgaactcctgacctcaggtgatccacccgcgttggcctcccaacgtgctgggattataggcgtgagccaccacgccccgcctaaaatccatattcaaagaagcaatttcagttcctttctaagctttgtcagtcaaggggctccactgacttcctaggccctgtaatttaaccagtctttaaggttttgcaggaaagtcccttcttccaagtggtttttccaaatcgcacaatggcaaagccaaacagaggaagaaacattaaaaaaaaaaaaagaccattatttct

SEQ ID NO: 363849 - DNA, 1745 bp, Homo sapiens
caatccagaggcaggggagggacggtgcaggcgcagagtattgggtttggctggcctcgatttaaagagacagaagctgtcggggtcctggaagacggtccccaataccctccccccaagtccttgggaccacttgggtccccagagctggggagatggtttgtggcggctttgcctgctccaagaatgcgctttgcgctctcaacgtggtctacatgctggtgagcttgttgctcattggagtggctgcttggggcaagggcctgggtctggtgtccagcatccacatcatcggcggagtcattgctgtgggagtcttccttctccttattgcagtggctggactggtgggtgctgtcaaccaccaccaagtcctgctgttcttttacatgatcatccttggtttggtcttcatcttccaatttgtaatctcttgctcatgtctggctattaaccgaagcaaacagacagatgtcatcaatgcttcttggtgggtcatgagcaacaagactcgggatgaactggaaagaagttttgattgttgtggcttattcaacctcacaaccctgtatcaacaagattatgatttctgcactgcaatctgcaagagccagagccccacatgccagatgtgtggagaaaagtttcttaagcattcagacgaagccctgaaaatcctagggggtgttggactcttctttagctttacagagatccttggtgtttggctagcaatgagatttcggaatcagaaggatcctagagccaaccccagtgcctttctatgagactttggatccttctgacttttcttctgctctctctaagctttctcttcctcccttagggaatatctagggtctgtaaccgttttggtttgagaaaaaggaaaggccccttgtcacatcctctaaaattgatggaatagcaagactttatgccttgacatattttagtgggagccagactataaggaataaaaggaaaaactttcttcctctctctccaagaggatatgggaagcttctgtgagtgcataggatgggggctggagtcattcttagctgtttcccttcctctgtccatatactggatcacctcaacataccctggtgtggctctaagggtaaatcagggatagggccaaggagaaaacaaccaagaactctttcctgtaataagcaggatccagtttgagaaagtttagcgaatataaaagtaaaagccatttaaaaatctatattctttttttttttttgacacagagtcttgctctgttgcccaggctggagtgcaatggcatgatctcggctcaccgcaacctctgcctcccgggttcaagcgatcctcctgcctcagtctcccaagtagctgggattacaggtgtgcaccaccacgcctgactaattttgtatttttagtagagacagggtttcaccatgttagtcaggctggtctcgaactcctgacctcaggtgatccacccgcgttggcctcccaacgtgctgggattataggcgtgagccaccacgccccgcctaaaatccatattcaaagaagcaatttcagttcctttctaagctttgtcagtcaaggggctccactgacttcctaggccctgtaatttaaccagtctttaaggttttgcaggaaagtcccttcttccaagtggtttttccaaatcgcacaatggcaaagccaaacagaggaagaaacattaaaaaaaaaaaaagaccattatttct

SEQ ID NO: 363850 - DNA, 3769 bp, Homo sapiens
cagcttgcctgctctcagcctaagctctctcgccaaccgtggtggctccttgcgttcctacatcctctcatctgagaatcagagagcataatcttcttacgggcccgtgatttattaacgtggcttaatctgaaggttctcagtcaaattctttgtgatctactgattgtgggggcatggcaaggtttgcttaaaggagcttggctggtttgggcccttgtagctgacagaaggtggccagggagaaggcagcacactgctcggagaatgaaggcgcttctgttgctggtcttgccttggctcagtcctgctaactacattgacaatgtgggcaacctgcacttcctgtattcagaactctgtaaaggtgcctcccactacggcctgaccaaagataggaagaggcgctcacaagatggctgtccagacggctgtgcgagcctcacagccacggctccctccccagaggtttctgcagctgccaccatctccttaatgacagacgagcctggcctagacaaccctgcctacgtgtcctcggcagaggacgggcagccagcaatcagcccagtggactctggccggagcaaccgaactagggcacggccctttgagagatccactattagaagcagatcatttaaaaaaataaatcgagctttgagtgttcttcgaaggacaaagagcgggagtgcagttgccaaccatgccgaccagggcagggaaaattctgaaaacaccactgcccctgaagtctttccaaggttgtaccacctgattccagatggtgaaattaccagcatcaagatcaatcgagtagatcccagtgaaagcctctctattaggctggtgggaggtagcgaaaccccactggtccatatcattatccaacacatttatcgtgatggggtgatcgccagagacggccggctactgccaggagacatcattctaaaggtcaacgggatggacatcagcaatgtccctcacaactacgctgtgcgtctcctgcggcagccctgccaggtgctgtggctgactgtgatgcgtgaacagaagttccgcagcaggaacaatggacaggccccggatgcctacagaccccgagatgacagctttcatgtgattctcaacaaaagtagccccgaggagcagcttggaataaaactggtgcgcaaggtggatgagcctggggttttcatcttcaatgtgctggatggcggtgtggcatatcgacatggtcagcttgaggagaatgaccgtgtgttagccatcaatggacatgatcttcgatatggcagcccagaaagtgcggctcatctgattcaggccagtgaaagacgtgttcacctcgtcgtgtcccgccaggttcggcagcggagccctgacatctttcaggaagccggctggaacagcaatggcagctggtccccagggccaggggagaggagcaacactcccaagcccctccatcctacaattacttgtcatgagaaggtggtaaatatccaaaaagaccccggtgaatctctcggcatgaccgtcgcagggggagcatcacatagagaatgggatttgcctatctatgtcatcagtgttgagcccggaggagtcataagcagagatggaagaataaaaacaggtgacattttgttgaatgtggatggggtcgaactgacagaggtcagccggagtgaggcagtggcattattgaaaagaacatcatcctcgatagtactcaaagctttggaagtcaaagagtatgagccccaggaagactgcagcagcccagcagccctggactccaaccacaacatggccccacccagtgactggtccccatcctgggtcatgtggctggaattaccacggtgcttgtataactgtaaagatattgtattacgaagaaacacagctggaagtctgggcttctgcattgtaggaggttatgaagaatacaatggaaacaaaccttttttcatcaaatccattgttgaaggaacaccagcatacaatgatggaagaattagatgtggtgatattcttcttgctgtcaatggtagaagtacatcaggaatgatacatgcttgcttggcaagactgctgaaagaacttaaaggaagaattactctaactattgtttcttggcctggcacttttttatagaatcaatgatgggtcagaggaaaacagaaaaatcacaaataggctaagaagttgaaacactatatttatcttgtcagtttttatatttaaagaaagaatacattgtaaaaatgtcaggaaaagtatgatcatctaatgaaagccagttacacctcagaaaatatgattccaaaaaaattaaaactactagttttttttcagtgtggaggatttctcattactctacaacattgtttatattttttctattcaataaaaagccctaaaacaactaaaatgatttgtataccccactgaattcaagctgatttaaatttaaaatttggtatatgctgaagtctgccaagggtacattatggccatttttaatttacagctaaaatattttttaaaatgcattgctgagaaacgttgctttcatcaaacaagaataaatatttttcagaagttatagttgtcttttagtatgtgatactaattaagattacttttgtattatcactatttaaaagatcctagtaatttattctttcaaataccatgttatttgttaccatcaccgatgaatacctcctaggcttatccctaaaaatgctcgctcagagaattaattataaacttgttttgtttttagtaagaaatggctaaagctcttttttttccacaatcgttagtaactgtataaaaactcatgctgctccaccagtgggccttggaaaatgcatcaagaaggccaaaccagcttgaccctggctcacagacatggtcatgaggcgatttaaatttgtgccacaatgaagagtgtgtgtacacatgcctcctagaaactacactatgggtaattaatttatttcatagaggccacccagatgccttataggttttattaatttggatatgaaagtgtaccccatttggtttcaccaggaacccaaatttagaatattgaaaagccatcaaaaagttgtgatatcaaaaatgtatgagtctcttaatatactaagcaagagtgtcacagcagtaatgataaagactagttttaatctcaagccttagaggggccctttgttgccttttgtggtgcagcctcttaagagagtggtgtttgattaacaaaaaaactgtggcccaagtggaacccttgaccttttctcagataatctgtgtatgtacacagctaacacagctctttagattccctgttaagtgactcattcacattcctttcttggatataaagtcattgctgtctttttatttttgaaatagtacaagacaaagatttttaacttaacatgaaaaattcactcttttattttggaaaaaaagttaacttttcatactaacaaacagaacaagatttaaggtaaatttcttaaacattatccagaaaaataacaagatttatagtatctacttctggtactaatatacacaaaaggccaaaaccatgcctattctgcaggtgtagcttcggtgctctcctgttcaggggcaggctcactgcccgcttcttttccttctttgcttcttttagattttttgtgtttgtgtctcctgtgactatctccttcttcactttcatggcgacgtctactattac

SEQ ID NO: 363851 - DNA, 3177 bp, Homo sapiens
accactgacatcaaggtttactgtgaaatgcagcagataaatattttacaataggaaatttaatgaaattcatacttttaagcaatcatttcagtaaaagaaattgttatagatgatgtgtatgtatgacgatagattcagaactggttagagttgaatttcagcattacattttaaaggtatttgccaaaccctaaagctcattttatttcaagtgaaaacatcatcatgaaaaaagtcacgtcacattgactaacaaggttggtaacaaatgtaatgatcaactttatcatttaacatttcacaagactttttattggtttctaaaaagcagttaatattttaaggtacggtatataaacaaaatagccatatctgatttttggcaacatgaaaatgccaatttcctttcaaaccaattcccggactacagctacaaatgtggtcaacaacgtcatcctggagtaaaattcagctcctgacacacacttctatggcaattataacatagttaacacttggcctgtacctatatgaacactgatccattgggggccactgaataaaaatttcttcaatctcatttgctattttagttgaggattctaatttacagaagagctgggcctttccttctcccattccttttataacttcctatccagtttcctgcagtttgtttttcctcctatttgaattgttcttataatctttaaacgtttctgtttccattcactttatgcgtgcatgcttctctatgacttatcaaacgtagcactgggtgtaaagtggtatttttccaaggtcaaaaaaagtatacgaattcatttattaggattaggcttaaactgctttcattgagattattcaaaggatttttgccctcattaaaattatatcaagtaaataaaaatatgacatccataagtgtgtttgttcaccaataaggatttaggtttatccaactttttgctaatacatattcaagcattgtcttaagttaaaaatatgattatcattcccagtagatgtgtaacagaacacaatagggctgtcagttttttaaggatattcaaaattatggaaaacaggttcaattacaaaaagccagctaacagcacaaaggtcaccaaggtatgatacaattttgagtgggacctatgcagtggtacttagccattaaaaatgccaacaaaaggaatggaggatgagtcacagtaagtattcccttaactgtgaaacttaaatatgcatgtacactgattacattctatttcaggtgcttgtataactgtaaagatattgtattacgaagaaacacagctggaagtctgggcttctgcattgtaggaggttatgaagaatacaatggaaacaaaccttttttcatcaaatccattgttgaaggaacaccagcatacaatgatggaagaattagatgtggtgatattcttcttgctgtcaatggtagaagtacatcaggaatgatacatgcttgcttggcaagactgctgaaagaacttaaaggaagaattactctaactattgtttcttggcctggcacttttttatagaatcaatgatgggtcagaggaaaacagaaaaatcacaaataggctaagaagttgaaacactatatttatcttgtcagtttttatatttaaagaaagaatacattgtaaaaatgtcaggaaaagtatgatcatctaatgaaagccagttacacctcagaaaatatgattccaaaaaaattaaaactactagttttttttcagtgtggaggatttctcattactctacaacattgtttatattttttctattcaataaaaagccctaaaacaactaaaatgatttgtataccccactgaattcaagctgatttaaatttaaaatttggtatatgctgaagtctgccaagggtacattatggccatttttaatttacagctaaaatattttttaaaatgcattgctgagaaacgttgctttcatcaaacaagaataaatatttttcagaagttatagttgtcttttagtatgtgatactaattaagattacttttgtattatcactatttaaaagatcctagtaatttattctttcaaataccatgttatttgttaccatcaccgatgaatacctcctaggcttatccctaaaaatgctcgctcagagaattaattataaacttgttttgtttttagtaagaaatggctaaagctcttttttttccacaatcgttagtaactgtataaaaactcatgctgctccaccagtgggccttggaaaatgcatcaagaaggccaaaccagcttgaccctggctcacagacatggtcatgaggcgatttaaatttgtgccacaatgaagagtgtgtgtacacatgcctcctagaaactacactatgggtaattaatttatttcatagaggccacccagatgccttataggttttattaatttggatatgaaagtgtaccccatttggtttcaccaggaacccaaatttagaatattgaaaagccatcaaaaagttgtgatatcaaaaatgtatgagtctcttaatatactaagcaagagtgtcacagcagtaatgataaagactagttttaatctcaagccttagaggggccctttgttgccttttgtggtgcagcctcttaagagagtggtgtttgattaacaaaaaaactgtggcccaagtggaacccttgaccttttctcagataatctgtgtatgtacacagctaacacagctctttagattccctgttaagtgactcattcacattcctttcttggatataaagtcattgctgtctttttatttttgaaatagtacaagacaaagatttttaacttaacatgaaaaattcactcttttattttggaaaaaaagttaacttttcatactaacaaacagaacaagatttaaggtaaatttcttaaacattatccagaaaaataacaagatttatagtatctacttctggtactaatatacacaaaaggccaaaaccatgcctattctgcaggtgtagcttcggtgctctcctgttcaggggcaggctcactgcccgcttcttttccttctttgcttcttttagattttttgtgtttgtgtctcctgtgactatctccttcttcactttcatggcgacgtctactattac

SEQ ID NO: 363852 - DNA, 3960 bp, Homo sapiens
caaggagctgctcggttcacccacaaggaatgagagctgcctgcctgctgctgcttggagagccccagacagtcgcttgaagaggtgtgtggatgtctcctagatcttgacttgctcctgaggaaatattgtgtgactgagtttcctgttatactgctctccaatccatcatgaaccagccagagtctgccaacgatcctgaacccctgtgtgcagtgtgtggccaagcccactccttggaggaaaaccacttctacagctatccagaggaagtggatgatgacctcatctgccacatctgcctgcaggctttgctggaccccctggacactccgtgtggacacacctactgcaccctctgcctcaccaacttcctggtggagaaggacttctgtcccatggaccgcaagcctctggttctgcagcactgcaagaagtccagcatcctggtcaacaaactcctcaacaagctactggtgacctgcccattcagggagcactgcacccaggtgttgcagcgctgtgacctcgagcatcactttcaaaccagctgtaaaggtgcctcccactacggcctgaccaaagataggaagaggcgctcacaagatggctgtccagacggctgtgcgagcctcacagccacggctccctccccagaggtttctgcagctgccaccatctccttaatgacagacgagcctggcctagacaaccctgcctacgtgtcctcggcagaggacgggcagccagcaatcagcccagtggactctggccggagcaaccgaactagggcacggccctttgagagatccactattagaagcagatcatttaaaaaaataaatcgagctttgagtgttcttcgaaggacaaagagcgggagtgcagttgccaaccatgccgaccagggcagggaaaattctgaaaacaccactgcccctgaagtctttccaaggttgtaccacctgattccagatggtgaaattaccagcatcaagatcaatcgagtagatcccagtgaaagcctctctattaggctggtgggaggtagcgaaaccccactggtccatatcattatccaacacatttatcgtgatggggtgatcgccagagacggccggctactgccaggagacatcattctaaaggtcaacgggatggacatcagcaatgtccctcacaactacgctgtgcgtctcctgcggcagccctgccaggtgctgtggctgactgtgatgcgtgaacagaagttccgcagcaggaacaatggacaggccccggatgcctacagaccccgagatgacagctttcatgtgattctcaacaaaagtagccccgaggagcagcttggaataaaactggtgcgcaaggtggatgagcctggggttttcatcttcaatgtgctggatggcggtgtggcatatcgacatggtcagcttgaggagaatgaccgtgtgttagccatcaatggacatgatcttcgatatggcagcccagaaagtgcggctcatctgattcaggccagtgaaagacgtgttcacctcgtcgtgtcccgccaggttcggcagcggagccctgacatctttcaggaagccggctggaacagcaatggcagctggtccccagggccaggggagaggagcaacactcccaagcccctccatcctacaattacttgtcatgagaaggtggtaaatatccaaaaagaccccggtgaatctctcggcatgaccgtcgcagggggagcatcacatagagaatgggatttgcctatctatgtcatcagtgttgagcccggaggagtcataagcagagatggaagaataaaaacaggtgacattttgttgaatgtggatggggtcgaactgacagaggtcagccggagtgaggcagtggcattattgaaaagaacatcatcctcgatagtactcaaagctttggaagtcaaagagtatgagccccaggaagactgcagcagcccagcagccctggactccaaccacaacatggccccacccagtgactggtccccatcctgggtcatgtggctggaattaccacggtgcttgtataactgtaaagatattgtattacgaagaaacacagctggaagtctgggcttctgcattgtaggaggttatgaagaatacaatggaaacaaaccttttttcatcaaatccattgttgaaggaacaccagcatacaatgatggaagaattagatgtggtgatattcttcttgctgtcaatggtagaagtacatcaggaatgatacatgcttgcttggcaagactgctgaaagaacttaaaggaagaattactctaactattgtttcttggcctggcacttttttatagaatcaatgatgggtcagaggaaaacagaaaaatcacaaataggctaagaagttgaaacactatatttatcttgtcagtttttatatttaaagaaagaatacattgtaaaaatgtcaggaaaagtatgatcatctaatgaaagccagttacacctcagaaaatatgattccaaaaaaattaaaactactagttttttttcagtgtggaggatttctcattactctacaacattgtttatattttttctattcaataaaaagccctaaaacaactaaaatgatttgtataccccactgaattcaagctgatttaaatttaaaatttggtatatgctgaagtctgccaagggtacattatggccatttttaatttacagctaaaatattttttaaaatgcattgctgagaaacgttgctttcatcaaacaagaataaatatttttcagaagttatagttgtcttttagtatgtgatactaattaagattacttttgtattatcactatttaaaagatcctagtaatttattctttcaaataccatgttatttgttaccatcaccgatgaatacctcctaggcttatccctaaaaatgctcgctcagagaattaattataaacttgttttgtttttagtaagaaatggctaaagctcttttttttccacaatcgttagtaactgtataaaaactcatgctgctccaccagtgggccttggaaaatgcatcaagaaggccaaaccagcttgaccctggctcacagacatggtcatgaggcgatttaaatttgtgccacaatgaagagtgtgtgtacacatgcctcctagaaactacactatgggtaattaatttatttcatagaggccacccagatgccttataggttttattaatttggatatgaaagtgtaccccatttggtttcaccaggaacccaaatttagaatattgaaaagccatcaaaaagttgtgatatcaaaaatgtatgagtctcttaatatactaagcaagagtgtcacagcagtaatgataaagactagttttaatctcaagccttagaggggccctttgttgccttttgtggtgcagcctcttaagagagtggtgtttgattaacaaaaaaactgtggcccaagtggaacccttgaccttttctcagataatctgtgtatgtacacagctaacacagctctttagattccctgttaagtgactcattcacattcctttcttggatataaagtcattgctgtctttttatttttgaaatagtacaagacaaagatttttaacttaacatgaaaaattcactcttttattttggaaaaaaagttaacttttcatactaacaaacagaacaagatttaaggtaaatttcttaaacattatccagaaaaataacaagatttatagtatctacttctggtactaatatacacaaaaggccaaaaccatgcctattctgcaggtgtagcttcggtgctctcctgttcaggggcaggctcactgcccgcttcttttccttctttgcttcttttagattttttgtgtttgtgtctcctgtgactatctccttcttcactttcatggcgacgtctactattac

SEQ ID NO: 363853 - DNA, 3569 bp, Homo sapiens
accactgacatcaaggtttactgtgaaatgcagcagataaatattttacaataggaaatttaatgaaattcatacttttaagcaatcatttcagtaaaagaaattgttatagatgatgtgtatgtatgacgatagattcagaactggttagagttgaatttcagcattacattttaaaggtatttgccaaaccctaaagctcattttatttcaagtgaaaacatcatcatgaaaaaagtcacgtcacattgactaacaaggttggtaacaaatgtaatgatcaactttatcatttaacatttcacaagactttttattggtttctaaaaagcagttaatattttaaggtacggtatataaacaaaatagccatatctgatttttggcaacatgaaaatgccaatttcctttcaaaccaattcccggactacagctacaaatgtggtcaacaacgtcatcctggagtaaaattcagctcctgacacacacttctatggcaattataacatagttaacacttggcctgtacctatatgaacactgatccattgggggccactgaataaaaatttcttcaatctcatttgctattttagttgaggattctaatttacagaagagctgggcctttccttctcccattccttttataacttcctatccagtttcctgcagtttgtttttcctcctatttgaattgttcttataatctttaaacgtttctgtttccattcactttatgcgtgcatgcttctctatgacttatcaaacgtagcactgggtgtaaagtggtatttttccaaggtcaaaaaaagtatacgaattcatttattaggattaggcttaaactgctttcattgagattattcaaaggatttttgccctcattaaaattatatcaagtaaataaaaatatgacatccataagtgtgtttgttcaccaataaggatttaggtttatccaactttttgctaatacatattcaagcattgtcttaagttaaaaatatgattatcattcccagtagatgtgtaacagaacacaatagggctgtcagttttttaaggatattcaaaattatggaaaacaggttcaattacaaaaagccagctaacagcacaaaggtcaccaaggtatgatacaattttgagtgggacctatgcagtggtacttagccattaaaaatgccaacaaaaggaatggaggatgagtcacagtaagtattcccttaactgtgaaacttaaatatgcatgtacactgattacattctatttcaggtgcttgtataactgtaaagatattgtattacgaagaaacacagctggaagtctgggcttctgcattgtaggaggttatgaagaatacaatggaaacaaaccttttttcatcaaatccattgttgaaggaacaccagcatacaatgatggaagaattaggtaataataatgactaatcaaaaatacttgtattaaatgttgtttcataaatgccaaagcttggccccatttgagataaggcatgtatttattatactttgtggggattaaaagtatgtacgtagcattcaacttctgagaaatccaaaataattacacatattcttggtcccatactacaactccccatacttttagcattccttctaacacaagctgaatggatagtgagtttggagaatgtaaataagaggcaagaaatatctcaattagaagttaacataattaaaatggtcagatgtagcaaaatctagcaccactaagataaacttgcattaacttcagcaacgaattaaaatactaatcatatcttgttttgtttttttttttagatgtggtgatattcttcttgctgtcaatggtagaagtacatcaggaatgatacatgcttgcttggcaagactgctgaaagaacttaaaggaagaattactctaactattgtttcttggcctggcacttttttatagaatcaatgatgggtcagaggaaaacagaaaaatcacaaataggctaagaagttgaaacactatatttatcttgtcagtttttatatttaaagaaagaatacattgtaaaaatgtcaggaaaagtatgatcatctaatgaaagccagttacacctcagaaaatatgattccaaaaaaattaaaactactagttttttttcagtgtggaggatttctcattactctacaacattgtttatattttttctattcaataaaaagccctaaaacaactaaaatgatttgtataccccactgaattcaagctgatttaaatttaaaatttggtatatgctgaagtctgccaagggtacattatggccatttttaatttacagctaaaatattttttaaaatgcattgctgagaaacgttgctttcatcaaacaagaataaatatttttcagaagttatagttgtcttttagtatgtgatactaattaagattacttttgtattatcactatttaaaagatcctagtaatttattctttcaaataccatgttatttgttaccatcaccgatgaatacctcctaggcttatccctaaaaatgctcgctcagagaattaattataaacttgttttgtttttagtaagaaatggctaaagctcttttttttccacaatcgttagtaactgtataaaaactcatgctgctccaccagtgggccttggaaaatgcatcaagaaggccaaaccagcttgaccctggctcacagacatggtcatgaggcgatttaaatttgtgccacaatgaagagtgtgtgtacacatgcctcctagaaactacactatgggtaattaatttatttcatagaggccacccagatgccttataggttttattaatttggatatgaaagtgtaccccatttggtttcaccaggaacccaaatttagaatattgaaaagccatcaaaaagttgtgatatcaaaaatgtatgagtctcttaatatactaagcaagagtgtcacagcagtaatgataaagactagttttaatctcaagccttagaggggccctttgttgccttttgtggtgcagcctcttaagagagtggtgtttgattaacaaaaaaactgtggcccaagtggaacccttgaccttttctcagataatctgtgtatgtacacagctaacacagctctttagattccctgttaagtgactcattcacattcctttcttggatataaagtcattgctgtctttttatttttgaaatagtacaagacaaagatttttaacttaacatgaaaaattcactcttttattttggaaaaaaagttaacttttcatactaacaaacagaacaagatttaaggtaaatttcttaaacattatccagaaaaataacaagatttatagtatctacttctggtactaatatacacaaaaggccaaaaccatgcctattctgcaggtgtagcttcggtgctctcctgttcaggggcaggctcactgcccgcttcttttccttctttgcttcttttagattttttgtgtttgtgtctcctgtgactatctccttcttcactttcatggcgacgtctactattac

SEQ ID NO: 363854 - DNA, 1846 bp, Homo sapiens
accactgacatcaaggtttactgtgaaatgcagcagataaatattttacaataggaaatttaatgaaattcatacttttaagcaatcatttcagtaaaagaaattgttatagatgatgtgtatgtatgacgatagattcagaactggttagagttgaatttcagcattacattttaaaggtatttgccaaaccctaaagctcattttatttcaagtgaaaacatcatcatgaaaaaagtcacgtcacattgactaacaaggttggtaacaaatgtaatgatcaactttatcatttaacatttcacaagactttttattggtttctaaaaagcagttaatattttaaggtacggtatataaacaaaatagccatatctgatttttggcaacatgaaaatgccaatttcctttcaaaccaattcccggactacagctacaaatgtggtcaacaacgtcatcctggagtaaaattcagctcctgacacacacttctatggcaattataacatagttaacacttggcctgtacctatatgaacactgatccattgggggccactgaataaaaatttcttcaatctcatttgctattttagttgaggattctaatttacagaagagctgggcctttccttctcccattccttttataacttcctatccagtttcctgcagtttgtttttcctcctatttgaattgttcttataatctttaaacgtttctgtttccattcactttatgcgtgcatgcttctctatgacttatcaaacgtagcactgggtgtaaagtggtatttttccaaggtcaaaaaaagtatacgaattcatttattaggattaggcttaaactgctttcattgagattattcaaaggatttttgccctcattaaaattatatcaagtaaataaaaatatgacatccataagtgtgtttgttcaccaataaggatttaggtttatccaactttttgctaatacatattcaagcattgtcttaagttaaaaatatgattatcattcccagtagatgtgtaacagaacacaatagggctgtcagttttttaaggatattcaaaattatggaaaacaggttcaattacaaaaagccagctaacagcacaaaggtcaccaaggtatgatacaattttgagtgggacctatgcagtggtacttagccattaaaaatgccaacaaaaggaatggaggatgagtcacagtaagtattcccttaactgtgaaacttaaatatgcatgtacactgattacattctatttcaggtgcttgtataactgtaaagatattgtattacgaagaaacacagctggaagtctgggcttctgcattgtaggaggttatgaagaatacaatggaaacaaaccttttttcatcaaatccattgttgaaggaacaccagcatacaatgatggaagaattagatgtggtgatattcttcttgctgtcaatggtagaagtacatcaggaatgatacatgcttgcttggcaagactgctgaaagaacttaaaggaagaattactctaactattgtttcttggcctggcacttttttatagaatcaatgatgggtcagaggaaaacagaaaaatcacaaataggctaagaagttgaaacactatatttatcttgtcagtttttatatttaaagaaagaatacattgtaaaaatgtcaggaaaagtatgatcatctaatgaaagccagttacacctcagaaaatatgattccaaaaaaattaaaactactagttttttttcagtgtggaggatttctcattactctacaacattgtttatattttttctattcaataaaaagccctaaaacaac

SEQ ID NO: 363855 - DNA, 1951 bp, Homo sapiens
tatctcctttaaatcaataaccccatactatcaatcaatcacaaaaaactcatgtgcttgtataactgtaaagatattgtattacgaagaaacacagctggaagtctgggcttctgcattgtaggaggttatgaagaatacaatggaaacaaaccttttttcatcaaatccattgttgaaggaacaccagcatacaatgatggaagaattagatgtggtgatattcttcttgctgtcaatggtagaagtacatcaggaatgatacatgcttgcttggcaagactgctgaaagaacttaaaggaagaattactctaactattgtttcttggcctggcacttttttatagaatcaatgatgggtcagaggaaaacagaaaaatcacaaataggctaagaagttgaaacactatatttatcttgtcagtttttatatttaaagaaagaatacattgtaaaaatgtcaggaaaagtatgatcatctaatgaaagccagttacacctcagaaaatatgattccaaaaaaattaaaactactagttttttttcagtgtggaggatttctcattactctacaacattgtttatattttttctattcaataaaaagccctaaaacaactaaaatgatttgtataccccactgaattcaagctgatttaaatttaaaatttggtatatgctgaagtctgccaagggtacattatggccatttttaatttacagctaaaatattttttaaaatgcattgctgagaaacgttgctttcatcaaacaagaataaatatttttcagaagttatagttgtcttttagtatgtgatactaattaagattacttttgtattatcactatttaaaagatcctagtaatttattctttcaaataccatgttatttgttaccatcaccgatgaatacctcctaggcttatccctaaaaatgctcgctcagagaattaattataaacttgttttgtttttagtaagaaatggctaaagctcttttttttccacaatcgttagtaactgtataaaaactcatgctgctccaccagtgggccttggaaaatgcatcaagaaggccaaaccagcttgaccctggctcacagacatggtcatgaggcgatttaaatttgtgccacaatgaagagtgtgtgtacacatgcctcctagaaactacactatgggtaattaatttatttcatagaggccacccagatgccttataggttttattaatttggatatgaaagtgtaccccatttggtttcaccaggaacccaaatttagaatattgaaaagccatcaaaaagttgtgatatcaaaaatgtatgagtctcttaatatactaagcaagagtgtcacagcagtaatgataaagactagttttaatctcaagccttagaggggccctttgttgccttttgtggtgcagcctcttaagagagtggtgtttgattaacaaaaaaactgtggcccaagtggaacccttgaccttttctcagataatctgtgtatgtacacagctaacacagctctttagattccctgttaagtgactcattcacattcctttcttggatataaagtcattgctgtctttttatttttgaaatagtacaagacaaagatttttaacttaacatgaaaaattcactcttttattttggaaaaaaagttaacttttcatactaacaaacagaacaagatttaaggtaaatttcttaaacattatccagaaaaataacaagatttatagtatctacttctggtactaatatacacaaaaggccaaaaccatgcctattctgcaggtgtagcttcggtgctctcctgttcaggggcaggctcactgcccgcttcttttccttctttgcttcttttagattttttgtgtttgtgtctcctgtgactatctccttcttcactttcatggcgacgtctactattac

SEQ ID NO: 363856 - DNA, 2238 bp, Homo sapiens
accactgacatcaaggtttactgtgaaatgcagcagataaatattttacaataggaaatttaatgaaattcatacttttaagcaatcatttcagtaaaagaaattgttatagatgatgtgtatgtatgacgatagattcagaactggttagagttgaatttcagcattacattttaaaggtatttgccaaaccctaaagctcattttatttcaagtgaaaacatcatcatgaaaaaagtcacgtcacattgactaacaaggttggtaacaaatgtaatgatcaactttatcatttaacatttcacaagactttttattggtttctaaaaagcagttaatattttaaggtacggtatataaacaaaatagccatatctgatttttggcaacatgaaaatgccaatttcctttcaaaccaattcccggactacagctacaaatgtggtcaacaacgtcatcctggagtaaaattcagctcctgacacacacttctatggcaattataacatagttaacacttggcctgtacctatatgaacactgatccattgggggccactgaataaaaatttcttcaatctcatttgctattttagttgaggattctaatttacagaagagctgggcctttccttctcccattccttttataacttcctatccagtttcctgcagtttgtttttcctcctatttgaattgttcttataatctttaaacgtttctgtttccattcactttatgcgtgcatgcttctctatgacttatcaaacgtagcactgggtgtaaagtggtatttttccaaggtcaaaaaaagtatacgaattcatttattaggattaggcttaaactgctttcattgagattattcaaaggatttttgccctcattaaaattatatcaagtaaataaaaatatgacatccataagtgtgtttgttcaccaataaggatttaggtttatccaactttttgctaatacatattcaagcattgtcttaagttaaaaatatgattatcattcccagtagatgtgtaacagaacacaatagggctgtcagttttttaaggatattcaaaattatggaaaacaggttcaattacaaaaagccagctaacagcacaaaggtcaccaaggtatgatacaattttgagtgggacctatgcagtggtacttagccattaaaaatgccaacaaaaggaatggaggatgagtcacagtaagtattcccttaactgtgaaacttaaatatgcatgtacactgattacattctatttcaggtgcttgtataactgtaaagatattgtattacgaagaaacacagctggaagtctgggcttctgcattgtaggaggttatgaagaatacaatggaaacaaaccttttttcatcaaatccattgttgaaggaacaccagcatacaatgatggaagaattaggtaataataatgactaatcaaaaatacttgtattaaatgttgtttcataaatgccaaagcttggccccatttgagataaggcatgtatttattatactttgtggggattaaaagtatgtacgtagcattcaacttctgagaaatccaaaataattacacatattcttggtcccatactacaactccccatacttttagcattccttctaacacaagctgaatggatagtgagtttggagaatgtaaataagaggcaagaaatatctcaattagaagttaacataattaaaatggtcagatgtagcaaaatctagcaccactaagataaacttgcattaacttcagcaacgaattaaaatactaatcatatcttgttttgtttttttttttagatgtggtgatattcttcttgctgtcaatggtagaagtacatcaggaatgatacatgcttgcttggcaagactgctgaaagaacttaaaggaagaattactctaactattgtttcttggcctggcacttttttatagaatcaatgatgggtcagaggaaaacagaaaaatcacaaataggctaagaagttgaaacactatatttatcttgtcagtttttatatttaaagaaagaatacattgtaaaaatgtcaggaaaagtatgatcatctaatgaaagccagttacacctcagaaaatatgattccaaaaaaattaaaactactagttttttttcagtgtggaggatttctcattactctacaacattgtttatattttttctattcaataaaaagccctaaaacaac

SEQ ID NO: 363857 - DNA, 735 bp, Homo sapiens
caaggagctgctcggttcacccacaaggaatgagagctgcctgcctgctgctgcttggagagccccagacagtcgcttgaagaggtgtgtggatgtctcctagatcttgacttgctcctgaggaaatattgtgtgactgagtttcctgttatactgctctccaatccatcatgaaccagccagagtctgccaacgatcctgaacccctgtgtgcagtgtgtggccaagcccactccttggaggaaaaccacttctacagctatccagaggaagtggatgatgacctcatctgccacatctgcctgcaggctttgctggaccccctggacactccgtgtggacacacctactgcaccctctgcctcaccaacttcctggtggagaaggacttctgtcccatggaccgcaagcctctggttctgcagcactgcaagaagtccagcatcctggtcaacaaactcctcaacaagctactggtgacctgcccattcagggagcactgcacccaggtgttgcagcgctgtgacctcgagcatcactttcaaaccagccaggcatggcggcacgcacctgtagtcccagctacttgggaggctgaggcaggaggattgcttgagcccaggagttcaccactgcagtgaggtataattgtgacacagcactacagcctgggtgacagagcaagacccccatctctgaaaaaaataaaatacaataacattaagctaatactcg

SEQ ID NO: 363858 - DNA, 2438 bp, Homo sapiens
cagcttgcctgctctcagcctaagctctctcgccaaccgtggtggctccttgcgttcctacatcctctcatctgagaatcagagagcataatcttcttacgggcccgtgatttattaacgtggcttaatctgaaggttctcagtcaaattctttgtgatctactgattgtgggggcatggcaaggtttgcttaaaggagcttggctggtttgggcccttgtagctgacagaaggtggccagggagaaggcagcacactgctcggagaatgaaggcgcttctgttgctggtcttgccttggctcagtcctgctaactacattgacaatgtgggcaacctgcacttcctgtattcagaactctgtaaaggtgcctcccactacggcctgaccaaagataggaagaggcgctcacaagatggctgtccagacggctgtgcgagcctcacagccacggctccctccccagaggtttctgcagctgccaccatctccttaatgacagacgagcctggcctagacaaccctgcctacgtgtcctcggcagaggacgggcagccagcaatcagcccagtggactctggccggagcaaccgaactagggcacggccctttgagagatccactattagaagcagatcatttaaaaaaataaatcgagctttgagtgttcttcgaaggacaaagagcgggagtgcagttgccaaccatgccgaccagggcagggaaaattctgaaaacaccactgcccctgaagtctttccaaggttgtaccacctgattccagatggtgaaattaccagcatcaagatcaatcgagtagatcccagtgaaagcctctctattaggctggtgggaggtagcgaaaccccactggtccatatcattatccaacacatttatcgtgatggggtgatcgccagagacggccggctactgccaggagacatcattctaaaggtcaacgggatggacatcagcaatgtccctcacaactacgctgtgcgtctcctgcggcagccctgccaggtgctgtggctgactgtgatgcgtgaacagaagttccgcagcaggaacaatggacaggccccggatgcctacagaccccgagatgacagctttcatgtgattctcaacaaaagtagccccgaggagcagcttggaataaaactggtgcgcaaggtggatgagcctggggttttcatcttcaatgtgctggatggcggtgtggcatatcgacatggtcagcttgaggagaatgaccgtgtgttagccatcaatggacatgatcttcgatatggcagcccagaaagtgcggctcatctgattcaggccagtgaaagacgtgttcacctcgtcgtgtcccgccaggttcggcagcggagccctgacatctttcaggaagccggctggaacagcaatggcagctggtccccagggccaggggagaggagcaacactcccaagcccctccatcctacaattacttgtcatgagaaggtggtaaatatccaaaaagaccccggtgaatctctcggcatgaccgtcgcagggggagcatcacatagagaatgggatttgcctatctatgtcatcagtgttgagcccggaggagtcataagcagagatggaagaataaaaacaggtgacattttgttgaatgtggatggggtcgaactgacagaggtcagccggagtgaggcagtggcattattgaaaagaacatcatcctcgatagtactcaaagctttggaagtcaaagagtatgagccccaggaagactgcagcagcccagcagccctggactccaaccacaacatggccccacccagtgactggtccccatcctgggtcatgtggctggaattaccacggtgcttgtataactgtaaagatattgtattacgaagaaacacagctggaagtctgggcttctgcattgtaggaggttatgaagaatacaatggaaacaaaccttttttcatcaaatccattgttgaaggaacaccagcatacaatgatggaagaattagatgtggtgatattcttcttgctgtcaatggtagaagtacatcaggaatgatacatgcttgcttggcaagactgctgaaagaacttaaaggaagaattactctaactattgtttcttggcctggcacttttttatagaatcaatgatgggtcagaggaaaacagaaaaatcacaaataggctaagaagttgaaacactatatttatcttgtcagtttttatatttaaagaaagaatacattgtaaaaatgtcaggaaaagtatgatcatctaatgaaagccagttacacctcagaaaatatgattccaaaaaaattaaaactactagttttttttcagtgtggaggatttctcattactctacaacattgtttatattttttctattcaataaaaagccctaaaacaac

SEQ ID NO: 363859 - DNA, 3403 bp, Homo sapiens
  misc_feature (449)..(449): n is a, c, g, or t
  misc_feature (718)..(718): n is a, c, g, or t
  misc_feature (862)..(862): n is a, c, g, or t
  misc_feature (1313)..(1313): n is a, c, g, or t
  misc_feature (1367)..(1367): n is a, c, g, or t
  misc_feature (1996)..(1996): n is a, c, g, or t
  misc_feature (2202)..(2202): n is a, c, g, or t
  misc_feature (2529)..(2529): n is a, c, g, or t
  misc_feature (2706)..(2706): n is a, c, g, or t
  misc_feature (2849)..(2849): n is a, c, g, or t
  misc_feature (2976)..(2976): n is a, c, g, or t
ggatccagtcccagcatctcagcacggccttcaagcatttccacgtcctggcctggctccatggtctccccgccaatttgccaccttctccatgcatccttttctgatcccctcctcactcatcccagcaaagaaccccctcctggcctgagcatagcatttcgtggtgtgtatctcagagcatccagttaggggtgtgcaagtttactttgttactggctgatgttgtgaagtcccaagttgttggtgccgcaaacaaaaaattggacatgacacacacaaatagcaaagcagcaaaagtttattaagcacagtacgatccactatggatcaaggatgacctgcgaatggtatcagcatcactttgctatatttcatggccttttctatgtgttttttttctctttttcctcaagctgcctaagctttagccagcatgtgccttttgnttgacaggtgggttgcttagtttcttggcctctgtgtgtttacgtgtcatttccttcccatagttttaagtacatgcatgatatgcactctgtaggcatgaaccttaagtagctaattactatacggggtcattttgaggatatcttttctctgtagtacatgtgcatctttttttgcagtggtgcaatcttggctcactgcaacctcctcctccctggttcaagtgattctcctgcctcagcttcctaagcacctgagactacaggtncatgccaccacgcccggctaatttttgtatttttagtagagatggggtttcaccatgttggccaggctgatctcgaactcctgaccgcaagtgatccacccacctcggcctcccaaagcactgggattacaggcatgagccacngcacccagcctagtatatgcccatctcttaggagctgctcctaactggtttggtttggatctagccagccatggggctccttattcacttatttatcttctgtttttgctcacctgcctctttctcttgcttctgctcctactcattccttccttaatccaacctccaattccctctgctattctcctgcctcaagttcactaggctggctgcaagggtcctgagggagaggttgtgtatcgcccctgtatactccaggtccagtaaatgtttgctgactaatgattggcatttccctcaggccctgccatttctgtgggctcaggtccctactggctcaggcccctgcctccctcggcaaggccacaatgaaccggggagtcccttttaggcacttgcttctggtgctgcaactgggtaagttctcagacctggggtctcaatcagatgncgtgggaggaaaggcaaaggtggaggatggggtagagggggacagcggcgacantgagacctgactcctttcttttccacttagcgctcctcccagcagccactcagggaaagaaagtggtgctgggcaaaaaaggggatacagtggaactgacctgtacagcttcccagaagaagagcatacaattccactggaaaaactccaaccagataaagattctgggaaatcagggctccttcttaactaaaggtagggttgcctggctccccatccagggaggaaaacacactatggagtgaaagcctttggtgtctgagatctggtcttagttaaactctgggatcccagagggcttgggttgacagaaactcagtggcattcttatccagagtttctctacaccaactgctggtggcccagggaaaggtggtatgtgaatttcaatattttaatatttaatattcatgaacttattttagtgagttttagaacaatcactatcacttaaaacccgtgatttcttgagtattgttgctacagacctatgtagataatactttgcacagtgactcatatgtataatcctagcactgtgggaggctgaggccggaggattgcttgagtccaggagttcaagaccagcctgaacaacatagtgagactctgtctctatgaaaaaaaanatatatatattttttttggagacaaggtctagttctatcacccaggctccagtgcagtggtgtgatctcggctcactgcaatctccacctcccaggctcaagtcatcatcccacctcagcctcccaagtagctgggactacaggcatgcaccaccatgccaggtaattttttgtacttttagtagagacagagtttcacggtgttngccaggctggtcttgatctcctgacctcgtgatttaccctccttggcctcccaaagtgctgggattacaggcgtgagtcactgtgcccggcccagaatcatttttttctacttttttttttttgaggcaaactctcgatctgttgcccaggctggagtgcagtgggcatgatcttggctcactgcaagctctgcctcccaggttcaagcaattctcctgcctcagcctcctgagtagctgggactacaggcgtgtgccaccatgcccggctaatttgcgtatttttagtagagaccggttttcatcatattggccaggctggtcttnaactcctgacctcaagtgattctcccaccttagcctcccaaagtgctgggattacaggcatgagctactgcacttggccttttctcctggttttaaaactattatatgctcattacaaaatatttggtcaatgaagaaaagaatatggaagaaaatcaaatgcatgcatacttctancactcagagatatcctctgctaacattttgattgattttcttccaatctttttttttttttttctttttgagacagggtctcactctgctgcccaggctggagtacagtggcatgaccacaacacatcacagcctcaagtgancttcccacttcagccttcccagtagctgggactacaggtgcacgccaccatgttcacctaattttttactttttgtagagatgagacttcaccatgttgctcaggctggtcttgaattcctaggctnaagtgatcttcccgctttggcctcccaaagtgctgggattataggtatgagccactgcatgtggcctattttcttccactgttgttcggcgtggagaatattatatacataattacgtaaatgatatcatactgtatataccttttttcctactccttccttaagttatatcataatgagactaccaattattagactttttttcttttttttgagacggagtctcggtctgtcacctaggctggagtgcaatggcgcgatctcagctcgctgcaacctctgcctcccaggttcaagcaattctgcctcagcctcccgagtagctgggactacagacacgtgccaccatgcccagctaacttttttatttttttattagagacagggttccaccatgctagcaggatggtctcaatctctcgacttc

SEQ ID NO: 363860 - DNA, 3074 bp, Homo sapiens
gatcgggcttcctgtctctcttcatttaagcacgactctgcagaaggaacaaagcaccctccccactgggctcctggttgcagagctccaagtcctcacacagatacgcctgtttgagaagcagcgggcaagaaagacgcaagcccagaggccctgccatttctgtgggctcaggtccctactggctcaggcccctgcctccctcggcaaggccacaatgaaccggggagtcccttttaggcacttgcttctggtgctgcaactggcgctcctcccagcagccactcagggaaagaaagtggtgctgggcaaaaaaggggatacagtggaactgacctgtacagcttcccagaagaagagcatacaattccactggaaaaactccaaccagataaagattctgggaaatcagggctccttcttaactaaaggtccatccaagctgaatgatcgcgctgactcaagaagaagcctttgggaccaaggaaactttcccctgatcatcaagaatcttaagatagaagactcagatacttacatctgtgaagtggaggaccagaaggaggaggtgcaattgctagtgttcggattgactgccaactctgacacccacctgcttcaggggcagagcctgaccctgaccttggagagcccccctggtagtagcccctcagtgcaatgtaggagtccaaggggtaaaaacatacagggggggaagaccctctccgtgtctcagctggagctccaggatagtggcacctggacatgcactgtcttgcagaaccagaagaaggtggagttcaaaatagacatcgtggtgctagctttccagaaggcctccagcatagtctataagaaagagggggaacaggtggagttctccttcccactcgcctttacagttgaaaagctgacgggcagtggcgagctgtggtggcaggcggagagggcttcctcctccaagtcttggatcacctttgacctgaagaacaaggaagtgtctgtaaaacgggttacccaggaccctaagctccagatgggcaagaagctcccgctccacctcaccctgccccaggccttgcctcagtatgctggctctggaaacctcaccctggcccttgaagcgaaaacaggaaagttgcatcaggaagtgaacctggtggtgatgagagccactcagctccagaaaaatttgacctgtgaggtgtggggacccacctcccctaagctgatgctgagtttgaaactggagaacaaggaggcaaaggtctcgaagcgggagaaggcggtgtgggtgctgaaccctgaggcggggatgtggcagtgtctgctgagtgactcgggacaggtcctgctggaatccaacatcaaggttctgcccacatggtccaccccggtgcagccaatggccctgattgtgctggggggcgtcgccggcctcctgcttttcattgggctaggcatcttcttctgtgtcaggtgccggcaccgaaggcgccaagcagagcggatgtctcagatcaagagactcctcagtgagaagaagacctgccagtgccctcaccggtttcagaagacatgtagccccatttgaggcacgaggccaggcagatcccacttgcagcctccccaggtgtctgccccgcgtttcctgcctgcggaccagatgaatgtagcagatcccaggcctctggcctcctgttcgcctcctctacaatttgccattgtttctcctgggttaggccccggcttcactggttgagtgttgctctctagtttccagaggcttaatcacaccgtcctccacgccatttccttttccttcaagcctagcccttctctcattatttctctctgaccctctccccactgctcatttggatcccaggggagtgttcagggccagccctggctggcatggagggtgaggctgggtgtctggaagcatggagcatgggactgttcttttacaagacaggaccctgggaccacagagggcaggaacttgcacaaaatcacacagccaagccagtcaaggatggatgcagatccagaggtttctggcagccagtacctcctgccccatgctgcccgcttctcaccctatgtgggtgggaccacagactcacatcctgaccttgcacaaacagcccctctggacacagccccatgtacacggcctcaagggatgtctcacatcctctgtctatttgagacttagaaaaatcctacaaggctggcagtgacagaactaagatgatcatctccagtttatagaccagaaccagagctcagagaggctagatgattgattaccaagtgccggactagcaagtgctggagtcgggactaacccaggtcccttgtcccaagttccactgctgcctcttgaatgcagggacaaatgccacacggctctcaccagtggctagtggtgggtactcaatgtgtacttttgggttcacagaagcacagcacccatgggaagggtccatctcagagaatttacgagcagggatgaaggcctccctgtctaaaatccctccttcatcccccgctggtggcagaatctgttaccagaggacaaagcctttggctcttctaatcagagcgcaagctgggagcacaggcactgcaggagagaatgcccagtgaccagtcactgaccctgtgcagaacctcctggaagcgagctttgctgggagagggggtagctagcctgagagggaaccctctaagggacctcaaaggtgattgtgccaggctctgcgcctgccccacaccctcccttaccctcctccagaccattcaggacacagggaaatcagggttacaaatcttcttgatccacttctctcaggatcccctctcttcctacccttcctcaccacttccctcagtcccaactccttttccctatttccttctcctcctgtctttaaagcctgcctcttccaggaagacccccctattgctgctggggctccccatttgcttactttgcatttgtgcccactctccacccctgctcccctgagctgaaataaaaatacaataaacttactataaagatg

SEQ ID NO: 363861 - DNA, 1658 bp, Homo sapiens
ggccctcaaacccctgagtcctctaccaggagatcctgtatatgggaactgattttggcccagctccctctgcccactccgccaagcagagcggatgtctcagatcaagagactcctcagtgagaagaagacctgccagtgccctcaccggtttcagaagacatgtagccccatttgaggcacgaggccaggcagatcccacttgcagcctccccaggtgtctgccccgcgtttcctgcctgcggaccagatgaatgtagcagatcccaggcctctggcctcctgttcgcctcctctacaatttgccattgtttctcctgggttaggccccggcttcactggttgagtgttgctctctagtttccagaggcttaatcacaccgtcctccacgccatttccttttccttcaagcctagcccttctctcattatttctctctgaccctctccccactgctcatttggatcccaggggagtgttcagggccagccctggctggcatggagggtgaggctgggtgtctggaagcatggagcatgggactgttcttttacaagacaggaccctgggaccacagagggcaggaacttgcacaaaatcacacagccaagccagtcaaggatggatgcagatccagaggtttctggcagccagtacctcctgccccatgctgcccgcttctcaccctatgtgggtgggaccacagactcacatcctgaccttgcacaaacagcccctctggacacagccccatgtacacggcctcaagggatgtctcacatcctctgtctatttgagacttagaaaaatcctacaaggctggcagtgacagaactaagatgatcatctccagtttatagaccagaaccagagctcagagaggctagatgattgattaccaagtgccggactagcaagtgctggagtcgggactaacccaggtcccttgtcccaagttccactgctgcctcttgaatgcagggacaaatgccacacggctctcaccagtggctagtggtgggtactcaatgtgtacttttgggttcacagaagcacagcacccatgggaagggtccatctcagagaatttacgagcagggatgaaggcctccctgtctaaaatccctccttcatcccccgctggtggcagaatctgttaccagaggacaaagcctttggctcttctaatcagagcgcaagctgggagcacaggcactgcaggagagaatgcccagtgaccagtcactgaccctgtgcagaacctcctggaagcgagctttgctgggagagggggtagctagcctgagagggaaccctctaagggacctcaaaggtgattgtgccaggctctgcgcctgccccacaccctcccttaccctcctccagaccattcaggacacagggaaatcagggttacaaatcttcttgatccacttctctcaggatcccctctcttcctacccttcctcaccacttccctcagtcccaactccttttccctatttccttctcctcctgtctttaaagcctgcctcttccaggaagacccccctattgctgctggggctccccatttgcttactttgcatttgtgcccactctccacccctgctcccctgagctgaaataaaaatacaataaacttactataaagatg

SEQ ID NO: 363862 - DNA, 2013 bp, Homo sapiens
gatcgggcttcctgtctctcttcatttaagcacgactctgcagaaggaacaaagcaccctccccactgggctcctggttgcagagctccaagtcctcacacagatacgcctgtttgagaagcagcgggcaagaaagacgcaagcccagaggccctgccatttctgtgggctcaggtccctactggctcaggcccctgcctccctcggcaaggccacaatgaaccggggagtcccttttaggcacttgcttctggtgctgcaactggcgctcctcccagcagccactcagggaaagaaagtggtgctgggcaaaaaaggggatacagtggaactgacctgtacagcttcccagaagaagagcatacaattccactggaaaaactccaaccagataaagattctgggaaatcagggctccttcttaactaaaggtccatccaagctgaatgatcgcgctgactcaagaagaagcctttgggaccaaggaaactttcccctgatcatcaagaatcttaagatagaagactcagatacttacatctgtgaagtggaggaccagaaggaggaggtgcaattgctagtgttcggatctgcctgcggaccagatgaatgtagcagatcccaggcctctggcctcctgttcgcctcctctacaatttgccattgtttctcctgggttaggccccggcttcactggttgagtgttgctctctagtttccagaggcttaatcacaccgtcctccacgccatttccttttccttcaagcctagcccttctctcattatttctctctgaccctctccccactgctcatttggatcccaggggagtgttcagggccagccctggctggcatggagggtgaggctgggtgtctggaagcatggagcatgggactgttcttttacaagacaggaccctgggaccacagagggcaggaacttgcacaaaatcacacagccaagccagtcaaggatggatgcagatccagaggtttctggcagccagtacctcctgccccatgctgcccgcttctcaccctatgtgggtgggaccacagactcacatcctgaccttgcacaaacagcccctctggacacagccccatgtacacggcctcaagggatgtctcacatcctctgtctatttgagacttagaaaaatcctacaaggctggcagtgacagaactaagatgatcatctccagtttatagaccagaaccagagctcagagaggctagatgattgattaccaagtgccggactagcaagtgctggagtcgggactaacccaggtcccttgtcccaagttccactgctgcctcttgaatgcagggacaaatgccacacggctctcaccagtggctagtggtgggtactcaatgtgtacttttgggttcacagaagcacagcacccatgggaagggtccatctcagagaatttacgagcagggatgaaggcctccctgtctaaaatccctccttcatcccccgctggtggcagaatctgttaccagaggacaaagcctttggctcttctaatcagagcgcaagctgggagcacaggcactgcaggagagaatgcccagtgaccagtcactgaccctgtgcagaacctcctggaagcgagctttgctgggagagggggtagctagcctgagagggaaccctctaagggacctcaaaggtgattgtgccaggctctgcgcctgccccacaccctcccttaccctcctccagaccattcaggacacagggaaatcagggttacaaatcttcttgatccacttctctcaggatcccctctcttcctacccttcctcaccacttccctcagtcccaactccttttccctatttccttctcctcctgtctttaaagcctgcctcttccaggaagacccccctattgctgctggggctccccatttgcttactttgcatttgtgcccactctccacccctgctcccctgagctgaaataaaaatacaataaacttactataaagatg

SEQ ID NO: 363863 - DNA, 2094 bp, Homo sapiens
gatcgggcttcctgtctctcttcatttaagcacgactctgcagaaggaacaaagcaccctccccactgggctcctggttgcagagctccaagtcctcacacagatacgcctgtttgagaagcagcgggcaagaaagacgcaagcccagaggccctgccatttctgtgggctcaggtccctactggctcaggcccctgcctccctcggcaaggccacaatgaaccggggagtcccttttaggcacttgcttctggtgctgcaactggcgctcctcccagcagccactcagggaaagaaagtggtgctgggcaaaaaaggggatacagtggaactgacctgtacagcttcccagaagaagagcatacaattccactggaaaaactccaaccagataaagattctgggaaatcagggctccttcttaactaaaggtccatccaagctgaatgatcgcgctgactcaagaagaagcctttgggaccaaggaaactttcccctgatcatcaagaatcttaagatagaagactcagatacttacatctgtgaagtggaggaccagaaggaggaggtgcaattgctagtgttcggattgactgccaactctgacacccacctgcttcaggggcagagcctgaccctgaccttggagagcccccctggtagtagcccctcagtgcaatgtaggagtccaaggggtaaaaacatacagggggggaagaccctctccgtgtctcagctggagctccaggatagtggcacctggacatgcactgtcttgcagaaccagaagaaggtggagttcaaaatagacatcgtggtgctagctttccagaaggcctccagcatagtctataagaaagagggggaacaggtggagttctccttcccactcgcctttacagttgaaaagctgacgggcagtggcgagctgtggtggcaggcggagagggcttcctcctccaagtcttggatcacctttgacctgaagaacaaggaagtgtctgtaaaacgggttacccaggaccctaagctccagatgggcaagaagctcccgctccacctcaccctgccccaggccttgcctcagtatgctggctctggaaacctcaccctggcccttgaagcgaaaacaggaaagttgcatcaggaagtgaacctggtggtgatgagagccactcagctccagaaaaatttgacctgtgaggtgtggggacccacctcccctaagctgatgctgagtttgaaactggagaacaaggaggcaaaggtctcgaagcgggagaaggcggtgtgggtgctgaaccctgaggcggggatgtggcagtgtctgctgagtgactcgggacaggtcctgctggaatccaacatcaaggttctgcccacatggtccaccccggtgcagccaatggccctgattgtgctggggggcgtcgccggcctcctgcttttcattgggctaggcatcttcttctgtgtcaggtgccggcaccgaaggcgccaagcagagcggatgtctcagatcaagagactcctcagtgagaagaagacctgccagtgccctcaccggtttcagaagacatgtagccccatttgaggcacgaggccaggcagatcccacttgcagcctccccaggtgtctgccccgcgtttcctgcctgcggaccagatgaatgtagcagatcccaggcctctggcctcctgttcgcctcctctacaatttgccattgtttctcctgggttaggccccggcttcactggttgagtgttgctctctagtttccagaggcttaatcacaccgtcctccacgccatttccttttccttcaagcctagcccttctctcattatttctctctgaccctctccccactgctcatttggatcccaggggagtgttcagggccagccctggctggcatggagggtgaggctgggtgtctggaagcatggagcatgggactgttcttttacaagacaggaagacccccctattgctgctggggctccccatttgcttactttgcatttgtgcccactctccacccctgctcccctgagctgaaataaaaatacaataaacttactataaagatg

SEQ ID NO: 363864 - DNA, 569 bp, Homo sapiens
  misc_feature (38)..(38): n is a, c, g, or t
  misc_feature (46)..(46): n is a, c, g, or t
  misc_feature (54)..(54): n is a, c, g, or t
  misc_feature (62)..(62): n is a, c, g, or t
  misc_feature (65)..(65): n is a, c, g, or t
  misc_feature (72)..(72): n is a, c, g, or t
  misc_feature (221)..(221): n is a, c, g, or t
caggcgtaggtagagatataactgggggagggggaggngccgaggnagaaggangagggggnggngagtacngaggtagtgcggtgggactacgtgcgtcctaggtgctgcgtgtggtcatacgggctaagtaggacataggtcgggaggaggtagctcgggaccagcgtcgacctcgcatcgctctaggagcgtgcgtactaaggagatggagctagctnacaggggactggagggggcgtgagggtactgtgcatattaatggcggggccgtgcaccctcccttaccctcctccagaccattcaggacacagggaaatcagggttacaaatcttcttgatccacttctctcaggatcccctctcttcctacccttcctcaccacttccctcagtcccaactccttttccctatttccttctcctcctgtctttaaagcctgcctcttccaggaagacccccctattgctgctggggctccccatttgcttactttgcatttgtgcccactctccacccctgctcccctgagctgaaataaaaatacaataaacttactataaagatg

SEQ ID NO: 363865 - DNA, 3685 bp, Homo sapiens
  misc_feature (3114)..(3115): n is a, c, g, or t
  misc_feature (3119)..(3119): n is a, c, g, or t
  misc_feature (3130)..(3130): n is a, c, g, or t
  misc_feature (3133)..(3134): n is a, c, g, or t
gatcgggcttcctgtctctcttcatttaagcacgactctgcagaaggaacaaagcaccctccccactgggctcctggttgcagagctccaagtcctcacacagatacgcctgtttgagaagcagcgggcaagaaagacgcaagcccagaggccctgccatttctgtgggctcaggtccctactggctcaggcccctgcctccctcggcaaggccacaatgaaccggggagtcccttttaggcacttgcttctggtgctgcaactggcgctcctcccagcagccactcagggaaagaaagtggtgctgggcaaaaaaggggatacagtggaactgacctgtacagcttcccagaagaagagcatacaattccactggaaaaactccaaccagataaagattctgggaaatcagggctccttcttaactaaaggtccatccaagctgaatgatcgcgctgactcaagaagaagcctttgggaccaaggaaactttcccctgatcatcaagaatcttaagatagaagactcagatacttacatctgtgaagtggaggaccagaaggaggaggtgcaattgctagtgttcggattgactgccaactctgacacccacctgcttcaggggcagagcctgaccctgaccttggagagcccccctggtagtagcccctcagtgcaatgtaggagtccaaggggtaaaaacatacagggggggaagaccctctccgtgtctcagctggagctccaggatagtggcacctggacatgcactgtcttgcagaaccagaagaaggtggagttcaaaatagacatcgtggtgctagctttccagaaggcctccagcatagtctataagaaagagggggaacaggtggagttctccttcccactcgcctttacagttgaaaagctgacgggcagtggcgagctgtggtggcaggcggagagggcttcctcctccaagtcttggatcacctttgacctgaagaacaaggaagtgtctgtaaaacgggttacccaggaccctaagctccagatgggcaagaagctcccgctccacctcaccctgccccaggccttgcctcagtatgctggctctggaaacctcaccctggcccttgaagcgaaaacaggaaagttgcatcaggaagtgaacctggtggtgatgagagccactcagctccagaaaaatttgacctgtgaggtgtggggacccacctcccctaagctgatgctgagtttgaaactggagaacaaggaggcaaaggtctcgaagcgggagaaggcggtgtgggtgctgaaccctgaggcggggatgtggcagtgtctgctgagtgactcgggacaggtcctgctggaatccaacatcaaggttctgcccacatggtccaccccggtgcagccaatggccctgattgtgctggggggcgtcgccggcctcctgcttttcattgggctaggcatcttcttctgtgtcaggtgccggcaccgaaggcgccaagcagagcggatgtctcagatcaagagactcctcagtgagaagaagacctgccagtgccctcaccggtttcagaagacatgtagccccatttgaggcacgaggccaggcagatcccacttgcagcctccccaggtgtctgccccgcgtttcctgcctgcggaccagatgaatgtagcagatcccaggcctctggcctcctgttcgcctcctctacaatttgccattgtttctcctgggttaggccccggcttcactggttgagtgttgctctctagtttccagaggcttaatcacaccgtcctccacgccatttccttttccttcaagcctagcccttctctcattatttctctctgaccctctccccactgctcatttggatcccaggggagtgttcagggccagccctggctggcatggagggtgaggctgggtgtctggaagcatggagcatgggactgttcttttacaagacaggaccctgggaccacagagggcaggaacttgcacaaaatcacacagccaagccagtcaaggatggatgcagatccagaggtttctggcagccagtacctcctgccccatgctgcccgcttctcaccctatgtgggtgggaccacagactcacatcctgaccttgcacaaacagcccctctggacacagccccatgtacacggcctcaagggatgtctcacatcctctgtctatttgagacttagaaaaatcctacaaggctggcagtgacagaactaagatgatcatctccagtttatagaccagaaccagagctcagagaggctagatgattgattaccaagtgccggactagcaagtgctggagtcgggactaacccaggtcccttgtcccaagttccactgctgcctcttgaatgcagggacaaatgccacacggctctcaccagtggctagtggtgggtactcaatgtgtacttttgggttcacagaagcacagcacccatgggaagggtccatctcagagaatttacgagcagggatgaaggcctccctgtctaaaatccctccttcatcccccgctggtggcagaatctgttaccagaggacaaagcctttggctcttctaatcagagcgcaagctgggagcacaggcactgcaggagagaatgcccagtgaccagtcactgaccctgtgcagaacctcctggaagcgagctttgctgggagagggggtagctagcctgagagggaaccctctaagggacctcaaaggtgattgtgccaggctctgcgcctgccccacaccctcccttaccctcctccagaccattcaggacacagggaaatcagggttacaaatcttcttgatccacttctctcaggatcccctctcttcctacccttcctcaccacttccctcagtcccaactccttttccctatttccttctcctcctgtctttaaagcctgcctcttccaggaagacccccctattgctgctggggctccccatttgcttactttgcatttgtgcccactctccacccctgctcccctgagctgaaataaaaatacaataaacttactataaagatgaaaaaaaaaagaaaaagaaaaaaaaaaaaaaaaaaaaaannaaanaagaaaaaaanaannaaaaaaaggggggggggggactaacaggagaaatgcccgccgggggagggcccagagtagtaaacggacagccacaggagcatgatggggtgacaagaagggggggcccacataatagggggccgacgcaaatataaaacgagagaggaagcagaggaggcgacgaagtaaaaaaaacaggcgacgaagaggggacaaacacagggccacccaggagagagacacccctggagagaaagaggaccacccccaaacaacagcgaggggaggagaacaacaacacaatggtaggcaccacaaaacacccccagccgaggaaacaagtcaaagaacacccccctcgaagcgggggcacaacactcaagcaaactacagcagccgcggcggaaaccaaccggggtgcgctaacccaccccacgacacgaaacataacaaacaggcagaacggagagtaagaaaaagaaggtagacgcgcaacaagcagcaacaacacgagcaccagcaaaacaaatctaattcacacccacgggcgggagcaaagagaagaaaca

SEQ ID NO: 363866 - DNA, 233 bp, Homo sapiens
ccaggaaaggccctgctggaaagccactggagctgtgctgcgctggaaaggccattggaggtgctagaacgcaaaggggttgcagtggggacagacctgctccccttcttctttgttcctgcagccggtttcagaagacatgtagccccatttgaggcacgaggccaggcagatcccacttgcagcctccccaggtgtctgccccgcgtttcctgcctgcggaccagatgaat

SEQ ID NO: 363867 - DNA, 1677 bp, Homo sapiens
cctgtttcatgcctcaagaggtgaggaaagagggaaagacctctcttcttgaatctgaaaaatagtctgtttttgtttttttagatggggactcgctttgttacccagtggtataatcttggctcattgcaacctccgcttcctgggctcaagctaacctcccacctcctctctgcctcacactgcagtatccactctgtcgccagcagcgaggcattatagcaggaggcttctgaattggccagaacagcagctctcaggtggggtgtctgagaacctcatttcctcattacatccctccctggtcagccatatgtgttcagcagccaaatggcaaaattcacccccagaactgtgattgtcttccctaatctggaaggcccacaagtgtggagaagcactggagaccctccagaagcagtagtgctagcagtcaggggctactctccctgccgggccccgtgcaagggcctggccaccctatcccaggtatgtgacacttggctggctgttctttattgtcctgctagtacctgttgtaaagcttcttttattaaagaagagcaggagattgaagtgtcataaattgaagagattcacaccaacacggcacatgtatacatatgtaacaaacctgcacgttgtgcacatgtaccctagaacttaaagtataataacaaaatatgtattaaaaaaataaataaataaaaaaaaaaaaaaagtacttttagcagaacatttacggtattttgtacatatgtgtgcaaagttgcttattaacatttatgtcatggtcataaagactaatttggtaacaatattcagtctccagtaaatatgtggttaattgatatgcaaattacttccaaagtacaaattaatagtctcatattacatttttgtgctttgctacctttacctcaaacaaaataatctgtaggattcttcatgcttgtttcagcaccttttgcccagctttgcttgcttcattggccagaggactgtcagcacctcatgaagccctttatatcgttctctgaggtcatttgcataatgttgtggcctatagtaggttctcaataaatacctgatggatgaatgaatgaataaggatgaggaaatgaacacggtaggtatgcctggatctggaagcagaagtggcccaaaaatggaaggaaaagaaacttggcaggaatagcaggaagaagaaagcggggaggacagtattgtgtgagtttgctagggctgtgtaacaaagtgatacaaacctgatgtctcccgcaacagacatttattgtctcacagtcttggaggccggagtgcaaaatcaagttgtgagtggagctggttccttctgtgggctgtgaggaagaatctgtcgcaggcctctctcccagcctctgctggctcgctggcagtctctggtgtcccctggcttggagtgcatcattctgatctgtcttcatcttcacgtggcgtgccctctgtgggtgtgtctgtgtccaattttccatttttgataaggataccaatcatgttggattagggcccaccctaatgacctaattttaacttaattgtctctataaataccctatctccaaataagatcactgtctgagggttaggggctaactggggaatagaactctaacataaacgttttttaggatggga

SEQ ID NO: 363868 - DNA, 1948 bp, Homo sapiens
gaaggataaatgttctttgaagtgagaaagaacttcagtctgtccggttgtcaatttggagcaagtaagttttggccttattgtttgtttcttccagagagctctctctgaggatgtgtgacattggagttattcattcattggtcaccaaatgcttgggaggtcagatggtggctcccagattgaattcagaaatagacctaagtcaacactttagcagcaagttggttcaaggggaagcaagccgctattggtcacttgactccttgccatcccttgtggcttgaatgcaggctggaaaggtgaggtgtgtccggagccagaactctggaggctctcagtcttcttcctgaattttagggttccccacagagaccatttccaagctatacgggaagaaagaggaaaccccagggttctttggcaacaagcttgctttttttctggttcttggtatgctccaccagcagcagcatcacctgggagcttgttagaaactgaattctcagctgggcaacatagtgggatcccgtctctacaaaaaagtttaaaaattagccaggcatggtggcacgcgactgtggtcccagctacttgggaggctgaggcagaaggatcgcttgagcccaggagatagaggctgcagtgagcagtgatcatgcactccagcttgagtgacagagtaagactgtctcaaaagcaaacaaacaaaaagaaatctaaattctcaggccccactccaaacctactgaatctctgggatccagctatctgtgtctgaacaagccttgcaggtgactctggtggacatgaaggattgagagccactgatccaatcattttgaattaaactgaggcccaggagcattaaggaatgacatcttggttacatttcaccaagtcttcgtgctgtgatttttctctccttgctagagctttatatttttaccttacttctaaggccacgagatcatttcttgccctcattattagtttttcctaaaattaatgattggacttaaccttccagagataatacttttcatatcacagctctttttatggcatcttgttttctgctttggtctgacctatgttcttcatcttctacctccgatttcatccttaaagctttcccatgaatttcttaaaggggagaggggaagggccctaatatattttattcttcagttcagaagtggttcaggaaattatattttaagtgcaaggtgcccctagcatctttgccacagttgaatgttttcttaagtctgtcactaaaaggtgggcttctgtgcccaattcttggcacttctgtggttcattagaaaaacactaagtttgcaggccaggcttggtggctcatgcatgtaatcccagcactttgggaggccgaggcgggcggatcacaaggtcaggagtttgagaccagcctgaccaacctggtgaaacctcgtctatactaaaaacacaaaaattagctgggcgtgttggcacgtgcctatagtcccagctactcaggaggctgaggcaggagaattgcttgaacccaggagatggaggttgcagtgagccgagatcacgccactgcactccagtctgggtgacagagcgagactccatctctaaaaaaaaaagaaaagaaaagtaaaaagaaaacatttttgtagagacaggatcttgctgtgttgttcaagctggtttcgaactcctaacctcaggcaatcatcctactttggccccccaaagtgctggaattataggtgggagccactgtgcccagcagatttcagcttctccaatctctcccttgacttcctggcaggagagctagataaactcaggtagacatgtctttcatggctacccaaagactctgtacagctagccctcaggagcctgtttaagtcaagatgtccttgcagtcccacactgatactactgagcc

SEQ ID NO: 363869 - DNA, 2123 bp, Homo sapiens
cagctcccggctacggcccctcccagcgcaggcccatccccgttatggagcatgcgcagtcctcctgccgtcccgcccctccctttccagagcccccagttccttagaaaccaggcggcgcgttcccggtggcggcgccctggactcccgggcccgcgcatccccgccagccttccttaaggcggatgggtggcccccgagaccccgtcggacccatggtttccagtgcagcgcggagtgggcgatgccagcgtgccaggagccatgtctgaccaggacgtttggaagatcatatccatgccagaggctcttgtgaggagatgagttggtaaagagagaggctgggatgaagatgctgccaggagtgggcgtgtttgggactggcagctccgcccgagttctggtcccactgctgagggcagaagggttcactgttgaggccctgtgggggaagactgaggaggaggcgaagcagcttgctgaggagatgaacatcgccttctacaccagccggactgatgacatcttgctgcatcaagatgtggatctggtgtgcatcagcatcccccctccactcacccggcagatatccgtgaaggctctaggtattgggaagaatgtggtttgcgagaaggcagcaacatcggtggatgccttccggatggtgacagcctcgcgctactacccgcagctcatgagcctggtagggaacgtgctgcgcttcctgcctgccttcgtgcgcatgaaacagctgatttcggaacactatgtgggagcggtgatgatctgtgatgcccgcatctactcaggcagcctgctgagccccagctatggctggatctgtgatgagctcatgggcggcgggggcttgcacaccatggggacctacattgtggacctgctgacccacctgaccggccggagagccgagaaggtgcacgggctgctcaagacattcgtgaggcagaacgctgccatccgtggcatccggcacgtcactagcgatgacttctgtttcttccagatgctcatgggtgggggtgtgtgtagcacagtgacactcaacttcaacatgccaggcgcctttgtgcatgaagtcatggtggtaggctctgcaggacgcctcgtcgcccggggagccgacctctatgggcagaagaactctgccacgcaagaggagctgctcttgagggactcgctggcagtgggcgcaggactgcctgagcaggggccccaggatgtcccgctgctgtacctgaagggcatggtctacatggtgcaggccttgcgccagtccttccaggggcagggcgaccgccgcacctgggaccgcacccctgtctccatggccgcctccttcgaggatgggctgtacatgcagagcgtggtggatgccatcaagaggtcgagccgatccggggagtgggaggctgtggaggtgctgacggaggagcccgacaccaaccagaacctgtgtgaggcacttcagcggaacaacctatgagcctgcacctgggctccttgccacagggcagagggaccagggaggggaacaggagccagacatgacagggacttggccctagcagagacagtgtctttcatttaatgagtctgggtgaagccagaggtggctctgggacttcgccccctccagtggctcatctgctcctcagacttgcagggtggcaaatgttcctgttgccaggttaccacggtgtgcacagggcagagctgccgccaggcctcctcatggtgatgccagtgagtcggaccaggaaaggctcaccctggggagcccttcagcctgatccgcagtcctaacagggtgagaaagcacaagaggggccagctcggctgaggcctgaggagaaatgatgagaagttttgtttcgttcttgggctggggcatctcaggaacagtgagggcaacaagctgtccctcagggaccctcacctgccctcccatgtgaccaggcccttcccaggtggggactggggcttgctttattaagtgagctcttgggcttttgaagtaggacagagggccctggtttggcagagaggaggcaagggagggctttagaacatctgagaaatgttaataaataattcagaaaata

SEQ ID NO: 363870 - DNA, 2464 bp, Homo sapiens
cagctcccggctacggcccctcccagcgcaggcccatccccgttatggagcatgcgcagtcctcctgccgtcccgcccctccctttccagagcccccagttccttagaaaccaggcggcgcgttcccggtggcggcgccctggactcccgggcccgcgcatccccgccagccttccttaaggcggatgggtggcccccgagaccccgtcggacccatggtttccagtgcagcgcggagtgggcgatgccagcgtgccaggagccatgtctgaccaggacgtttggaagatcatatccatgccagaggctcttgtgaggagatgagttggtaaagagagaggctgggatgaagatgctgccaggagtgggcgtgtttgggactggcagctccgcccgagttctggtcccactgctgagggcagaagggttcactgttgaggccctgtgggggaagactgaggaggaggcgaagcagcttgctgaggagatgaacatcgccttctacaccagccggactgatgacatcttgctgcatcaagatgtggatctggtgtgcatcagcatcccccctccactcacccggcagatatccgtgaaggctctaggtattgggaagaatgtggtttgcgagaaggcagcaacatcggtggatgccttccggatggtgacagcctcgcgctactacccgcagctcatgagcctggtagggaacgtgctgcgcttcctgcctgccttcgtgcgcatgaaacagctgatttcggaacactatgtgggagcggtgatgatctgtgatgcccgcatctactcaggcagcctgctgagccccagctatggctggatctgtgatgagctcatgggcggcgggggcttgcacaccatggggacctacattgtggacctgctgacccacctgaccggccggagagccgagaaggtgcacgggctgctcaagacattcgtgaggcagaacgctgccatccgtggcatccggcacgtcactagcgatgacttctgtttcttccagatgctcatgggtgggggtgtgtgtagcacagtgacactcaacttcaacatgccaggcgcctttgtgcatgaagtcatggtggtaggctctgcaggacgcctcgtcgcccggggagccgacctctatgggcagaagaactctgccacgcaagaggagctgctcttgagggactcgctggcagtgggcgcaggactgcctgagcaggggccccaggatgtcccgctgctgtacctgaagggcatggtctacatggtgcaggccttgcgccagtccttccaggggcagggcgaccgccgcacctgggaccgcacccctgtctccatggccgcctccttcgaggatgggctgtacatgcagagcgtggtggatgccatcaagaggtcgagccgatccggggagtgggaggctgtggaggtgctgacggaggagcccgacaccaaccagaacctgtgtgaggcacttcagcggaacaacctatgagcctgcacctgggctccttgccacagggcagagggaccagggaggggaacaggagccagacatgacagggacttggccctagcagagacagtgtctttcatttaatgagtctgggtgaagccagaggtggctctgggacttcgccccctccagtggctcatctgctcctcagacttgcagggtggcaaatgttcctgttgccaggttaccacggtgtgcacagggcagagctgccgccaggcctcctcatggtgatgccagtgagtcggaccaggaaaggctcaccctggggagcccttcagcctgatccgcagtcctaacagggtgagaaagcacaagaggggccagctcggctgaggcctgaggagaaatgatgagaagttttgtttcgttcttgggctggggcatctcaggaacagtgagggcaacaagctgtccctcagggaccctcacctgccctcccatgtgaccaggcccttcccaggtggggactggggcttgctttattaagtgagctcttgggcttttgaagtaggacagagggccctggtttggcagagaggaggcaagggagggctttagaacatctgagaaatgttaataaataattcagaaaataaaaaaaaaaaaaaaaaaaaaaaaaaaaaaaaaataaaaaaaataaaagcagtctggtaactagtgacttgcacggggtttaacacccttaaaggctggaaaaaccccaggcgctaccctacatatgccatttggcctaacatccccattttcacctgatggcttatcttacaaaaagccccccaagttcgcctttccaaattgttgcggcccccgagtggcttaatgtcatatttggcagcctcaattatttggatcacattcgtacaaactttttgaaactcctactatttctttaccaatagccctttcctacccgtttatatataccctcgccgctcc

SEQ ID NO: 363871 - DNA, 1636 bp, Homo sapiens
cagctcccggctacggcccctcccagcgcaggcccatccccgttatggagcatgcgcagtcctcctgccgtcccgcccctccctttccagagcccccagttccttagaaaccaggcggcgcgttcccggtggcggcgccctggactcccgggcccgcgcatccccgccagccttccttaaggcggatgggtggcccccgagaccccgtcggacccatggtttccagtgctgcgcttcctgcctgccttcgtgcgcatgaaacagctgatttcggaacactatgtgggagcggtgatgatctgtgatgcccgcatctactcaggcagcctgctgagccccagctatggctggatctgtgatgagctcatgggcggcgggggcttgcacaccatggggacctacattgtggacctgctgacccacctgaccggccggagagccgagaaggtgcacgggctgctcaagacattcgtgaggcagaacgctgccatccgtggcatccggcacgtcactagcgatgacttctgtttcttccagatgctcatgggtgggggtgtgtgtagcacagtgacactcaacttcaacatgccaggcgcctttgtgcatgaagtcatggtggtaggctctgcaggacgcctcgtcgcccggggagccgacctctatgggcagaagaactctgccacgcaagaggagctgctcttgagggactcgctggcagtgggcgcaggactgcctgagcaggggccccaggatgtcccgctgctgtacctgaagggcatggtctacatggtgcaggccttgcgccagtccttccaggggcagggcgaccgccgcacctgggaccgcacccctgtctccatggccgcctccttcgaggatgggctgtacatgcagagcgtggtggatgccatcaagaggtcgagccgatccggggagtgggaggctgtggaggtgctgacggaggagcccgacaccaaccagaacctgtgtgaggcacttcagcggaacaacctatgagcctgcacctgggctccttgccacagggcagagggaccagggaggggaacaggagccagacatgacagggacttggccctagcagagacagtgtctttcatttaatgagtctgggtgaagccagaggtggctctgggacttcgccccctccagtggctcatctgctcctcagacttgcagggtggcaaatgttcctgttgccaggttaccacggtgtgcacagggcagagctgccgccaggcctcctcatggtgatgccagtgagtcggaccaggaaaggctcaccctggggagcccttcagcctgatccgcagtcctaacagggtgagaaagcacaagaggggccagctcggctgaggcctgaggagaaatgatgagaagttttgtttcgttcttgggctggggcatctcaggaacagtgagggcaacaagctgtccctcagggaccctcacctgccctcccatgtgaccaggcccttcccaggtggggactggggcttgctttattaagtgagctcttgggcttttgaagtaggacagagggccctggtttggcagagaggaggcaagggagggctttagaacatctgagaaatgttaataaataattcagaaaata

SEQ ID NO: 363872 - DNA, 1011 bp, Homo sapiens
cagctcccggctacggcccctcccagcgcaggcccatccccgttatggagcatgcgcagtcctcctgccgtcccgcccctccctttccagagcccccagttccttagaaaccaggcggcgcgttcccggtggcggcgccctggactcccgggcccgcgcatccccgccagccttccttaaggcggatgggtggcccccgagaccccgtcggacccatggtttccagtgcagcgcggagtgggcgatgccagcgtgccaggagccatgtctgaccaggacgtttggaagatcatatccatgccagaggctcttgtgaggagatgagttggtaaagagagaggctgggatgaagatgctgccaggagtgggcgtgtttgggactggcagctccgcccgagttctggtcccactgctgaggggcagagggaccagggaggggaacaggagccagacatgacagggacttggccctagcagagacagtgtctttcatttaatgagtctgggtgaagccagaggtggctctgggacttcgccccctccagtggctcatctgctcctcagacttgcagggtggcaaatgttcctgttgccaggttaccacggtgtgcacagggcagagctgccgccaggcctcctcatggtgatgccagtgagtcggaccaggaaaggctcaccctggggagcccttcagcctgatccgcagtcctaacagggtgagaaagcacaagaggggccagctcggctgaggcctgaggagaaatgatgagaagttttgtttcgttcttgggctggggcatctcaggaacagtgagggcaacaagctgtccctcagggaccctcacctgccctcccatgtgaccaggcccttcccaggtggggactggggcttgctttattaagtgagctcttgggcttttgaagtaggacagagggccctggtttggcagagaggaggcaagggagggctttagaacatctgagaaatgttaataaataattcagaaaata

SEQ ID NO: 363873 - DNA, 1540 bp, Homo sapiens
cagctcccggctacggcccctcccagcgcaggcccatccccgttatggagcatgcgcagtcctcctgccgtcccgcccctccctttccagagcccccagttccttagaaaccaggcggcgcgttcccggtggcggcgccctggactcccgggcccgcgcatccccgccagccttccttaaggcggatgggtggcccccgagaccccgtcggacccatggtttccagtgcagcgcggagtgggcgatgccagcgtgccaggagccatgtctgaccaggacgtttggaagatcatatccatgccagaggctcttgtgaggagatgagttggtaaagagagaggctgggatgaagatgctgccaggagtgggcgtgtttgggactggcagctccgcccgagttctggtcccactgctgagggcagaagggttcactgttgaggccctgtgggggaagactgaggaggaggcgaagcagcttgctgaggagatgaacatcgccttctacaccagccggactgatgacatcttgctgcatcaagatgtggatctggtgtgcatcagcatcccccctccactcacccggcagatatccgtgaaggctctaggtacgcccggcaggccacagcaggggcagatcatgtctctccctctgggcagtcctctgagggtcactcctctcctctgagctctccttcctgggctcgcatctgcagggaggagaactctgggacatcacttgtccctgaagcagtgcttggggagggcatgaaaaaagacatagcctaacctacctcccatctgtaaatccctgaacagaaattaaggaaatactctaagagacagccatcaaggggctggagatggttgcatctcagtcaacataaagtttgcctctgtgaagttagaggtcagagccctgggtggcggggaattggttgtgactagtgtgtttgttctcccatttctggggcacacagcaccacaggaaggagaggctgtgtagcaaggctaccatttcccatgttttgtcagcgtttgactatagtgagcacacacccttcctgccaaactgcagtcttgtattgccggaggacaggaaggctctgccagcattgggcttccctgacaggatccgtcgacagcctgcttacatgacatctccactcccttgggaagttttgggcttggtaacctcttgcccctgactgggcatggcctgctgagctgttctcctacagttcccgttggtcttctatttccagtcaactggagtcaacttcttctctttatctaatataaatcagaacctagtttactaagtaaacaaaccagtaaacattcagccagcaatttttattttattttgagacagagtttccctcttgttgcccaggctggagttcaatggcgcaatcccggctcactgcaaccttcgcctcccaggttcaagtgattctcctgcctcagcctcccaagtagctgggattacaggtgcctgccaccacacccagctaatttttgtatttttagtagagacagg

SEQ ID NO: 363874 - DNA, 2456 bp, Homo sapiens
cagctcccggctacggcccctcccagcgcaggcccatccccgttatggagcatgcgcagtcctcctgccgtcccgcccctccctttccagagcccccagttccttagaaaccaggcggcgcgttcccggtggcggcgccctggactcccgggcccgcgcatccccgccagccttccttaaggcggatgggtggcccccgagaccccgtcggacccatggtttccagtgcagcgcggagtgggcgatgccagcgtgccaggagccatgtctgaccaggacgtttggaagatcatatccatgccagaggctcttgtgaggagatgagttggtaaagagagaggctgggatgaagatgctgccaggagtgggcgtgtttgggactggcagctccgcccgagttctggtcccactgctgagggcagaagggttcactgttgaggccctgtgggggaagactgaggaggaggcgaagcagcttgctgaggagatgaacatcgccttctacaccagccggactgatgacatcttgctgcatcaagatgtggatctggtgtgcatcagcatcccccctccactcacccggcagatatccgtgaaggctctagagagctctctctgaggatgtgtgacattggagttattcattcattggtcaccaaatgcttgggaggtcagatggtggctcccagattgaattcagaaatagacctaagtcaacactttagcagcaagttggttcaaggggaagcaagccgctattggtcacttgactccttgccatcccttgtggcttgaatgcaggctggaaaggtgaggtgtgtccggagccagaactctggaggctctcagtcttcttcctgaattttagggttccccacagagaccatttccaagctatacgggaagaaagaggaaaccccagggttctttggcaacaagcttgctttttttctggttcttggtatgctccaccagcagcagcatcacctgggagcttgttagaaactgaattctcagctgggcaacatagtgggatcccgtctctacaaaaaagtttaaaaattagccaggcatggtggcacgcgactgtggtcccagctacttgggaggctgaggcagaaggatcgcttgagcccaggagatagaggctgcagtgagcagtgatcatgcactccagcttgagtgacagagtaagactgtctcaaaagcaaacaaacaaaaagaaatctaaattctcaggccccactccaaacctactgaatctctgggatccagctatctgtgtctgaacaagccttgcaggtgactctggtggacatgaaggattgagagccactgatccaatcattttgaattaaactgaggcccaggagcattaaggaatgacatcttggttacatttcaccaagtcttcgtgctgtgatttttctctccttgctagagctttatatttttaccttacttctaaggccacgagatcatttcttgccctcattattagtttttcctaaaattaatgattggacttaaccttccagagataatacttttcatatcacagctctttttatggcatcttgttttctgctttggtctgacctatgttcttcatcttctacctccgatttcatccttaaagctttcccatgaatttcttaaaggggagaggggaagggccctaatatattttattcttcagttcagaagtggttcaggaaattatattttaagtgcaaggtgcccctagcatctttgccacagttgaatgttttcttaagtctgtcactaaaaggtgggcttctgtgcccaattcttggcacttctgtggttcattagaaaaacactaagtttgcaggccaggcttggtggctcatgcatgtaatcccagcactttgggaggccgaggcgggcggatcacaaggtcaggagtttgagaccagcctgaccaacctggtgaaacctcgtctatactaaaaacacaaaaattagctgggcgtgttggcacgtgcctatagtcccagctactcaggaggctgaggcaggagaattgcttgaacccaggagatggaggttgcagtgagccgagatcacgccactgcactccagtctgggtgacagagcgagactccatctctaaaaaaaaaagaaaagaaaagtaaaaagaaaacatttttgtagagacaggatcttgctgtgttgttcaagctggtttcgaactcctaacctcaggcaatcatcctactttggccccccaaagtgctggaattataggtgggagccactgtgcccagcagatttcagcttctccaatctctcccttgacttcctggcaggagagctagataaactcaggtagacatgtctttcatggctacccaaagactctgtacagctagccctcaggagcctgtttaagtcaagatgtccttgcagtcccacactgatactactgagcc

SEQ ID NO: 363875 - DNA, 1777 bp, Homo sapiens
cagctcccggctacggcccctcccagcgcaggcccatccccgttatggagcatgcgcagtcctcctgccgtcccgcccctccctttccagagcccccagttccttagaaaccaggcggcgcgttcccggtggcggcgccctggactcccgggcccgcgcatccccgccagccttccttaaggcggatgggtggcccccgagaccccgtcggacccatggtttccagtgcagcgcggagtgggcgatgccagcgtgccaggtattgggaagaatgtggtttgcgagaaggcagcaacatcggtggatgccttccggatggtgacagcctcgcgctactacccgcagctcatgagcctggtagggaacgtgctgcgcttcctgcctgccttcgtgcgcatgaaacagctgatttcggaacactatgtgggagcggtgatgatctgtgatgcccgcatctactcaggcagcctgctgagccccagctatggctggatctgtgatgagctcatgggcggcgggggcttgcacaccatggggacctacattgtggacctgctgacccacctgaccggccggagagccgagaaggtgcacgggctgctcaagacattcgtgaggcagaacgctgccatccgtggcatccggcacgtcactagcgatgacttctgtttcttccagatgctcatgggtgggggtgtgtgtagcacagtgacactcaacttcaacatgccaggcgcctttgtgcatgaagtcatggtggtaggctctgcaggacgcctcgtcgcccggggagccgacctctatgggcagaagaactctgccacgcaagaggagctgctcttgagggactcgctggcagtgggcgcaggactgcctgagcaggggccccaggatgtcccgctgctgtacctgaagggcatggtctacatggtgcaggccttgcgccagtccttccaggggcagggcgaccgccgcacctgggaccgcacccctgtctccatggccgcctccttcgaggatgggctgtacatgcagagcgtggtggatgccatcaagaggtcgagccgatccggggagtgggaggctgtggaggtgctgacggaggagcccgacaccaaccagaacctgtgtgaggcacttcagcggaacaacctatgagcctgcacctgggctccttgccacagggcagagggaccagggaggggaacaggagccagacatgacagggacttggccctagcagagacagtgtctttcatttaatgagtctgggtgaagccagaggtggctctgggacttcgccccctccagtggctcatctgctcctcagacttgcagggtggcaaatgttcctgttgccaggttaccacggtgtgcacagggcagagctgccgccaggcctcctcatggtgatgccagtgagtcggaccaggaaaggctcaccctggggagcccttcagcctgatccgcagtcctaacagggtgagaaagcacaagaggggccagctcggctgaggcctgaggagaaatgatgagaagttttgtttcgttcttgggctggggcatctcaggaacagtgagggcaacaagctgtccctcagggaccctcacctgccctcccatgtgaccaggcccttcccaggtggggactggggcttgctttattaagtgagctcttgggcttttgaagtaggacagagggccctggtttggcagagaggaggcaagggagggctttagaacatctgagaaatgttaataaataattcagaaaata

SEQ ID NO: 363876 - DNA, 2113 bp, Homo sapiens
cttagggccctctctggagttatgactaagagtagaagttatgaatagtccatcccctagaaaataggttagatttccttgccccaagctgatgacctaataaatgcatgacaacatagagacacgtccatgaagtgtgcccacctctctagcccacctgtgttattcagggttctccagagaaacagaaccaatagggtgtttaagacagagatttatttgaagaaattggggccaggcatggtggctcacacctgtaatctcagcactttgggaggccaaggcaggaggatcacttgggccctgcctgggcaacagaggaggaccccatctctacaaaaaaaaaattttaaattagccaggcgtggtggtacacacctgtggtcccacttgggaggccaagatggaggatcgcttgaggccaggagattgagactagcctgggcagcatagcaagaccccacctctacaaaaaagaaaaaaaaattagttcgtgcagttgtaaggcagagaagtccaaaatcctcagggcaggcggacatgctggagattcccccttgaaactttgagatttcctgttgtgtcctgttgttaggtattgggaagaatgtggtttgcgagaaggcagcaacatcggtggatgccttccggatggtgacagcctcgcgctactacccgcagctcatgagcctggtagggaacgtgctgcgcttcctgcctgccttcgtgcgcatgaaacagctgatttcggaacactatgtgggagcggtgatgatctgtgatgcccgcatctactcaggcagcctgctgagccccagctatggctggatctgtgatgagctcatgggcggcgggggcttgcacaccatggggacctacattgtggacctgctgacccacctgaccggccggagagccgagaaggtgcacgggctgctcaagacattcgtgaggcagaacgctgccatccgtggcatccggcacgtcactagcgatgacttctgtttcttccagatgctcatgggtgggggtgtgtgtagcacagtgacactcaacttcaacatgccaggcgcctttgtgcatgaagtcatggtggtaggctctgcaggacgcctcgtcgcccggggagccgacctctatgggcagaagaactctgccacgcaagaggagctgctcttgagggactcgctggcagtgggcgcaggactgcctgagcaggggccccaggatgtcccgctgctgtacctgaagggcatggtctacatggtgcaggccttgcgccagtccttccaggggcagggcgaccgccgcacctgggaccgcacccctgtctccatggccgcctccttcgaggatgggctgtacatgcagagcgtggtggatgccatcaagaggtcgagccgatccggggagtgggaggctgtggaggtgctgacggaggagcccgacaccaaccagaacctgtgtgaggcacttcagcggaacaacctatgagcctgcacctgggctccttgccacagggcagagggaccagggaggggaacaggagccagacatgacagggacttggccctagcagagacagtgtctttcatttaatgagtctgggtgaagccagaggtggctctgggacttcgccccctccagtggctcatctgctcctcagacttgcagggtggcaaatgttcctgttgccaggttaccacggtgtgcacagggcagagctgccgccaggcctcctcatggtgatgccagtgagtcggaccaggaaaggctcaccctggggagcccttcagcctgatccgcagtcctaacagggtgagaaagcacaagaggggccagctcggctgaggcctgaggagaaatgatgagaagttttgtttcgttcttgggctggggcatctcaggaacagtgagggcaacaagctgtccctcagggaccctcacctgccctcccatgtgaccaggcccttcccaggtggggactggggcttgctttattaagtgagctcttgggcttttgaagtaggacagagggccctggtttggcagagaggaggcaagggagggctttagaacatctgagaaatgttaataaataattcagaaaata

SEQ ID NO: 363877 - DNA, 3100 bp, Homo sapiens
cagctcccggctacggcccctcccagcgcaggcccatccccgttatggagcatgcgcagtcctcctgccgtcccgcccctccctttccagagcccccagttccttagaaaccaggcggcgcgttcccggtggcggcgccctggactcccgggcccgcgcatccccgccagccttccttaaggcggatgggtggcccccgagaccccgtcggacccatggtttccagtgcagcgcggagtgggcgatgccagcgtgccaggagccatgtctgaccaggacgtttggaagatcatatccatgccagaggctcttgtgaggagatgagttggtaaagagagaggctgggatgaagatgctgccaggagtgggcgtgtttgggactggcagctccgcccgagttctggtcccactgctgagggcagaagggttcactgttgaggccctgtgggggaagactgaggaggaggcgaagcagcttgctgaggagatgaacatcgccttctacaccagccggactgatgacatcttgctgcatcaagatgtggatctggtgtgcatcagcatcccccctccactcacccggcagatatccgtgaaggctctaggtacgcccggcaggccacagcaggggcagatcatgtctctccctctgggcagtcctctgagggtcactcctctcctctgagctctccttcctgggctcgcatctgcagggaggagaactctgggacatcacttgtccctgaagcagtgcttggggagggcatgaaaaaagacatagcctaacctacctcccatctgtaaatccctgaacagaaattaaggaaatactctaagagacagccatcaaggggctggagatggttgcatctcagtcaacataaagtttgcctctgtgaagttagaggtcagagccctgggtggcggggaattggttgtgactagtgtgtttgttctcccatttctggggcacacagcaccacaggaaggagaggctgtgtagcaaggctaccatttcccatgttttgtcagcgtttgactatagtgagcacacacccttcctgccaaactgcagtcttgtattgccggaggacaggaaggctctgccagcattgggcttccctgacaggatccgtcgacagcctgcttacatgacatctccactcccttgggaagttttgggcttggtaacctcttgcccctgactgggcatggcctgctgagctgttctcctacagttcccgttggtcttctatttccagtcaactggagtcaacttcttctctttatctaatataaatcagaacctagtttactaagtaaacaaaccagtaaacattcagccagcaatttttattttattttgagacagagtttccctcttgttgcaatgagccaagattataccactgggtaacaaagcgagtccccatctaaaaaaacaaaaacagactatttttcagattcaagaagagaggtctttccctctttcctcacctcttgaggcatgaaacaggaattccttatcctagttttatcaccaccaaactcctagcagtcataaaagtcctttttcctctaaacccacctcctctctgcctcacactgcagtatccactctgtcgccagcagcgaggcattatagcaggaggcttctgaattggccagaacagcagctctcaggtggggtgtctgagaacctcatttcctcattacatccctccctggtcagccatatgtgttcagcagccaaatggcaaaattcacccccagaactgtgattgtcttccctaatctggaaggcccacaagtgtggagaagcactggagaccctccagaagcagtagtgctagcagtcaggggctactctccctgccgggccccgtgcaagggcctggccaccctatcccaggtatgtgacacttggctggctgttctttattgtcctgctagtacctgttgtaaagcttcttttattaaagaagagcaggagattgaagtgtcataaattgaagagattcacaccaacacggcacatgtatacatatgtaacaaacctgcacgttgtgcacatgtaccctagaacttaaagtataataacaaaatatgtattaaaaaaataaataaataaaaaaaaaaaaaaagtacttttagcagaacatttacggtattttgtacatatgtgtgcaaagttgcttattaacatttatgtcatggtcataaagactaatttggtaacaatattcagtctccagtaaatatgtggttaattgatatgcaaattacttccaaagtacaaattaatagtctcatattacatttttgtgctttgctacctttacctcaaacaaaataatctgtaggattcttcatgcttgtttcagcaccttttgcccagctttgcttgcttcattggccagaggactgtcagcacctcatgaagccctttatatcgttctctgaggtcatttgcataatgttgtggcctatagtaggttctcaataaatacctgatggatgaatgaatgaataaggatgaggaaatgaacacggtaggtatgcctggatctggaagcagaagtggcccaaaaatggaaggaaaagaaacttggcaggaatagcaggaagaagaaagcggggaggacagtattgtgtgagtttgctagggctgtgtaacaaagtgatacaaacctgatgtctcccgcaacagacatttattgtctcacagtcttggaggccggagtgcaaaatcaagttgtgagtggagctggttccttctgtgggctgtgaggaagaatctgtcgcaggcctctctcccagcctctgctggctcgctggcagtctctggtgtcccctggcttggagtgcatcattctgatctgtcttcatcttcacgtggcgtgccctctgtgggtgtgtctgtgtccaattttccatttttgataaggataccaatcatgttggattagggcccaccctaatgacctaattttaacttaattgtctctataaataccctatctccaaataagatcactgtctgagggttaggggctaactggggaatagaactctaacataaacgttttttaggatggga

SEQ ID NO: 363878 - DNA, 1156 bp, Homo sapiens
cagctcccggctacggcccctcccagcgcaggcccatccccgttatggagcatgcgcagtcctcctgccgtcccgcccctccctttccagagcccccagttccttagaaaccaggcggcgcgttcccggtggcggcgccctggactcccgggcccgcgcatccccgccagccttccttaaggcggatgggtggcccccgagaccccgtcggacccatggtttccagtgcagcgcggagtgggcgatgccagcgtgccaggagccatgtctgaccaggacgtttggaagatcatatccatgccagaggctcttgtgaggagatgagttggtaaagagagaggctgggatgaagatgctgccaggagtgggcgtgtttgggactggcagctccgcccgagttctggtcccactgctgagggcagaagggttcactgttgaggccctgtgggggaagactgaggaggaggcgaagcagcttgctgaggagatgaacatcgccttctacaccagccggactgatgacatcttgctgcatcaagatgtggatctggtgtgcatcagcatcccccctccactcacccggcagatatccgtgaaggctctaggtattgggaagaatgtggtttgcgagaaggcagcaacatcggtggatgccttccggatggtgacagcctcgcgctactacccgcagctcatgagcctggtagggaacgtgctgcgcttcctgcctgccttcgtgcgcatgaaacagctgatttcggaacactatgtgggagcggtgatgatctgtgatgccagtgagtcggaccaggaaaggctcaccctggggagcccttcagcctgatccgcagtcctaacagggtgagaaagcacaagaggggccagctcggctgaggcctgaggagaaatgatgagaagttttgtttcgttcttgggctggggcatctcaggaacagtgagggcaacaagctgtccctcagggaccctcacctgccctcccatgtgaccaggcccttcccaggtggggactggggcttgctttattaagtgagctcttgggcttttgaagtaggacagagggccctggtttggcagagaggaggcaagggagggctttagaacatctgagaaatgttaataaataattcagaaaata

SEQ ID NO: 363879 - DNA, 975 bp, Homo sapiens
tgccacttacgcgtcgctcttcctcgtttgcccctcgtgttcatgggagctcgttttcttttcctctaggcagagaagaggcgatggcggcgatggcatctctcggcgccctggcgctgctcctgctgtccagcctctcccgctgctcagccgaggcctgcctggagccccagatcaccccttcctactacaccacttctgacgctgtcatttccactgagaccgtcttcattgtggagatctccctgacatgcaagaacagggtccagaacatggctctctatgctgacgtcggtggaaaacaattccctgtcactcgaggccaggatgtggggcgttatcaggtgtcctggagcctggaccacaagagcgcccacgcaggcacctatgaggttagattcttcgacgaggagtcctacagcctcctcaggaaggctcagaggaataacgaggacatttccatcatcccgcctctgtttacagtcagcgtggaccatcggggcacttggaacgggccctgggtgtccactgaggtgctggctgcggcgatcggccttgtgatctactacttggccttcagtgcgaagagccacatccaggcctgagggcggcaccccagccctgcccttgcttccttcaataaacatcacaggacctgggactgcacaggacctgggaaaaaaaaataaaaaaaaaacacaacaaagggggccgggcgcgcgcactaaaaagtacccccttgagcgcgcccacggtataacgcgacccccggttttcttgtcacaagggggcccatattaggaagacccgaatatataagcatagggccactgcccgcgagtatacaccacgcttggacacgggcgaaaccggtgcacacccgggggacactggagcaagggacccatactcgcggggggcgaccaaacggggacacaaacccacaagagatataacgccagacgcaactataag

SEQ ID NO: 363880 - DNA, 456 bp, Homo sapiens
ctactactaaattcggcggcgctcgactgtggagatctccctgacatgcaagaacagggtaacatggctctctatgctgacgtcggtggaaaacaattccctgtcactcgaggccaggatgtggggcgttatcaggtgtcctggagcctggaccacaagagcgcccacgcaggcacctatgaggttagattcttcgacgaggagtcctacagcctcctcaggaaggctcagaggaataacgaggacatttccatcatcccgcctctgtttacagtcagcgtggaccatcggggcacttggaacgggccctgggtgtccactgaggtgctggctgcggcgatcggccttgtgatctactacttggccttcagtgcgaagagccacatccaggcctgtgatgtttattgaaggaagcaagggcagggctggggtgccgccctcaggcctgggtcgacg

SEQ ID NO: 363881 - DNA, 1522 bp, Homo sapiens
cctaggacctaaattaacctcttcttaaataagtgtaaggaaagaagactcggacctgaatacgcaagaccgcacacggagaagagcagaagcaaaacccccgcagcctcagaaaccctagctccttcccattccaggcgcctcgaggggaaggcatctggggctctaagactgggggactatgggggatgactggcaaagtccggttctttgccaccgggataggtggcaaagcggtccacgagagaggaaaccgtggagaaatttgagtcccggaaccggattcccgaagcggtttgagaaaggcgggccgggatacgtgagtgactgcctcagaagggctccttcaaggacactaaggaggtgacagccgccgtggcccactctcccggcccgtccggagggccccccgccacccgatgcagaccccctgggggagccggtccagggccaacttcggccaatcccctcagtgacagcggaggcgccaatcggactccagactgcttcgggtgcggctaccccaccgctcccctgcgaccgctgccgcggtcccgtggctctttccctgctcacctcccagggacggcagagaagggctggcccgagcaccgccttcgcggcgctgccggcgacggtcgctaccttcagcgccatgacggaaagtgagagcctccgcacgtcccgacacgcagataccgctctcgcgagagttcgacggggtgcgaagtttcggggacaggcgcggacccggtactgcgcacgcgcgcggtcgcaccgattcacgcccccttccggcgcctagagcaccgctgccgccatgttgagggggggaccgcgaccagctgggcccctggctcagggaggggccacgtcagtgctgccagagacgtcacaatgccggcccagccgttcgagagaagaggcgatggcggcgatggcatctctcggcgccctggcgctgctcctgctgtccagcctctcccgctgctcagccgaggcctgcctggagccccagatcaccccttcctactacaccacttctgacgctgtcatttccactgagaccgtcttcattgtggagatctccctgacatgcaagaacagggtccagaacatggctctctatgctgacgtcggtggaaaacaattccctgtcactcgaggccaggatgtggggcgttatcaggtgtcctggagcctggaccacaagagcgcccacgcaggcacctatgaggttagattcttcgacgaggagtcctacagcctcctcaggaaggctcagaggaataacgaggacatttccatcatcccgcctctgtttacagtcagcgtggaccatcggggcacttggaacgggccctgggtgtccactgaggtgctggctgcggcgatcggccttgtgatctactacttggccttcagtgcgaagagccacatccaggcctgagggcggcaccccagccctgcccttgcttccttcaataaacatcacaggacctgggactgcacaggacctggg

SEQ ID NO: 363882 - DNA, 2041 bp, Homo sapiens
cctaggacctaaattaacctcttcttaaataagtgtaaggaaagaagactcggacctgaatacgcaagaccgcacacggagaagagcagaagcaaaacccccgcagcctcagaaaccctagctccttcccattccaggcgcctcgaggggaaggcatctggggctctaagactgggggactatgggggatgactggcaaagtccggttctttgccaccgggataggtggcaaagcggtccacgagagaggaaaccgtggagaaatttgagtcccggaaccggattcccgaagcggtttgagaaaggcgggccgggatacgtgagtgactgcctcagaagggctccttcaaggacactaaggaggtgacagccgccgtggcccactctcccggcccgtccggagggccccccgccacccgatgcagaccccctgggggagccggtccagggccaacttcggccaatcccctcagtgacagcggaggcgccaatcggactccagactgcttcgggtgcggctaccccaccgctcccctgcgaccgctgccgcggtcccgtggctctttccctgctcacctcccagggacggcagagaagggctggcccgagcaccgccttcgcggcgctgccggcgacggtcgctaccttcagcgccatgacggaaaagagaagaggcgatggcggcgatggcatctctcggcgccctggcgctgctcctgctgtccagcctctcccgctgctcagggatctgcctcctgtggtccagacccagagccttctctgacgtcctctgctgaagccatcgttctgccagggcaccacatttggacagcgggtggctgagaacattcccactttggggagcctttgtttcacaccctctgatgtaggcggcagccttcctttcctttgggcctctggttatggagaaggctaaggcaaggtcctttctctcacagctaacaagttgtgcttctggaaccagagtctctcccgtttacttcttcaggaaacgctggggccagtcttcaccttctgtcaactggccgggggcagagaccctttctctcatcttgaaagccccagtgcattgcctgcctgcagcccccacccccgatgtctctgctgaggatgccttcagtaactcgtccaggccgtttgtggctctgaattgaggctggcgtggcccccgggcctccgtgtcataggtccaagtgttggcatgtattgtccagtgaatccagcccccacctgtccccagttcgctcttcctgcacacctccagaaagccggccttgcccctccccagccttccttcacagccatcccgcctacgttgccattgcatttgtgaccgagcacttggatctgtctcgcatatcccacctggaaggggcaggaggagcgcatgggtccccagctgatccgtgctatgaggcagggccgggccatcctgccctcagaccgggatactcgagctggcttacccaggcatctctccctcttccccgcagccgaggcctgcctggagccccagatcaccccttcctactacaccacttctgacgctgtcatttccactgagaccgtcttcattgtggagatctccctgacatgcaagaacagggtccagaacatggctctctatgctgacgtcggtggaaaacaattccctgtcactcgaggccaggatgtggggcgttatcaggtgtcctggagcctggaccacaagagcgcccacgcaggcacctatgaggttagattcttcgacgaggagtcctacagcctcctcaggaaggctcagaggaataacgaggacatttccatcatcccgcctctgtttacagtcagcgtggaccatcggggcacttggaacgggccctgggtgtccactgaggtgctggctgcggcgatcggccttgtgatctactacttggccttcagtgcgaagagccacatccaggcctgagggcggcaccccagccctgcccttgcttccttcaataaacatcacaggacctgggactgcacaggacctggg

SEQ ID NO: 363883 - DNA, 871 bp, Homo sapiens
tgccacttacgcgtcgctcttcctcgtttgcccctcgtgttcatgggagctcgttttcttttcctctaggcagagaagaggcgatggcggcgatggcatctctcggcgccctggcgctgctcctgctgtccagcctctcccgctgctcagggatctgcctcctgtggtccagacccagagccttctctgacgtcctctgctgaagccatcgttctgccagggcaccacatttggacagcgggtggctgagaacattcccactttggggagcctttgtttcacaccctctgatgtaggcggcagccttcctttcctttgggcctctggttatggagaaggctaagccgaggcctgcctggagccccagatcaccccttcctactacaccacttctgacgctgtcatttccactgagaccgtcttcattgtggagatctccctgacatgcaagaacagggtccagaacatggctctctatgctgacgtcggtggaaaacaattccctgtcactcgaggccaggatgtggggcgttatcaggtgtcctggagcctggaccacaagagcgcccacgcaggcacctatgaggttagattcttcgacgaggagtcctacagcctcctcaggaaggctcagaggaataacgaggacatttccatcatcccgcctctgtttacagtcagcgtggaccatcggggcacttggaacgggccctgggtgtccactgaggtgctggctgcggcgatcggccttgtgatctactacttggccttcagtgcgaagagccacatccaggcctgagggcggcaccccagccctgcccttgcttccttcaataaacatcacaggacctgggactgcacaggacctggg

SEQ ID NO: 363884 - DNA, 1727 bp, Homo sapiens
cctaggacctaaattaacctcttcttaaataagtgtaaggaaagaagactcggacctgaatacgcaagaccgcacacggagaagagcagaagcaaaacccccgcagcctcagaaaccctagctccttcccattccaggcgcctcgaggggaaggcatctggggctctaagactgggggactatgggggatgactggcaaagtccggttctttgccaccgggataggtggcaaagcggtccacgagagaggaaaccgtggagaaatttgagtcccggaaccggattcccgaagcggtttgagaaaggcgggccgggatacgtgagtgactgcctcagaagggctccttcaaggacactaaggaggtgacagccgccgtggcccactctcccggcccgtccggagggccccccgccacccgatgcagaccccctgggggagccggtccagggccaacttcggccaatcccctcagtgacagcggaggcgccaatcggactccagactgcttcgggtgcggctaccccaccgctcccctgcgaccgctgccgcggtcccgtggctctttccctgctcacctcccagggacggcagagaagggctggcccgagcaccgccttcgcggcgctgccggcgacggtcgctaccttcagcgccatgacggaaagtgagagcctccgcacgtcccgacacgcagataccgctctcgcgagagttcgacggggtgcgaagtttcggggacaggcgcggacccggtactgcgcacgcgcgcggtcgcaccgattcacgcccccttccggcgcctagagcaccgctgccgccatgttgagggggggaccgcgaccagctgggcccctggctcagggaggggccacgtcagtgctgccagagacgtcacaatgccggcccagccgttcgagagaagaggcgatggcggcgatggcatctctcggcgccctggcgctgctcctgctgtccagcctctcccgctgctcaggaaacgctggggccagtcttcaccttctgtcaactggccgggggcagagaccctttctctcatcttgaaagccccagtgcattgcctgcctgcagcccccacccccgatgtctctgctgaggatgccttcagtaactcgtccaggccgtttgtggctctgaattgaggctggcgtggcccccgggcctccgtgtcataggtccaaccgaggcctgcctggagccccagatcaccccttcctactacaccacttctgacgctgtcatttccactgagaccgtcttcattgtggagatctccctgacatgcaagaacagggtccagaacatggctctctatgctgacgtcggtggaaaacaattccctgtcactcgaggccaggatgtggggcgttatcaggtgtcctggagcctggaccacaagagcgcccacgcaggcacctatgaggttagattcttcgacgaggagtcctacagcctcctcaggaaggctcagaggaataacgaggacatttccatcatcccgcctctgtttacagtcagcgtggaccatcggggcacttggaacgggccctgggtgtccactgaggtgctggctgcggcgatcggccttgtgatctactacttggccttcagtgcgaagagccacatccaggcctgagggcggcaccccagccctgcccttgcttccttcaataaacatcacaggacctgggactgcacaggacctggg

SEQ ID NO: 363885 - DNA, 1139 bp, Homo sapiens
  misc_feature (915)..(916): n is a, c, g, or t
tgccacttacgcgtcgctcttcctcgtttgcccctcgtgttcatgggagctcgttttcttttcctctaggcagagaagaggcgatggcggcgatggcatctctcggcgccctggcgctgctcctgctgtccagcctctcccgctgctcagccgaggcctgcctggagccccagatcaccccttcctactacaccacttctgacgctgtcatttccactgagaccgtcttcattgtggagatctccctgacatgcaagaacagggtccagaacatggctctctatgctgacgtcggtggaaaacaattccctgtcactcgaggccaggatgtggggcgttatcaggtgtcctggagcctggaccacaagagcgcccacgcaggcacctatgaggttagattcttcgacgaggagtcctacagcctcctcaggaaggctcagaggaataacgaggacatttccatcatcccgcctctgtttacagtcagcgtggaccatcggggcacttggaacgggccctgggtgtccactgaggtgctggctgcggcgatcggccttgtgatctactacttggccttcagtgcgaagagccacatccaggcctgagggcggcaccccagccctgcccttgcttccttcaataaacatcacaggacctgggactgcacaggacctgggaaaaaaaacaaaaaacaaaaaaaaaaaaaaaaaaaaaaaaaaaaaaaaaaaaaaaaaaaaaaaaaaaaaaaaaaaaaaaaaaaaaaaaaaaaaaaaaaaaaaaaaaaaaaaaaaggggggggcctttttaaatttccctgggggggcccaaatttccccccccccccttttttttaaaaaaggggccccttttggggggggttttaaaaacgaggcccggccccggtttttaaaaccnngggacgggaaaaactttttttttgggatttttggaaagaacccttcttttgggggggggaataattgggaaaccctcctcaaaaagtttaaagcctttagggaaattaaaaattttgaagggtttattgggaaaactacctcttatccctctcggggggagagattcgctctccgggaattatatataaaaattttcaccaaggcacgagggatctacttttg

SEQ ID NO: 363886 - DNA, 833 bp, Homo sapiens
  misc_feature (693)..(693): n is a, c, g, or t
tgccacttacgcgtcgctcttcctcgtttgcccctcgtgttcatgggagctcgttttcttttcctctaggcagagaagaggcgatggcggcgatggcatctctcggcgccctggcgctgctcctgctgtccagcctctcccgctgctcagccgaggcctgcctggagccccagatcaccccttcctactacaccacttctgacgctgtcatttccactgagaccgtcttcattgtggagatctccctgacatgcaagaacagggtccagaacatggctctctatgctgacgtcggtggaaaacaattccctgtcactcgaggccaggatgtggggcgttatcaggtgtcctggagcctggaccacaagagcgcccacgcaggcacctatgaggttagattcttcgacgaggagtcctacagcctcctcaggaaggctcagaggaataacgaggacatttccatcatcccgcctctgtttacagtcagcgtggaccatcggggcacttggaacgggccctgggtgtccactgaggtgctggctgcggcgatcggccttgtgatctactacttggccttcagtgcgaagagccacatccaggcctgagggcggcaccccagccctgcccttgcttccttcaataaacatcacaggacctgggactgcacaggacctggggcccgggaaaaaacanacaccaaaaaataatagaagacaaaaaccagaacatacacaaactataatccaataaacaaaaaggggggggggccaaaaaatatcccccagggagggccacccaatacgcacacgccttttttgtaccacagggcccca

SEQ ID NO: 363887 - DNA, 1048 bp, Homo sapiens
  misc_feature (824)..(825): n is a, c, g, or t
tgccacttacgcgtcgctcttcctcgtttgcccctcgtgttcatgggagctcgttttcttttcctctaggcagagaagaggcgatggcggcgatggcatctctcggcgccctggcgctgctcctgctgtccagcctctcccgctgctcagccgaggcctgcctggagccccagatcaccccttcctactacaccacttctgacgctgtcatttccactgagaccgtcttcattgtggagatctccctgacatgcaagaacagggtccagaacatggctctctatgctgacgtcggtggaaaacaattccctgtcactcgaggccaggatgtggggcgttatcaggtgtcctggagcctggaccacaagagcgcccacgcaggcacctatgaggttagattcttcgacgaggagtcctacagcctcctcaggaaggctcagaggaataacgaggacatttccatcatcccgcctctgtttacagtcagcgtggaccatcggggcacttggaacgggccctgggtgtccactgaggtgctggctgcggcgatcggccttgtgatctactacttggccttcagtgcgaagagccacatccaggcctgagggcggcaccccagccctgcccttgcttccttcaataaacatcacaggacctgggactgcacaggacctgggaaaaaaaaaaaaaaaaaaaaaaaggggggggcctttttaaatttccctgggggggcccaaatttccccccccccccttttttttaaaaaaggggccccttttggggggggttttaaaaacgaggcccggccccggtttttaaaaccnngggacgggaaaaactttttttttgggatttttggaaagaacccttcttttgggggggggaataattgggaaaccctcctcaaaaagtttaaagcctttagggaaattaaaaattttgaagggtttattgggaaaactacctcttatccctctcggggggagagattcgctctccgggaattatatataaaaattttcaccaaggcacgagggatctacttttg

SEQ ID NO: 363888 - DNA, 1427 bp, Homo sapiens
  misc_feature (1287)..(1287): n is a, c, g, or t
cctaggacctaaattaacctcttcttaaataagtgtaaggaaagaagactcggacctgaatacgcaagaccgcacacggagaagagcagaagcaaaacccccgcagcctcagaaaccctagctccttcccattccaggcgcctcgaggggaaggcatctggggctctaagactgggggactatgggggatgactggcaaagtccggttctttgccaccgggataggtggcaaagcggtccacgagagaggaaaccgtggagaaatttgagtcccggaaccggattcccgaagcggtttgagaaaggcgggccgggatacgtgagtgactgcctcagaagggctccttcaaggacactaaggaggtgacagccgccgtggcccactctcccggcccgtccggagggccccccgccacccgatgcagaccccctgggggagccggtccagggccaacttcggccaatcccctcagtgacagcggaggcgccaatcggactccagactgcttcgggtgcggctaccccaccgctcccctgcgaccgctgccgcggtcccgtggctctttccctgctcacctcccagggacggcagagaagggctggcccgagcaccgccttcgcggcgctgccggcgacggtcgctaccttcagcgccatgacggaaaagagaagaggcgatggcggcgatggcatctctcggcgccctggcgctgctcctgctgtccagcctctcccgctgctcagccgaggcctgcctggagccccagatcaccccttcctactacaccacttctgacgctgtcatttccactgagaccgtcttcattgtggagatctccctgacatgcaagaacagggtccagaacatggctctctatgctgacgtcggtggaaaacaattccctgtcactcgaggccaggatgtggggcgttatcaggtgtcctggagcctggaccacaagagcgcccacgcaggcacctatgaggttagattcttcgacgaggagtcctacagcctcctcaggaaggctcagaggaataacgaggacatttccatcatcccgcctctgtttacagtcagcgtggaccatcggggcacttggaacgggccctgggtgtccactgaggtgctggctgcggcgatcggccttgtgatctactacttggccttcagtgcgaagagccacatccaggcctgagggcggcaccccagccctgcccttgcttccttcaataaacatcacaggacctgggactgcacaggacctggggcccgggaaaaaacanacaccaaaaaataatagaagacaaaaaccagaacatacacaaactataatccaataaacaaaaaggggggggggccaaaaaatatcccccagggagggccacccaatacgcacacgccttttttgtaccacagggcccca

SEQ ID NO: 363889 - DNA, 869 bp, Homo sapiens
tgccacttacgcgtcgctcttcctcgtttgcccctcgtgttcatgggagctcgttttcttttcctctaggcagagaagaggcgatggcggcgatggcatctctcggcgccctggcgctgctcctgctgtccagcctctcccgctgctcagccgaggcctgcctggagccccagatcaccccttcctactacaccacttctgacgctgtcatttccactgagaccgtcttcattgtggagatctccctgacatgcaagaacagggtccagaacatggctctctatgctgacgtcggtggaaaacaattccctgtcactcgaggccaggatgtggggcgttatcaggtgtcctggagcctggaccacaagagcgcccacgcaggcacctatgaggttagattcttcgacgaggagtcctacagcctcctcaggaaggctcagaggaataacgaggacatttccatcatcccgcctctgtttacagtcagcgtggaccatcgggtgagtggcctggtccctcctcctttttggggttgttgggctgagtgaaggttatcctctccacagccccagctctgctgctgggccgtgattggccagcatgtcttggttcccctggcggaaggtgaccagggctggctggtctgctcacctgtactcccctgagctggcttgtgatctcctttttttcagggcacttggaacgggccctgggtgtccactgaggtgctggctgcggcgatcggccttgtgatctactacttggccttcagtgcgaagagccacatccaggcctgagggcggcaccccagccctgcccttgcttccttcaataaacatcacaggacctgggactgcacaggacctggg

SEQ ID NO: 363890 - DNA, 461 bp, Homo sapiens
gcggccgcctactactactactgctcgaattcaagcttctaacgatgtacgggaacatggctctctatgctgacgtcggtggaaaacaattccctgtcactcgaggccaggatgtggggcgttatcaggtgtcctggagcctggaccacaagagcgcccacgcaggcacctatgaggttagattcttcgacgaggagtcctacagcctcctcaggaaggctcagaggaataacgaggacatttccatcatcccgcctctgtttacagtcagcgtggaccatcggggcacttggaacgggccctgggtgtccactgaggtgctggctgcggcgatcggccttgtgatctactacttggccttcagtgcgaagagccacatccaggcctgagggcggcaccccagccctgcccttgcttccttcaataaacatcacaggacctgggactgcacaggacctggg

SEQ ID NO: 363891 - DNA, 630 bp, Homo sapiens
tgccacttacgcgtcgctcttcctcgtttgcccctcgtgttcatgggagctcgttttcttttcctctaggcagagaagaggcgatggcggcgatggcatctctcggcgccctggcgctgctcctgctgtccagcctctcccgctgctcagccgaggcctgcctggagccccagatcaccccttcctactacaccacttctgacgctgtcatttccactgagaccgtcttcattgtggagatctccctgacatgcaagaacagggtccagaacatggctctctatgctgacgtcggtggtgtcctggagcctggaccacaagagcgcccacgcaggcacctatgaggttagattcttcgacgaggagtcctacagcctcctcaggaaggctcagaggaataacgaggacatttccatcatcccgcctctgtttacagtcagcgtggaccatcggggcacttggaacgggccctgggtgtccactgaggtgctggctgcggcgatcggccttgtgatctactacttggccttcagtgcgaagagccacatccaggcctgagggcggcaccccagccctgcccttgcttccttcaataaacatcacaggacctgggactgcacaggacctggg

SEQ ID NO: 363892 - DNA, 1372 bp, Homo sapiens
tgccacttacgcgtcgctcttcctcgtttgcccctcgtgttcatgggagctcgttttcttttcctctaggcagagaagaggcgatggcggcgatggcatctctcggcgccctggcgctgctcctgctgtccagcctctcccgctgctcagggatctgcctcctgtggtccagacccagagccttctctgacgtcctctgctgaagccatcgttctgccagggcaccacatttggacagcgggtggctgagaacattcccactttggggagcctttgtttcacaccctctgatgtaggcggcagccttcctttcctttgggcctctggttatggagaaggctaaggcaaggtcctttctctcacagctaacaagttgtgcttctggaaccagagtctctcccgtttacttcttcaggaaacgctggggccagtcttcaccttctgtcaactggccgggggcagagaccctttctctcatcttgaaagccccagtgcattgcctgcctgcagcccccacccccgatgtctctgctgaggatgccttcagtaactcgtccaggccgtttgtggctctgaattgaggctggcgtggcccccgggcctccgtgtcataggtccaagtgttggcatgtattgtccagtgaatccagcccccacctgtccccagttcgctcttcctgcacacctccagaaagccggccttgcccctccccagccttccttcacagccatcccgcctacgttgccattgcatttgtgaccgagcacttggatctgtctcgcatatcccacctggaaggggcaggaggagcgcatgggtccccagctgatccgtgctatgaggcagggccgggccatcctgccctcagaccgggatactcgagctggcttacccaggcatctctccctcttccccgcagccgaggcctgcctggagccccagatcaccccttcctactacaccacttctgacgctgtcatttccactgagaccgtcttcattgtggagatctccctgacatgcaagaacagggtccaggtgtcctggagcctggaccacaagagcgcccacgcaggcacctatgaggttagattcttcgacgaggagtcctacagcctcctcaggaaggctcagaggaataacgaggacatttccatcatcccgcctctgtttacagtcagcgtggaccatcggggcacttggaacgggccctgggtgtccactgaggtgctggctgcggcgatcggccttgtgatctactacttggccttcagtgcgaagagccacatccaggcctgagggcggcaccccagccctgcccttgcttccttcaataaacatcacaggacctgggactgcacaggacctggg

SEQ ID NO: 363893 - DNA, 2325 bp, Homo sapiens
  misc_feature (2101)..(2102): n is a, c, g, or t
cctaggacctaaattaacctcttcttaaataagtgtaaggaaagaagactcggacctgaatacgcaagaccgcacacggagaagagcagaagcaaaacccccgcagcctcagaaaccctagctccttcccattccaggcgcctcgaggggaaggcatctggggctctaagactgggggactatgggggatgactggcaaagtccggttctttgccaccgggataggtggcaaagcggtccacgagagaggaaaccgtggagaaatttgagtcccggaaccggattcccgaagcggtttgagaaaggcgggccgggatacgtgagtgactgcctcagaagggctccttcaaggacactaaggaggtgacagccgccgtggcccactctcccggcccgtccggagggccccccgccacccgatgcagaccccctgggggagccggtccagggccaacttcggccaatcccctcagtgacagcggaggcgccaatcggactccagactgcttcgggtgcggctaccccaccgctcccctgcgaccgctgccgcggtcccgtggctctttccctgctcacctcccagggacggcagagaagggctggcccgagcaccgccttcgcggcgctgccggcgacggtcgctaccttcagcgccatgacggaaagtgagagcctccgcacgtcccgacacgcagataccgctctcgcgagagttcgacggggtgcgaagtttcggggacaggcgcggacccggtactgcgcacgcgcgcggtcgcaccgattcacgcccccttccggcgcctagagcaccgctgccgccatgttgagggggggaccgcgaccagctgggcccctggctcagggaggggccacgtcagtgctgccagagacgtcacaatgccggcccagccgttcgagagaagaggcgatggcggcgatggcatctctcggcgccctggcgctgctcctgctgtccagcctctcccgctgctcaggtagcggcccagccggggcttctttcttgcgagcctctgacccacggcaggtggtgttgggggcaggagggatgcgggggtccggcctttcagggtccgtcgctgcgggccgggccttcccccgagaggcaggcggccttgggacggggggaccaaagcacctcgcgcacgtttaccggcagccaggcttttccttgtctgcccatacgaagaggagtccccgagcctccatggtgcgcccggcccccaagctgcagcacggaacgtgacacatgtcccggctcccgctccctgcggggtcggaccggagcgaagctctgtagcgctgagcgatcgcggccaaaaacggggctggaggagccacataagctaggaagggacctcagtgaggagagggagcaagagcggggcgagttagatggggagccaaagccgaggcctgcctggagccccagatcaccccttcctactacaccacttctgacgctgtcatttccactgagaccgtcttcattgtggagatctccctgacatgcaagaacagggtccagaacatggctctctatgctgacgtcggtggaaaacaattccctgtcactcgaggccaggatgtggggcgttatcaggtgtcctggagcctggaccacaagagcgcccacgcaggcacctatgaggttagattcttcgacgaggagtcctacagcctcctcaggaaggctcagaggaataacgaggacatttccatcatcccgcctctgtttacagtcagcgtggaccatcggggcacttggaacgggccctgggtgtccactgaggtgctggctgcggcgatcggccttgtgatctactacttggccttcagtgcgaagagccacatccaggcctgagggcggcaccccagccctgcccttgcttccttcaataaacatcacaggacctgggactgcacaggacctgggaaaaaaaaaaaaaaaaaaaaaaaggggggggcctttttaaatttccctgggggggcccaaatttccccccccccccttttttttaaaaaaggggccccttttggggggggttttaaaaacgaggcccggccccggtttttaaaaccnngggacgggaaaaactttttttttgggatttttggaaagaacccttcttttgggggggggaataattgggaaaccctcctcaaaaagtttaaagcctttagggaaattaaaaattttgaagggtttattgggaaaactacctcttatccctctcggggggagagattcgctctccgggaattatatataaaaattttcaccaaggcacgagggatctacttttg

SEQ ID NO: 363894 - DNA, 648 bp, Homo sapiens
tgccacttacgcgtcgctcttcctcgtttgcccctcgtgttcatgggagctcgttttcttttcctctaggcagagaagaggcgatggcggcgatggcatctctcggcgccctggcgctgctcctgctgtccagcctctcccgctgctcagccgaggcctgcctggagccccagatcaccccttcctactacaccacttctgacgctgtcatttccactgagaccgtcttcattgtggagatctccctgacatgcaagaacagggtccaggtgtcctggagcctggaccacaagagcgcccacgcaggcacctatgaggttagattcttcgacgaggagtcctacagcctcctcaggaaggctcagaggaataacgaggacatttccatcatcccgcctctgtttacagtcagcgtggaccatcggggcacttggaacgggccctgggtgtccactgaggtgctggctgcggcgatcggccttgtgatctactacttggccttcagtgcgaagagccacatccaggcctgagggcggcaccccagccctgcccttgcttccttcaataaacatcacaggacctgggactgcacaggacctgggaaaaaaaaaaagtggtgggtttttttttttttttttttttttttta

SEQ ID NO: 363895 - DNA, 1827 bp, Homo sapiens
cctaggacctaaattaacctcttcttaaataagtgtaaggaaagaagactcggacctgaatacgcaagaccgcacacggagaagagcagaagcaaaacccccgcagcctcagaaaccctagctccttcccattccaggcgcctcgaggggaaggcatctggggctctaagactgggggactatgggggatgactggcaaagtccggttctttgccaccgggataggtggcaaagcggtccacgagagaggaaaccgtggagaaatttgagtcccggaaccggattcccgaagcggtttgagaaaggcgggccgggatacgtgagtgactgcctcagaagggctccttcaaggacactaaggaggtgacagccgccgtggcccactctcccggcccgtccggagggccccccgccacccgatgcagaccccctgggggagccggtccagggccaacttcggccaatcccctcagtgacagcggaggcgccaatcggactccagactgcttcgggtgcggctaccccaccgctcccctgcgaccgctgccgcggtcccgtggctctttccctgctcacctcccagggacggcagagaagggctggcccgagcaccgccttcgcggcgctgccggcgacggtcgctaccttcagcgccatgacggaaagtgagagcctccgcacgtcccgacacgcagataccgctctcgcgagagttcgacggggtgcgaagtttcggggacaggcgcggacccggtactgcgcacgcgcgcggtcgcaccgattcacgcccccttccggcgcctagagcaccgctgccgccatgttgagggggggaccgcgaccagctgggcccctggctcagggaggggccacgtcagtgctgccagagacgtcacaatgccggcccagccgttcgagagaagaggcgatggcggcgatggcatctctcggcgccctggcgctgctcctgctgtccagcctctcccgctgctcaggtagcggcccagccggggcttctttcttgcgagcctctgacccacggcaggtggtgttgggggcaggagggatgcgggggtccggcctttcagggtccgtcgctgcgggccgggccttcccccgagaggcaggcggccttgggacggggggaccaaagcacctcgcgcacgtttaccggcagccaggcttttccttgtctgcccatacgaagaggagtccccgagcctccatggtgcgcccggcccccaagctgcagcacggaacgtgacacatgtcccggctcccgctccctgcggggtcggaccggagcgaagctctgtagcgctgagcgatcgcggccaaaaacggggctggaggagccacataagctaggaagggacctcagtgaggagagggagcaagagcggggcgagttagatggggagccaaaggtgcgcagggccttgagtgccaggccgaagactggcttttccggagggccctgccttacccttaccagagttttcggcagagccgaccaggggtcccgtcgatttgcattcgtgaggggctgaggtctgaactccagagtgtgtttaggaggtggctgcagcagccagccccgggcccgggggccaggactggacaggggcggctttctccacattcccttttctgccgtccttcaggccagtagccttgctgcctgcaacgttttggcagcctaactggcctccctttccgcacactcctcatctgcccctcaggaattccctgaactatagtcagggacgtatccagaggacaagcctggccataaaacccttcgggggctcccctgcgccacaggaa

SEQ ID NO: 363896 - DNA, 762 bp, Homo sapiens
gccacgcagtggctcagtgtgggagcatggcctagaggtcaaacctcttacccatcagggccaggtgctggctggcagctgcttcagatggtttccagcccacctaggacctaaattaacctcttcttaaataagtgtaaggaaagaagactcggacctgaatacgcaagaccgcacacggagaagagcagaagcaaaacccccgcagcctcagaaaccctagctccttcccattccaggcgcctcgaggggaaggcatctggggctctaagactgggggactatgggggatgactggcaaagtccggttctttgccaccgggataggtggcaaagcggtccacgagagaggaaaccgtggagaaatttgagtcccggaaccggattcccgaagcggtttgagaaaggcgggccgggatacgtgagtgactgcctcagaagggctccttcaaggacactaaggaggtgacagccgccgtggcccactctcccggcccgtccggagggccccccgccacccgatgcagaccccctgggggagccggtccagggccaacttcggccaatcccctcagtgacagcggaggcggccaatcaaccccggcgcgaagccctttccccgcccctggtggggcccctagccaatcggactccagactgcttcgggtgcggctaccccaccgctcccctgcgaccgctgccgcggtcccgtggctctttccctgctcacctcccagggacggcagagaagggctggcccga

SEQ ID NO: 363897 - DNA, 677 bp, Homo sapiens
tgccacttacgcgtcgctcttcctcgtttgcccctcgtgttcatgggagctcgttttcttttcctctaggcagagaagaggcgatggcggcgatggcatctctcggcgccctggcgctgctcctgctgtccagcctctcccgctgctcagccgaggcctgcctggagccccagatcaccccttcctactacaccacttctgacgctgtcatttccactgagaccgtcttcattgtggagatctccctgacatgcaagaacagggtccagaacatggctctctatgctgacgtcggtggaaaacaattccctgtcactcgaggccaggatgtggggcgttatcaggtgtcctggagcctggaccacaagagcgcccacgcaggcacctatgaggttagattcttcgacgaggagtcctacagcctcctcaggaaggctcagaggaataacgaggacatttccatcatcccgcctctgtttacagtcagcgtggaccatcggggcacttggaacgggccctgggtgtccactgaggtgctggctgcggcgatcggccttgtgatctactacttggccttcagtgcgaagagccacatccaggcctgagggcggcaccccagccctgcccttgcttccttcaataaacatcacaggacctgggactgcacaggacctggg

SEQ ID NO: 363898 - DNA, 435 bp, Homo sapiens
ccgtgggctctggctgccggagtgctgcagtgtcggcactggtggtcagggtggcccctccgtgtccactctgcccacactctgctcaacacccaacccagggtgtcctggagcctggaccacaagagcgcccacgcaggcacctatgaggttagattcttcgacgaggagtcctacagcctcctcaggaaggctcagaggaataacgaggacatttccatcatcccgcctctgtttacagtcagcgtggaccatcggggcacttggaacgggccctgggtgtccactgaggtgctggctgcggcgatcggccttgtgatctactacttggccttcagtgcgaagagccacatccaggcctgagggcggcaccccagccctgcccttgcttccttcaataaacatcacaggacctgggactgcacaggacctggg

SEQ ID NO: 363899 - DNA, 1271 bp, Homo sapiens
cctaggacctaaattaacctcttcttaaataagtgtaaggaaagaagactcggacctgaatacgcaagaccgcacacggagaagagcagaagcaaaacccccgcagcctcagaaaccctagctccttcccattccaggcgcctcgaggggaaggcatctggggctctaagactgggggactatgggggatgactggcaaagtccggttctttgccaccgggataggtggcaaagcggtccacgagagaggaaaccgtggagaaatttgagtcccggaaccggattcccgaagcggtttgagaaaggcgggccgggatacgtgagtgactgcctcagaagggctccttcaaggacactaaggaggtgacagccgccgtggcccactctcccggcccgtccggagggccccccgccacccgatgcagaccccctgggggagccggtccagggccaacttcggccaatcccctcagtgacagcggaggcgccaatcggactccagactgcttcgggtgcggctaccccaccgctcccctgcgaccgctgccgcggtcccgtggctctttccctgctcacctcccagggacggcagagaagggctggcccgagcaccgccttcgcggcgctgccggcgacggtcgctaccttcagcgccatgacggaaaagagaagaggcgatggcggcgatggcatctctcggcgccctggcgctgctcctgctgtccagcctctcccgctgctcagccgaggcctgcctggagccccagatcaccccttcctactacaccacttctgacgctgtcatttccactgagaccgtcttcattgtggagatctccctgacatgcaagaacagggtccagaacatggctctctatgctgacgtcggtggaaaacaattccctgtcactcgaggccaggatgtggggcgttatcaggtgtcctggagcctggaccacaagagcgcccacgcaggcacctatgaggttagattcttcgacgaggagtcctacagcctcctcaggaaggctcagaggaataacgaggacatttccatcatcccgcctctgtttacagtcagcgtggaccatcggggcacttggaacgggccctgggtgtccactgaggtgctggctgcggcgatcggccttgtgatctactacttggccttcagtgcgaagagccacatccaggcctgagggcggcaccccagccctgcccttgcttccttcaataaacatcacaggacctgggactgcacaggacctggg

SEQ ID NO: 363900 - DNA, 1447 bp, Homo sapiens
tgccacttacgcgtcgctcttcctcgtttgcccctcgtgttcatgggagctcgttttcttttcctctaggcagagaagaggcgatggcggcgatggcatctctcggcgccctggcgctgctcctgctgtccagcctctcccgctgctcagggatctgcctcctgtggtccagacccagagccttctctgacgtcctctgctgaagccatcgttctgccagggcaccacatttggacagcgggtggctgagaacattcccactttggggagcctttgtttcacaccctctgatgtaggcggcagccttcctttcctttgggcctctggttatggagaaggctaaggcaaggtcctttctctcacagctaacaagttgtgcttctggaaccagagtctctcccgtttacttcttcaggaaacgctggggccagtcttcaccttctgtcaactggccgggggcagagaccctttctctcatcttgaaagccccagtgcattgcctgcctgcagcccccacccccgatgtctctgctgaggatgccttcagtaactcgtccaggccgtttgtggctctgaattgaggctggcgtggcccccgggcctccgtgtcataggtccaagtgttggcatgtattgtccagtgaatccagcccccacctgtccccagttcgctcttcctgcacacctccagaaagccggccttgcccctccccagccttccttcacagccatcccgcctacgttgccattgcatttgtgaccgagcacttggatctgtctcgcatatcccacctggaaggggcaggaggagcgcatgggtccccagctgatccgtgctatgaggcagggccgggccatcctgccctcagaccgggatactcgagctggcttacccaggcatctctccctcttccccgcagccgaggcctgcctggagccccagatcaccccttcctactacaccacttctgacgctgtcatttccactgagaccgtcttcattgtggagatctccctgacatgcaagaacagggtccagaacatggctctctatgctgacgtcggtggaaaacaattccctgtcactcgaggccaggatgtggggcgttatcaggtgtcctggagcctggaccacaagagcgcccacgcaggcacctatgaggttagattcttcgacgaggagtcctacagcctcctcaggaaggctcagaggaataacgaggacatttccatcatcccgcctctgtttacagtcagcgtggaccatcggggcacttggaacgggccctgggtgtccactgaggtgctggctgcggcgatcggccttgtgatctactacttggccttcagtgcgaagagccacatccaggcctgagggcggcaccccagccctgcccttgcttccttcaataaacatcacaggacctgggactgcacaggacctggg

SEQ ID NO: 363901 - DNA, 2292 bp, Homo sapiens
cctaggacctaaattaacctcttcttaaataagtgtaaggaaagaagactcggacctgaatacgcaagaccgcacacggagaagagcagaagcaaaacccccgcagcctcagaaaccctagctccttcccattccaggcgcctcgaggggaaggcatctggggctctaagactgggggactatgggggatgactggcaaagtccggttctttgccaccgggataggtggcaaagcggtccacgagagaggaaaccgtggagaaatttgagtcccggaaccggattcccgaagcggtttgagaaaggcgggccgggatacgtgagtgactgcctcagaagggctccttcaaggacactaaggaggtgacagccgccgtggcccactctcccggcccgtccggagggccccccgccacccgatgcagaccccctgggggagccggtccagggccaacttcggccaatcccctcagtgacagcggaggcgccaatcggactccagactgcttcgggtgcggctaccccaccgctcccctgcgaccgctgccgcggtcccgtggctctttccctgctcacctcccagggacggcagagaagggctggcccgagcaccgccttcgcggcgctgccggcgacggtcgctaccttcagcgccatgacggaaagtgagagcctccgcacgtcccgacacgcagataccgctctcgcgagagttcgacggggtgcgaagtttcggggacaggcgcggacccggtactgcgcacgcgcgcggtcgcaccgattcacgcccccttccggcgcctagagcaccgctgccgccatgttgagggggggaccgcgaccagctgggcccctggctcagggaggggccacgtcagtgctgccagagacgtcacaatgccggcccagccgttcgagagaagaggcgatggcggcgatggcatctctcggcgccctggcgctgctcctgctgtccagcctctcccgctgctcagggatctgcctcctgtggtccagacccagagccttctctgacgtcctctgctgaagccatcgttctgccagggcaccacatttggacagcgggtggctgagaacattcccactttggggagcctttgtttcacaccctctgatgtaggcggcagccttcctttcctttgggcctctggttatggagaaggctaaggcaaggtcctttctctcacagctaacaagttgtgcttctggaaccagagtctctcccgtttacttcttcaggaaacgctggggccagtcttcaccttctgtcaactggccgggggcagagaccctttctctcatcttgaaagccccagtgcattgcctgcctgcagcccccacccccgatgtctctgctgaggatgccttcagtaactcgtccaggccgtttgtggctctgaattgaggctggcgtggcccccgggcctccgtgtcataggtccaagtgttggcatgtattgtccagtgaatccagcccccacctgtccccagttcgctcttcctgcacacctccagaaagccggccttgcccctccccagccttccttcacagccatcccgcctacgttgccattgcatttgtgaccgagcacttggatctgtctcgcatatcccacctggaaggggcaggaggagcgcatgggtccccagctgatccgtgctatgaggcagggccgggccatcctgccctcagaccgggatactcgagctggcttacccaggcatctctccctcttccccgcagccgaggcctgcctggagccccagatcaccccttcctactacaccacttctgacgctgtcatttccactgagaccgtcttcattgtggagatctccctgacatgcaagaacagggtccagaacatggctctctatgctgacgtcggtggaaaacaattccctgtcactcgaggccaggatgtggggcgttatcaggtgtcctggagcctggaccacaagagcgcccacgcaggcacctatgaggttagattcttcgacgaggagtcctacagcctcctcaggaaggctcagaggaataacgaggacatttccatcatcccgcctctgtttacagtcagcgtggaccatcggggcacttggaacgggccctgggtgtccactgaggtgctggctgcggcgatcggccttgtgatctactacttggccttcagtgcgaagagccacatccaggcctgagggcggcaccccagccctgcccttgcttccttcaataaacatcacaggacctgggactgcacaggacctggg

SEQ ID NO: 363902 - DNA, 2449 bp, Homo sapiens
cctaggacctaaattaacctcttcttaaataagtgtaaggaaagaagactcggacctgaatacgcaagaccgcacacggagaagagcagaagcaaaacccccgcagcctcagaaaccctagctccttcccattccaggcgcctcgaggggaaggcatctggggctctaagactgggggactatgggggatgactggcaaagtccggttctttgccaccgggataggtggcaaagcggtccacgagagaggaaaccgtggagaaatttgagtcccggaaccggattcccgaagcggtttgagaaaggcgggccgggatacgtgagtgactgcctcagaagggctccttcaaggacactaaggaggtgacagccgccgtggcccactctcccggcccgtccggagggccccccgccacccgatgcagaccccctgggggagccggtccagggccaacttcggccaatcccctcagtgacagcggaggcgccaatcggactccagactgcttcgggtgcggctaccccaccgctcccctgcgaccgctgccgcggtcccgtggctctttccctgctcacctcccagggacggcagagaagggctggcccgagcaccgccttcgcggcgctgccggcgacggtcgctaccttcagcgccatgacggaaagtgagagcctccgcacgtcccgacacgcagataccgctctcgcgagagttcgacggggtgcgaagtttcggggacaggcgcggacccggtactgcgcacgcgcgcggtcgcaccgattcacgcccccttccggcgcctagagcaccgctgccgccatgttgagggggggaccgcgaccagctgggcccctggctcagggaggggccacgtcagtgctgccagagacgtcacaatgccggcccagccgttcgagagaagaggcgatggcggcgatggcatctctcggcgccctggcgctgctcctgctgtccagcctctcccgctgctcaggtagcggcccagccggggcttctttcttgcgagcctctgacccacggcaggtggtgttgggggcaggagggatgcgggggtccggcctttcagggtccgtcgctgcgggccgggccttcccccgagaggcaggcggccttgggacggggggaccaaagcacctcgcgcacgtttaccggcagccaggcttttccttgtctgcccatacgaagaggagtccccgagcctccatggtgcgcccggcccccaagctgcagcacggaacgtgacacatgtcccggctcccgctccctgcggggtcggaccggagcgaagctctgtagcgctgagcgatcgcggccaaaaacggggctggaggagccacataagctaggaagggacctcagtgaggagagggagcaagagcggggcgagttagatggggagccaaaggtgcgcagggccttgagtgccaggccgaagactggcttttccggagggccctgccttacccttaccagagttttcggcagagccgaccaggggtcccgtcgatttgcattcgtgaggggctgaggtctgaactccagagtgtgtttaggaggtggctgcagcagccagccccgggcctccgtgtcataggtccaagtgttggcatgtattgtccagtgaatccagcccccacctgtccccagttcgctcttcctgcacacctccagaaagccggccttgcccctccccagccttccttcacagccatcccgcctacgttgccattgcatttgtgaccgagcacttggatctgtctcgcatatcccacctggaaggggcaggaggagcgcatgggtccccagctgatccgtgctatgaggcagggccgggccatcctgccctcagaccgggatactcgagctggcttacccaggcatctctccctcttccccgcagccgaggcctgcctggagccccagatcaccccttcctactacaccacttctgacgctgtcatttccactgagaccgtcttcattgtggagatctccctgacatgcaagaacagggtccagaacatggctctctatgctgacgtcggtggaaaacaattccctgtcactcgaggccaggatgtggggcgttatcaggtgtcctggagcctggaccacaagagcgcccacgcaggcacctatgaggttagattcttcgacgaggagtcctacagcctcctcaggaaggctcagaggaataacgaggacatttccatcatcccgcctctgtttacagtcagcgtggaccatcggggcacttggaacgggccctgggtgtccactgaggtgctggctgcggcgatcggccttgtgatctactacttggccttcagtgcgaagagccacatccaggcctgagggcggcaccccagccctgcccttgcttccttcaataaacatcacaggacctgggactgcacaggacctggg

SEQ ID NO: 363903 - DNA, 1992 bp, Homo sapiens
cctaggacctaaattaacctcttcttaaataagtgtaaggaaagaagactcggacctgaatacgcaagaccgcacacggagaagagcagaagcaaaacccccgcagcctcagaaaccctagctccttcccattccaggcgcctcgaggggaaggcatctggggctctaagactgggggactatgggggatgactggcaaagtccggttctttgccaccgggataggtggcaaagcggtccacgagagaggaaaccgtggagaaatttgagtcccggaaccggattcccgaagcggtttgagaaaggcgggccgggatacgtgagtgactgcctcagaagggctccttcaaggacactaaggaggtgacagccgccgtggcccactctcccggcccgtccggagggccccccgccacccgatgcagaccccctgggggagccggtccagggccaacttcggccaatcccctcagtgacagcggaggcgccaatcggactccagactgcttcgggtgcggctaccccaccgctcccctgcgaccgctgccgcggtcccgtggctctttccctgctcacctcccagggacggcagagaagggctggcccgagcaccgccttcgcggcgctgccggcgacggtcgctaccttcagcgccatgacggaaagtgagagcctccgcacgtcccgacacgcagataccgctctcgcgagagttcgacggggtgcgaagtttcggggacaggcgcggacccggtactgcgcacgcgcgcggtcgcaccgattcacgcccccttccggcgcctagagcaccgctgccgccatgttgagggggggaccgcgaccagctgggcccctggctcagggaggggccacgtcagtgctgccagagacgtcacaatgccggcccagccgttcgagagaagaggcgatggcggcgatggcatctctcggcgccctggcgctgctcctgctgtccagcctctcccgctgctcagggatctgcctcctgtggtccagacccagagccttctctgacgtcctctgctgaagccatcgttctgccagggcaccacatttggacagcgggtggctgagaacattcccactttggggagcctttgtttcacaccctctgatgtaggcggcagccttcctttcctttgggcctctggttatggagaaggctaaggcaaggtcctttctctcacagctaacaagttgtgcttctggaaccagagtctctcccgtttacttcttcaggaaacgctggggccagtcttcaccttctgtcaactggccgggggcagagaccctttctctcatcttgaaagccccagtgcattgcctgcctgcagcccccacccccgatgtctctgctgaggatgccttcagtaactcgtccaggccgtttgtggctctgaattgaggctggcgtggcccccgggcctccgtgtcataggtccaaccgaggcctgcctggagccccagatcaccccttcctactacaccacttctgacgctgtcatttccactgagaccgtcttcattgtggagatctccctgacatgcaagaacagggtccagaacatggctctctatgctgacgtcggtggaaaacaattccctgtcactcgaggccaggatgtggggcgttatcaggtgtcctggagcctggaccacaagagcgcccacgcaggcacctatgaggttagattcttcgacgaggagtcctacagcctcctcaggaaggctcagaggaataacgaggacatttccatcatcccgcctctgtttacagtcagcgtggaccatcggggcacttggaacgggccctgggtgtccactgaggtgctggctgcggcgatcggccttgtgatctactacttggccttcagtgcgaagagccacatccaggcctgagggcggcaccccagccctgcccttgcttccttcaataaacatcacaggacctgggactgcacaggacctggg

SEQ ID NO: 363904 - DNA, 1664 bp, Homo sapiens
cctaggacctaaattaacctcttcttaaataagtgtaaggaaagaagactcggacctgaatacgcaagaccgcacacggagaagagcagaagcaaaacccccgcagcctcagaaaccctagctccttcccattccaggcgcctcgaggggaaggcatctggggctctaagactgggggactatgggggatgactggcaaagtccggttctttgccaccgggataggtggcaaagcggtccacgagagaggaaaccgtggagaaatttgagtcccggaaccggattcccgaagcggtttgagaaaggcgggccgggatacgtgagtgactgcctcagaagggctccttcaaggacactaaggaggtgacagccgccgtggcccactctcccggcccgtccggagggccccccgccacccgatgcagaccccctgggggagccggtccagggccaacttcggccaatcccctcagtgacagcggaggcgccaatcggactccagactgcttcgggtgcggctaccccaccgctcccctgcgaccgctgccgcggtcccgtggctctttccctgctcacctcccagggacggcagagaagggctggcccgagcaccgccttcgcggcgctgccggcgacggtcgctaccttcagcgccatgacggaaagtgagagcctccgcacgtcccgacacgcagataccgctctcgcgagagttcgacggggtgcgaagtttcggggacaggcgcggacccggtactgcgcacgcgcgcggtcgcaccgattcacgcccccttccggcgcctagagcaccgctgccgccatgttgagggggggaccgcgaccagctgggcccctggctcagggaggggccacgtcagtgctgccagagacgtcacaatgccggcccagccgttcgagagaagaggcgatggcggcgatggcatctctcggcgccctggcgctgctcctgctgtccagcctctcccgctgctcagggatctgcctcctgtggtccagacccagagccttctctgacgtcctctgctgaagccatcgttctgccagggcaccacatttggacagcgggtggctgagaacattcccactttggggagcctttgtttcacaccctctgatccgaggcctgcctggagccccagatcaccccttcctactacaccacttctgacgctgtcatttccactgagaccgtcttcattgtggagatctccctgacatgcaagaacagggtccagaacatggctctctatgctgacgtcggtggaaaacaattccctgtcactcgaggccaggatgtggggcgttatcaggtgtcctggagcctggaccacaagagcgcccacgcaggcacctatgaggttagattcttcgacgaggagtcctacagcctcctcaggaaggctcagaggaataacgaggacatttccatcatcccgcctctgtttacagtcagcgtggaccatcggggcacttggaacgggccctgggtgtccactgaggtgctggctgcggcgatcggccttgtgatctactacttggccttcagtgcgaagagccacatccaggcctgagggcggcaccccagccctgcccttgcttccttcaataaacatcacaggacctgggactgcacaggacctggg

SEQ ID NO: 363905 - DNA, 723 bp, Homo sapiens
tgccacttacgcgtcgctcttcctcgtttgcccctcgtgttcatgggagctcgttttcttttcctctaggcagagaagaggcgatggcggcgatggcatctctcggcgccctggcgctgctcctgctgtccagcctctcccgctgctcagccgaggcctgcctggagccccagatcaccccttcctactacaccacttctgacgctgtcatttccactgagaccgtcttcattgtggagatctccctgacatgcaagaacagggtccagaacatggctctctatgctgacgtcggtggaaaacaattccctgtcactcgaggccaggatgtggggcgttatcaggtgtcctggagcctggaccacaagagcgcccacgcaggcacctatgaggttagattcttcgacgaggagtcctacagcctcctcaggaaggctcagaggaataacgaggacatttccatcatcccgcctctgtttacagtcagcgtggaccatcggggcacttggaacgggccctgggtgtccactgaggtgctggctgcggcgatcggccttgtgatctactacttggccttcagtgcgaagagccacatccaggcctgagggcggcaccccagccctgcccttgcttccttcaataaacatcacaggacctgggactgcacaggacctgggaaaaaaaaaaagtggtgggtttttttttttttttttttttttttta

SEQ ID NO: 363906 - DNA, 424 bp, Homo sapiens
cgggatactcgagctggcttacccaggcatctctccctcttccccgcagccgaggcctgcctggagccccagatcaccccttcctactacaccacttctgacgctgtcatttccactgagaccgtcttcattgtggagatctccctgacatgcaagaacagggtccaggtgagacagtggggtttcagacaggagggcgggtggggggtgctcctcactgctagttgatgggggacctgtgtcgatagagggagaatcaagattccaactcttggggtgccggagagatcagggcacggtgatgccagatcctagccagtgttgacaggtcaccttcctcacctgctttgtgtgctgtgcctacacgaggtaaccctgggctcaccacccgctgtttcctgaatgagtatctggaccgggagaa

SEQ ID NO: 363907 - DNA, 456 bp, Homo sapiens
tcccctcttgctgtctttgtgatttgataattttttatggttatatactcggattcttttccctttcttgtatctgctgaagattttttctttgtagttactgtgaagcttgcataaccctccttagaattgtaccagtctattttgagctgataacttcaatcacatacaaaaactacacttttactctcccattccccagtttgttattgatgtcagaatttgctttttatgttgtgtatccattaaccaatattttgtggttatattcttaatacttttgtcttttatgctggggttaaaagtgatttatgcaccaccattacaatattacattattctgtatttgtctatgtatttacccttagcagtgagatttatactttcatatgcttttgtgttgctatttagcaagaagctgatttttttattaatacaaattatgtacttttttca

SEQ ID NO: 363908 - DNA, 1058 bp, Homo sapiens
ggcatgatctcagctcaccgcaacctctgcctcccaggttcaagcgattctccttcctcagcctcccgagtagctgggattacaggcgtgcaccaccatgcctggccagttttgtatttttagtagagacagatttctctatgttggtcaggctggtctcaaactcccgacctcaagggatccacccaccttggcctcccaaagtgctgggattacaggtgtaagctgccgtgcccagcctatttttttttaacttcaaatactattattttaaatttatgttcattatgtaattcagggagtaacgatgcctggagcaatttctgaaatattctcaaaccacttcactcttgacactacagatttttctctcagtctcaatcagaatctctgcagtcattatttgtttttaagatgtgagggacgaggaaaattactgaagaaattctagcagatttcgattgcagagaaatttggtaacactttttgggtaactgggtaaattactatttcttttaataatcgggtgaaactctgaattgttaaaacggaccaataatcaaatggttttataatctttcttaacttcccgtccttgttataacatcttggaagaagactcttcaggataaaaaggatattatttgattaaaaattatagcatttggagaggtaacacacaaaaacaaaaacatatttgacaaagcgccctacatcctgtgttttgttaggactagaaactatactggatgagtatgtatactgcatgtttacacatgctgtgtttctttatatgtgaggcttcactgaccaccgtgcattttgaaattgtattgcattttgtgtgtgtgtgtggtgacaggtttgctcttctcacttaaggagctctggtctgtgtaggcagtacagtgttgttagggaggttgctgaattatctaaaaatgtatccatgaatttgggggaaataatgcttaatatctgaagtattttcagtaaatgtggagatatatcagataatacttttaaattagtggaaacacatttctgagtgaactgag

SEQ ID NO: 363909 - DNA, 454 bp, Homo sapiens
tgtagctgtactgcagcaagctttactaattcctttgagccctgcacaacatttttaaatggttccaaacacacaggatctctaattggtatggatttcatccacagttttcttgcaatctcaaaatgtctcggcaactcctaagcaggaattgacaggggccagcttccctatttccctttgtgaaggcagctattaataatattttttcaggttcaataaaattactgaactcaaaccatttcaaccaaaaacctggagagggagattttattttccctggcctgaacactgtctcttgctactttaaatcacagttaatgtttttaaaaatacatcttacacagaagtcagttgtagacctttagcatcaaaggacctgagctacatcacatgtaacagcctgatctttagccataatttctaagtgccattaaaaaatgtctctcaaaat

SEQ ID NO: 363910 - DNA, 800 bp, Homo sapiens
cggaaacgggcgtgccatttccgcgcacgtctgcagatgcggtagtcgattggtcaagtctcccatgggctcctccttcatcaggaggtgggcaaaccgcgccatgatagggtcgggattggctggctctggaggcgcaggtggtccttcttctactgtcacatggtgcgcgctgttttctaatcacgtggctgccacccaggcctctctgctcctgtcttttgtttggatgccggcgctgctgcctgtggcctcccgccttttgttgctaccccgagtcttgctgaccatggcctctggaagccctccgacccagccctcgccggcctcggattccggctctggctacgttccgggctcggtctctgcagcctttgttacttgccccaacgagaaggtcgccaaggagatcgccagggccgtggtggagaagcgcctagcagcctgcgtcaacctcatccctcagattacatccatctatgagtggaaagggaagatcgaggaagacagtgaggtgctgatgatgattaaaacccaaagttccttggtcccagctttgacagattttgttcgttctgtgcacccttacgaagtggccgaggtaattgcattgcctgtggaacaggggaactttccgtacctgcagtgggtgcgccaggtcacagagtcagtttctgactctatcacagtcctgccatgatgagccctgttcctgctcatcatgaagatccccgcgatacttcaacgccttctgacttccaggtgatgactgggcccccaataaatcccgtctttgggtc

SEQ ID NO: 363911 - DNA, 860 bp, Homo sapiens
cggaaacgggcgtgccatttccgcgcacgtctgcagatgcggtagtcgattggtcaagtctcccatgggctcctccttcatcaggaggtgggcaaaccgcgccatgatagggtcgggattggctggctctggaggcgcaggtggtccttcttctactgtcacatggtgcgcgctgttttctaatcacgtggctgccacccaggcctctctgctcctgtcttttgtttggatgccggcgctgctgcctgtggcctcccgccttttgttgctaccccgagtcttgctgaccatggcctctggaagccctccgacccagccctcgccggcctcggattccggctctggctacgttccgggctcggtctctgcagcctttgttacttgccccaacgagaaggtcgccaaggagatcgccagggccgtggtggagaagcgcctagcagcctgcgtcaacctcatccctcagattacatccatctatgagtggaaagggaagatcgaggaagacagtgaggtgctgatgatgattaaaacccaaagttccttggtcccagctttgacagattttgttcgttctgtgcacccttacgaagtggccgaggtaattgcattgcctgtggaacaggggaactttccgtacctgcagtgggtgcgccaggtcacagagtcagtttctgactctatcacagtcctgccatgatgagccctgttcctgctcatcatgaagatccccgcgatacttcaacgccttctgacttccaggtgatgactgggcccccaataaatcccgtctttgggtcacaaaaaacaacaaacaacacaaaaaaaacaacaaaaaagggggggccgcaaaaaaaccc

SEQ ID NO: 363912 - DNA, 138 bp, Homo sapiens
gcggccgcctactactactactactgctcgaattcaagcttctaacgatgtacggggacatgaagatccccgcgatacttcaacgccttctgacttccaggtgatgactgggcccccaataaatcccgtctttgggtc

SEQ ID NO: 363913 - DNA, 1198 bp, Homo sapiens
cggaaacgggcgtgccatttccgcgcacgtctgcagatgcggtagtcgattggtcaagtctcccatgggctcctccttcatcaggaggtgggcaaaccgcgccatgatagggtcgggattggctggctctggaggcgcaggtggtccttcttctactgtcacatggtgcgcgctgttttctaatcacgtggctgccacccagtacccaggtaagaagaggccgctcttcctggggttgtttctccgtgtgacgtgtggcctttgagatcaactctcctgtaccagcgtaggccgcatgagtggggggcgggctcccgcggtcctgctcggcggagtggtgagtgaccggccccgccccgccccttccggtcctcgaagcctcgaccgctacccgcaccctaaatcccagaggttggccccctgaggtgtgagtgaaatgagcttttgctttattttccaagtttctctctcaccttcaggggcattcttcgggggtgcatcagagggagggcagagcctgaggatctaagcgaaggcttccccgggtgtaatttcctgggctgtttgtgaggagagatcgaattcgcctcctgctctcaggcctctctgctcctgtcttttgtttggatgccggcgctgctgcctgtggcctcccgccttttgttgctaccccgagtcttgctgaccatggcctctggaagccctccgacccagccctcgccggcctcggattccggctctggctacgttccgggctcggtctctgcagcctttgttacttgccccaacgagaaggtcgccaaggagatcgccagggccgtggtggagaagcgcctagcagcctgcgtcaacctcatccctcagattacatccatctatgagtggaaagggaagatcgaggaagacagtgaggtgctgatgatgattaaaacccaaagttccttggtcccagctttgacagattttgttcgttctgtgcacccttacgaagtggccgaggtaattgcattgcctgtggaacaggggaactttccgtacctgcagtgggtgcgccaggtcacagagtcagtttctgactctatcacagtcctgccatgatgagccctgttcctgctcatcatgaagatccccgcgatacttcaacgccttctgacttccaggtgatgactgggcccccaataaatcccgtctttgggtc

SEQ ID NO: 363914 - DNA, 1028 bp, Homo sapiens
cggaaacgggcgtgccatttccgcgcacgtctgcagatgcggtagtcgattggtcaagtctcccatgggctcctccttcatcaggaggtgggcaaaccgcgccatgatagggtcgggattggctggctctggaggcgcaggtggtccttcttctactgtcacatggtgcgcgctgttttctaatcacgtggctgccacccagtacccaggtaagaagaggccgctcttcctggggttgtttctccgtgtgacgtgtggcctttgagatcaactctcctgtaccagcgtaggccgcatgagtggggggcgggctcccgcggtcctgctcggcggagtggtgagtgaccggccccgccccgccccttccggtcctcgaagcctcgaccgctacccgcaccctaaatcccagaggttggccccctgaggtgtggcctctctgctcctgtcttttgtttggatgccggcgctgctgcctgtggcctcccgccttttgttgctaccccgagtcttgctgaccatggcctctggaagccctccgacccagccctcgccggcctcggattccggctctggctacgttccgggctcggtctctgcagcctttgttacttgccccaacgagaaggtcgccaaggagatcgccagggccgtggtggagaagcgcctagcagcctgcgtcaacctcatccctcagattacatccatctatgagtggaaagggaagatcgaggaagacagtgaggtgctgatgatgattaaaacccaaagttccttggtcccagctttgacagattttgttcgttctgtgcacccttacgaagtggccgaggtaattgcattgcctgtggaacaggggaactttccgtacctgcagtgggtgcgccaggtcacagagtcagtttctgactctatcacagtcctgccatgatgagccctgttcctgctcatcatgaagatccccgcgatacttcaacgccttctgacttccaggtgatgactgggcccccaataaatcccgtctttgggtc

SEQ ID NO: 363915 - DNA, 1056 bp, Homo sapiens
cggaaacgggcgtgccatttccgcgcacgtctgcagatgcggtagtcgattggtcaagtctcccatgggctcctccttcatcaggaggtgggcaaaccgcgccatgatagggtcgggattggctggctctggaggcgcaggtggtccttcttctactgtcacatggtgcgcgctgttttctaatcacgtggctgccacccagtacccaggtaagaagaggccgctcttcctggggttgtttctccgtgtgacgtgtggcctttgagatcaactctcctgtaccagcgtaggccgcatgagtggggggcgggctcccgcggtcctgctcggcggagtggggcattcttcgggggtgcatcagagggagggcagagcctgaggatctaagcgaaggcttccccgggtgtaatttcctgggctgtttgtgaggagagatcgaattcgcctcctgctctcaggcctctctgctcctgtcttttgtttggatgccggcgctgctgcctgtggcctcccgccttttgttgctaccccgagtcttgctgaccatggcctctggaagccctccgacccagccctcgccggcctcggattccggctctggctacgttccgggctcggtctctgcagcctttgttacttgccccaacgagaaggtcgccaaggagatcgccagggccgtggtggagaagcgcctagcagcctgcgtcaacctcatccctcagattacatccatctatgagtggaaagggaagatcgaggaagacagtgaggtgctgatgatgattaaaacccaaagttccttggtcccagctttgacagattttgttcgttctgtgcacccttacgaagtggccgaggtaattgcattgcctgtggaacaggggaactttccgtacctgcagtgggtgcgccaggtcacagagtcagtttctgactctatcacagtcctgccatgatgagccctgttcctgctcatcatgaagatccccgcgatacttcaacgccttctgacttccaggtgatgactgggcccccaataaatcccgtctttgggtc

SEQ ID NO: 363916 - DNA, 788 bp, Homo sapiens
aaccccttgggtttttttcgtgtcggcgatgttgacgctcggatactgctatttctctctcaccttcaggggcattcttcgggggtgcatcagagggagggcagagcctgaggatctaagcgaaggcttccccgggtgtaatttcctgggctgtttgtgaggagagatcgaattcgcctcctgctctcaggcctctctgctcctgtcttttgtttggatgccggcgctgctgcctgtggcctcccgccttttgttgctaccccgagtcttgctgaccatggcctctggaagccctccgacccagccctcgccggcctcggattccggctctggctacgttccgggctcggtctctgcagcctttgttacttgccccaacgagaaggtcgccaaggagatcgccagggccgtggtggagaagcgcctagcagcctgcgtcaacctcatccctcagattacatccatctatgagtggaaagggaagatcgaggaagacagtgaggtgctgatgatgattaaaacccaaagttccttggtcccagctttgacagattttgttcgttctgtgcacccttacgaagtggccgaggtaattgcattgcctgtggaacaggggaactttccgtacctgcagtgggtgcgccaggtcacagagtcagtttctgactctatcacagtcctgccatgatgagccctgttcctgctcatcatgaagatccccgcgatacttcaacgccttctgacttccaggtgatgactgggcccccaataaatcccgtctttgggtc

SEQ ID NO: 363917 - DNA, 965 bp, Homo sapiens
cggaaacgggcgtgccatttccgcgcacgtctgcagatgcggtagtcgattggtcaagtctcccatgggctcctccttcatcaggaggtgggcaaaccgcgccatgatagggtcgggattggctggctctggaggcgcaggtggtccttcttctactgtcacatggtgcgcgctgttttctaatcacgtggctgccacccagtacccaggtaagaagaggccgctcttcctggggttgtttctccgtgtgacgtgtggcctttgagatcaactctcctgtaccagcgtaggccgcatgagtggggggcgggctcccgcggtcctgctcggcggagtggcctctctgctcctgtcttttgtttggatgccggcgctgctgcctgtggcctcccgccttttgttgctaccccgagtcttgctgaccatggcctctggaagccctccgacccagccctcgccggcctcggattccggctctggctacgttccgggctcggtctctgcagcctttgttacttgccccaacgagaaggtcgccaaggagatcgccagggccgtggtggagaagcgcctagcagcctgcgtcaacctcatccctcagattacatccatctatgagtggaaagggaagatcgaggaagacagtgaggtgctgatgatgattaaaacccaaagttccttggtcccagctttgacagattttgttcgttctgtgcacccttacgaagtggccgaggtaattgcattgcctgtggaacaggggaactttccgtacctgcagtgggtgcgccaggtcacagagtcagtttctgactctatcacagtcctgccatgatgagccctgttcctgctcatcatgaagatccccgcgatacttcaacgccttctgacttccaggtgatgactgggcccccaataaatcccgtctttgggtcaaaaaaaaagtcgacgcggccgcgaattta

SEQ ID NO: 363918 - DNA, 1337 bp, Homo sapiens
cggaaacgggcgtgccatttccgcgcacgtctgcagatgcggtagtcgattggtcaagtctcccatgggctcctccttcatcaggaggtgggcaaaccgcgccatgatagggtcgggattggctggctctggaggcgcaggtggtccttcttctactgtcacatggtgcgcgctgttttctaatcacgtggctgccacccagtacccaggtaagaagaggccgctcttcctggggttgtttctccgtgtgacgtgtggcctttgagatcaactctcctgtaccagcgtaggccgcatgagtggggggcgggctcccgcggtcctgctcggcggagtggcctctctgctcctgtcttttgtttggatgccggcgctgctgcctgtggcctcccgccttttgttgctaccccgagtcttgctgaccatggcctctggaagccctccgacccagccctcgccggcctcggattccggctctggctacgttccgggctcggtctctgcagcctttgttacttgccccaacgagaaggtcgccaaggagatcgccagggccgtggtggagaagcgcctagcagcctgcgtcaacctcatccctcagattacatccatctatgagtggaaagggaagatcgaggaagacagtgaggtgctgatgatgattaaaacccaaagttccttggtcccagctttgacagattttgttcgttctgtgcacccttacgaagtggccgaggtaattgcattgcctgtggaacaggggaactttccgtacctgcagtgggtgcgccaggtcacagagtcagtttctgactctatcacagtcctgccatgatgagccctgttcctgctcatcatgaagatccccgcgatacttcaacgccttctgacttccaggtgatgactgggcccccaataaatcccgtctttgggtcaaaaaacaaaaacacacaaaataaaaacaaaaacatcacagagacagcaacaccgcacaaaaaaaaagagaataaacgcaccagaaacagtagttcacagcctcacgcaccccgcggcgcccccttcaaccacacacagacgtccgaacgctgcagtatccacgaccgcaggcgcagcgccccgaccgccttacccacaggacgcacacacgccaaagtacgacccccgccaccaatcacgcgcaagggtaacgacccgacgcaccaccacccgtctcgatagacacactcaccgcgcaaaacaatcctagcttgaacccgcccgtagctgtttatcgcgaaacccgcgtcctatgggtagtcacgcccaccacaacagcccacacatcgcggcccagcaga

SEQ ID NO: 363919 - DNA, 1132 bp, Homo sapiens
  misc_feature (1104)..(1104): n is a, c, g, or t
cggaaacgggcgtgccatttccgcgcacgtctgcagatgcggtagtcgattggtcaagtctcccatgggctcctccttcatcaggaggtgggcaaaccgcgccatgatagggtcgggattggctggctctggaggcgcaggtggtccttcttctactgtcacatggtgcgcgctgttttctaatcacgtggctgccacccagtacccaggtaagaagaggccgctcttcctggggttgtttctccgtgtgacgtgtggcctttgagatcaactctcctgtaccagcgtaggccgcatgagtggggggcgggctcccgcggtcctgctcggcggagtggcctctctgctcctgtcttttgtttggatgccggcgctgctgcctgtggcctcccgccttttgttgctaccccgagtcttgctgaccatggcctctggaagccctccgacccagccctcgccggcctcggattccggctctggctacgttccgggctcggtctctgcagcctttgttacttgccccaacgagaaggtcgccaaggagatcgccagggccgtggtggagaagcgcctagcagcctgcgtcaacctcatccctcagattacatccatctatgagtggaaagggaagatcgaggaagacagtgaggtgctgatgatgattaaaacccaaagttccttggtcccagctttgacagattttgttcgttctgtgcacccttacgaagtggccgaggtaattgcattgcctgtggaacaggggaactttccgtacctgcagtgggtgcgccaggtcacagagtcagtttctgactctatcacagtcctgccatgatgagccctgttcctgctcatcatgaagatccccgcgatacttcaacgccttctgacttccaggtgatgactgggcccccaataaatcccgtctttgggtcaaaaacataatatttatttcaaaaaatccctttataatctacatcttttaatgactaaagaaaaaaactcgagggggggccccggtacccatttcgaccctattatgagtcgtattacaaatcaactgcccgcctttttaccacctccttgacctggtaaaaccctggncgttacccaaccttaaatcccttgcaac

SEQ ID NO: 363920 - DNA, 845 bp, Homo sapiens
cggaaacgggcgtgccatttccgcgcacgtctgcagatgcggtagtcgattggtcaagtctcccatgggctcctccttcatcaggaggtgggcaaaccgcgccatgatagggtcgggattggctggctctggaggcgcaggtggtccttcttctactgtcacatggtgcgcgctgttttctaatcacgtggctgccacccagtacccaggtaagaagaggccgctcttcctggggttgtttctccgtgtgacgtgtggcctttgagatcaactctcctgtaccagcgtaggccgcatgagtggggggcgggctcccgcggtcctgctcggcggagtggcctctctgctcctgtcttttgtttggatgccggcgctgctgcctgtggcctcccgccttttgttgtcggtctctgcagcctttgttacttgccccaacgagaaggtcgccaaggagatcgccagggccgtggtggagaagcgcctagcagcctgcgtcaacctcatccctcagattacatccatctatgagtggaaagggaagatcgaggaagacagtgaggtgctgatgatgattaaaacccaaagttccttggtcccagctttgacagattttgttcgttctgtgcacccttacgaagtggccgaggtaattgcattgcctgtggaacaggggaactttccgtacctgcagtgggtgcgccaggtcacagagtcagtttctgactctatcacagtcctgccatgatgagccctgttcctgctcatcatgaagatccccgcgatacttcaacgccttctgacttccaggtgatgactgggcccccaataaatcccgtctttgggtc

SEQ ID NO: 363921 - DNA, 1368 bp, Homo sapiens
cggaaacgggcgtgccatttccgcgcacgtctgcagatgcggtagtcgattggtcaagtctcccatgggctcctccttcatcaggaggtgggcaaaccgcgccatgatagggtcgggattggctggctctggaggcgcaggtggtccttcttctactgtcacatggtgcgcgctgttttctaatcacgtggctgccacccagtacccaggtaagaagaggccgctcttcctggggttgtttctccgtgtgacgtgtggcctttgagatcaactctcctgtaccagcgtaggccgcatgagtggggggcgggctcccgcggtcctgctcggcggagtggtgagtgaccggccccgccccgccccttccggtcctcgaagcctcgaccgctacccgcaccctaaatcccagaggttggccccctgaggtgtgagtgaaatgagcttttgctttattttccaagtttctctctcaccttcaggggcattcttcgggggtgcatcagagggagggcagagcctgaggatctaagcgaaggcttccccgggtgtaatttcctgggctgtttgtgaggagagatcgaattcgcctcctgctctcaggcctctctgctcctgtcttttgtttggatgccggcgctgctgcctgtggcctcccgccttttgttgctaccccgagtcttgctgaccatggcctctggaagccctccgacccagccctcgccggcctcggattccggctctggctacgttccgggctcggtctctgcagcctttgttacttgccccaacgagaaggtcgccaaggagatcgccaggtagggacctcgatgtgcagcgagaaaggatgatcatgaagggacagttgggggtggggcagaagagtgctgctttctcctttctccagctctggaagcctgtctctgggctgccagtacaaaaactggggttatggggtactctgaatgggactgtctcttcactccagggccgtggtggagaagcgcctagcagcctgcgtcaacctcatccctcagattacatccatctatgagtggaaagggaagatcgaggaagacagtgaggtgctgatgatgattaaaacccaaagttccttggtcccagctttgacagattttgttcgttctgtgcacccttacgaagtggccgaggtaattgcattgcctgtggaacaggggaactttccgtacctgcagtgggtgcgccaggtcacagagtcagtttctgactctatcacagtcctgccatgatgagccctgttcctgctcatcatgaagatccccgcgatacttcaacgccttctgacttccaggtgatgactgggcccccaataaatcccgtctttgggtc

SEQ ID NO: 363922 - DNA, 1476 bp, Homo sapiens
cggaaacgggcgtgccatttccgcgcacgtctgcagatgcggtagtcgattggtcaagtctcccatgggctcctccttcatcaggaggtgggcaaaccgcgccatgatagggtcgggattggctggctctggaggcgcaggtggtccttcttctactgtcacatggtgcgcgctgttttctaatcacgtggctgccacccagtacccaggtaagaagaggccgctcttcctggggttgtttctccgtgtgacgtgtggcctttgagatcaactctcctgtaccagcgtaggccgcatgagtggggggcgggctcccgcggtcctgctcggcggagtggtgagtgaccggccccgccccgccccttccggtcctcgaagcctcgaccgctacccgcaccctaaatcccagaggttggccccctgaggtgtgagtgaaatgagcttttgctttattttccaagtttctctctcaccttcaggggcattcttcgggggtgcatcagagggagggcagagcctgaggatctaagcgaaggcttccccgggtgtaatttcctgggctgtttgtgaggagagatcgaattcgcctcctgctctcaggcctctctgctcctgtcttttgtttggatgccggcgctgctgcctgtggcctcccgccttttgttgctaccccgagtcttgctgaccatggcctctggaagccctccgacccagccctcgccggcctcggattccggctctggctacgttccgggctcggtctctgcagcctttgttacttgccccaacgagaaggtcgccaaggagatcgccaggtagggacctcgatgtgcagcgagaaaggatgatcatgaagggacagttgggggtggggcagaagagtgctgctttctcctttctccagctctggaagcctgtctctgggctgccagtacaaaaactggggttatggggtactctgaatgggactgtctcttcactccagggccgtggtggagaagcgcctagcagcctgcgtcaacctcatccctcagattacatccatgtgagtcataggagttggggggttaacctaactgtaggagctgactgggaacctctttcctgggggaaattctttgctccccacaactctccccctctgacctttcagctatgagtggaaagggaagatcgaggaagacagtgaggtgctgatgatgattaaaacccaaagttccttggtcccagctttgacagattttgttcgttctgtgcacccttacgaagtggccgaggtaattgcattgcctgtggaacaggggaactttccgtacctgcagtgggtgcgccaggtcacagagtcagtttctgactctatcacagtcctgccatgatgagccctgttcctgctcatcatgaagatccccgcgatacttcaacgccttctgacttccaggtgatgactgggcccccaataaatcccgtctttgggtc

SEQ ID NO: 363923 - DNA, 1306 bp, Homo sapiens
cggaaacgggcgtgccatttccgcgcacgtctgcagatgcggtagtcgattggtcaagtctcccatgggctcctccttcatcaggaggtgggcaaaccgcgccatgatagggtcgggattggctggctctggaggcgcaggtggtccttcttctactgtcacatggtgcgcgctgttttctaatcacgtggctgccacccagtacccaggtaagaagaggccgctcttcctggggttgtttctccgtgtgacgtgtggcctttgagatcaactctcctgtaccagcgtaggccgcatgagtggggggcgggctcccgcggtcctgctcggcggagtggtgagtgaccggccccgccccgccccttccggtcctcgaagcctcgaccgctacccgcaccctaaatcccagaggttggccccctgaggtgtgagtgaaatgagcttttgctttattttccaagtttctctctcaccttcaggggcattcttcgggggtgcatcagagggagggcagagcctgaggatctaagcgaaggcttccccgggtgtaatttcctgggctgtttgtgaggagagatcgaattcgcctcctgctctcaggcctctctgctcctgtcttttgtttggatgccggcgctgctgcctgtggcctcccgccttttgttgctaccccgagtcttgctgaccatggcctctggaagccctccgacccagccctcgccggcctcggattccggctctggctacgttccgggctcggtctctgcagcctttgttacttgccccaacgagaaggtcgccaaggagatcgccagggccgtggtggagaagcgcctagcagcctgcgtcaacctcatccctcagattacatccatgtgagtcataggagttggggggttaacctaactgtaggagctgactgggaacctctttcctgggggaaattctttgctccccacaactctccccctctgacctttcagctatgagtggaaagggaagatcgaggaagacagtgaggtgctgatgatgattaaaacccaaagttccttggtcccagctttgacagattttgttcgttctgtgcacccttacgaagtggccgaggtaattgcattgcctgtggaacaggggaactttccgtacctgcagtgggtgcgccaggtcacagagtcagtttctgactctatcacagtcctgccatgatgagccctgttcctgctcatcatgaagatccccgcgatacttcaacgccttctgacttccaggtgatgactgggcccccaataaatcccgtctttgggtc

SEQ ID NO: 363924 - DNA, 1148 bp, Homo sapiens
cggaaacgggcgtgccatttccgcgcacgtctgcagatgcggtagtcgattggtcaagtctcccatgggctcctccttcatcaggaggtgggcaaaccgcgccatgatagggtcgggattggctggctctggaggcgcaggtggtccttcttctactgtcacatggtgcgcgctgttttctaatcacgtggctgccacccagtacccaggtaagaagaggccgctcttcctggggttgtttctccgtgtgacgtgtggcctttgagatcaactctcctgtaccagcgtaggccgcatgagtggggggcgggctcccgcggtcctgctcggcggagtggtgagtgaccggccccgccccgccccttccggtcctcgaagcctcgaccgctacccgcaccctaaatcccagaggttggccccctgaggtgtgagtgaaatgagcttttgctttattttccaagtttctctctcaccttcaggggcattcttcgggggtgcatcagagggagggcagagcctgaggatctaagcgaaggcttccccgggtgtaatttcctgggctgtttgtgaggagagatcgaattcgcctcctgctctcaggcctctctgctcctgtcttttgtttggatgccggcgctgctgcctgtggcctcccgccttttgttgctaccccgagtcttgctgaccatggcctctggaagccctccgacccagccctcgccggcctcggattccggctctggctacgttccgggctcggtctctgcagcctttgttacttgccccaacgagaaggtcgccaaggagatcgccagggccgtggtggagaagcgcctagcagcctgcgtcaacctcatccctcagattacatccatctatgagtggaaagggaagatcgaggaagacagtgaggtgctgatgttctgtgcacccttacgaagtggccgaggtaattgcattgcctgtggaacaggggaactttccgtacctgcagtgggtgcgccaggtcacagagtcagtttctgactctatcacagtcctgccatgatgagccctgttcctgctcatcatgaagatccccgcgatacttcaacgccttctgacttccaggtgatgactgggcccccaataaatcccgtctttgggtc

SEQ ID NO: 363925 - DNA, 885 bp, Homo sapiens
cggaaacgggcgtgccatttccgcgcacgtctgcagatgcggtagtcgattggtcaagtctcccatgggctcctccttcatcaggaggtgggcaaaccgcgccatgatagggtcgggattggctggctctggaggcgcaggtggtccttcttctactgtcacatggtgcgcgctgttttctaatcacgtggctgccacccagtacccaggtaagaagaggccgctcttcctggggttgtttctccgtgtgacgtgtggcctttgagatcaactctcctgtaccagcgtaggccgcatgagtggggggcgggctcccgcggtcctgctcggcggagtggcctctctgctcctgtcttttgtttggatgccggcgctgctgcctgtggcctcccgccttttgttgctaccccgagtcttgctgaccatggcctctggaagccctccgacccagccctcgccggcctcggattccggctctggctacgttccgggctcggtctctgcagcctttgttacttgccccaacgagaaggtcgccaaggagatcgccagggccgtggtggagaagcgcctagcagcctgcgtcaacctcatccctcagattacatccatctatgagtggaaagggaagatcgaggaagacagtgaggtgctgatgttctgtgcacccttacgaagtggccgaggtaattgcattgcctgtggaacaggggaactttccgtacctgcagtgggtgcgccaggtcacagagtcagtttctgactctatcacagtcctgccatgatgagccctgttcctgctcatcatgaagatccccgcgatacttcaacgccttctgacttccaggtgatgactgggcccccaataaatcccgtctttgggtc

SEQ ID NO: 363926 - DNA, 1095 bp, Homo sapiens
cggaaacgggcgtgccatttccgcgcacgtctgcagatgcggtagtcgattggtcaagtctcccatgggctcctccttcatcaggaggtgggcaaaccgcgccatgatagggtcgggattggctggctctggaggcgcaggtggtccttcttctactgtcacatggtgcgcgctgttttctaatcacgtggctgccacccagtacccaggtaagaagaggccgctcttcctggggttgtttctccgtgtgacgtgtggcctttgagatcaactctcctgtaccagcgtaggccgcatgagtggggggcgggctcccgcggtcctgctcggcggagtggggcattcttcgggggtgcatcagagggagggcagagcctgaggatctaagcgaaggcttccccgggtgtaatttcctgggctgtttgtgaggagagatcgaattcgcctcctgctctcaggcctctctgctcctgtcttttgtttggatgccggcgctgctgcctgtggcctcccgccttttgttgctaccccgagtcttgctgaccatggcctctggaagccctccgacccagccctcgccggcctcggattccggctctggctacgttccgggctcggtctctgcagcctttgttacttgccccaacgagaaggtcgccaaggagatcgccagggccgtggtggagaagcgcctagcagcctgcgtcaacctcatccctcagattacatccatctatgagtggaaagggaagatcgaggaagacagtgaggtgctgatgatgattaaaacccaaagttccttggtcccagctttgacagattttgttcgttctgtgcacccttacgaagtggccgagtcctgccatgatgagccctgttcctgctcatcatgaagatccccgcgatacttcaacgccttctgacttccaggtgatgactgggcccccaataaatcccgtctttgggtcaaaaaaacaatacaaaacataatacaaaaacacctccgggacctataaagccggggggcggacaaaaacggttaaaaagggccggggtacaggggttccgacccgctttttggacaagtgggcactc

SEQ ID NO: 363927 - DNA, 1108 bp, Homo sapiens
  misc_feature (884)..(884): n is a, c, g, or t
cggaaacgggcgtgccatttccgcgcacgtctgcagatgcggtagtcgattggtcaagtctcccatgggctcctccttcatcaggaggtgggcaaaccgcgccatgatagggtcgggattggctggctctggaggcgcaggtggtccttcttctactgtcacatggtgcgcgctgttttctaatcacgtggctgccacccagtacccaggtaagaagaggccgctcttcctggggttgtttctccgtgtgacgtgtggcctttgagatcaactctcctgtaccagcgtaggccgcatgagtggggggcgggctcccgcggtcctgctcggcggagtggtgagtgaccggccccgccccgccccttccggtcctcgaagcctcgaccgctacccgcaccctaaatcccagaggttggccccctgaggtgtgagtgaaatgagcttttgctttattttccaagtttctctctcaccttcaggggcattcttcgggggtgcatcagagggagggcagagcctgaggatctaagcgaaggcttccccgggtgtaatttcctgggctgtttgtgaggagagatcgaattcgcctcctgctctcaggcctctctgctcctgtcttttgtttggatgccggcgctgctgcctgtggcctcccgccttttgttgtcggtctctgcagcctttgttacttgccccaacgagaaggtcgccaaggagatcgccagggccgtggtggagaagcgcctagcagcctgcgtcaacctcatccctcagattacatccatctatgagtggaaagggaagatcgaggaagacagtgaggtgctgatgatgattaaaacccaaagttccttggtcccagctttgacagattttgttcgtcngtgcacccttcgaaagggcccagggtaatgcaatggctgttgaaccagggaacctttcggaacttccattggttgcgcaaggtccaaaagcaagtttttgattcaatacaattctggcaataataagcctggttcttgttaataataaggatccccggaatatttcaaggctttttgatttcagagggaaggattgggccccccaataatccctgttttggggt

SEQ ID NO: 363928 - DNA, 788 bp, Homo sapiens
aatcgtgaagatggtgcgtctctactactgacacggtgctgcgcgcctggtgttctaatcatctgtcatgccggccgcgtctgtcagaatcactttcctctgtgacttgcgagtgctcggacgttctagctgcacatggagagcactctctggcacatgtttgcgtggccttgccttccgaagtgtgtcacttgactacacttgttcgtactgagagaagcactgcgcgtatcccaacgacgcactgcttccggggtcggcgggtacacgctgtgctcttgcacaacgatagcgcgcgtgtctcagatgtcatgtaacgacctgtggaataatttgtatcctagcatgaaggtatcagggtccggagatcagccctggacggccatgaactatcccggcacatacactctgcatgcagttcaaacctacaatcactctcatggataccgtcacgatctattgagttgaaagatatgggaataatctgaggaaagacagtgaggtgctgatgatgattaaaacccaaagttccttggtcccagctttgacagattttgttcgttctgtgcacccttacgaagtggccgaggtaattgcattgcctgtggaacaggggaactttccgtacctgcagtgggtgcgccaggtcacagagtcagtttctgactctatcacagtcctgccatgatgagccctgttcctgctcatcatgaagatccccgcgatacttcaacgccttctgacttccaggtgatgactgggcccccaataaatcccgtctttgggtc

SEQ ID NO: 363929 - DNA, 935 bp, Homo sapiens
cggaaacgggcgtgccatttccgcgcacgtctgcagatgcggtagtcgattggtcaagtctcccatgggctcctccttcatcaggaggtgggcaaaccgcgccatgatagggtcgggattggctggctctggaggcgcaggtggtccttcttctactgtcacatggtgcgcgctgttttctaatcacgtggctgccacccagtacccaggtaagaagaggccgctcttcctggggttgtttctccgtgtgacgtgtggcctttgagatcaactctcctgtaccagcgtaggccgcatgagtggggggcgggctcccgcggtcctgctcggcggagtggcctctctgctcctgtcttttgtttggatgccggcgctgctgcctgtggcctcccgccttttgttgctaccccgagtcttgctgaccatggcctctggaagccctccgacccagccctcgccggcctcggattccggctctggctacgttccgggctcggtctctgcagcctttgttacttgccccaacgagaaggtcgccaaggagatcgccagggccgtggtggagaagcgcctagcagcctgcgtcaacctcatccctcagattacatccatctatgagtggaaagggaagatcgaggaagacagtgaggtgctgatgatgattaaaacccaaagttccttggtcccagctttgacagattttgttcgttctgtgcacccttacgaagtggccgaggtaattgcattgcctgtggaacaggggaactttccgtacctgcagtgggtgcgccaggtcacagagtcagtttctgactctatcacagtcctgccatgatgagccctgttcctgctcatcatgaagatccccgcgatacttcaacgccttctgacttccaggtgatgactgggcccccaataaatcccgtctttgggtc

SEQ ID NO: 363930 - DNA, 974 bp, Homo sapiens
  misc_feature (956)..(956): n is a, c, g, or t
  misc_feature (971)..(971): n is a, c, g, or t
cggaaacgggcgtgccatttccgcgcacgtctgcagatgcggtagtcgattggtcaagtctcccatgggctcctccttcatcaggaggtgggcaaaccgcgccatgatagggtcgggattggctggctctggaggcgcaggtggtccttcttctactgtcacatggtgcgcgctgttttctaatcacgtggctgccacccagtacccaggtaagaagaggccgctcttcctggggttgtttctccgtgtgacgtgtggcctttgagatcaactctcctgtaccagcgtaggccgcatgagtggggggcgggctcccgcggtcctgctcggcggagtggcctctctgctcctgtcttttgtttggatgccggcgctgctgcctgtggcctcccgccttttgttgctaccccgagtcttgctgaccatggcctctggaagccctccgacccagccctcgccggcctcggattccggctctggctacgttccgggctcggtctctgcagcctttgttacttgccccaacgagaaggtcgccaaggagatcgccagggccgtggtggagaagcgcctagcagcctgcgtcaacctcatccctcagattacatccatctatgagtggaaagggaagatcgaggaagacagtgaggtgctgatgatgattaaaacccaaagttccttggtcccagctttgacagattttgttcgttctgtgcacccttacgaagtggccgaggtaattgcattgcctgtggaacaggggaactttccgtacctgcagtgggtgcgccaggtcacagagtcagtttctgactctatcacagtcctgccatgatgagccctgttcctgctcatcatgaagatccccgcgatacttcaacgccttctgacttccaggtgatgactgggcccccaataaatcccgtctttgggtcaaaaaaaaaaaaaaaaccggncttttgggggaaaanaaa

SEQ ID NO: 363931 - DNA, 1307 bp, Homo sapiens
cggaaacgggcgtgccatttccgcgcacgtctgcagatgcggtagtcgattggtcaagtctcccatgggctcctccttcatcaggaggtgggcaaaccgcgccatgatagggtcgggattggctggctctggaggcgcaggtggtccttcttctactgtcacatggtgcgcgctgttttctaatcacgtggctgccacccagtacccaggtaagaagaggccgctcttcctggggttgtttctccgtgtgacgtgtggcctttgagatcaactctcctgtaccagcgtaggccgcatgagtggggggcgggctcccgcggtcctgctcggcggagtggtgagtgaccggccccgccccgccccttccggtcctcgaagcctcgaccgctacccgcaccctaaatcccagaggttggccccctgaggtgtgagtgaaatgagcttttgctttattttccaagtttctctctcaccttcaggggcattcttcgggggtgcatcagagggagggcagagcctgaggatctaagcgaaggcttccccgggtgtaatttcctgggctgtttgtgaggagagatcgaattcgcctcctgctctcaggcctctctgctcctgtcttttgtttggatgccggcgctgctgcctgtggcctcccgccttttgttgctaccccgagtcttgctgaccatggcctctggaagccctccgacccagccctcgccggcctcggattccggctctggctacgttccgggctcggtctctgcagcctttgttacttgccccaacgagaaggtcgccaaggagatcgccagggccgtggtggagaagcgcctagcagcctgcgtcaacctcatccctcagattacatccatctatgagtggaaagggaagatcgaggaagacagtgaggtgctgatgatgattaaaacccaaagttccttggtcccagctttgacagattttgttcgttctgtgcacccttacgaagtggccgaggtaattgcattgcctgtggaacaggggaactttccgtacctgcagtgggtgcgccaggtcacagagtcagtttctgactctatcacagtcctgccatgatgagccctgttcctgctcatcatgaagatccccgcgatacttcaacgccttctgacttccaggtgatgactgggcccccaataaatcccgtctttgggtcctctctgccttttgcctgttttttgtcatgtatgcaaatttgttgggagaatataagtgcttctagtccctgtattctctacatctttcagaatgactcagagctgcta

SEQ ID NO: 363932 - DNA, 1264 bp, Homo sapiens
cggaaacgggcgtgccatttccgcgcacgtctgcagatgcggtagtcgattggtcaagtctcccatgggctcctccttcatcaggaggtgggcaaaccgcgccatgatagggtcgggattggctggctctggaggcgcaggtggtccttcttctactgtcacatggtgcgcgctgttttctaatcacgtggctgccacccagtacccaggtaagaagaggccgctcttcctggggttgtttctccgtgtgacgtgtggcctttgagatcaactctcctgtaccagcgtaggccgcatgagtggggggcgggctcccgcggtcctgctcggcggagtggtgagtgaccggccccgccccgccccttccggtcctcgaagcctcgaccgctacccgcaccctaaatcccagaggttggccccctgaggtgtgtttgtgaggagagatcgaattcgcctcctgctctcaggcctctcctgtaccagcgtaggccgccatgagtggggggcgggctcccgcggtcctgctcggcggagtggtgagtgaccggccccgccccgcccttccggtcctcgaagcctcgaccgtacccgcacctaaatcccagaggttggacccctgaggtgtgagtgtggtgaggagagatcgaattcgcctcctgctctcaggcctctctgctcctgtcttttgtttggatgccggcgctgctgcctgtggcctcccgccttttgttgctaccccgagtcttgctgaccatggcctctggaagccctccgacccagccctcgccggcctcggattccggctctggctacgttccgggctcggtctctgcagcctttgttacttgccccaacgagaaggtcgccaaggagatcgccagggccgtggtggagaagcgcctagcagcctgcgtcaacctcatccctcagattacatccatctatgagtggaaagggaagatcgaggaagacagtgaggtgctgatgatgattaaaacccaaagttccttggtcccagctttgacagattttgttcgttctgtgcacccttacgaagtggccgaggtaattgcattgcctgtggaacaggggaactttccgtacctgcagtgggtgcgccaggtcacagagtcagtttctgactctatcacagtcctgccatgatgagccctgttcctgctcatcatgaagatccccgcgatacttcaacgccttctgacttccaggtgatgactgggcccccaataaatcccgtctttgggtc

SEQ ID NO: 363933 - DNA, 995 bp, Homo sapiens
  misc_feature (947)..(947): n is a, c, g, or t
  misc_feature (954)..(954): n is a, c, g, or t
  misc_feature (977)..(977): n is a, c, g, or t
  misc_feature (992)..(992): n is a, c, g, or t
cggaaacgggcgtgccatttccgcgcacgtctgcagatgcggtagtcgattggtcaagtctcccatgggctcctccttcatcaggaggtgggcaaaccgcgccatgatagggtcgggattggctggctctggaggcgcaggtggtccttcttctactgtcacatggtgcgcgctgttttctaatcacgtggctgccacccagtacccaggtaagaagaggccgctcttcctggggttgtttctccgtgtgacgtgtggcctttgagatcaactctcctgtaccagcgtaggccgcatgagtggggggcgggctcccgcggtcctgctcggcggagtggcctctctgctcctgtcttttgtttggatgccggcgctgctgcctgtggcctcccgccttttgttgctaccccgagtcttgctgaccatggcctctggaagccctccgacccagccctcgccggcctcggattccggctctggctacgttccgggctcggtctctgcagcctttgttacttgccccaacgagaaggtcgccaaggagatcgccagggccgtggtggagaagcgcctagcagcctgcgtcaacctcatccctcagattacatccatctatgagtggaaagggaagatcgaggaagacagtgaggtgctgatgatgattaaaacccaaagttccttggtcccagctttgacagattttgttcgttctgtgcacccttacgaagtggccgaggtaattgcattgcctgtggaacaggggaactttccgtacctgcagtgggtgcgccaggtcacagagtcagtttctgactctatcacagtcctgccatgatgagccctgttcctgctcatcatgaagatccccgcgatacttcaacgccttctgacttccaggtgatgactgggcccccaataaatcccgtctttgggtcaaacaaaaacanaccaaanaaaaaaaaaaaaaaaaaaccggncttttgggggaaaanaaa

SEQ ID NO: 363934 - DNA, 995 bp, Homo sapiens
cggaaacgggcgtgccatttccgcgcacgtctgcagatgcggtagtcgattggtcaagtctcccatgggctcctccttcatcaggaggtgggcaaaccgcgccatgatagggtcgggattggctggctctggaggcgcaggtggtccttcttctactgtcacatggtgcgcgctgttttctaatcacgtggctgccacccagtacccaggtaagaagaggccgctcttcctggggttgtttctccgtgtgacgtgtggcctttgagatcaactctcctgtaccagcgtaggccgcatgagtggggggcgggctcccgcggtcctgctcggcggagtggcctctctgctcctgtcttttgtttggatgccggcgctgctgcctgtggcctcccgccttttgttgctaccccgagtcttgctgaccatggcctctggaagccctccgacccagccctcgccggcctcggattccggctctggctacgttccgggctcggtctctgcagcctttgttacttgccccaacgagaaggtcgccaaggagatcgccagggccgtggtggagaagcgcctagcagcctgcgtcaacctcatccctcagattacatccatctatgagtggaaagggaagatcgaggaagacagtgaggtgctgatgatgattaaaacccaaagttccttggtcccagctttgacagattttgttcgttctgtgcacccttacgaagtggccgaggtaattgcattgcctgtggaacaggggaactttccgtacctgcagtgggtgcgccaggtcacagagtcagtttctgactctatcacagtcctgccatgatgagccctgttcctgctcatcatgaagatccccgcgatacttcaacgccttctgacttccaggtgatgactgggcccccaataaatcccgtctttgggtcacaaaaaacaacaaacaacacaaaaaaaacaacaaaaaagggggggccgcaaaaaaaccc

SEQ ID NO: 363935 - DNA, 1088 bp, Homo sapiens
  misc_feature (1040)..(1040): n is a, c, g, or t
  misc_feature (1047)..(1047): n is a, c, g, or t
  misc_feature (1070)..(1070): n is a, c, g, or t
  misc_feature (1085)..(1085): n is a, c, g, or t
cggaaacgggcgtgccatttccgcgcacgtctgcagatgcggtagtcgattggtcaagtctcccatgggctcctccttcatcaggaggtgggcaaaccgcgccatgatagggtcgggattggctggctctggaggcgcaggtggtccttcttctactgtcacatggtgcgcgctgttttctaatcacgtggctgccacccagtacccaggtaagaagaggccgctcttcctggggttgtttctccgtgtgacgtgtggcctttgagatcaactctcctgtaccagcgtaggccgcatgagtggggggcgggctcccgcggtcctgctcggcggagtggtgagtgaccggccccgccccgccccttccggtcctcgaagcctcgaccgctacccgcaccctaaatcccagaggttggccccctgaggtgtggcctctctgctcctgtcttttgtttggatgccggcgctgctgcctgtggcctcccgccttttgttgctaccccgagtcttgctgaccatggcctctggaagccctccgacccagccctcgccggcctcggattccggctctggctacgttccgggctcggtctctgcagcctttgttacttgccccaacgagaaggtcgccaaggagatcgccagggccgtggtggagaagcgcctagcagcctgcgtcaacctcatccctcagattacatccatctatgagtggaaagggaagatcgaggaagacagtgaggtgctgatgatgattaaaacccaaagttccttggtcccagctttgacagattttgttcgttctgtgcacccttacgaagtggccgaggtaattgcattgcctgtggaacaggggaactttccgtacctgcagtgggtgcgccaggtcacagagtcagtttctgactctatcacagtcctgccatgatgagccctgttcctgctcatcatgaagatccccgcgatacttcaacgccttctgacttccaggtgatgactgggcccccaataaatcccgtctttgggtcaaacaaaaacanaccaaanaaaaaaaaaaaaaaaaaaccggncttttgggggaaaanaaa

SEQ ID NO: 363936 - DNA, 946 bp, Homo sapiens
cggaaacgggcgtgccatttccgcgcacgtctgcagatgcggtagtcgattggtcaagtctcccatgggctcctccttcatcaggaggtgggcaaaccgcgccatgatagggtcgggattggctggctctggaggcgcaggtggtccttcttctactgtcacatggtgcgcgctgttttctaatcacgtggctgccacccagtacccaggtaagaagaggccgctcttcctggggttgtttctccgtgtgacgtgtggcctttgagatcaactctcctgtaccagcgtaggccgcatgagtggggggcgggctcccgcggtcctgctcggcggagtggcctctctgctcctgtcttttgtttggatgccggcgctgctgcctgtggcctcccgccttttgttgctaccccgagtcttgctgaccatggcctctggaagccctccgacccagccctcgccggcctcggattccggctctggctacgttccgggctcggtctctgcagcctttgttacttgccccaacgagaaggtcgccaaggagatcgccagggccgtggtggagaagcgcctagcagcctgcgtcaacctcatccctcagattacatccatctatgagtggaaagggaagatcgaggaagacagtgaggtgctgatgatgattaaaacccaaagttccttggtcccagctttgacagattttgttcgttctgtgcacccttacgaagtggccgaggtaattgcattgcctgtggaacaggggaactttccgtacctgcagtgggtgcgccaggtcacagagtcagtttctgactctatcacaggcgggcatgatttagcccggtccgcgcaccataaaatccgcgaaaaaaagcccctgatcacggtggggccccccgtttggccaacaacacatccaacacacaacctcatacatgccacgccg

SEQ ID NO: 363937 - DNA, 1341 bp, Homo sapiens
cggaaacgggcgtgccatttccgcgcacgtctgcagatgcggtagtcgattggtcaagtctcccatgggctcctccttcatcaggaggtgggcaaaccgcgccatgatagggtcgggattggctggctctggaggcgcaggtggtccttcttctactgtcacatggtgcgcgctgttttctaatcacgtggctgccacccagtacccaggtaagaagaggccgctcttcctggggttgtttctccgtgtgacgtgtggcctttgagatcaactctcctgtaccagcgtaggccgcatgagtggggggcgggctcccgcggtcctgctcggcggagtggtgagtgaccggccccgccccgccccttccggtcctcgaagcctcgaccgctacccgcaccctaaatcccagaggttggccccctgaggtgtgagtgaaatgagcttttgctttattttccaagtttctctctcaccttcaggggcattcttcgggggtgcatcagagggagggcagagcctgaggatctaagcgaaggcttccccgggtgtaatttcctgggctgtttgtgaggagagatcgaattcgcctcctgctctcaggcctctctgctcctgtcttttgtttggatgccggcgctgctgcctgtggcctcccgccttttgttgctaccccgagtcttgctgaccatggcctctggaagccctccgacccagccctcgccggcctcggattccggctctggctacgttccgggctcggtctctgcagcctttgttacttgccccaacgagaaggtcgccaaggagatcgccagggccgtggtggagaagcgcctagcagcctgcgtcaacctcatccctcagattacatccatctatgagtggaaagggaagatcgaggaagacagtgaggtgctgatgatgattaaaacccaaagttccttggtcccagctttgacagattttgttcggtgagaactttgagatggatggggtgagggtgtgtactgtgtgggtgtgacttgctgggcagtctagggcttgcgtgtaagggagtgggttcttttgggtaaatctttgagtgatccccttcccccacccacctattttgtagttctgtgcacccttacgaagtggccgaggtaattgcattgcctgtggaacaggggaactttccgtacctgcagtgggtgcgccaggtcacagagtcagtttctgactctatcacagtcctgccatgatgagccctgttcctgctcatcatgaagatccccgcgatacttcaacgccttctgacttccaggtgatgactgggcccccaataaatcccgtctttgggtc

SEQ ID NO: 363938 - DNA, 1746 bp, Homo sapiens
cggaaacgggcgtgccatttccgcgcacgtctgcagatgcggtagtcgattggtcaagtctcccatgggctcctccttcatcaggaggtgggcaaaccgcgccatgatagggtcgggattggctggctctggaggcgcaggtggtccttcttctactgtcacatggtgcgcgctgttttctaatcacgtggctgccacccagtacccaggtaagaagaggccgctcttcctggggttgtttctccgtgtgacgtgtggcctttgagatcaactctcctgtaccagcgtaggccgcatgagtggggggcgggctcccgcggtcctgctcggcggagtggtgagtgaccggccccgccccgccccttccggtcctcgaagcctcgaccgctacccgcaccctaaatcccagaggttggccccctgaggtgtgagtgaaatgagcttttgctttattttccaagtttctctctcaccttcaggggcattcttcgggggtgcatcagagggagggcagagcctgaggatctaagcgaaggcttccccgggtgtaatttcctgggctgtttgtgaggagagatcgaattcgcctcctgctctcaggcctctctgctcctgtcttttgtttggatgccggcgctgctgcctgtggcctcccgccttttgttgctaccccgagtcttgctgaccatggcctctggaagccctccgacccagccctcgccggcctcggattccggctctggctacgttccgggctcggtctctgcagcctttgttacttgccccaacgagaaggtcgccaaggagatcgccaggtagggacctcgatgtgcagcgagaaaggatgatcatgaagggacagttgggggtggggcagaagagtgctgctttctcctttctccagctctggaagcctgtctctgggctgccagtacaaaaactggggttatggggtactctgaatgggactgtctcttcactccagggccgtggtggagaagcgcctagcagcctgcgtcaacctcatccctcagattacatccatgtgagtcataggagttggggggttaacctaactgtaggagctgactgggaacctctttcctgggggaaattctttgctccccacaactctccccctctgacctttcagctatgagtggaaagggaagatcgaggaagacagtgaggtgctgatggtgagaaacatttcccccacccaacaaaatatccccaatccctgacccctttagcccttacccctcttctgagaaactgaactcaatcccactccttgattcaaccatgtttatctttgtcccttagatgattaaaacccaaagttccttggtcccagctttgacagattttgttcggtgagaactttgagatggatggggtgagggtgtgtactgtgtgggtgtgacttgctgggcagtctagggcttgcgtgtaagggagtgggttcttttgggtaaatctttgagtgatccccttcccccacccacctattttgtagttctgtgcacccttacgaagtggccgaggtaattgcattgcctgtggaacaggggaactttccgtacctgcagtgggtgcgccaggtcacagagtcagtttctgactctatcacagtcctgccatgatgagccctgttcctgctcatcatgaagatccccgcgatacttcaacgccttctgacttccaggtgatgactgggcccccaataaatcccgtctttgggtc

SEQ ID NO: 363939 - DNA, 1576 bp, Homo sapiens
cggaaacgggcgtgccatttccgcgcacgtctgcagatgcggtagtcgattggtcaagtctcccatgggctcctccttcatcaggaggtgggcaaaccgcgccatgatagggtcgggattggctggctctggaggcgcaggtggtccttcttctactgtcacatggtgcgcgctgttttctaatcacgtggctgccacccagtacccaggtaagaagaggccgctcttcctggggttgtttctccgtgtgacgtgtggcctttgagatcaactctcctgtaccagcgtaggccgcatgagtggggggcgggctcccgcggtcctgctcggcggagtggtgagtgaccggccccgccccgccccttccggtcctcgaagcctcgaccgctacccgcaccctaaatcccagaggttggccccctgaggtgtgagtgaaatgagcttttgctttattttccaagtttctctctcaccttcaggggcattcttcgggggtgcatcagagggagggcagagcctgaggatctaagcgaaggcttccccgggtgtaatttcctgggctgtttgtgaggagagatcgaattcgcctcctgctctcaggcctctctgctcctgtcttttgtttggatgccggcgctgctgcctgtggcctcccgccttttgttgctaccccgagtcttgctgaccatggcctctggaagccctccgacccagccctcgccggcctcggattccggctctggctacgttccgggctcggtctctgcagcctttgttacttgccccaacgagaaggtcgccaaggagatcgccagggccgtggtggagaagcgcctagcagcctgcgtcaacctcatccctcagattacatccatgtgagtcataggagttggggggttaacctaactgtaggagctgactgggaacctctttcctgggggaaattctttgctccccacaactctccccctctgacctttcagctatgagtggaaagggaagatcgaggaagacagtgaggtgctgatggtgagaaacatttcccccacccaacaaaatatccccaatccctgacccctttagcccttacccctcttctgagaaactgaactcaatcccactccttgattcaaccatgtttatctttgtcccttagatgattaaaacccaaagttccttggtcccagctttgacagattttgttcggtgagaactttgagatggatggggtgagggtgtgtactgtgtgggtgtgacttgctgggcagtctagggcttgcgtgtaagggagtgggttcttttgggtaaatctttgagtgatccccttcccccacccacctattttgtagttctgtgcacccttacgaagtggccgaggtaattgcattgcctgtggaacaggggaactttccgtacctgcagtgggtgcgccaggtcacagagtcagtttctgactctatcacagtcctgccatgatgagccctgttcctgctcatcatgaagatccccgcgatacttcaacgccttctgacttccaggtgatgactgggcccccaataaatcccgtctttgggtc

SEQ ID NO: 363940 - DNA, 750 bp, Homo sapiens
cggaaacgggcgtgccatttccgcgcacgtctgcagatgcggtagtcgattggtcaagtctcccatgggctcctccttcatcaggaggtgggcaaaccgcgccatgatagggtcgggattggctggctctggaggcgcaggtggtccttcttctactgtcacatggtgcgcgctgttttctaatcacgtggctgccacccaggcctctctgctcctgtcttttgtttggatgccggcgctgctgcctgtggcctcccgccttttgttgctaccccgagtcttgctgaccatggcctctggaagccctccgacccagccctcgccggcctcggattccggctctggctacgttccgggctcggtctctgcagcctttgttacttgccccaacgagaaggtcgccaaggagatcgccagggccgtggtggagaagcgcctagcagcctgcgtcaacctcatccctcagattacatccatctatgagtggaaagggaagatcgaggaagacagtgaggtgctgatgttctgtgcacccttacgaagtggccgaggtaattgcattgcctgtggaacaggggaactttccgtacctgcagtgggtgcgccaggtcacagagtcagtttctgactctatcacagtcctgccatgatgagccctgttcctgctcatcatgaagatccccgcgatacttcaacgccttctgacttccaggtgatgactgggcccccaataaatcccgtctttgggtc

SEQ ID NO: 363941 - DNA, 366 bp, Homo sapiens
gttttctcctgtgtgaggtggggctaggcccagcatctgctctgcaggcctgttgtgagaatcacaatggatccccatcagcccctgtcccctagtggttgttgatgaatagcaacagggattggaggattctgctgactcagtggcttccccctgccagccctgaccttggcctgagggcttcccccagttcccagctcctgctgccgctcagctctaactctccttccttcgcgtctgtttaaagtgggccttccagggtaaaaagtccattctgtgcaggctgcaggaatcaccacgtctgctggacaaggacatcaatgtctttgaagtgtcctggctggcagaattccctgccgttttgca

SEQ ID NO: 363942 - DNA, 1840 bp, Homo sapiens
ctctagcagagcgccgttgctgggggaatgcagaagcggccgcgggctagcaagctcccggagccggcggcgcaccaccatgacccagtcggtggtcgtacaggtcggccagtgcggaaaccagatcggctgctgcttctgggacctggcactaagggagcacgccgcggtcaaccagaaaggaatttatgatgaggcaataagcagcttctttagaaatgtggacaccagagtggttggtgatggtggaagtatttccaagggaaaaatatgttctttaaaagcacgagcagtcttgattgatatggaagaaggggtagtgaatgaaattctgcagggaccactgagagatgtatttgatacgaaacagctcatcactgatatttctggctcaggaaataattgggccgtgggtcacaaagttttcggcagtctttaccaagaccagattttagagaaattcagaaagtcggcagagcactgtgattgcttgcagtgtttctttataatacattccatgggaggaggaacaggatctggacttggcacatttcttttaaaggtgcttgaagacgaattcccagaagtatacagatttgtgacttccatttatccttctggtgaggatgatgtcataacctcaccttataatagcatcttggcaatgaaggaacttaatgagcatgcagactgtgtattgcccattgacaatcaatctttatttgacatcattagcaaaatcgacctcatggtgaattctggaaagttgggtacaactgtgaagccaaagagtctggttacttcaagttctggggctttaaaaaagcagcataagaagccctttgatgcaatgaataacattgtggcaaatttgctcctcaacctaacgagctctgcaagatttgaagggtcccttaatatggaccttaatgaaatcagcatgaatttagttccttttcctcaacttcattatctcgtgtcaagcctaacacctctgtatacactgacagatgttaacattcctcctagaagattggatcagatgttttcagatgcctttagtaaagatcaccagctgcttcgggcagaccccaaacacagtctttacctcgcctgtgcactcatggttagaggaaatgtacaaatttcagatcttcgtagaaatattgaaagattaaaaccatctctacaatttgtctcctggaatcaagaaggctggaagaccagcctgtgttccgtacctcctgtgggccattctcattcgttattagctttagcaaataacacatgtgtgaagcccaccttcatggaactgaaagagagattcatgaggctctacaagaaaaaggctcaccttcatcactatctacaagttgaagggatggaagaaagctgtttcacagaagctgtgtcatctttatcagcactcatacaggaatatgaccaactggacgccacaaaaaacatgcctgtgcaggatttacccagactaagcatagctatgtgaaaaagaaaccctcaaaaatactttcttaatttcacattgttttttctgacctttctgtttcaacatttttgtaatttggaaactccagttttttcatattatcgggaaatatttttgtctaaaagagtgatttctgtttaatcgcaatttgttggtaataccaatgtgtgaaattagtgaaatcttagtaccttaacttcaaacatttctcttcagaaaagttcccttttctaaaattgagataacatagttcttgaatattttgctgtatttatagcctcatatttaggcatttatgcactgatgtgtcttcaataaaaatcttgtacagat

SEQ ID NO: 363943 - DNA, 2467 bp, Homo sapiens
ctctagcagagcgccgttgctgggggaatgcagaagcggccgcgggctagcaagctcccggagccggcggcgcaccaccatgacccagtcggtggtcgtacaggtcggccagtgcggaaaccagatcggctgctgcttctgggacctggcactaagggagcacgccgcggtcaaccagaaaggaatttatgatgaggcaataagcagcttctttagaaatgtggacaccagagtggttggtgatggtggaagtatttccaagggaaaaatatgttctttaaaagcacgagcagtcttgattgatatggaagaaggggtagtgaatgaaattctgcagggaccactgagagatgtatttgatacgaaacagctcatcactgatatttctggctcaggaaataattgggccgtgggtcacaaagttttcggcagtctttaccaagaccagattttagagaaattcagaaagtcggcagagcactgtgattgcttgcagtgtttctttataatacattccatgggaggaggaacaggatctggacttggcacatttcttttaaaggtgcttgaagacgaattcccagaagtatacagatttgtgacttccatttatccttctggtgaggatgatgtcataacctcaccttataatagcatcttggcaatgaaggaacttaatgagcatgcagactgtgtattgcccattgacaatcaagtaagaaatgacattggaacttatgaataaatgttatatatattcagtcctgtattatgtatgtgtgtttatatgaaacgttctcttcacttttcagccttcttagagaaaaaatcagtttaaattgtttttctttctctttcctagtagaatatcatctacatccactcttcttaatagcttctctcccaatgtttttccctcaaaagtctttatttgacatcattagcaaaatcgacctcatggtgaattctggaaagttgggtacaactgtgaagccaaagagtctggttacttcaagttctggggctttaaaaaagcagcataagaagccctttgatgcaatgaataacattgtggcaaatttgctcctcaacctaacgagctctgcaagatttgaagggtcccttaatatggaccttaatgaaatcagcatgaatttagttccttttcctcaacttcattatctcgtgtcaagcctaacacctctgtatacactgacagatgttaacattcctcctagaagattggatcagatgttttcagatgcctttagtaaagatcaccagctgcttcgggcagaccccaaacacagtctttacctcgcctgtgcactcatggttagaggaaatgtacaaatttcagatcttcgtagaaatattgaaagattaaaaccatctctacaatttgtctcctggaatcaagaaggctggaagaccagcctgtgttccgtacctcctgtgggccattctcattcgttattagctttagcaaataacacatgtgtgaagcccaccttcatggaactgaaagagagattcatgaggctctacaagaaaaaggctcaccttcatcactatctacaagttgaagggatggaagaaagctgtttcacagaagctgtgtcatctttatcagcactcatacaggaatatgaccaactggacgccacaaaaaacatgcctgtgcaggatttacccagactaagcatagctatgtgaaaaagaaaccctcaaaaatactttcttaatttcacattgttttttctgacctttctgtttcaacatttttgtaatttggaaactccagttttttcatattatcgggaaatatttttgtctaaaagagtgatttctgtttaatcgcaatttgttggtaataccaatgtgtgaaattagtgaaatcttagtaccttaacttcaaacatttctcttcagaaaagttcccttttctaaaattgagataacatagttcttgaatattttgctgtatttatagcctcatatttaggcatttatgcactgatgtgtcttcaataaaaatcttgtacagatatatttttataattatttataatttatattttgatattctatttaagttatcctgattctttaaaagtagttattgggagtagaagaacacaatataaatatttccgtgtaatagccaccaacttttcaggcataggttttattacaactgttaaggaggttttgcttcttctttagataacaacttgtttgcccaaaagaatcctaatttgtacacttaacatgtatttgtattaaactttttaaataattgctttcttatcaaaccaattgattttataataaatgtctatatttttcaacagtgctacttgttattgttctgcatgacatttatgcaaatgaacagaatgttactaagcttgatatcttccaaactttgcaataaatggctataattgttccggttactataatc

SEQ ID NO: 363944 - DNA, 2200 bp, Homo sapiens
ctctagcagagcgccgttgctgggggaatgcagaagcggccgcgggctagcaagctcccggagccggcggcgcaccaccatgacccagtcggtggtcgtacaggtcggccagtgcggaaaccagatcggctgctgcttctgggacctggcactaagggagcacgccgcggtcaaccagaaaggaatttatgatgaggcaataagcagcttctttagaaatgtggacaccaggcagtcttgattgatatggaagaaggggtagtgaatgaaattctgcagggaccactgagagatgtatttgatacgaaacagctcatcactgatatttctggctcaggaaataattgggccgtgggtcacaaagttttcggcagtctttaccaagaccagattttagagaaattcagaaagtcggcagagcactgtgattgcttgcagtgtttctttataatacattccatgggaggaggaacaggatctggacttggcacatttcttttaaaggtgcttgaagacgaattcccagaagtatacagatttgtgacttccatttatccttctggtgaggatgatgtcataacctcaccttataatagcatcttggcaatgaaggaacttaatgagcatgcagactgtgtattgcccattgacaatcaatctttatttgacatcattagcaaaatcgacctcatggtgaattctggaaagttgggtacaactgtgaagccaaagagtctggttacttcaagttctggggctttaaaaaagcagcataagaagccctttgatgcaatgaataacattgtggcaaatttgctcctcaacctaacgagctctgcaagatttgaagggtcccttaatatggaccttaatgaaatcagcatgaatttagttccttttcctcaacttcattatctcgtgtcaagcctaacacctctgtatacactgacagatgttaacattcctcctagaagattggatcagatgttttcagatgcctttagtaaagatcaccagctgcttcgggcagaccccaaacacagtctttacctcgcctgtgcactcatggttagaggaaatgtacaaatttcagatcttcgtagaaatattgaaagattaaaaccatctctacaatttgtctcctggaatcaagaaggctggaagaccagcctgtgttccgtacctcctgtgggccattctcattcgttattagctttagcaaataacacatgtgtgaagcccaccttcatggaactgaaagagagattcatgaggctctacaagaaaaaggctcaccttcatcactatctacaagttgaagggatggaagaaagctgtttcacagaagctgtgtcatctttatcagcactcatacaggaatatgaccaactggacgccacaaaaaacatgcctgtgcaggatttacccagactaagcatagctatgtgaaaaagaaaccctcaaaaatactttcttaatttcacattgttttttctgacctttctgtttcaacatttttgtaatttggaaactccagttttttcatattatcgggaaatatttttgtctaaaagagtgatttctgtttaatcgcaatttgttggtaataccaatgtgtgaaattagtgaaatcttagtaccttaacttcaaacatttctcttcagaaaagttcccttttctaaaattgagataacatagttcttgaatattttgctgtatttatagcctcatatttaggcatttatgcactgatgtgtcttcaataaaaatcttgtacagatatatttttataattatttataatttatattttgatattctatttaagttatcctgattctttaaaagtagttattgggagtagaagaacacaatataaatatttccgtgtaatagccaccaacttttcaggcataggttttattacaactgttaaggaggttttgcttcttctttagataacaacttgtttgcccaaaagaatcctaatttgtacacttaacatgtatttgtattaaactttttaaataattgctttcttatcaaaccaattgattttataataaatgtctatatttttcaacagtgctacttgttattgttctgcatgacatttatgcaaatgaacagaatgttactaagcttgatatcttccaaactttgcaataaatggctataattgttccggttactataatc

SEQ ID NO: 363945 - DNA, 2226 bp, Homo sapiens
gcgactctagaccatcgcttatggcttcctggagcggggcgcacaccttgacccagtcggtggtcgtacaggtcggccagtgcggaaaccagatcggctgctgcttctgggacctggcactaagggagcacgccgcggtcaaccagaaaggaatttatgatgaggcaataagcagcttctttagaaatgtggacaccagagtggttggtgatggtggaagtatttccaagggaaaaatatgttctttaaaagcacgagcagtcttgattgatatggaagaaggggtagtgaatgaaattctgcagggaccactgagagatgtatttgatacgaaacagctcatcactgatatttctggctcaggaaataattgggccgtgggtcacaaagttttcggcagtctttaccaagaccagattttagagaaattcagaaagtcggcagagcactgtgattgcttgcagtgtttctttataatacattccatgggaggaggaacaggatctggacttggcacatttcttttaaaggtgcttgaagacgaattcccagaagtatacagatttgtgacttccatttatccttctggtgaggatgatgtcataacctcaccttataatagcatcttggcaatgaaggaacttaatgagcatgcagactgtgtattgcccattgacaatcaatctttatttgacatcattagcaaaatcgacctcatggtgaattctggaaagttgggtacaactgtgaagccaaagagtctggttacttcaagttctggggctttaaaaaagcagcataagaagccctttgatgcaatgaataacattgtggcaaatttgctcctcaacctaacgagctctgcaagatttgaagggtcccttaatatggaccttaatgaaatcagcatgaatttagttccttttcctcaacttcattatctcgtgtcaagcctaacacctctgtatacactgacagatgttaacattcctcctagaagattggatcagatgttttcagatgcctttagtaaagatcaccagctgcttcgggcagaccccaaacacagtctttacctcgcctgtgcactcatggttagaggaaatgtacaaatttcagatcttcgtagaaatattgaaagattaaaaccatctctacaatttgtctcctggaatcaagaaggctggaagaccagcctgtgttccgtacctcctgtgggccattctcattcgttattagctttagcaaataacacatgtgtgaagcccaccttcatggaactgaaagagagattcatgaggctctacaagaaaaaggctcaccttcatcactatctacaagttgaagggatggaagaaagctgtttcacagaagctgtgtcatctttatcagcactcatacaggaatatgaccaactggacgccacaaaaaacatgcctgtgcaggatttacccagactaagcatagctatgtgaaaaagaaaccctcaaaaatactttcttaatttcacattgttttttctgacctttctgtttcaacatttttgtaatttggaaactccagttttttcatattatcgggaaatatttttgtctaaaagagtgatttctgtttaatcgcaatttgttggtaataccaatgtgtgaaattagtgaaatcttagtaccttaacttcaaacatttctcttcagaaaagttcccttttctaaaattgagataacatagttcttgaatattttgctgtatttatagcctcatatttaggcatttatgcactgatgtgtcttcaataaaaatcttgtacagatatatttttataattatttataatttatattttgatattctatttaagttatcctgattctttaaaagtagttattgggagtagaagaacacaatataaatatttccgtgtaatagccaccaacttttcaggcataggttttattacaactgttaaggaggttttgcttcttctttagataacaacttgtttgcccaaaagaatcctaatttgtacacttaacatgtatttgtattaaactttttaaataattgctttcttatcaaaccaattgattttataataaatgtctatatttttcaacagtgctacttgttattgttctgcatgacatttatgcaaatgaacagaatgttactaagcttgatatcttccaaactttgcaataaatggctataattgttccggttactataatc

SEQ ID NO: 363946 - DNA, 3140 bp, Homo sapiens
ctctagcagagcgccgttgctgggggaatgcagaagcggccgcgggctagcaagctcccggagccggcggcgcaccaccatgacccagtcggtggtcgtacagggtaagctacgccgggcgggtagagacctggtcgccgcggaatccagcggccatgtttcctgcttaatgtcctattctctttccttcctctcctccggtcgcagtcggccagtgcggaaaccagatcggctgctgcttctgggacctggcactaagggagcacgccgcggtcaaccaggtacccgcccgccgccgcgagccccctcgcctgtcagctaggtcttccagcccatacgcaggaaataatcgacttgagctttcatctgacccgtttaagatgcatgggatcttcccagtaaagaacgtactggtttttaaacatgttgcgtcagacacacactaaactaaaagaacactggccagcgaccttagtcttaacgtttttcctgattctcagggtctcctttttattggtgttcgtgtgcagaacagtgagatttgtatatgggaaagtactttgtaaaatagataacacgtgtggttattgtattccttaatttaaccagtcagcttttcctatgggtgaaatcctttctttagcaccccctgctgaactttttatctgtagatctggcatttactcttctaaggagattgggaagagtcaggctccgcattttgtgatacttggtttttcttatcagagtctcatcctagccattacagtattatgtaattaaaattgaaagaacttgatttgggcgagaagcaaaacctaaatgctattaacatatgtttttctttttagaaaggaatttatgatgaggcaataagcagcttctttagaaatgtggacaccagagtggttggtgatggtggaagtatttccaagggaaaaatatgttctttaaaagcacgagcagtcttgattgatatggaagaaggggtagtgaatgaaattctgcagggaccactgagagatgtatttgatacgaaacagctcatcactgatatttctggctcaggaaataattgggccgtgggtcacaaagttttcggcagtctttaccaagaccagattttagagaaattcagaaagtcggcagagcactgtgattgcttgcagtgtttctttataatacattccatgggaggaggaacaggatctggacttggcacatttcttttaaaggtgcttgaagacgaattcccagaagtatacagatttgtgacttccatttatccttctggtgaggatgatgtcataacctcaccttataatagcatcttggcaatgaaggaacttaatgagcatgcagactgtgtattgcccattgacaatcaagtaagaaatgacattggaacttatgaataaatgttatatatattcagtcctgtattatgtatgtgtgtttatatgaaacgttctcttcacttttcagccttcttagagaaaaaatcagtttaaattgtttttctttctctttcctagtagaatatcatctacatccactcttcttaatagcttctctcccaatgtttttccctcaaaagtctttatttgacatcattagcaaaatcgacctcatggtgaattctggaaagttgggtacaactgtgaagccaaagagtctggttacttcaagttctggggctttaaaaaagcagcataagaagccctttgatgcaatgaataacattgtggcaaatttgctcctcaacctaacgagctctgcaagatttgaagggtcccttaatatggaccttaatgaaatcagcatgaatttagttccttttcctcaacttcattatctcgtgtcaagcctaacacctctgtatacactgacagatgttaacattcctcctagaagattggatcagatgttttcagatgcctttagtaaagatcaccagctgcttcgggcagaccccaaacacagtctttacctcgcctgtgcactcatggttagaggaaatgtacaaatttcagatcttcgtagaaatattgaaagattaaaaccatctctacaatttgtctcctggaatcaagaaggctggaagaccagcctgtgttccgtacctcctgtgggccattctcattcgttattagctttagcaaataacacatgtgtgaagcccaccttcatggaactgaaagagagattcatgaggctctacaagaaaaaggctcaccttcatcactatctacaagttgaagggatggaagaaagctgtttcacagaagctgtgtcatctttatcagcactcatacaggaatatgaccaactggacgccacaaaaaacatgcctgtgcaggatttacccagactaagcatagctatgtgaaaaagaaaccctcaaaaatactttcttaatttcacattgttttttctgacctttctgtttcaacatttttgtaatttggaaactccagttttttcatattatcgggaaatatttttgtctaaaagagtgatttctgtttaatcgcaatttgttggtaataccaatgtgtgaaattagtgaaatcttagtaccttaacttcaaacatttctcttcagaaaagttcccttttctaaaattgagataacatagttcttgaatattttgctgtatttatagcctcatatttaggcatttatgcactgatgtgtcttcaataaaaatcttgtacagatatatttttataattatttataatttatattttgatattctatttaagttatcctgattctttaaaagtagttattgggagtagaagaacacaatataaatatttccgtgtaatagccaccaacttttcaggcataggttttattacaactgttaaggaggttttgcttcttctttagataacaacttgtttgcccaaaagaatcctaatttgtacacttaacatgtatttgtattaaactttttaaataattgctttcttatcaaaccaattgattttataataaatgtctatatttttcaacagtgctacttgttattgttctgcatgacatttatgcaaatgaacagaatgttactaagcttgatatcttccaaactttgcaataaatggctataattgttccggttactataatc

SEQ ID NO: 363947 - DNA, 1530 bp, Homo sapiens
ctctagcagagcgccgttgctgggggaatgcagaagcggccgcgggctagcaagctcccggagccggcggcgcaccaccatgacccagtcggtggtcgtacaggtcggccagtgcggaaaccagatcggctgctgcttctgggacctggcactaagggagcacgccgcggtcaaccagaaaggaatttatgatgaggcaataagcagcttctttagaaatgtggacaccagagtggttggtgatggtggaagtatttccaagggaaaaatatgttctttaaaagcacgagcagtcttgattgatatggaagaaggggtagtgaatgaaattctgcagggaccactgagagatgtatttgatacgaaacagctcatcactgatatttctggctcaggaaataattgggccgtgggtcacaaagttttcggcagtctttaccaagaccagattttagagaaattcagaaagtcggcagagcactgtgattgcttgcagtgtttctttataatacattccatgggaggaggtaaaatttttcactcatttgcctgtaacagtgttaaaggataagtgggaattcattttgcaaacgtaagtcttgtttttagacctgtgcttgataaagatagaactattcggagggtgtgtagtttgagtatataaacatacacctttttatcttaaaattttgtggaattatgtcactattttcttttcttttcttttttttttttttaatgtaagccctcttaagagtcaacagaactatactggaaaattttttttcttgtacctttagtttcttttacagaacattcagatacttttcaggatgtatgagcttttgagaaatgctgactttctccttagagtttgcctgtacagtcctatttcctagagtgaagcatttttgacgtgctcatgatgtgtgcttgccaaaggatattaataccctttctttaaccatcttcaaacctttcttgtctccaaaaagagaaaaaaaaggaaactagtttagtcaattcctttagatcatttattacatggcaattaatcaacttgaagtaaaaataaatgattggcattgctttcttcccccagggaagtctataccttagaactgaagtattttgctcccctgttctgtaaaaatagaaacagaatgtaacttgctgatttttaaatacgcttagcaaattttaaaagaacaaaatggtcacacttttttcctccaacctgagattaagattttatattcagcaagttaggtgtatgtacagttgatttttatacatattattcattgacatagcattttaagattaaaagttaaaattgctgtgtaaccatgtctttaaaagatcctcataatcatcggttaagaaacaaatttgtttctgtgctagtataattaacctgcaaatttgagctagctttttatttgatttatagttcgttatacctttttaaaaaatacctttactacccaacatctcagaagaacatacttacaattcacttaaaatagc

SEQ ID NO: 363948 - DNA, 1472 bp, Homo sapiens
ctctagcagagcgccgttgctgggggaatgcagaagcggccgcgggctagcaagctcccggagccggcggcgcaccaccatgacccagtcggtggtcgtacaggtcggccagtgcggaaaccagatcggctgctgcttctgggacctggcactaagggagcacgccgcggtcaaccagaaaggaatttatgatgaggcaataagcagcttctttagaaatgtggacaccaggcagtcttgattgatatggaagaaggggtagtgaatgaaattctgcagggaccactgagagatgtatttgatacgaaacagctcatcactgatatttctggctcaggaaataattgggccgtgggtcacaaagttttcggcagtctttaccaagaccagattttagagaaattcagaaagtcggcagagcactgtgattgcttgcagtgtttctttataatacattccatgggaggaggtaaaatttttcactcatttgcctgtaacagtgttaaaggataagtgggaattcattttgcaaacgtaagtcttgtttttagacctgtgcttgataaagatagaactattcggagggtgtgtagtttgagtatataaacatacacctttttatcttaaaattttgtggaattatgtcactattttcttttcttttcttttttttttttttaatgtaagccctcttaagagtcaacagaactatactggaaaattttttttcttgtacctttagtttcttttacagaacattcagatacttttcaggatgtatgagcttttgagaaatgctgactttctccttagagtttgcctgtacagtcctatttcctagagtgaagcatttttgacgtgctcatgatgtgtgcttgccaaaggatattaataccctttctttaaccatcttcaaacctttcttgtctccaaaaagagaaaaaaaaggaaactagtttagtcaattcctttagatcatttattacatggcaattaatcaacttgaagtaaaaataaatgattggcattgctttcttcccccagggaagtctataccttagaactgaagtattttgctcccctgttctgtaaaaatagaaacagaatgtaacttgctgatttttaaatacgcttagcaaattttaaaagaacaaaatggtcacacttttttcctccaacctgagattaagattttatattcagcaagttaggtgtatgtacagttgatttttatacatattattcattgacatagcattttaagattaaaagttaaaattgctgtgtaaccatgtctttaaaagatcctcataatcatcggttaagaaacaaatttgtttctgtgctagtataattaacctgcaaatttgagctagctttttatttgatttatagttcgttatacctttttaaaaaatacctttactacccaacatctcagaagaacatacttacaattcacttaaaatagc

SEQ ID NO: 363949 - DNA, 754 bp, Homo sapiens
gtaagcaaggaagaaagagattaggaatagctgttgtgtctgccttacctggcctataagcagtcttattatataaatggaagttaactttatcacctgatagtgctattagccatggaagatcttatgaccatttctcatttttttatctttcagagtggttggtgatggtggaagtatttccaagggaaaaatatgttctttaaaagcacgagtaagatacatatgcttggattcttatattacatgtattttttaaataactattctcagtaactatcatgagaataaaactttaaacttttcaaagtagaaaaaaattactaagccacatttaatataaatataactaagcagacatttgtgtccacctaacacattagggggaaaagcccatactttaaaacactgtagttagcctgttttcaggagaaatagtgtctagataaatgataacaaaaggagcattcttaactctaaggacctgaaatacgtactagtacagtttaatgttttatttaaagatactggaagatttatttgcatcaaagttactaccaataaaaaacatggaaccagccacattgtagtgaataaaaaccattcaccatataagttctcctgaaccaagtacttcaggttcttagcccatatttacagtcttatttacagtcttaatcattccaacaatatttctgtgattgtctgtaacgaactactttttctgatttttgatcagtgatctttgactata

SEQ ID NO: 363950 - DNA, 2258 bp, Homo sapiens
ctctagcagagcgccgttgctgggggaatgcagaagcggccgcgggctagcaagctcccggagccggcggcgcaccaccatgacccagtcggtggtcgtacaggtcggccagtgcggaaaccagatcggctgctgcttctgggacctggcactaagggagcacgccgcggtcaaccagaaaggaatttatgatgaggcaataagcagcttctttagaaatgtggacaccagagtggttggtgatggtggaagtatttccaagggaaaaatatgttctttaaaagcacgagcagtcttgattgatatggaagaaggggtagtgaatgaaattctgcagggaccactgagagatgtatttgatacgaaacagctcatcactgatatttctggctcaggaaataattgggccgtgggtcacaaagttttcggcagtctttaccaagaccagattttagagaaattcagaaagtcggcagagcactgtgattgcttgcagtgtttctttataatacattccatgggaggaggaacaggatctggacttggcacatttcttttaaaggtgcttgaagacgaattcccagaagtatacagatttgtgacttccatttatccttctggtgaggatgatgtcataacctcaccttataatagcatcttggcaatgaaggaacttaatgagcatgcagactgtgtattgcccattgacaatcaatctttatttgacatcattagcaaaatcgacctcatggtgaattctggaaagttgggtacaactgtgaagccaaagagtctggttacttcaagttctggggctttaaaaaagcagcataagaagccctttgatgcaatgaataacattgtggcaaatttgctcctcaacctaacgagctctgcaagatttgaagggtcccttaatatggaccttaatgaaatcagcatgaatttagttccttttcctcaacttcattatctcgtgtcaagcctaacacctctgtatacactgacagatgttaacattcctcctagaagattggatcagatgttttcagatgcctttagtaaagatcaccagctgcttcgggcagaccccaaacacagtctttacctcgcctgtgcactcatggttagaggaaatgtacaaatttcagatcttcgtagaaatattgaaagattaaaaccatctctacaatttgtctcctggaatcaagaaggctggaagaccagcctgtgttccgtacctcctgtgggccattctcattcgttattagctttagcaaataacacatgtgtgaagcccaccttcatggaactgaaagagagattcatgaggctctacaagaaaaaggctcaccttcatcactatctacaagttgaagggatggaagaaagctgtttcacagaagctgtgtcatctttatcagcactcatacaggaatatgaccaactggacgccacaaaaaacatgcctgtgcaggatttacccagactaagcatagctatgtgaaaaagaaaccctcaaaaatactttcttaatttcacattgttttttctgacctttctgtttcaacatttttgtaatttggaaactccagttttttcatattatcgggaaatatttttgtctaaaagagtgatttctgtttaatcgcaatttgttggtaataccaatgtgtgaaattagtgaaatcttagtaccttaacttcaaacatttctcttcagaaaagttcccttttctaaaattgagataacatagttcttgaatattttgctgtatttatagcctcatatttaggcatttatgcactgatgtgtcttcaataaaaatcttgtacagatatatttttataattatttataatttatattttgatattctatttaagttatcctgattctttaaaagtagttattgggagtagaagaacacaatataaatatttccgtgtaatagccaccaacttttcaggcataggttttattacaactgttaaggaggttttgcttcttctttagataacaacttgtttgcccaaaagaatcctaatttgtacacttaacatgtatttgtattaaactttttaaataattgctttcttatcaaaccaattgattttataataaatgtctatatttttcaacagtgctacttgttattgttctgcatgacatttatgcaaatgaacagaatgttactaagcttgatatcttccaaactttgcaataaatggctataattgttccggttactataatc

SEQ ID NO: 363951 - DNA, 2894 bp, Homo sapiens
ctctagcagagcgccgttgctgggggaatgcagaagcggccgcgggctagcaagctcccggagccggcggcgcaccaccatgacccagtcggtggtcgtacaggtcggccagtgcggaaaccagatcggctgctgcttctgggacctggcactaagggagcacgccgcggtcaaccagaaaggaatttatgatgaggcaataagcagcttctttagaaatgtggacaccagagtggttggtgatggtggaagtatttccaagggaaaaatatgttctttaaaagcacgagcagtcttgattgatatggaagaaggggtagtgaatgaaattctgcagggaccactgagagatgtatttgatacgaaacagctcatcactgatatttctggctcaggaaataattgggccgtgggtcacaaagttttcggcagtctttaccaagaccagattttagagaaattcagaaagtcggcagagcactgtgattgcttgcagtgtttctttataatacattccatgggaggaggaacaggatctggacttggcacatttcttttaaaggtgcttgaagacgaattcccagaagtatacagatttgtgacttccatttatccttctggtgaggatgatgtcataacctcaccttataatagcatcttggcaatgaaggaacttaatgagcatgcagactgtgtattgcccattgacaatcaatctttatttgacatcattagcaaaatcgacctcatggtgaattctggaaagttgggtacaactgtgaagccaaagagtctggttacttcaagttctggggctttaaaaaagcagcataagaagccctttgatgcaatgaataacattgtggcaaatttgctcctcaacctaacgagctctgcaagatttgaagggtcccttaatatggaccttaatgaaatcagcatgaatttagttccttttcctcaacttcattatctcgtgtcaagcctaacacctctgtatacactgacagatgttaacattcctcctagaagattggatcagatgttttcagatgcctttagtaaagatcaccagctgcttcgggcagaccccaaacacagtctttacctcgcctgtgcactcatggttagaggaaatgtacaaatttcagatcttcgtagaaatattgaaagattaaaaccatctctacaatttgtctcctggaatcaagaaggctggaagaccagcctgtgttccgtacctcctgtgggccattctcattcgttattagctttagcaaataacacatgtgtgaagcccaccttcatggaactgaaagagagattcatgaggctctacaagaaaaaggctcaccttcatcactatctacaagttgaagggatggaagaaagctgtttcacagaagctgtgtcatctttatcagcactcatacaggaatatgaccaactggacgccacaaaaaacatgcctgtgcaggatttacccagactaagcatagctatgtgaaaaagaaaccctcaaaaatactttcttaatttcacattgttttttctgacctttctgtttcaacatttttgtaatttggaaactccagttttttcatattatcgggaaatatttttgtctaaaagagtgatttctgtttaatcgcaatttgttggtaataccaatgtgtgaaattagtgaaatcttagtaccttaacttcaaacatttctcttcagaaaagttcccttttctaaaattgagataacatagttcttgaatattttgctgtatttatagcctcatatttaggcatttatgcactgatgtgtcttcaataaaaatcttgtacagatatatttttataattatttataatttatattttgatattctatttaagttatcctgattctttaaaagtagttattgggagtagaagaacacaatataaatatttccgtgtaatagccaccaacttttcaggcataggttttattacaactgttaaggaggttttgcttcttctttagataacaacttgtttgcccaaaagaatcctaatttgtacacttaacatgtatttgtattaaactttttaaataattgctttcttatcaaaccaattgattttataataaatgtctatatttttcaaaaaaaaaaaaaaacaaaacaaacacaaacacaaacaaacaaaacaaaaaacaaacaaaaaaaaaaaaaaaccagcacacaaaaaaaaaaaaatagaaaaaaaaaaaaaaacaaaacacacacaagaaaagagaaaaggaaaaaacaagaggaaaaaaagaaagagagaaagagaagaaaaaaaagagaaagagaagaaaaaaaaaaacaagaaaagaaaaaaagagaaaagaagaaaaaaagaagagaagaagaagaacaagaggaaaaaagaagaaaaaaatagaaaaaaaagaaagagagagagaaaagacaacagccaaaagaaaaaagagaaggaaaaagaaaagaaaaagtacagaaaagaaaaaaagaaagaaaagaaaaagaacaagaagaaacaaaagaaaaaaagaagaaaaaaaaaaagaaaaaagaaaaggaacagaaaaaagaaaaaaaaagaaaaaagtaaagagagaaaacaaagaaagaaaaaagacagaagaaagacaaagaaagaaagaagaagagaagaagaaaggagaagaaaaaagaagaaaagaagaagaaaggaagagaaaagaagagaaagagaagagaaagaggagagagaaagaaaaggaagaagagaaagaagagaaaaagaaagaagaagaaagagaagaagaaagaaagaagaagaaagaaggaagagaaaaggagaagacaaggaagaaagaaagaatagaaacgaagagagaagaaaagaac

SEQ ID NO: 363952 - DNA, 3194 bp, Homo sapiens
ctctagcagagcgccgttgctgggggaatgcagaagcggccgcgggctagcaagctcccggagccggcggcgcaccaccatgacccagtcggtggtcgtacagggtaagctacgccgggcgggtagagacctggtcgccgcggaatccagcggccatgtttcctgcttaatgtcctattctctttccttcctctcctccggtcgcagtcggccagtgcggaaaccagatcggctgctgcttctgggacctggcactaagggagcacgccgcggtcaaccaggtacccgcccgccgccgcgagccccctcgcctgtcagctaggtcttccagcccatacgcaggaaataatcgacttgagctttcatctgacccgtttaagatgcatgggatcttcccagtaaagaacgtactggtttttaaacatgttgcgtcagacacacactaaactaaaagaacactggccagcgaccttagtcttaacgtttttcctgattctcagggtctcctttttattggtgttcgtgtgcagaacagtgagatttgtatatgggaaagtactttgtaaaatagataacacgtgtggttattgtattccttaatttaaccagtcagcttttaaaaagattacgaagaatccagagaacgctcatttgatggacctgtcctacagtcctatgggtgaaatcctttctttagcaccccctgctgaactttttatctgtagatctggcatttactcttctaaggagattgggaagagtcaggctccgcattttgtgatacttggtttttcttatcagagtctcatcctagccattacagtattatgtaattaaaattgaaagaacttgatttgggcgagaagcaaaacctaaatgctattaacatatgtttttctttttagaaaggaatttatgatgaggcaataagcagcttctttagaaatgtggacaccagagtggttggtgatggtggaagtatttccaagggaaaaatatgttctttaaaagcacgagcagtcttgattgatatggaagaaggggtagtgaatgaaattctgcagggaccactgagagatgtatttgatacgaaacagctcatcactgatatttctggctcaggaaataattgggccgtgggtcacaaagttttcggcagtctttaccaagaccagattttagagaaattcagaaagtcggcagagcactgtgattgcttgcagtgtttctttataatacattccatgggaggaggaacaggatctggacttggcacatttcttttaaaggtgcttgaagacgaattcccagaagtatacagatttgtgacttccatttatccttctggtgaggatgatgtcataacctcaccttataatagcatcttggcaatgaaggaacttaatgagcatgcagactgtgtattgcccattgacaatcaagtaagaaatgacattggaacttatgaataaatgttatatatattcagtcctgtattatgtatgtgtgtttatatgaaacgttctcttcacttttcagccttcttagagaaaaaatcagtttaaattgtttttctttctctttcctagtagaatatcatctacatccactcttcttaatagcttctctcccaatgtttttccctcaaaagtctttatttgacatcattagcaaaatcgacctcatggtgaattctggaaagttgggtacaactgtgaagccaaagagtctggttacttcaagttctggggctttaaaaaagcagcataagaagccctttgatgcaatgaataacattgtggcaaatttgctcctcaacctaacgagctctgcaagatttgaagggtcccttaatatggaccttaatgaaatcagcatgaatttagttccttttcctcaacttcattatctcgtgtcaagcctaacacctctgtatacactgacagatgttaacattcctcctagaagattggatcagatgttttcagatgcctttagtaaagatcaccagctgcttcgggcagaccccaaacacagtctttacctcgcctgtgcactcatggttagaggaaatgtacaaatttcagatcttcgtagaaatattgaaagattaaaaccatctctacaatttgtctcctggaatcaagaaggctggaagaccagcctgtgttccgtacctcctgtgggccattctcattcgttattagctttagcaaataacacatgtgtgaagcccaccttcatggaactgaaagagagattcatgaggctctacaagaaaaaggctcaccttcatcactatctacaagttgaagggatggaagaaagctgtttcacagaagctgtgtcatctttatcagcactcatacaggaatatgaccaactggacgccacaaaaaacatgcctgtgcaggatttacccagactaagcatagctatgtgaaaaagaaaccctcaaaaatactttcttaatttcacattgttttttctgacctttctgtttcaacatttttgtaatttggaaactccagttttttcatattatcgggaaatatttttgtctaaaagagtgatttctgtttaatcgcaatttgttggtaataccaatgtgtgaaattagtgaaatcttagtaccttaacttcaaacatttctcttcagaaaagttcccttttctaaaattgagataacatagttcttgaatattttgctgtatttatagcctcatatttaggcatttatgcactgatgtgtcttcaataaaaatcttgtacagatatatttttataattatttataatttatattttgatattctatttaagttatcctgattctttaaaagtagttattgggagtagaagaacacaatataaatatttccgtgtaatagccaccaacttttcaggcataggttttattacaactgttaaggaggttttgcttcttctttagataacaacttgtttgcccaaaagaatcctaatttgtacacttaacatgtatttgtattaaactttttaaataattgctttcttatcaaaccaattgattttataataaatgtctatatttttcaacagtgctacttgttattgttctgcatgacatttatgcaaatgaacagaatgttactaagcttgatatcttccaaactttgcaataaatggctataattgttccggttactataatc

SEQ ID NO: 363953 - DNA, 2059 bp, Homo sapiens
tgcttggtgaccatggaatcagaccaaaggaaagtggttggtgatggtggaagtatttccaagggaaaaatatgttctttaaaagcacgagcagtcttgattgatatggaagaaggggtagtgaatgaaattctgcagggaccactgagagatgtatttgatacgaaacagctcatcactgatatttctggctcaggaaataattgggccgtgggtcacaaagttttcggcagtctttaccaagaccagattttagagaaattcagaaagtcggcagagcactgtgattgcttgcagtgtttctttataatacattccatgggaggaggaacaggatctggacttggcacatttcttttaaaggtgcttgaagacgaattcccagaagtatacagatttgtgacttccatttatccttctggtgaggatgatgtcataacctcaccttataatagcatcttggcaatgaaggaacttaatgagcatgcagactgtgtattgcccattgacaatcaatctttatttgacatcattagcaaaatcgacctcatggtgaattctggaaagttgggtacaactgtgaagccaaagagtctggttacttcaagttctggggctttaaaaaagcagcataagaagccctttgatgcaatgaataacattgtggcaaatttgctcctcaacctaacgagctctgcaagatttgaagggtcccttaatatggaccttaatgaaatcagcatgaatttagttccttttcctcaacttcattatctcgtgtcaagcctaacacctctgtatacactgacagatgttaacattcctcctagaagattggatcagatgttttcagatgcctttagtaaagatcaccagctgcttcgggcagaccccaaacacagtctttacctcgcctgtgcactcatggttagaggaaatgtacaaatttcagatcttcgtagaaatattgaaagattaaaaccatctctacaatttgtctcctggaatcaagaaggctggaagaccagcctgtgttccgtacctcctgtgggccattctcattcgttattagctttagcaaataacacatgtgtgaagcccaccttcatggaactgaaagagagattcatgaggctctacaagaaaaaggctcaccttcatcactatctacaagttgaagggatggaagaaagctgtttcacagaagctgtgtcatctttatcagcactcatacaggaatatgaccaactggacgccacaaaaaacatgcctgtgcaggatttacccagactaagcatagctatgtgaaaaagaaaccctcaaaaatactttcttaatttcacattgttttttctgacctttctgtttcaacatttttgtaatttggaaactccagttttttcatattatcgggaaatatttttgtctaaaagagtgatttctgtttaatcgcaatttgttggtaataccaatgtgtgaaattagtgaaatcttagtaccttaacttcaaacatttctcttcagaaaagttcccttttctaaaattgagataacatagttcttgaatattttgctgtatttatagcctcatatttaggcatttatgcactgatgtgtcttcaataaaaatcttgtacagatatatttttataattatttataatttatattttgatattctatttaagttatcctgattctttaaaagtagttattgggagtagaagaacacaatataaatatttccgtgtaatagccaccaacttttcaggcataggttttattacaactgttaaggaggttttgcttcttctttagataacaacttgtttgcccaaaagaatcctaatttgtacacttaacatgtatttgtattaaactttttaaataattgctttcttatcaaaccaattgattttataataaatgtctatatttttcaacagtgctacttgttattgttctgcatgacatttatgcaaatgaacagaatgttactaagcttgatatcttccaaactttgcaataaatggctataattgttccggttactataatc

SEQ ID NO: 363954 - DNA, 1369 bp, Homo sapiens
ctctagcagagcgccgttgctgggggaatgcagaagcggccgcgggctagcaagctcccggagccggcggcgcaccaccatgacccagtcggtggtcgtacagggtaagctacgccgggcgggtagagacctggtcgccgcggaatccagcggccatgtttcctgcttaatgtcctattctctttccttcctctcctccggtcgcagtcggccagtgcggaaaccagatcggctgctgcttctgggacctggcactaagggagcacgccgcggtcaaccaggtacccgcccgccgccgcgagccccctcgcctgtcagctaggtcttccagcccatacgcaggaaataatcgacttgagctttcatctgacccgtttaagatgcatgggatcttcccagtaaagaacgtactggtttttaaacatgttgcgtcagacacacactaaactaaaagaacactggccagcgaccttagtcttaacgtttttcctgattctcagggtctcctttttattggtgttcgtgtgcagaacagtgagatttgtatatgggaaagtactttgtaaaatagataacacgtgtggttattgtattccttaatttaaccagtcagcttttaaaaagattacgaagaatccagagaacgctcatttgatggacctgtcctacagtcctatgggtgaaatcctttctttagcaccccctgctgaactttttatctgtagatctggcatttactcttctaaggagattgggaagagtcaggctccgcattttgtgatacttggtttttcttatcagagtctcatcctagccattacagtattatgtaattaaaattgaaagaacttgatttgggcgagaagcaaaacctaaatgctattaacatatgtttttctttttagaaaggaatttatgatgaggcaataagcagcttctttagaaatgtggacaccaggtaagatgggattaaagtctgtcacagtgtgatactttaagtttcagtagcttgggagagaattcttcaaaggacaataaaaatagccagctgcgaagttgtgtttttttgtttcattattgaaagcatatttattctattagattattaatattcttatatcattttcccgaagaagacaacagatttccctttagtgtgacttcttttaacttaaccttgaaataagtttcattaaaagaaagctgaaattttcccagagggcatcttgttaatgcatcctgtaataactaacttttgaaagaaaaatatattgtttacatatatgctgtaagtataaaaatatacttaaaaaggtgacaagcagttgttggattgtttttgtttatttaataaagagtatatgtaagt

SEQ ID NO: 363955 - DNA, 2225 bp, Homo sapiens
tccccatattatgcatggcagcacttgctactttcttttaagttgataacaatcagctcaggggtttgctctgcttgcaaggtcactgcaagaatgaacattgaactttggactatacctgaggggtgaggtaaacaacaggactataaatatcagagtgtgctgctgtggctttgtggagctgccagagtaaagcaaagagaaaggaagcaggcccgttggaagtggttgtgacaaccccagcaatgtggagaagcctggggcttgccctggctctctgtctcctcccatcgggaggaacagagagccaggaccaaagctccttatgtaagcaacccccagcctggagcataagagatcaagatccaatgctaaactccaatggttcagtgactgtggttgctcttcttcaagccagctgatacctgtgcatactgcaggcatctaaattagaagacctgcgagtaaaactgaagaaagaaggatattctaatatttcttatattgttgttaatcatcaaggaatctcttctcgattaaaatacacacatcttaagaataaggtttcagagcatattcctgtttatcaacaagaagaaaaccaaacagatgtctggactcttttaaatggaagcaaagatgacttcctcatatatgatagatgtggccgtcttgtatatcatcttggtttgcctttttccttcctaactttcccatatgtagaagaagccattaagattgcttactgtgaaaagaaatgtggaaactgctctctcacgactctcaaagatgaagacttttgtaaacgtgtatctttggctactgtggataaaacagttgaaactccatcgcctcattaccatcatgagcatcatcacaatcatggacatcagcaccttggcagcagtgagctttcagagaatcagcaaccaggagcaccaaatgctcctactcatcctgctcctccaggccttcatcaccaccataagcacaagggtcagcataggcagggtcacccagagaaccgagatatgccagcaagtgaagatttacaagatttacaaaagaagctctgtcgaaagagatgtataaatcaattactctgtaaattgcccacagattcagagttggctcctaggagctgatgctgccattgtcgacatctgatatttgaaaaaacagggtctgcaatcacctgacagtgtaaagaaaacctcccatctttatgtagctgacagggacttcgggcagaggagaacataactgaatcttgtcagtgacgtttgcctccagctgcctgacaaataagtcagcagcttatacccacagaagccagtgccagttgacgctgaaagaatcaggcaaaaaagtgagaatgaccttcaaactaaatatttaaaataggacatactccccaatttagtctagacacaatttcatttccagcatttttataaactaccaaattagtgaaccaaaaatagaaattagatttgtgcaaacatggagaaatctactgaattggcttccagattttaaattttatgtcatagaaatattgactcaaaccatattttttatgatggagcaactgaaaggtgattgcagcttttggttaatatgtctttttttttctttttccagtgttctatttgctttaatgagaatagaaacgtaaactatgacctaggggtttctgttggataattagcagtttagaatggaggaagaacaacaaagacatgctttccatttttttctttacttatctctcaaaacaatattactttgtcttttcaatcttctacttttaactaataaaataagtggattttgtattttaagatccagaaatacttaacacgtgaatattttgctaaaaaagcatatataactattttaaatatccatttatcttttgtatatctaagactcatcctgatttttactatcacacatgaataaagcctttgtatctttctttctctaatgttgtatcatactcttctaaaacttgagtggctgtcttaaaagatataaggggaaagataatattgtctgtctctatattgcttagtaagtatttccatagtcaatgatggtttaataggtaaaccaaaccctataaacctgacctcctttatggttaatactattaagcaagaatgcagtacagaattggatacagtacggatttgtccaaataaattcaataaaaaccttaa

SEQ ID NO: 363956 - DNA, 2122 bp, Homo sapiens
tacgtttataaagaacaagacatagaaataaacaacaaggaggtttactgcgacgtgaccactatgctactttctgtctctgtgaatttgactactctaagtgcctcagctacttgcaatatgtgctctgggctggacgcggtggctcacgcttgtaatcccagcactttgggaggccaaggcaggcggatcacgaggacaaccccagcaatgtggagaagcctggggcttgccctggctctctgtctcctcccatcgggaggaacagagagccaggaccaaagctccttatgtaagcaacccccagcctggagcataagagatcaagatccaatgctaaactccattagaagacctgcgagtaaaactgaagaaagaaggatattctaatatttcttatattgttgttaatcatcaaggaatctcttctcgattaaaatacacacatcttaagaataaggtttcagagcatattcctgtttatcaacaagaagaaaaccaaacagatgtctggactcttttaaatggaagcaaagatgacttcctcatatatgatagatgtggccgtcttgtatatcatcttggtttgcctttttccttcctaactttcccatatgtagaagaagccattaagattgcttactgtgaaaagaaatgtggaaactgctctctcacgactctcaaagatgaagacttttgtaaacgtgtatctttggctactgtggataaaacagttgaaactccatcgcctcattaccatcatgagcatcatcacaatcatggacatcagcaccttggcagcagtgagctttcagagaatcagcaaccaggagcaccaaatgctcctactcatcctgctcctccaggccttcatcaccaccataagcacaagggtcagcataggcagggtcacccagagaaccgagatatgccagcaagtgaagatttacaagatttacaaaagaagctctgtcgaaagagatgtataaatcaattactctgtaaattgcccacagattcagagttggctcctaggagctgatgctgccattgtcgacatctgatatttgaaaaaacagggtctgcaatcacctgacagtgtaaagaaaacctcccatctttatgtagctgacagggacttcgggcagaggagaacataactgaatcttgtcagtgacgtttgcctccagctgcctgacaaataagtcagcagcttatacccacagaagccagtgccagttgacgctgaaagaatcaggcaaaaaagtgagaatgaccttcaaactaaatatttaaaataggacatactccccaatttagtctagacacaatttcatttccagcatttttataaactaccaaattagtgaaccaaaaatagaaattagatttgtgcaaacatggagaaatctactgaattggcttccagattttaaattttatgtcatagaaatattgactcaaaccatattttttatgatggagcaactgaaaggtgattgcagcttttggttaatatgtctttttttttctttttccagtgttctatttgctttaatgagaatagaaacgtaaactatgacctaggggtttctgttggataattagcagtttagaatggaggaagaacaacaaagacatgctttccatttttttctttacttatctctcaaaacaatattactttgtcttttcaatcttctacttttaactaataaaataagtggattttgtattttaagatccagaaatacttaacacgtgaatattttgctaaaaaagcatatataactattttaaatatccatttatcttttgtatatctaagactcatcctgatttttactatcacacatgaataaagcctttgtatctttctttctctaatgttgtatcatactcttctaaaacttgagtggctgtcttaaaagatataaggggaaagataatattgtctgtctctatattgcttagtaagtatttccatagtcaatgatggtttaataggtaaaccaaaccctataaacctgacctcctttatggttaatactattaagcaagaatgcagtacagaattggatacagtacggatttgtccaaataaattcaataaaaaccttaa

SEQ ID NO: 363957 - DNA, 2486 bp, Homo sapiens
tacgtttataaagaacaagacatagaaataaacaacaaggaggtttactgcgacgtgaccactatgctactttctgtctctgtgaatttgactactctaagtgcctcagctacttgcaatatgtgctctgggctggacgcggtggctcacgcttgtaatcccagcactttgggaggccaaggcaggcggatcacgaggacaaccccagcaatgtggagaagcctggggcttgccctggctctctgtctcctcccatcgggaggaacagagagccaggaccaaagctccttatgtaagcaacccccagcctggagcataagagatcaagatccaatgctaaactccaatggttcagtgactgtggttgctcttcttcaagccagctgatacctgtgcatactgcaggcatctaaattagaagacctgcgagtaaaactgaagaaagaaggatattctaatatttcttatattgttgttaatcatcaaggaatctcttctcgattaaaatacacacatcttaagaataaggtttcagagcatattcctgtttatcaacaagaagaaaaccaaacagatgtctggactcttttaaatggaagcaaagatgacttcctcatatatgatagatgtggccgtcttgtatatcatcttggtttgcctttttccttcctaactttcccatatgtagaagaagccattaagattgcttactgtgaaaagaaatgtggaaactgctctctcacgactctcaaagatgaagacttttgtaaacgtgtatctttggctactgtggataaaacagttgaaactccatcgcctcattaccatcatgagcatcatcacaatcatggacatcagcaccttggcagcagtgagctttcagagaatcagcaaccaggagcaccaaatgctcctactcatcctgctcctccaggccttcatcaccaccataagcacaagggtcagcataggcagggtcacccagagaaccgagatatgccagcaagtgaagatttacaagatttacaaaagaagctctgtcgaaagagatgtataaatcaattactctgtaaattgcccacagattcagagttggctcctaggagctgatgctgccattgtcgacatctgatatttgaaaaaacagggtctgcaatcacctgacagtgtaaagaaaacctcccatctttatgtagctgacagggacttcgggcagaggagaacataactgaatcttgtcagtgacgtttgcctccagctgcctgacaaataagtcagcagcttatacccacagaagccagtgccagttgacgctgaaagaatcaggcaaaaaagtgagaatgaccttcaaactaaatatttaaaataggacatactccccaatttagtctagacacaatttcatttccagcatttttataaactaccaaattagtgaaccaaaaatagaaattagatttgtgcaaacatggagaaatctactgaattggcttccagattttaaattttatgtcatagaaatattgactcaaaccatattttttatgatggagcaactgaaaggtgattgcagcttttggttaatatgtctttttttttctttttccagtgttctatttgctttaatgagaatagaaacgtaaactatgacctaggggtttctgttggataattagcagtttagaatggaggaagaacaacaaagacatgctttccatttttttctttacttatctctcaaaacaatattactttgtcttttcaatcttctacttttaactaataaaataagtggattttgtattttaagatccagaaatacttaacacgtgaatattttgctaaaaaagcatatataactattttaaatatccatttatcttttgtatatctaagactcatcctgatttttactatcacacatgaataaagcctttgtatctttctttctctaatgttgtatcatactcttctaaaacttgagtggctgtcttaaaagatataaggggaaagataatattgtctgtctctatattgcttagtaagtatttccatagtcaatgatggtttaataggtaaaccaaaccctataaacctgacctcctttatggttaatactattaagcaagaatgcagtacagaattggatacagtacggatttgtccaaataaattcaataaaaaccttaaagctgacttcgtttgttatgtaggctgtatgcatatattgaaaacagaagtgaaactttcgattgcttttaaataaataccaactaatgaatttactgctaagctcaaaaccgtctacgcttaaggtgagaatctttgccaacagaaaggcgttgctctaaatcgcgaatggtattacgaagaattgcaatctccttgtttttttcttcttgaaaatgctgaagtttctaaacgaaacaaaaaatttgttattagaattcagaaataaaatttagtacaaggaacaacaaaataac

SEQ ID NO: 363958 - DNA, 2536 bp, Homo sapiens
  misc_feature (2239)..(2239): n is a, c, g, or t
tacgtttataaagaacaagacatagaaataaacaacaaggaggtttactgcgacgtgaccactatgctactttctgtctctgtgaatttgactactctaagtgcctcagctacttgcaatatgtgctctgggctggacgcggtggctcacgcttgtaatcccagcactttgggaggccaaggcaggcggatcacgaggacaaccccagcaatgtggagaagcctggggcttgccctggctctctgtctcctcccatcgggaggaacagagagccaggaccaaagctccttatgtaagcaacccccagcctggagcataagagatcaagatccaatgctaaactccaatggttcagtgactgtggttgctcttcttcaagccagctgatacctgtgcatactgcaggcatctaaattagaagacctgcgagtaaaactgaagaaagaaggatattctaatatttcttatattgttgttaatcatcaaggaatctcttctcgattaaaatacacacatcttaagaataaggtttcagagcatattcctgtttatcaacaagaagaaaaccaaacagatgtctggactcttttaaatggaagcaaagatgacttcctcatatatgatagatgtggccgtcttgtatatcatcttggtttgcctttttccttcctaactttcccatatgtagaagaagccattaagattgcttactgtgaaaagaaatgtggaaactgctctctcacgactctcaaagatgaagacttttgtaaacgtgtatctttggctactgtggataaaacagttgaaactccatcgcctcattaccatcatgagcatcatcacaatcatggacatcagcaccttggcagcagtgagctttcagagaatcagcaaccaggagcaccaaatgctcctactcatcctgctcctccaggccttcatcaccaccataagcacaagggtcagcataggcagggtcacccagagaaccgagatatgccagcaagtgaagatttacaagatttacaaaagaagctctgtcgaaagagatgtataaatcaattactctgtaaattgcccacagattcagagttggctcctaggagctgatgctgccattgtcgacatctgatatttgaaaaaacagggtctgcaatcacctgacagtgtaaagaaaacctcccatctttatgtagctgacagggacttcgggcagaggagaacataactgaatcttgtcagtgacgtttgcctccagctgcctgacaaataagtcagcagcttatacccacagaagccagtgccagttgacgctgaaagaatcaggcaaaaaagtgagaatgaccttcaaactaaatatttaaaataggacatactccccaatttagtctagacacaatttcatttccagcatttttataaactaccaaattagtgaaccaaaaatagaaattagatttgtgcaaacatggagaaatctactgaattggcttccagattttaaattttatgtcatagaaatattgactcaaaccatattttttatgatggagcaactgaaaggtgattgcagcttttggttaatatgtctttttttttctttttccagtgttctatttgctttaatgagaatagaaacgtaaactatgacctaggggtttctgttggataattagcagtttagaatggaggaagaacaacaaagacatgctttccatttttttctttacttatctctcaaaacaatattactttgtcttttcaatcttctacttttaactaataaaataagtggattttgtattttaagatccagaaatacttaacacgtgaatattttgctaaaaaagcatatataactattttaaatatccatttatcttttgtatatctaagactcatcctgatttttactatcacacatgaataaagcctttgtatctttctttctctaatgttgtatcatactcttctaaaacttgagtggctgtcttaaaagatataaggggaaagataatattgtctgtctctatattgcttagtaagtatttccatagtcaatgatggtttaataggtaaaccaaaccctataaacctgacctcctttatggttaatactattaagcaagaatgcagtacagaattggatacagtacggatttgtccaaataaattcaataaaaaccttaaaaaaaaaaaaaaaaaaaaaaaaaaaaaaaaaaacaaaaaaaaaaaaaanaaaaaaaaaaaaaaaaaacaaaaaaacaactaatacaaaaacataaaccaccctccttcccaaaaaaaacaaaaccacacaggcgcccaaatccgcgcctttttgcgacacaccccccttttgcgggggttattcacaattacgggccgcgttcttcaaccccgcgcgctcggaacaaccctgggtcccccccattaaaccctctttgcacaaacccccctcttcccccgtcgcgcccaaactcctggcccccccctcccaccctcttctccctctctccacccttcgtgcgtgccg

SEQ ID NO: 363959 - DNA, 2136 bp, Homo sapiens
tacgtttataaagaacaagacatagaaataaacaacaaggaggtttactgcgacgtgaccactatgctactttctgtctctgtgaatttgactactctaagtgcctcagctacttgcaatatgtgctctgggctggacgcggtggctcacgcttgtaatcccagcactttgggaggccaaggcaggcggatcacgaggacaaccccagcaatgtggagaagcctggggcttgccctggctctctgtctcctcccatcgggaggaacagagagccaggaccaaagctccttatgtaagcaacccccagcctggagcataagagatcaagatccaatgctaaactccaatggttcagtgactgtggttgctcttcttcaagccagctgatacctgtgcatactgcaggcatctaaattagaagacctgcgagtaaaactgaagaaagaaggatattctaatatttcttatattgttgttaatcatcaaggaatctcttctcgattaaaatacacacatcttaagaataaggtttcagagcatattcctgtttatcaacaagaagaaaaccaaacagatgtctggactcttttaaatggaagcaaagatgacttcctcatatatgatagatgtggccgtcttgtatatcatcttggtttgcctttttccttcctaactttcccatatgtagaagaagccattaagattgcttactgtgaaaagaaatgtggaaactgctctctcacgactctcaaagatgaagacttttgtaaacgtgtatctttggctactgtggatggacatcagcaccttggcagcagtgagctttcagagaatcagcaaccaggagcaccaaatgctcctactcatcctgctcctccaggccttcatcaccaccataagcacaagggtcagcataggcagggtcacccagagaaccgagatatgccagcaagtgaagatttacaagatttacaaaagaagctctgtcgaaagagatgtataaatcaattactctgtaaattgcccacagattcagagttggctcctaggagctgatgctgccattgtcgacatctgatatttgaaaaaacagggtctgcaatcacctgacagtgtaaagaaaacctcccatctttatgtagctgacagggacttcgggcagaggagaacataactgaatcttgtcagtgacgtttgcctccagctgcctgacaaataagtcagcagcttatacccacagaagccagtgccagttgacgctgaaagaatcaggcaaaaaagtgagaatgaccttcaaactaaatatttaaaataggacatactccccaatttagtctagacacaatttcatttccagcatttttataaactaccaaattagtgaaccaaaaatagaaattagatttgtgcaaacatggagaaatctactgaattggcttccagattttaaattttatgtcatagaaatattgactcaaaccatattttttatgatggagcaactgaaaggtgattgcagcttttggttaatatgtctttttttttctttttccagtgttctatttgctttaatgagaatagaaacgtaaactatgacctaggggtttctgttggataattagcagtttagaatggaggaagaacaacaaagacatgctttccatttttttctttacttatctctcaaaacaatattactttgtcttttcaatcttctacttttaactaataaaataagtggattttgtattttaagatccagaaatacttaacacgtgaatattttgctaaaaaagcatatataactattttaaatatccatttatcttttgtatatctaagactcatcctgatttttactatcacacatgaataaagcctttgtatctttctttctctaatgttgtatcatactcttctaaaacttgagtggctgtcttaaaagatataaggggaaagataatattgtctgtctctatattgcttagtaagtatttccatagtcaatgatggtttaataggtaaaccaaaccctataaacctgacctcctttatggttaatactattaagcaagaatgcagtacagaattggatacagtacggatttgtccaaataaattcaataaaaaccttaa

SEQ ID NO: 363960 - DNA, 2081 bp, Homo sapiens
  misc_feature (1992)..(1992): n is a, c, g, or t
  misc_feature (2023)..(2023): n is a, c, g, or t
  misc_feature (2078)..(2078): n is a, c, g, or t
tacgtttataaagaacaagacatagaaataaacaacaaggaggtttactgcgacgtgaccactatgctactttctgtctctgtgaatttgactactctaagtgcctcagctacttgcaatatgtgctctgggctggacgcggtggctcacgcttgtaatcccagcactttgggaggccaaggcaggcggatcacgaggacaaccccagcaatgtggagaagcctggggcttgccctggctctctgtctcctcccatcgggaggaacagagagccaggaccaaagctccttatgtaagcaacccccagcctggagcataagagatcaagatccaatgctaaactccaatggttcagtgactgtggttgctcttcttcaagccagctgatacctgtgcatactgcaggcatctaaattagaagacctgcgagtaaaactgaagaaagaaggatattctaatatttcttatattgttgttaatcatcaaggaatctcttctcgattaaaatacacacatcttaagaataaggtttcagagcatattcctgtttatcaacaagaagaaaaccaaacagatgtctggactcttttaaatggaagcaaagatgacttcctcatatatgatagatgtggccgtcttgtatatcatcttggtttgcctttttccttcctaactttcccatatgtagaagaagccattaagattgcttactgtgaaaagaaatgtggaaactgctctctcacgactctcaaagatgaagacttttgtaaacgtgtatctttggctactgtggataaaacagttgaaactccatcgcctcattaccatcatgagcatcatcacaatcatggacatcagcaccttggcagcagtgagctttcagagaatcagcaaccaggagcaccaaatgctcctactcatcctgctcctccaggccttcatcaccaccataagcacaagggtcagcataggcagggtcacccagagaaccgagatatgccagcaagtgaagatttacaagatttacaaaagaagctctgtcgaaagagatgtataaatcaattactctgtaaattgcccacagattcagagttggctcctaggagctgatgctgccattgtcgacatctgatatttgaaaaaacagggtctgcaatcacctgacagtgtaaagaaaacctcccatctttatgtagctgacagggacttcgggcagaggagaacataactgaatcttgtcagtgacgtttgcctccagctgcctgacaaataagtcagcagcttatacccacagaagccagtgccagttgacgctgaaagaatcaggcaaaaaagtgagaatgaccttcaaactaaatatttaaaataggacatactccccaatttagtctagacacaatttcatttccagcatttttataaactaccaaattagtgaaccaaaaatagaaattagatttgtgcaaacatggagaaatctactgaattggcttccagattttaaattttatgtcatagaaatattgactcaaaccatattttttatgatggagcaactgaaaggtgattgcagcttttggttaatatgtctttttttttctttttccagtgttctatttgctttaatgagaatagaaacgtaaactatgacctaggggtttctgttggataattagcagtttagaatggaggaagaacaacaaagacatgctttccatttttttctttacttatctctcaaaacaatattactttgtcttttcaatcttctacttttaactaataaaataagtggattttgtattttaagatccagaaatacttaacacgtgaatattttgctaaaaaagcatatataactattttaaatatccatttatcttttgtatatctaagactcatcctgatttttactatcacacatgaataaagcctttgtatctttctttctctaatgttgtatcatactcttctaaaacctatattggtaanaaggatttcatagcaaagaagggttaatagnaaaccaaccctttaacctgccttcttatgggtaactttttaacaagaggctcccnatt

SEQ ID NO: 363961 - DNA, 2416 bp, Homo sapiens
tacgtttataaagaacaagacatagaaataaacaacaaggaggtttactgcgacgtgaccactatgctactttctgtctctgtgaatttgactactctaagtgcctcagctacttgcaatatgtgctctgggctggacgcggtggctcacgcttgtaatcccagcactttgggaggccaaggcaggcggatcacgaggacaaccccagcaatgtggagaagcctggggcttgccctggctctctgtctcctcccatcgggaggaacagagagccaggaccaaagctccttatgtaagcaacccccagcctggagcataagagatcaagatccaatgctaaactccaatggttcagtgactgtggttgctcttcttcaagccagctgatacctgtgcatactgcaggcatctaaattagaagacctgcgagtaaaactgaagaaagaaggatattctaatatttcttatattgttgttaatcatcaaggaatctcttctcgattaaaatacacacatcttaagaataaggtttcagagcatattcctgtttatcaacaagaagaaaaccaaacagatgtctggactcttttaaatggaagcaaagatgacttcctcatatatgatagatgtggccgtcttgtatatcatcttggtttgcctttttccttcctaactttcccatatgtagaagaagccattaagattgcttactgtgaaaagaaatgtggaaactgctctctcacgactctcaaagatgaagacttttgtaaacgtgtatctttggctactgtggataaaacagttgaaactccatcgcctcattaccatcatgagcatcatcacaatcatggacatcagcaccttggcagcagtgagctttcagagaatcagcaaccaggagcaccaaatgctcctactcatcctgctcctccaggccttcatcaccaccataagcacaagggtcagcataggcagggtcacccagagaaccgagatatgccagcaagtgaagatttacaagatttacaaaagaagctctgtcgaaagagatgtataaatcaattactctgtaaattgcccacagattcagagttggctcctaggagctgatgctgccattgtcgacatctgatatttgaaaaaacagggtctgcaatcacctgacagtgtaaagaaaacctcccatctttatgtagctgacagggacttcgggcagaggagaacataactgaatcttgtcagtgacgtttgcctccagctgcctgacaaataagtcagcagcttatacccacagaagccagtgccagttgacgctgaaagaatcaggcaaaaaagtgagaatgaccttcaaactaaatatttaaaataggacatactccccaatttagtctagacacaatttcatttccagcatttttataaactaccaaattagtgaaccaaaaatagaaattagatttgtgcaaacatggagaaatctactgaattggcttccagattttaaattttatgtcatagaaatattgactcaaaccatattttttatgatggagcaactgaaaggtgattgcagcttttggttaatatgtctttttttttctttttccagtgttctatttgctttaatgagaatagaaacgtaaactatgacctaggggtttctgttggataattagcagtttagaatggaggaagaacaacaaagacatgctttccatttttttctttacttatctctcaaaacaatattactttgtcttttcaatcttctacttttaactaataaaataagtggattttgtattttaagatccagaaatacttaacacgtgaatattttgctaaaaaagcatatataactattttaaatatccatttatcttttgtatatctaagactcatcctgatttttactatcacacatgaataaagcctttgtatctttctttctctaatgttgtatcatactcttctaaaacttccatagtcaatgatggtttaataggtaaaccaaaccctataaacctgacctcctttatggttaatactattaagcaagaatgcagtacagaattggatacagtacggatttgtccaaataaattcaataaaaaccttaaagctgacttcgtttgttatgtaggctgtatgcatatattgaaaacagaagtgaaactttcgattgcttttaaataaataccaactaatgaatttactgctaagctcaaaaccgtctacgcttaaggtgagaatctttgccaacagaaaggcgttgctctaaatcgcgaatggtattacgaagaattgcaatctccttgtttttttcttcttgaaaatgctgaagtttctaaacgaaacaaaaaatttgttattagaattcagaaataaaatttagtacaaggaacaacaaaataac

SEQ ID NO: 363962 - DNA, 1959 bp, Homo sapiens
tacgtttataaagaacaagacatagaaataaacaacaaggaggtttactgcgacgtgaccactatgctactttctgtctctgtgaatttgactactctaagtgcctcagctacttgcaatatgtgctctgggctggacgcggtggctcacgcttgtaatcccagcactttgggaggccaaggcaggcggatcacgaggacaaccccagcaatgtggagaagcctggggcttgccctggctctctgtctcctcccatcgggaggaacagagagccaggaccaaagctccttatgtaagcaacccccagcctggagcataagagatcaagatccaatgctaaactccaatggttcagtgactgtggttgctcttcttcaagccagctgatacctgtgcatactgcaggcatctaaattagaagacctgcgagtaaaactgaagaaagaaggatattctaatatttcttatattgttgttaatcatcaaggaatctcttctcgattaaaatacacacatcttaagaataaggtttcagagcatattcctgtttatcaacaagaagaaaaccaaacagatgtctggactcttttaaatggaagcaaagatgacttcctcatatatgatagatgtggccgtcttgtatatcatcttggtttgcctttttccttcctaactttcccatatgtagaagaagccattaagattgcttactgtgaaaagaaatgtggaaactgctctctcacgactctcaaagatgaagacttttgtaaacgtgtatctttggctactgtggataaaacagttgaaactccatcgcctcattaccatcatgagcatcatcacaatcatggacatcagcaccttggcagcagtgagctttcagagaatcagcaaccaggagcaccaaatgctcctactcatcctgctcctccaggccttcatcaccaccataagcacaagggtcagcataggcagggtcacccagagaaccgagatatgccagcaagtgaagatttacaagatttacaaaagaagctctgtcgaaagagatgtataaatcaattactctgtaaattgcccacagattcagagttggctcctaggagctgatgctgccattgtcgacatctgatatttgaaaaaacagggtctgcaatcacctgacagtgtaaagaaaacctcccatctttatgtagctgacagggacttcgggcagaggagaacataactgaatcttgtcagtgacgtttgcctccagctgcctgacaaataagtcagcagcttatacccacagaagccagtgccagttgacgctgaaagaatcaggcaaaaaagtgagaatgaccttcaaactaaatatttaaaataggacatactccccaatttagtctagacacaatttcatttccagcatttttataaactaccaaattagtgaaccaaaaatagaaattagatttgtgcaaacatggagaaatctactgaattggcttccagattttaaattttatgtcatagaaatattgactcaaaccatattttttatgatggagcaactgaaaggtgattgcagcttttggttaatatgtctttttttttctttttccagtgttctatttgctttaatgagaatagaaacgtaaactatgacctaggggtttctgttggataattagcagtttagaatggaggaagaacaacaaagacatgctttccatttttttctttacttatctctcaaaacaatattactttgtcttttcaatcttctacttttaactaataaaataagtggattttgtattttaagatccagaaatacttaacacgtgaatattttgctaaaaaagcatatataactattttaaatatccatttatcttttttaaagatacaaaggctttattcatgtgtgatagtaaaaatcaggatgagtcttagatatacaaaaggtcgacg

SEQ ID NO: 363963 - DNA, 2400 bp, Homo sapiens
tacgtttataaagaacaagacatagaaataaacaacaaggaggtttactgcgacgtgaccactatgctactttctgtctctgtgaatttgactactctaagtgcctcagctacttgcaatatgtgctctgggctggacgcggtggctcacgcttgtaatcccagcactttgggaggccaaggcaggcggatcacgaggacaaccccagcaatgtggagaagcctggggcttgccctggctctctgtctcctcccatcgggaggaacagagagccaggaccaaagctccttatgtaagcaacccccagcctggagcataagagatcaagatccaatgctaaactccaatggttcagtgactgtggttgctcttcttcaagccagctgatacctgtgcatactgcaggcatctaaattagaagacctgcgagtaaaactgaagaaagaaggatattctaatatttcttatattgttgttaatcatcaaggaatctcttctcgattaaaatacacacatcttaagaataaggtttcagagcatattcctgtttatcaacaagaagaaaaccaaacagatgtctggactcttttaaatggaagcaaagatgacttcctcatatatgatagatgtggccgtcttgtatatcatcttggtttgcctttttccttcctaactttcccatatgtagaagaagccattaagattgcttactgtgaaaagaaatgtggaaactgctctctcacgactctcaaagatgaagacttttgtaaacgtgtatctttggctactgtggataaaacagttgaaactccatcgcctcattaccatcatgagcatcatcacaatcatggacatcagcaccttggcagcagtgagctttcagagaatcagcaaccaggagcaccaaatgctcctactcatcctgctcctccaggccttcatcaccaccataagcacaagggtcagcataggcagggtcacccagagaaccgagatatgccagcaagtgaagatttacaagatttacaaaagaagctctgtcgaaagagatgtataaatcaattactctgtaaattgcccacagattcagagttggctcctaggagctgatgctgccattgtcgacatctgatatttgaaaaaacagggtctgcaatcacctgacagtgtaaagaaaacctcccatctttatgtagctgacagggacttcgggcagaggagaacataactgaatcttgtcagtgacgtttgcctccagctgcctgacaaataagtcagcagcttatacccacagaagccagtgccagttgacgctgaaagaatcaggcaaaaaagtgagaatgaccttcaaactaaatatttaaaataggacatactccccaatttagtctagacacaatttcatttccagcatttttataaactaccaaattagtgaaccaaaaatagaaattagatttgtgcaaacatggagaaatctactgaattggcttccagattttaaattttatgtcatagaaatattgactcaaaccatattttttatgatggagcaactgaaaggtgattgcagcttttggttaatatgtctttttttttctttttccagtgttctatttgctttaatgagaatagaaacgtaaactatgacctaggggtttctgttggataattagcagtttagaatggaggaagaacaacaaagacatgctttccatttttttctttacttatctctcaaaacaatattactttgtcttttcaatcttctacttttaactaataaaataagtggattttgtattttaagaacgtgaatattttgctaaaaaagcatatataactattttaaatatccatttatcttttgtatatctaagactcatcctgatttttactatcacacatgaataaagcctttgtatctttctttctctaatgttgtatcatactcttctaaaacttccatagtcaatgatggtttaataggtaaaccaaaccctataaacctgacctcctttatggttaatactattaagcaagaatgcagtacagaattggatacagtacggatttgtccaaataaattcaataaaaaccttaaagctgacttcgtttgttatgtaggctgtatgcatatattgaaaacagaagtgaaactttcgattgcttttaaataaataccaactaatgaatttactgctaagctcaaaaccgtctacgcttaaggtgagaatctttgccaacagaaaggcgttgctctaaatcgcgaatggtattacgaagaattgcaatctccttgtttttttcttcttgaaaatgctgaagtttctaaacgaaacaaaaaatttgttattagaattcagaaataaaatttagtacaaggaacaacaaaataac

SEQ ID NO: 363964 - DNA, 1725 bp, Homo sapiens
  misc_feature (1448)..(1448): n is a, c, g, or t
  misc_feature (1477)..(1477): n is a, c, g, or t
  misc_feature (1541)..(1541): n is a, c, g, or t
  misc_feature (1567)..(1567): n is a, c, g, or t
  misc_feature (1609)..(1609): n is a, c, g, or t
  misc_feature (1654)..(1654): n is a, c, g, or t
  misc_feature (1700)..(1700): n is a, c, g, or t
tacgtttataaagaacaagacatagaaataaacaacaaggaggtttactgcgacgtgaccactatgctactttctgtctctgtgaatttgactactctaagtgcctcagctacttgcaatatgtgctctgggctggacgcggtggctcacgcttgtaatcccagcactttgggaggccaaggcaggcggatcacgaggacaaccccagcaatgtggagaagcctggggcttgccctggctctctgtctcctcccatcgggaggaacagagagccaggaccaaagctccttatgtaagcaacccccagcctggagcataagagatcaagatccaatgctaaactccaatggttcagtgactgtggttgctcttcttcaagccagctgatacctgtgcatactgcaggcatctaaattagaagacctgcgagtaaaactgaagaaagaaggatattctaatatttcttatattgttgttaatcatcaaggaatctcttctcgattaaaatacacacatcttaagaataaggtttcagagcatattcctgtttatcaacaagaagaaaaccaaacagatgtctggactcttttaaatggaagcaaagatgacttcctcatatatgatagatgtggccgtcttgtatatcatcttggtttgcctttttccttcctaactttcccatatgtagaagaagccattaagattgcttactgtgaaaagaaatgtggaaactgctctctcacgactctcaaagatgaagacttttgtaaacgtgtatctttggctactgtggataaaacagttgaaactccatcgcctcattaccatcatgagcatcatcacaatcatggacatcagcaccttggcagcagtgagctttcagagaatcagcaaccaggagcaccaaatgctcctactcatcctgctcctccaggccttcatcaccaccataagcacaagggtcagcataggcagggtcacccagagaaccgagatatgccagcaagtgaagatttacaagatttacaaaagaagctctgtcgaaagagatgtataaatcaattactctgtaaattgcccacagattcagagttggctcctaggagctgatgctgccattgtcgacatctgatatttgaaaaaacagggtctgcaatcacctgacagtgtaaagaaaacctcccatctttatgtagctgacagggacttcgggcagaggagaacataactgaatcttgtcagtgacgtttgcctccagctgcctgacaaataagtcagcagcttatacccacagaagccagtgccagttgacgctgaaagaatcaggcaaaaaagtgagaatgaccttcaaactaaatatttaaaataggacatactccccaatttagtctagacacaatttcatttccagcatttttataaactaccaaattagtgaaccactaatntatgcatagaatattgactcaacatattnttatgatggagcactgaaggtgattgcagtttggtaatatgcttttttcttttcagtgtcattngttaatggatgaacgtactatgctanggtctgtgatatacagtagatgaggagacacagctgttcatnttctactatttaacattactgcttatgttactactataaaggatngattagacgatctaccggatatgtaaagtttactataaatctactngtatagaccacgttactccagaaac

SEQ ID NO: 363965 - DNA, 2329 bp, Homo sapiens
tacgtttataaagaacaagacatagaaataaacaacaaggaggtttactgcgacgtgaccactatgctactttctgtctctgtgaatttgactactctaagtgcctcagctacttgcaatatgtgctctgggctggacgcggtggctcacgcttgtaatcccagcactttgggaggccaaggcaggcggatcacgaggacaaccccagcaatgtggagaagcctggggcttgccctggctctctgtctcctcccatcgggaggaacagagagccaggaccaaagctccttatgtaagcaacccccagcctggagcataagagatcaagatccaatgctaaactccaatggttcagtgactgtggttgctcttcttcaagccagctgatacctgtgcatactgcaggcatctaaattagaagacctgcgagtaaaactgaagaaagaaggatattctaatatttcttatattgttgttaatcatcaaggaatctcttctcgattaaaatacacacatcttaagaataaggtttcagagcatattcctgtttatcaacaagaagaaaaccaaacagatgtctggactcttttaaatggaagcaaagatgacttcctcatatatgataggtttgtacatacacacaaacacatcccaaatttaaaaataactgtttcgtatctatttatttacttcccatcacacataacaatcttctttactgttaaatacaatgccatatttcagtcttcatctcatataatctctctttaacatttagaagtaaaaatcactccttatttttgaaatactctcattttaaaaaatttctatgacactataccctgctggttttcctcatatccttcctcttctttctcctcctccacacttcctcctcttccacctcctgatttttcttcctcccacattcttccttggtttattctgtatgtgtttgtgttattcagggctatacagctttctgcctgttcacactctgcacattttacctgagcaatctcatctatcccttgattacaattaaaacacatattaggatgatcccatatatacaaagctgaaacacaatgactgaactccagacgagtctacttcctagacatattcacaaacatcttaaatttaattattcaaatctgtattgattatcttctcctaaaacatgcttatactttcacttttgtgtgatttttatatacaacctattggaggcagatgcagccaaccactagggcatataatcctataattttcagaccctgcactcccagtcatcatccactattttgcaggacatcacaaaaaccatcaggtatggcagccttgctgccatccaccccttcacaaaactgtgtgacaggaatgtattacttactccttccaccacacttcccacctcagtcagtaatcaaattctatgggttcttaatcctgagtatatttatctcatatccgtaattattatctcaagttacttcctggtgaccactcctctagatttttccactaatctcttcacttgatttcttcttgttttgtatttaatagtaagtgatttaaaataatatatttgcttttgattattgccaaatagtttataaactctttattcacatttatttttttgaaatgactttgatttttgaaatgactttttaaaaagtaaggcatgtaaaagagttcaccattccaagaggaaaatacagaaaattgattatccccataaattggcatttcggttaaataaaaagaatgaccaatttgtatatcctgtacaattctaacctaattcttttgcaaatgaataaccatatcttctaattaattttaatctaaataataattttaaggctacatacctgaatttctgaactgtaaagtgagttaatcatttaaagcatgatctgcacaaatctacttttgattctatgaacaaataaaacatttatattttgagggaatctcaattcatgcattatgccattataaacattcttagttggtgctttgttttttttgactctccggagtctggtgagccctacttggtcttacactaaatttttaaaaattcacatttcattcttttaggcctttaaacttctaatttttaggataacctaaaagtataaccctttgatagtcacataaaaccatatatactaggtaaaatgtaggcaagaagaacattttaaccccaccatttctgacaatgccacatgttctaatactttcattgtgctgaaattttcattgcattagatacatttttaaataaatgggctactggccaaggcttggaaaagtt

SEQ ID NO: 363966 - DNA, 620 bp, Homo sapiens
gatgacatttttgatattatatagtgacatatctataacatttcaaaatactagtattagactaattatagtgttgctatgacctgacctggtgtgcagtacctgggagctcatttgtagctctcatccaaagaaatttagtaaaggcgtgaaagggtcttagttatgaccattaaacctataatacctatcccagactgtatttgagtaggatcgtgatacagaaaatattatagtgacattgtatttgtcctttttcttatgtggccgtcttgtatatcatcttggtttgcctttttccttcctaactttcccatatgtagaagaagccattaagattgcttactgtgaaaagaaatgtggaaactgctctctcacggtatttttctgaattatttttctggggagaaaagaggaaatcttttaagagtttatcatgaaacacttatttagaaaactcaatgcttttgcaggtgtactaaaaataaataacaataatttttacaattaaacaaacatcctgtcatctaacctctactttatttatttatttattactattactattatttttgagacggagtctgtctctgtcgccgaggctggagtgcagtggcgcg

SEQ ID NO: 363967 - DNA, 2190 bp, Homo sapiens
tacgtttataaagaacaagacatagaaataaacaacaaggaggtttactgcgacgtgaccactatgctactttctgtctctgtgaatttgactactctaagtgcctcagctacttgcaatatgtgctctgggctggacgcggtggctcacgcttgtaatcccagcactttgggaggccaaggcaggcggatcacgaggacaaccccagcaatgtggagaagcctggggcttgccctggctctctgtctcctcccatcgggaggaacagagagccaggaccaaagctccttatgtaagcaacccccagcctggagcataagagatcaagatccaatgctaaactccaatggttcagtgactgtggttgctcttcttcaagccagctgatacctgtgcatactgcaggcatctaaattagaagacctgcgagtaaaactgaagaaagaaggatattctaatatttcttatattgttgttaatcatcaaggaatctcttctcgattaaaatacacacatcttaagaataaggtttcagagcatattcctgtttatcaacaagaagaaaaccaaacagatgtctggactcttttaaatggaagcaaagatgacttcctcatatatgatagatgtggccgtcttgtatatcatcttggtttgcctttttccttcctaactttcccatatgtagaagaagccattaagattgcttactgtgaaaagaaatgtggaaactgctctctcacgactctcaaagatgaagacttttgtaaacgtgtatctttggctactgtggataaaacagttgaaactccatcgcctcattaccatcatgagcatcatcacaatcatggacatcagcaccttggcagcagtgagctttcagagaatcagcaaccaggagcaccaaatgctcctactcatcctgctcctccaggccttcatcaccaccataagcacaagggtcagcataggcagggtcacccagagaaccgagatatgccagcaagtgaagatttacaagatttacaaaagaagctctgtcgaaagagatgtataaatcaattactctgtaaattgcccacagattcagagttggctcctaggagctgatgctgccattgtcgacatctgatatttgaaaaaacagggtctgcaatcacctgacagtgtaaagaaaacctcccatctttatgtagctgacagggacttcgggcagaggagaacataactgaatcttgtcagtgacgtttgcctccagctgcctgacaaataagtcagcagcttatacccacagaagccagtgccagttgacgctgaaagaatcaggcaaaaaagtgagaatgaccttcaaactaaatatttaaaataggacatactccccaatttagtctagacacaatttcatttccagcatttttataaactaccaaattagtgaaccaaaaatagaaattagatttgtgcaaacatggagaaatctactgaattggcttccagattttaaattttatgtcatagaaatattgactcaaaccatattttttatgatggagcaactgaaaggtgattgcagcttttggttaatatgtctttttttttctttttccagtgttctatttgctttaatgagaatagaaacgtaaactatgacctaggggtttctgttggataattagcagtttagaatggaggaagaacaacaaagacatgctttccatttttttctttacttatctctcaaaacaatattactttgtcttttcaatcttctacttttaactaataaaataagtggattttgtattttaagatccagaaatacttaacacgtgaatattttgctaaaaaagcatatataactattttaaatatccatttatcttttgtatatctaagactcatcctgatttttactatcacacatgaataaagcctttgtatctttctttctctaatgttgtatcatactcttctaaaacttgagtggctgtcttaaaagatataaggggaaagataatattgtctgtctctatattgcttagtaagtatttccatagtcaatgatggtttaataggtaaaccaaaccctataaacctgacctcctttatggttaatactattaagcaagaatgcagtacagaattggatacagtacggatttgtccaaataaattcaataaaaaccttaa

SEQ ID NO: 363968 - DNA, 2124 bp, Homo sapiens
tacgtttataaagaacaagacatagaaataaacaacaaggaggtttactgcgacgtgaccactatgctactttctgtctctgtgaatttgactactctaagtgcctcagctacttgcaatatgtgctctgggctggacgcggtggctcacgcttgtaatcccagcactttgggaggccaaggcaggcggatcacgaggacaaccccagcaatgtggagaagcctggggcttgccctggctctctgtctcctcccatcgggaggaacagagagccaggaccaaagctccttatgtaagcaacccccagcctggagcataagagatcaagatccaatgctaaactccaatggttcagtgactgtggttgctcttcttcaagccagctgatacctgtgcatactgcaggcatctaaattagaagacctgcgagtaaaactgaagaaagaaggatattctaatatttcttatattgttgttaatcatcaaggaatctcttctcgattaaaatacacacatcttaagaataaggtttcagagcatattcctgtttatcaacaagaatgtggccgtcttgtatatcatcttggtttgcctttttccttcctaactttcccatatgtagaagaagccattaagattgcttactgtgaaaagaaatgtggaaactgctctctcacgactctcaaagatgaagacttttgtaaacgtgtatctttggctactgtggataaaacagttgaaactccatcgcctcattaccatcatgagcatcatcacaatcatggacatcagcaccttggcagcagtgagctttcagagaatcagcaaccaggagcaccaaatgctcctactcatcctgctcctccaggccttcatcaccaccataagcacaagggtcagcataggcagggtcacccagagaaccgagatatgccagcaagtgaagatttacaagatttacaaaagaagctctgtcgaaagagatgtataaatcaattactctgtaaattgcccacagattcagagttggctcctaggagctgatgctgccattgtcgacatctgatatttgaaaaaacagggtctgcaatcacctgacagtgtaaagaaaacctcccatctttatgtagctgacagggacttcgggcagaggagaacataactgaatcttgtcagtgacgtttgcctccagctgcctgacaaataagtcagcagcttatacccacagaagccagtgccagttgacgctgaaagaatcaggcaaaaaagtgagaatgaccttcaaactaaatatttaaaataggacatactccccaatttagtctagacacaatttcatttccagcatttttataaactaccaaattagtgaaccaaaaatagaaattagatttgtgcaaacatggagaaatctactgaattggcttccagattttaaattttatgtcatagaaatattgactcaaaccatattttttatgatggagcaactgaaaggtgattgcagcttttggttaatatgtctttttttttctttttccagtgttctatttgctttaatgagaatagaaacgtaaactatgacctaggggtttctgttggataattagcagtttagaatggaggaagaacaacaaagacatgctttccatttttttctttacttatctctcaaaacaatattactttgtcttttcaatcttctacttttaactaataaaataagtggattttgtattttaagatccagaaatacttaacacgtgaatattttgctaaaaaagcatatataactattttaaatatccatttatcttttgtatatctaagactcatcctgatttttactatcacacatgaataaagcctttgtatctttctttctctaatgttgtatcatactcttctaaaacttgagtggctgtcttaaaagatataaggggaaagataatattgtctgtctctatattgcttagtaagtatttccatagtcaatgatggtttaataggtaaaccaaaccctataaacctgacctcctttatggttaatactattaagcaagaatgcagtacagaattggatacagtacggatttgtccaaataaattcaataaaaaccttaa

SEQ ID NO: 363969 - DNA, 2246 bp, Homo sapiens
tacgtttataaagaacaagacatagaaataaacaacaaggaggtttactgcgacgtgaccactatgctactttctgtctctgtgaatttgactactctaagtgcctcagctacttgcaatatgtgctctgggctggacgcggtggctcacgcttgtaatcccagcactttgggaggccaaggcaggcggatcacgaggacaaccccagcaatgtggagaagcctggggcttgccctggctctctgtctcctcccatcgggaggaacagagagccaggaccaaagctccttatgtaagcaacccccagcctggagcataagagatcaagatccaatgctaaactccaatggttcagtgactgtggttgctcttcttcaagccagctgatacctgtgcatactgcaggcatctaaattagaagacctgcgagtaaaactgaagaaagaaggatattctaatatttcttatattgttgttaatcatcaaggaatctcttctcgattaaaatacacacatcttaagaataaggtttcagagcatattcctgtttatcaacaagaagaaaaccaaacagatgtctggactcttttaaatggaagcaaagatgacttcctcatatatgatagatgtggccgtcttgtatatcatcttggtttgcctttttccttcctaactttcccatatgtagaagaagccattaagattgcttactgtgaaaagaaatgtggaaactgctctctcacgactctcaaagatgaagacttttgtaaacgtgtatctttggctactgtggataaaacagttgaaactccatcgcctcattaccatcatgagcatcatcacaatcatggacatcagcaccttggcagcagtgagctttcagagaatcagcaaccaggagcaccaaatgctcctactcatcctgctcctccaggccttcatcaccaccataagcacaagggtcagcataggcagggtcacccagagaaccgagatatgccagcaagtgaagatttacaagatttacaaaagaagctctgtcgaaagagatgtataaatcaattactctgtaaattgcccacagattcagagttggctcctaggagctgatgctgccattgtcgacatctgatatttgaaaaaacagggtctgcaatcacctgacagtgtaaagaaaacctcccatctttatgtagctgacagggacttcgggcagaggagaacataactgaatcttgtcagtgacgtttgcctccagctgcctgacaaataagtcagcagcttatacccacagaagccagtgccagttgacgctgaaagaatcaggcaaaaaagtgagaatgaccttcaaactaaatatttaaaataggacatactccccaatttagtctagacacaatttcatttccagcatttttataaactaccaaattagtgaaccaaaaatagaaattagatttgtgcaaacatggagaaatctactgaattggcttccagattttaaattttatgtcatagaaatattgactcaaaccatattttttatgatggagcaactgaaaggtgattgcagcttttggttaatatgtctttttttttctttttccagtgttctatttgctttaatgagaatagaaacgtaaactatgacctaggggtttctgttggataattagcagtttagaatggaggaagaacaacaaagacatgctttccatttttttctttacttatctctcaaaacaatattactttgtcttttcaatcttctacttttaactaataaaataagtggattttgtattttaagatccagaaatacttaacacgtgaatattttgctaaaaaagcatatataactattttaaatatccatttatcttttgtatatctaagactcatcctgatttttactatcacacatgaataaagcctttgtatctttctttctctaatgttgtatcatactcttctaaaacttgagtggctgtcttaaaagatataaggggaaagataatattgtctgtctctatattgcttagtaagtatttccatagtcaatgatggtttaataggtaaaccaaaccctataaacctgacctcctttatggttaatactattaagcaagaatgcagtacagaattggatacagtacggatttgtccaaataaattcaataaaaaccttaaagatgcgtccagttttgtttttggttgtgtcgatgaatgatgattttgttctttta

SEQ ID NO: 363970 - DNA, 2134 bp, Homo sapiens
tacgtttataaagaacaagacatagaaataaacaacaaggaggtttactgcgacgtgaccactatgctactttctgtctctgtgaatttgactactctaagtgcctcagctacttgcaatatgtgctctgggctggacgcggtggctcacgcttgtaatcccagcactttgggaggccaaggcaggcggatcacgaggacaaccccagcaatgtggagaagcctggggcttgccctggctctctgtctcctcccatcgggaggaacagagagccaggaccaaagctccttatgtaagcaacccccagcctggagcataagagatcaagatccaatgctaaactccaatggttcagtgactgtggttgctcttcttcaagccagctgatacctgtgcatactgcaggcatctaaattagaagacctgcgagtaaaactgaagaaagaaggatattctaatatttcttatattgttgttaatcatcaaggaatctcttctcgattaaaatacacacatcttaagaataaggtttcagagcatattcctgtttatcaacaagaagaaaaccaaacagatgtctggactcttttaaatggaagcaaagatgacttcctcatatatgatagatgtggccgtcttgtatatcatcttggtttgcctttttccttcctaactttcccatatgtagaagaagccattaagattgcttactgtgaaaagaaatgtggaaactgctctctcacgactctcaaagatgaagacttttgtaaacgtgtatctttggctactgtggataaaacagttgaaactccatcgcctcattaccatcatgagcatcatcacaatcatggacatcagcaccttggcagcagtgagctttcagagaatcagcaaccaggagcaccaaatgctcctactcatcctgctcctccaggccttcatcaccaccataagcacaagggtcagcataggcagggtcacccagagaaccgagatatgccagcaagtgaagatttacaagatttacaaaagaagctctgtcgaaagagatgtataaatcaattactctgtaaattgcccacagattcagagttggctcctaggagctgatgctgccattgtcgacatctgatatttgaaaaaacagggtctgcaatcacctgacagtgtaaagaaaacctcccatctttatgtagctgacagggacttcgggcagaggagaacataactgaatcttgtcagtgacgtttgcctccagctgcctgacaaataagtcagcagcttatacccacagaagccagtgccagttgacgctgaaagaatcaggcaaaaaagtgagaatgaccttcaaactaaatatttaaaataggacatactccccaatttagtctagacacaatttcatttccagcatttttataaactaccaaattagtgaaccattttaaattttatgtcatagaaatattgactcaaaccatattttttatgatggagcaactgaaaggtgattgcagcttttggttaatatgtctttttttttctttttccagtgttctatttgctttaatgagaatagaaacgtaaactatgacctaggggtttctgttggataattagcagtttagaatggaggaagaacaacaaagacatgctttccatttttttctttacttatctctcaaaacaatattactttgtcttttcaatcttctacttttaactaataaaataagtggattttgtattttaagatccagaaatacttaacacgtgaatattttgctaaaaaagcatatataactattttaaatatccatttatcttttgtatatctaagactcatcctgatttttactatcacacatgaataaagcctttgtatctttctttctctaatgttgtatcatactcttctaaaacttgagtggctgtcttaaaagatataaggggaaagataatattgtctgtctctatattgcttagtaagtatttccatagtcaatgatggtttaataggtaaaccaaaccctataaacctgacctcctttatggttaatactattaagcaagaatgcagtacagaattggatacagtacggatttgtccaaataaattcaataaaaaccttaa

SEQ ID NO: 363971 - DNA, 2131 bp, Homo sapiens
tacgtttataaagaacaagacatagaaataaacaacaaggaggtttactgcgacgtgaccactatgctactttctgtctctgtgaatttgactactctaagtgcctcagctacttgcaatatgtgctctgggctggacgcggtggctcacgcttgtaatcccagcactttgggaggccaaggcaggcggatcacgaggacaaccccagcaatgtggagaagcctggggcttgccctggctctctgtctcctcccatcgggaggaacagagagccaggaccaaagctccttatgtaagcaacccccagcctggagcataagagatcaagatccaatgctaaactccaatggttcagtgactgtggttgctcttcttcaagccagctgatacctgtgcatactgcaggcatctaaattagaagacctgcgagtaaaactgaagaaagaaggatattctaatatttcttatattgttgttaatcatcaaggaatctcttctcgattaaaatacacacatcttaagaataaggtttcagagcatattcctgtttatcaacaagaagaaaaccaaacagatgtctggactcttttaaatggaagcaaagatgacttcctcatatatgatagatgtggccgtcttgtatatcatcttggtttgcctttttccttcctaactttcccatatgtagaagaagccattaagattgcttactgtgaaaagaaatgtggaaactgctctctcacgactctcaaagatgaagacttttgtaaacgtgtatctttggctactgtggataaaacagttgaaactccatcgcctcattaccatcatgagcatcatcacaatcatggacatcagcaccttggcagcagtgagctttcagagaatcagcaaccaggagcaccaaatgctcctactcatcctgctcctccaggccttcatcaccaccataagcacaagggtcagcataggcagggtcacccagagaaccgagatatgccagcaagtgaagatttacaagatttacaaaagaagctctgtcgaaagagatgtataaatcaattactctgtaaattgcccacagattcagagttggctcctaggagctgatgctgccattgtcgacatctgatatttgaaaaaacagggtctgcaatcacctgacagtgtaaagaaaacctcccatctttatgtagctgacagggacttcgggcagaggagaacataactgaatcttgtcagtgacgtttgcctccagctgcctgacaaataagtcagcagcttatacccacagaagccagtgccagttgacgctgaaagaatcaggcaaaaaagtgagaatgaccttcaaactaaatatttaaaataggacatactccccaatttagtctagacacaatttcatttccagcatttttataaactaccaaattagtgaaccaaaaatagaaattagatttgtgcaaacatggagaaatctactgaattggcttccagatgaaaggtgattgcagcttttggttaatatgtctttttttttctttttccagtgttctatttgctttaatgagaatagaaacgtaaactatgacctaggggtttctgttggataattagcagtttagaatggaggaagaacaacaaagacatgctttccatttttttctttacttatctctcaaaacaatattactttgtcttttcaatcttctacttttaactaataaaataagtggattttgtattttaagatccagaaatacttaacacgtgaatattttgctaaaaaagcatatataactattttaaatatccatttatcttttgtatatctaagactcatcctgatttttactatcacacatgaataaagcctttgtatctttctttctctaatgttgtatcatactcttctaaaacttgagtggctgtcttaaaagatataaggggaaagataatattgtctgtctctatattgcttagtaagtatttccatagtcaatgatggtttaataggtaaaccaaaccctataaacctgacctcctttatggttaatactattaagcaagaatgcagtacagaattggatacagtacggatttgtccaaataaattcaataaaaaccttaa

SEQ ID NO: 363972 - DNA, 2430 bp, Homo sapiens
tacgtttataaagaacaagacatagaaataaacaacaaggaggtttactgcgacgtgaccactatgctactttctgtctctgtgaatttgactactctaagtgcctcagctacttgcaatatgtgctctgggctggacgcggtggctcacgcttgtaatcccagcactttgggaggccaaggcaggcggatcacgaggacaaccccagcaatgtggagaagcctggggcttgccctggctctctgtctcctcccatcgggaggaacagagagccaggaccaaagctccttatgtaagcaacccccagcctggagcataagagatcaagatccaatgctaaactccaatggttcagtgactgtggttgctcttcttcaagccagctgatacctgtgcatactgcaggcatctaaattagaagacctgcgagtaaaactgaagaaagaaggatattctaatatttcttatattgttgttaatcatcaaggaatctcttctcgattaaaatacacacatcttaagaataaggtttcagagcatattcctgtttatcaacaagaagaaaaccaaacagatgtctggactcttttaaatggaagcaaagatgacttcctcatatatgatagatgtggccgtcttgtatatcatcttggtttgcctttttccttcctaactttcccatatgtagaagaagccattaagattgcttactgtgaaaagaaatgtggaaactgctctctcacgactctcaaagatgaagacttttgtaaacgtgtatctttggctactgtggataaaacagttgaaactccatcgcctcattaccatcatgagcatcatcacaatcatggacatcagcaccttggcagcagtgagctttcagagaatcagcaaccaggagcaccaaatgctcctactcatcctgctcctccaggccttcatcaccaccataagcacaagggtcagcataggcagggtcacccagagaaccgagatatgccagcaagtgaagatttacaagatttacaaaagaagctctgtcgaaagagatgtataaatcaattactctgtaaattgcccacagattcagagttggctcctaggagctgatgctgccattgtcgacatctgatatttgaaaaaacagggtctgcaatcacctgacagtgtaaagaaaacctcccatctttatgtagctgacagggacttcgggcagaggagaacataactgaatcttgtcagtgacgtttgcctccagctgcctgacaaataagtcagcagcttatacccacagaagccagtgccagttgacgctgaaagaatcaggcaaaaaagtgagaatgaccttcaaactaaatatttaaaataggacatactccccaatttagtctagacacaatttcatttccagcatttttataaactaccaaattagtgaaccattttaaattttatgtcatagaaatattgactcaaaccatattttttatgatggagcaactgaaaggtgattgcagcttttggttaatatgtctttttttttctttttccagtgttctatttgctttaatgagaatagaaacgtaaactatgacctaggggtttctgttggataattagcagtttagaatggaggaagaacaacaaagacatgctttccatttttttctttacttatctctcaaaacaatattactttgtcttttcaatcttctacttttaactaataaaataagtggattttgtattttaagatccagaaatacttaacacgtgaatattttgctaaaaaagcatatataactattttaaatatccatttatcttttgtatatctaagactcatcctgatttttactatcacacatgaataaagcctttgtatctttctttctctaatgttgtatcatactcttctaaaacttgagtggctgtcttaaaagatataaggggaaagataatattgtctgtctctatattgcttagtaagtatttccatagtcaatgatggtttaataggtaaaccaaaccctataaacctgacctcctttatggttaatactattaagcaagaatgcagtacagaattggatacagtacggatttgtccaaataaattcaataaaaaccttaaagctgacttcgtttgttatgtaggctgtatgcatatattgaaaacagaagtgaaactttcgattgcttttaaataaataccaactaatgaatttactgctaagctcaaaaccgtctacgcttaaggtgagaatctttgccaacagaaaggcgttgctctaaatcgcgaatggtattacgaagaattgcaatctccttgtttttttcttcttgaaaatgctgaagtttctaaacgaaacaaaaaatttgttattagaattcagaaataaaatttagtacaaggaacaacaaaataac

SEQ ID NO: 363973 - DNA, 2470 bp, Homo sapiens
tacgtttataaagaacaagacatagaaataaacaacaaggaggtttactgcgacgtgaccactatgctactttctgtctctgtgaatttgactactctaagtgcctcagctacttgcaatatgtgctctgggctggacgcggtggctcacgcttgtaatcccagcactttgggaggccaaggcaggcggatcacgaggacaaccccagcaatgtggagaagcctggggcttgccctggctctctgtctcctcccatcgggaggaacagagagccaggaccaaagctccttatgtaagcaacccccagcctggagcataagagatcaagatccaatgctaaactccaatggttcagtgactgtggttgctcttcttcaagccagctgatacctgtgcatactgcaggcatctaaattagaagacctgcgagtaaaactgaagaaagaaggatattctaatatttcttatattgttgttaatcatcaaggaatctcttctcgattaaaatacacacatcttaagaataaggtttcagagcatattcctgtttatcaacaagaagaaaaccaaacagatgtctggactcttttaaatggaagcaaagatgacttcctcatatatgatagatgtggccgtcttgtatatcatcttggtttgcctttttccttcctaactttcccatatgtagaagaagccattaagattgcttactgtgaaaagaaatgtggaaactgctctctcacgactctcaaagatgaagacttttgtaaacgtgtatctttggctactgtggataaaacagttgaaactccatcgcctcattaccatcatgagcatcatcacaatcatggacatcagcaccttggcagcagtgagctttcagagaatcagcaaccaggagcaccaaatgctcctactcatcctgctcctccaggccttcatcaccaccataagcacaagggtcagcataggcagggtcacccagagaaccgagatatgccagcaagtgaagatttacaagatttacaaaagaagctctgtcgaaagagatgtataaatcaattactctgtaaattgcccacagattcagagttggctcctaggagctgatgctgccattgtcgacatctgatatttgaaaaaacagggtctgcaatcacctgacagtgtaaagaaaacctcccatctttatgtagctgacagggacttcgggcagaggagaacataactgaatcttgtcagtgacgtttgcctccagctgcctgacaaataagtcagcagcttatacccacagaagccagtgccagttgacgctgaaagaatcaggcaaaaaagtgagaatgaccttcaaactaaatatttaaaataggacatactccccaatttagtctagacacaatttcatttccagcatttttataaactaccaaattagtgaaccaaaaatagaaattagatttgtgcaaacatggagaaatctactgaattggcttccagattttaaattttatgtcatagaaatattgactcaaaccatattttttatgatggagcaactgaaaggtgattgcagcttttggttaatatgtctttttttttctttttccagtgttctatttgctttaatgagaatagaaacgtaaactatgacctaggggtttctgttggataattagcagtttagaatggaggaagaacaacaaagacatgctttccatttttttctttacttatctctcaaaacaatattactttgtcttttcaatcttctacttttaactaataaaataagtggattttgtattttaagaacgtgaatattttgctaaaaaagcatatataactattttaaatatccatttatcttttgtatatctaagactcatcctgatttttactatcacacatgaataaagcctttgtatctttctttctctaatgttgtatcatactcttctaaaacttgagtggctgtcttaaaagatataaggggaaagataatattgtctgtctctatattgcttagtaagtatttccatagtcaatgatggtttaataggtaaaccaaaccctataaacctgacctcctttatggttaatactattaagcaagaatgcagtacagaattggatacagtacggatttgtccaaataaattcaataaaaaccttaaagctgacttcgtttgttatgtaggctgtatgcatatattgaaaacagaagtgaaactttcgattgcttttaaataaataccaactaatgaatttactgctaagctcaaaaccgtctacgcttaaggtgagaatctttgccaacagaaaggcgttgctctaaatcgcgaatggtattacgaagaattgcaatctccttgtttttttcttcttgaaaatgctgaagtttctaaacgaaacaaaaaatttgttattagaattcagaaataaaatttagtacaaggaacaacaaaataac

SEQ ID NO: 363974 - DNA, 2433 bp, Homo sapiens
tacgtttataaagaacaagacatagaaataaacaacaaggaggtttactgcgacgtgaccactatgctactttctgtctctgtgaatttgactactctaagtgcctcagctacttgcaatatgtgctctgggctggacgcggtggctcacgcttgtaatcccagcactttgggaggccaaggcaggcggatcacgaggacaaccccagcaatgtggagaagcctggggcttgccctggctctctgtctcctcccatcgggaggaacagagagccaggaccaaagctccttatgtaagcaacccccagcctggagcataagagatcaagatccaatgctaaactccaatggttcagtgactgtggttgctcttcttcaagccagctgatacctgtgcatactgcaggcatctaaattagaagacctgcgagtaaaactgaagaaagaaggatattctaatatttcttatattgttgttaatcatcaaggaatctcttctcgattaaaatacacacatcttaagaataaggtttcagagcatattcctgtttatcaacaagaagaaaaccaaacagatgtctggactcttttaaatggaagcaaagatgacttcctcatatatgatagatgtggccgtcttgtatatcatcttggtttgcctttttccttcctaactttcccatatgtagaagaagccattaagattgcttactgtgaaaagaaatgtggaaactgctctctcacgactctcaaagatgaagacttttgtaaacgtgtatctttggctactgtggataaaacagttgaaactccatcgcctcattaccatcatgagcatcatcacaatcatggacatcagcaccttggcagcagtgagctttcagagaatcagcaaccaggagcaccaaatgctcctactcatcctgctcctccaggccttcatcaccaccataagcacaagggtcagcataggcagggtcacccagagaaccgagatatgccagcaagtgaagatttacaagatttacaaaagaagctctgtcgaaagagatgtataaatcaattactctgtaaattgcccacagattcagagttggctcctaggagctgatgctgccattgtcgacatctgatatttgaaaaaacagggtctgcaatcacctgacagtgtaaagaaaacctcccatctttatgtagctgacagggacttcgggcagaggagaacataactgaatcttgtcagtgacgtttgcctccagctgcctgacaaataagtcagcagcttatacccacagaagccagtgccagttgacgctgaaagaatcaggcaaaaaagtgagaatgaccttcaaactaaatatttaaaataggacatactccccaatttagtctagacacaatttcatttccagcatttttataaactaccaaattagtgaaccaaaaatagaaattagatttgtgcaaacatggagaaatctactgaattggcttccagattttaaattttatgtcatagaaatattgactcaaaccatattttttatgatggagcaactgaaaggtgattgcagcttttggttaatatgtctttttttttctttttccagtgttctatttgctttaatgagaatagaaacgtaaactatgacctaggggtttctgtttttttctttacttatctctcaaaacaatattactttgtcttttcaatcttctacttttaactaataaaataagtggattttgtattttaagatccagaaatacttaacacgtgaatattttgctaaaaaagcatatataactattttaaatatccatttatcttttgtatatctaagactcatcctgatttttactatcacacatgaataaagcctttgtatctttctttctctaatgttgtatcatactcttctaaaacttgagtggctgtcttaaaagatataaggggaaagataatattgtctgtctctatattgcttagtaagtatttccatagtcaatgatggtttaataggtaaaccaaaccctataaacctgacctcctttatggttaatactattaagcaagaatgcagtacagaattggatacagtacggatttgtccaaataaattcaataaaaaccttaaagctgacttcgtttgttatgtaggctgtatgcatatattgaaaacagaagtgaaactttcgattgcttttaaataaataccaactaatgaatttactgctaagctcaaaaccgtctacgcttaaggtgagaatctttgccaacagaaaggcgttgctctaaatcgcgaatggtattacgaagaattgcaatctccttgtttttttcttcttgaaaatgctgaagtttctaaacgaaacaaaaaatttgttattagaattcagaaataaaatttagtacaaggaacaacaaaataac

SEQ ID NO: 363975 - DNA, 2136 bp, Homo sapiens
tacgtttataaagaacaagacatagaaataaacaacaaggaggtttactgcgacgtgaccactatgctactttctgtctctgtgaatttgactactctaagtgcctcagctacttgcaatatgtgctctgggctggacgcggtggctcacgcttgtaatcccagcactttgggaggccaaggcaggcggatcacgaggacaaccccagcaatgtggagaagcctggggcttgccctggctctctgtctcctcccatcgggaggaacagagagccaggaccaaagctccttatgtaagcaacccccagcctggagcataagagatcaagatccaatgctaaactccaatggttcagtgactgtggttgctcttcttcaagccagctgatacctgtgcatactgcaggcatctaaattagaagacctgcgagtaaaactgaagaaagaaggatattctaatatttcttatattgttgttaatcatcaaggaatctcttctcgattaaaatacacacatcttaagaataaggtttcagagcatattcctgtttatcaacaagaagaaaaccaaacagatgtctggactcttttaaatggaagcaaagatgacttcctcatatatgatagatgtggccgtcttgtatatcatcttggtttgcctttttccttcctaactttcccatatgtagaagaagccattaagattgcttactgtgaaaagaaatgtggaaactgctctctcacgactctcaaagatgaagacttttgtaaacgtgtatctttggctactgtggataaaacagttgaaactccatcgcctcattaccatcatgagcatcatcacaatcatggacatcagcaccttggcagcagtgagctttcagagaatcagcaaccaggagcaccaaatgctcctactcatcctgctcctccaggccttcatcaccaccataagcacaagggtcagcataggcagggtcacccagagaaccgagatatgccagcaagtgaagatttacaagatttacaaaagaagctctgtcgaaagagatgtataaatcaattactctgtaaattgcccacagattcagagttggctcctaggagctgatgctgccattgtcgacatctgatatttgaaaaaacagggtctgcaatcacctgacagtgtaaagatgaatcttgtcagtgacgtttgcctccagctgcctgacaaataagtcagcagcttatacccacagaagccagtgccagttgacgctgaaagaatcaggcaaaaaagtgagaatgaccttcaaactaaatatttaaaataggacatactccccaatttagtctagacacaatttcatttccagcatttttataaactaccaaattagtgaaccaaaaatagaaattagatttgtgcaaacatggagaaatctactgaattggcttccagattttaaattttatgtcatagaaatattgactcaaaccatattttttatgatggagcaactgaaaggtgattgcagcttttggttaatatgtctttttttttctttttccagtgttctatttgctttaatgagaatagaaacgtaaactatgacctaggggtttctgttggataattagcagtttagaatggaggaagaacaacaaagacatgctttccatttttttctttacttatctctcaaaacaatattactttgtcttttcaatcttctacttttaactaataaaataagtggattttgtattttaagatccagaaatacttaacacgtgaatattttgctaaaaaagcatatataactattttaaatatccatttatcttttgtatatctaagactcatcctgatttttactatcacacatgaataaagcctttgtatctttctttctctaatgttgtatcatactcttctaaaacttgagtggctgtcttaaaagatataaggggaaagataatattgtctgtctctatattgcttagtaagtatttccatagtcaatgatggtttaataggtaaaccaaaccctataaacctgacctcctttatggttaatactattaagcaagaatgcagtacagaattggatacagtacggatttgtccaaataaattcaataaaaaccttaa

SEQ ID NO: 363976 - DNA, 2144 bp, Homo sapiens
tacgtttataaagaacaagacatagaaataaacaacaaggaggtttactgcgacgtgaccactatgctactttctgtctctgtgaatttgactactctaagtgcctcagctacttgcaatatgtgctctgggctggacgcggtggctcacgcttgtaatcccagcactttgggaggccaaggcaggcggatcacgaggacaaccccagcaatgtggagaagcctggggcttgccctggctctctgtctcctcccatcgggaggaacagagagccaggaccaaagctccttatgtaagcaacccccagcctggagcataagagatcaagatccaatgctaaactccaatggttcagtgactgtggttgctcttcttcaagccagctgatacctgtgcatactgcaggcatctaaattagaagacctgcgagtaaaactgaagaaagaaggatattctaatatttcttatattgttgttaatcatcaaggaatctcttctcgattaaaatacacacatcttaagaataaggtttcagagcatattcctgtttatcaacaagaagaaaaccaaacagatgtctggactcttttaaatggaagcaaagatgacttcctcatatatgatagatgtggccgtcttgtatatcatcttggtttgcctttttccttcctaactttcccatatgtagaagaagccattaagattgcttactgtgaaaagaaatgtggaaactgctctctcacgactctcaaagatgaagacttttgtaaacgtgtatctttggctactgtggataaaacagttgaaactccatcgcctcattaccatcatgagcatcatcacaatcatggacatcagcaccttggcagcagtgagctttcagagaatcagcaaccaggagcaccaaatgctcctactcatcctgctcctccaggccttcatcaccaccataagcacaagggtcagcataggcagggtcacccagagaaccgagatatgccagcaagtgaagatttacaagatttacaaaagaagctctgtcgaaagagatgtataaatcaattactctgtaaattgcccacagattcagagttggctcctaggagctgatgctgccattgtcgacatctgatatttgaaaaaacagggtctgcaatcacctgacagtgtaaagaaaacctcccatctttatgtagctgacagggacttcgggcagaggagaacataactgaatcttgtcagtgacgtttgcctccagctgcctgacaaataagtcagcagcttatacccacagaagccagtgccagttgacgctgaaagaatcaggcaaaaaagtgagaatgaccttcaaactaaatatttaaaataggacatactccccaatttagtctagacacaatttcatttccagcatttttataaactaccaaattagtgaaccaaaaatagaaattagatttgtgcaaacatggagaaatctactgaattggcttccagattttaaattttatgtcatagaaatattgactcaaaccatattttttatgatggagcaactgaaaggtgattgcagcttttggttaatatgtctttttttttctttttccagtgttctatttgctttaatgagaatagaaacgtaaactatgacctaggggtttctgttggataattagcagtttagaatggaggaagaacaacaaagacatgctttccatttttttctttacttatctctcaaaacaatattactttgtcttttcaatcttctacttttaactaataaaataagtggattttgtattttaagatccagaaatacttaacacgtgaatattttgctaaaaaagcatatataactattttaaatatccatttatcttttgtatatctaagactcatcctgatttttactatcacacatgaataaagcctttttgagtggctgtcttaaaagatataaggggaaagataatattgtctgtctctatattgcttagtaagtatttccatagtcaatgatggtttaataggtaaaccaaaccctataaacctgacctcctttatggttaatactattaagcaagaatgcagtacagaattgaatttatttggacaaatccgtactgtatccaatgtcgagc

SEQ ID NO: 363977 - DNA, 1778 bp, Homo sapiens
tacgtttataaagaacaagacatagaaataaacaacaaggaggtttactgcgacgtgaccactatgctactttctgtctctgtgaatttgactactctaagtgcctcagctacttgcaatatgtgctctgggctggacgcggtggctcacgcttgtaatcccagcactttgggaggccaaggcaggcggatcacgaggacaaccccagcaatgtggagaagcctggggcttgccctggctctctgtctcctcccatcgggaggaacagagagccaggaccaaagctccttatgtaagcaacccccagcctggagcataagagatcaagatccaatgctaaactccaatggttcagtgactgtggttgctcttcttcaagccagctgatacctgtgcatactgcaggcatctaaattagaagacctgcgagtaaaactgaagaaagaaggatattctaatatttcttatattgttgttaatcatcaaggaatctcttctcgattaaaatacacacatcttaagaataaggtttcagagcatattcctgtttatcaacaagaagaaaaccaaacagatgtctggactcttttaaatggaagcaaagatgacttcctcatatatgatagatgtggccgtcttgtatatcatcttggtttgcctttttccttcctaactttcccatatgtagaagaagccattaagattgcttactgtgaaaagaaatgtggaaactgctctctcacgactctcaaagatgaagacttttgtaaacgtgtatctttggctactgtggataaaacagttgaaactccatcgcctcattaccatcatgagcatcatcacaatcatggacatcagcaccttggcagcagtgagctttcagagaatcagcaaccaggagcaccaaatgctcctactcatcctgctcctccaggccttcatcaccaccataagcacaagggtcagcataggcagggtcacccagagaaccgagatatgccagcaagtgaagatttacaagatttacaaaagaagctctgtcgaaagagatgtataaatcaattactctgtaaattgcccacagattcagagttggctcctaggagctgatgctgccattgtcgacatctgatatttgaaaaaacagggtctgcaatcacctgacagtgtaaagaaaacctcccatctttatgtagctgacagggacttcgggcagaggagaacataactgaatcttgtcagtgacgtttgcctccagctgcctgacaaataagtcagcagcttatacccacagaagccagtgccagttgacgctgaaagaatcaggcaaaaaagtgagaatgaccttcaaactaaatatttaaaataggacatactccccaatttagtctagacacaatttcatttccagcatttttataaactaccaaattagtgaaccaaaaatagaaattagatttgtgcaaacatggagaaatctactgaattggcttccagattttaaattttatgtcatagaaatattgactcaaaccatattttttatgatggagcaactgaaaggtgattgcagcttttggttaatatgtctttttttttctttttccagtgttctatttgctttaatgagaatagaaacgtaaactatgacctaggggtttctgttggataattagaagattgaaaagacaaagtaatattgtcttgagagataagtaaagaaaaaaatggaaagcatgtctttgtaggacttcctccattctaaactgctaattgtc

SEQ ID NO: 363978 - DNA, 1277 bp, Homo sapiens
tacgtttataaagaacaagacatagaaataaacaacaaggaggtttactgcgacgtgaccactatgctactttctgtctctgtgaatttgactactctaagtgcctcagctacttgcaatatgtgctctgggctggacgcggtggctcacgcttgtaatcccagcactttgggaggccaaggcaggcggatcacgaggacaaccccagcaatgtggagaagcctggggcttgccctggctctctgtctcctcccatcgggaggaacagagagccaggaccaaagctccttatgtaagcaacccccagcctggagcataagagatcaagatccaatgctaaactccaatggttcagtgactgtggttgctcttcttcaagccagctgatacctgtgcatactgcaggcatctaaattagaagacctgcgagtaaaactgaagaaagaaggatattctaatatttcttatattgttgttaatcatcaaggaatctcttctcgattaaaatacacacatcttaagaataaggtttcagagcatattcctgtttatcaacaagaagaaaaccaaacagatgtctggactcttttaaatggaagcaaagatgacttcctcatatatgatagatgtggccgtcttgtatatcatcttggtttgcctttttccttcctaactttcccatatgtagaagaagccattaagattgcttactgtgaaaagaaatgtggaaactgctctctcacgactctcaaagatgaagacttttgtaaacgtgtatctttggctactgtggataaaacagttgaaactccatcgcctcattaccatcatgagcatcatcacaatcatggacatcagcaccttggcagcagtgagctttcagagaatcagcaaccaggagcaccaaatgctcctactcatcctgctcctccaggccttcatcaccaccataagcacaagggtcagcataggcagggtcacccagagaaccgagatatgccagcaagtgaagatttacaagatttacaaaagaagctctgtcgaaagagatgtataaatcaattactctgtaaattgcccacagattcagagttggctcctaggagctgatgctgccattgtcgacatctgatatttgaaaaaacagggtctgcaatcacctgacagtgtaaagaaaacctcccatctttatgtagctgacaggtccagggcagaggaccaacgtgccagcctacaggatgttgatgcggccgcgaatttagtagtagtagtcgacc

SEQ ID NO: 363979 - DNA, 339 bp, Homo sapiens
agtactatacatgagaagaaagaaagtagaagacaaaattgaaaaaataaacttatgaaatgagaagaaataagagataatgggcaaacacaataataatagatgaacctccaacggataatgaggatattaagagagaaacacaaatagtaatgagagagggaatgtaagtacagatatcaaagacattttaaaagatacttgatattacagtgtagcaaataggaattaacatttggtgaaatggggaatttctataaaaattggtaataaccaatactaactcaagaggattttagaattgttcatgggagtaactgagaaagaatttgttattta

SEQ ID NO: 363980 - DNA, 5066 bp, Homo sapiens
acatgcaaagagtttgtaacggagcattattacggtctaggtacgagctggtgggaatcggccgaggtgaggaggcacgtgtgcgggacggtctgcttccaggagcgcgcccgcatcgagaaggcttatgcccagcagttggctgactgggcccgaaagtggagggggaccgtggagaagggcccccagtatggcacactggagaaggcctggcatgcctttttcacggcggctgagcggctgagcgcgctgcacctggaggtgcgggagaagctgcaagggcaggacagtgagcgggtgcgcgcctggcagcggggggctttccaccggcctgtgctgggcggcttccgcgagagccgggcggccgaggacggcttccgcaaggcccagaagccctggctgaagaggctgaaggaggttgaggcttccaagaaaagctaccacgcagcccggaaggatgagaagaccgcccagacgagggagagccacgcaaaggcagacagcgccgtctcccaggagcagctgcgcaaactgcaggaacgggtggaacgctgtgccaaggaggccgagaagacaaaagctcagtatgagcagacgctggcagagctgcatcgctacactccacgctacatggaggacatggaacaggcctttgagacctgccaggccgccgagcgccagcggcttcttttcttcaaggatatgctgctcaccttacaccagcacctggacctttccagcagtgagaagttccatgaactccaccgtgacttgcaccagggcattgaggcagccagtgacgaagaggatctgcgctggtggcgcagcacccacgggccaggcatggccatgaactggccacagttcgaggagtggtccttggacacacagaggacaatcagccggaaagagaagggtggccggagccctgatgaggttaccctgaccagcattgtgcctacaagagatggcaccgcacccccaccccagtccccggggtccccaggcacggggcaggatgaggagtggtcagatgaagagagtccccggaaggctgccaccggggttcgggtgagggcactctatgactacgctggccaggaagctgatgagctgagcttccgagcaggggaggagctgctgaagatgagtgaggaggacgagcagggctggtgccaaggccagttgcagagtggccgcattggcctgtaccctgccaactacgtggagtgtgtgggcgcctgagtgtcctgacagcccttctgcaacgtttacccaccctggttcagagcccagcttctcctggagagccggaccctcagggccctgaaccgtcgctctctggctgctcctctgtcccttgagggaggaagtcctgggacccagggaggggaggggcctttgtctagggaagggactggtagggaagggacgagtctaggctgagggcaagatgggaggtcagaggtgacagaagcgttcaggggtgcctgggcctccccaggagctgtggactcagttcctgacctctgctttggggttcctggggtgggcttggggtgagtgtagttctggcctagcagcaccctcttgtggcttgttctagcgtgtattaaaacttgacacacacccacacacaaaaacaaaaacaccactgtcgggctcatgtgcatttttttgataggacacccttgccaggccaccagagggcatctagagagaggcctagcgtctgttatggggccggggttggaaaagggtttgcctgcttggtacctgctctggaacttcgagatactaatctggagtggaggggactcgctgtcaggcttgctgttaaccgagaacggctgaaggctgggcgagacgcgggccaatgcgtctgcccgttcgggccggagggacgaggagtgtttgggcagcctaatccttattcatcgatctgtaattagctggagtgggggtccccgcccccagcctcccgcagcctgcgcggcgtgggggcgactccacctgggggttgcggcgtgggaggggcggggggaagggtactacgcgcgcgaggaggtttgggccggtccgcgcgccgtcgccccgccccggctgcggattggcccggcgcggcgttgattcttgcggccgcggttgtcgtcgccgcccccgtcccgccggctgcccattggtccagatcggactccaatcaccccacccctcggctggcccaggcaccgctgaggccggcctggtgagcccgccctccccgccgtggattggcccgcggcgggacccgtcagccgcggttgtgtctgggaaggagagaaaatggcggcggagccgaacaagaccgaaatccagactctttttaagaggcttcgcgcagttccaaccaacaaggcctgtttcgactgcggcgccaagaatccgagttgggccagcatcacgtacggtgttttcttgtgcattgactgttccggggtgcaccgctccctgggcgtccatctgagcttcatcaggtccacagagttggattccaactggaactggttccagctgaggtgtatgcaggtcggcgggaatgccaatgcgacggctttttttcgccaacatggatgcacagccaatgatgccaacaccaaatataatagccgagctgcccagatgtaccgggagaagatccggcagctggggagtgcggccctggctaggcatggcactgatctttggatagacaacatgagtagtgccgttcctaatcactccccagagaagaaggactctgatttcttcacagaacacactcaaccccctgcctgggatgcgccagccactgagccttcagggacccagcagccagccccgtctacagagagcagtggcctggcacagccggagcatggccccaacacagacctgcttggcacctcacccaaagcctcactggaactgaaaagctccatcattggcaagaagaagccagcagcagctaagaaagggctgggtgccaagaaaggcctaggggcccagaaggtgagcagccagagcttcagtgagattgagcggcaggctcaggtggcagagaagctccgtgagcagcaggcagccgatgccaagaagcaggcggaggagtccatggtcgcctccatgcgtctggcctaccaggagctccagattgatcgtaagaaagaggaaaagaagctacagaatctggaagggaagaagcgagagcaggcagaaaggttgggcatgggcttggtatcccgaagctctgtctcccactccgtgctgtctgagatgcaggtgattgagcaggaaaccccagtgagtgcaaaatcctctcgctcgcagctggacttgtttgacgatgttggtactttcgcctctggacccccaaagtacaaggacaatcccttttccttaggggaaagctttggctcccgctgggatacagatgctgcctggggtatggacagggtagaggagaaggagccagaagtgaccatctcaagcatccggcctatttcagaaagagccacaaaccggagggaagtggagagccggagctcaggcctcgagtctagtgaggcgcgtcagaaattcgcaggagccaaagccatctcatctgacatgttctttgggcgggaggtggatgcggagtatgaggccaggtctcggctgcagcagctctcaggcagcagtgccatcagctcttcagacctctttggggacatggatggagctcacggagcaggaagtgtatctctggggaacgtgctgcctacagcggacattgcccagtttaagcagggtgtcaagtctgtggctgggaaaatggctgtgctggccaatggtgtgatgaattccttgcaggatcgctacggttcctactgatccgagctctgtgactcaggcttacgatggtgacggcaacaagaactccacagttcccaggctggggatgctttgccttgtggaagctggggaggatttgttacttcgtatgtgtggtgtgtgtgtggggtggcctttgaggcgctcactcctgtgaggggaatggtcagtaccagcccttgtcctctgcctgtggactgagccctttattccctctcacaccaccctccgtgtgttagactcttgtccttctgtcctgcccccacagctgctgctcacttatcctgccatactgggaaagggggttcccccacgatggcttattctgggtccagactttccccaggtagggaaagcggaaggtagaaggctttttttgctggctctagggttcttctagttcgaggccttgggtccccatcctctggaaccagggggaggcctggaaggagttcactgtagacccgtcccatggggaaagaggctgcggacttgctgctgctgctgctgccagtggcctcttctgggtgccaggagaggggaaggacctttgtctgggcgttaccaagggctggaaactttacctggtacctaaaggtttcatttggtatcagaccggagacccttgggttctcccgtctcaccacccctttctacagtaagcacttggaagattgtttcagggtgtctcagggtccctctgtaccatctgctgtggaatgcaggaccctctgtgacattctttatcccttcttccccgggttggtggccatggagggtcttgtctgctgtgattcgactctggatgctgtgagcttgatgctggccagggaagcagaggatgtgagaggcagaggcaggctcctggggctgagctccttcctctgcatcattctgggcttggcctggacagcacccgccagtgagagctgtgggcctcaccctctggcagctgagccaagcactgtcattcttggtgccatcttcccctgccgcaccggcagtctcagcccagcccccacctttgggttgtaggttgggctcccaagcaacacagaccactcttccccttgcccctcccccagagggacttgactttctttctggactgtttgtattgaaacaaagtggtgtcaaaataaagcccctgcagggcctggctccctgttggtctgagt

SEQ ID NO: 363981 - DNA, 5012 bp, Homo sapiens
acatgcaaagagtttgtaacggagcattattacggtctaggtacgagctggtgggaatcggccgaggtgaggaggcacgtgtgcgggacggtctgcttccaggagcgcgcccgcatcgagaaggcttatgcccagcagttggctgactgggcccgaaagtggagggggaccgtggagaagggcccccagtatggcacactggagaaggcctggcatgcctttttcacggcggctgagcggctgagcgcgctgcacctggaggtgcgggagaagctgcaagggcaggacagtgagcgggtgcgcgcctggcagcggggggctttccaccggcctgtgctgggcggcttccgcgagagccgggcggccgaggacggcttccgcaaggcccagaagccctggctgaagaggctgaaggaggttgaggcttccaagaaaagctaccacgcagcccggaaggatgagaagaccgcccagacgagggagagccacgcaaaggcagacagcgccgtctcccaggagcagctgcgcaaactgcaggaacgggtggaacgctgtgccaaggaggccgagaagtacatggaggacatggaacaggcctttgagacctgccaggccgccgagcgccagcggcttcttttcttcaaggatatgctgctcaccttacaccagcacctggacctttccagcagtgagaagttccatgaactccaccgtgacttgcaccagggcattgaggcagccagtgacgaagaggatctgcgctggtggcgcagcacccacgggccaggcatggccatgaactggccacagttcgaggagtggtccttggacacacagaggacaatcagccggaaagagaagggtggccggagccctgatgaggttaccctgaccagcattgtgcctacaagagatggcaccgcacccccaccccagtccccggggtccccaggcacggggcaggatgaggagtggtcagatgaagagagtccccggaaggctgccaccggggttcgggtgagggcactctatgactacgctggccaggaagctgatgagctgagcttccgagcaggggaggagctgctgaagatgagtgaggaggacgagcagggctggtgccaaggccagttgcagagtggccgcattggcctgtaccctgccaactacgtggagtgtgtgggcgcctgagtgtcctgacagcccttctgcaacgtttacccaccctggttcagagcccagcttctcctggagagccggaccctcagggccctgaaccgtcgctctctggctgctcctctgtcccttgagggaggaagtcctgggacccagggaggggaggggcctttgtctagggaagggactggtagggaagggacgagtctaggctgagggcaagatgggaggtcagaggtgacagaagcgttcaggggtgcctgggcctccccaggagctgtggactcagttcctgacctctgctttggggttcctggggtgggcttggggtgagtgtagttctggcctagcagcaccctcttgtggcttgttctagcgtgtattaaaacttgacacacacccacacacaaaaacaaaaacaccactgtcgggctcatgtgcatttttttgataggacacccttgccaggccaccagagggcatctagagagaggcctagcgtctgttatggggccggggttggaaaagggtttgcctgcttggtacctgctctggaacttcgagatactaatctggagtggaggggactcgctgtcaggcttgctgttaaccgagaacggctgaaggctgggcgagacgcgggccaatgcgtctgcccgttcgggccggagggacgaggagtgtttgggcagcctaatccttattcatcgatctgtaattagctggagtgggggtccccgcccccagcctcccgcagcctgcgcggcgtgggggcgactccacctgggggttgcggcgtgggaggggcggggggaagggtactacgcgcgcgaggaggtttgggccggtccgcgcgccgtcgccccgccccggctgcggattggcccggcgcggcgttgattcttgcggccgcggttgtcgtcgccgcccccgtcccgccggctgcccattggtccagatcggactccaatcaccccacccctcggctggcccaggcaccgctgaggccggcctggtgagcccgccctccccgccgtggattggcccgcggcgggacccgtcagccgcggttgtgtctgggaaggagagaaaatggcggcggagccgaacaagaccgaaatccagactctttttaagaggcttcgcgcagttccaaccaacaaggcctgtttcgactgcggcgccaagaatccgagttgggccagcatcacgtacggtgttttcttgtgcattgactgttccggggtgcaccgctccctgggcgtccatctgagcttcatcaggtccacagagttggattccaactggaactggttccagctgaggtgtatgcaggtcggcgggaatgccaatgcgacggctttttttcgccaacatggatgcacagccaatgatgccaacaccaaatataatagccgagctgcccagatgtaccgggagaagatccggcagctggggagtgcggccctggctaggcatggcactgatctttggatagacaacatgagtagtgccgttcctaatcactccccagagaagaaggactctgatttcttcacagaacacactcaaccccctgcctgggatgcgccagccactgagccttcagggacccagcagccagccccgtctacagagagcagtggcctggcacagccggagcatggccccaacacagacctgcttggcacctcacccaaagcctcactggaactgaaaagctccatcattggcaagaagaagccagcagcagctaagaaagggctgggtgccaagaaaggcctaggggcccagaaggtgagcagccagagcttcagtgagattgagcggcaggctcaggtggcagagaagctccgtgagcagcaggcagccgatgccaagaagcaggcggaggagtccatggtcgcctccatgcgtctggcctaccaggagctccagattgatcgtaagaaagaggaaaagaagctacagaatctggaagggaagaagcgagagcaggcagaaaggttgggcatgggcttggtatcccgaagctctgtctcccactccgtgctgtctgagatgcaggtgattgagcaggaaaccccagtgagtgcaaaatcctctcgctcgcagctggacttgtttgacgatgttggtactttcgcctctggacccccaaagtacaaggacaatcccttttccttaggggaaagctttggctcccgctgggatacagatgctgcctggggtatggacagggtagaggagaaggagccagaagtgaccatctcaagcatccggcctatttcagaaagagccacaaaccggagggaagtggagagccggagctcaggcctcgagtctagtgaggcgcgtcagaaattcgcaggagccaaagccatctcatctgacatgttctttgggcgggaggtggatgcggagtatgaggccaggtctcggctgcagcagctctcaggcagcagtgccatcagctcttcagacctctttggggacatggatggagctcacggagcaggaagtgtatctctggggaacgtgctgcctacagcggacattgcccagtttaagcagggtgtcaagtctgtggctgggaaaatggctgtgctggccaatggtgtgatgaattccttgcaggatcgctacggttcctactgatccgagctctgtgactcaggcttacgatggtgacggcaacaagaactccacagttcccaggctggggatgctttgccttgtggaagctggggaggatttgttacttcgtatgtgtggtgtgtgtgtggggtggcctttgaggcgctcactcctgtgaggggaatggtcagtaccagcccttgtcctctgcctgtggactgagccctttattccctctcacaccaccctccgtgtgttagactcttgtccttctgtcctgcccccacagctgctgctcacttatcctgccatactgggaaagggggttcccccacgatggcttattctgggtccagactttccccaggtagggaaagcggaaggtagaaggctttttttgctggctctagggttcttctagttcgaggccttgggtccccatcctctggaaccagggggaggcctggaaggagttcactgtagacccgtcccatggggaaagaggctgcggacttgctgctgctgctgctgccagtggcctcttctgggtgccaggagaggggaaggacctttgtctgggcgttaccaagggctggaaactttacctggtacctaaaggtttcatttggtatcagaccggagacccttgggttctcccgtctcaccacccctttctacagtaagcacttggaagattgtttcagggtgtctcagggtccctctgtaccatctgctgtggaatgcaggaccctctgtgacattctttatcccttcttccccgggttggtggccatggagggtcttgtctgctgtgattcgactctggatgctgtgagcttgatgctggccagggaagcagaggatgtgagaggcagaggcaggctcctggggctgagctccttcctctgcatcattctgggcttggcctggacagcacccgccagtgagagctgtgggcctcaccctctggcagctgagccaagcactgtcattcttggtgccatcttcccctgccgcaccggcagtctcagcccagcccccacctttgggttgtaggttgggctcccaagcaacacagaccactcttccccttgcccctcccccagagggacttgactttctttctggactgtttgtattgaaacaaagtggtgtcaaaataaagcccctgcagggcctggctccctgttggtctgagt

SEQ ID NO: 363982 - DNA, 5039 bp, Homo sapiens
acatgcaaagagtttgtaacggagcattattacggtctaggtacgagctggtgggaatcggccgaggtgaggaggcacgtgtgcgggacggtctgcttccaggagcgcgcccgcatcgagaaggcttatgcccagcagttggctgactgggcccgaaagtggagggggaccgtggagaagggcccccagtatggcacactggagaaggcctggcatgcctttttcacggcggctgagcggctgagcgcgctgcacctggaggtgcgggagaagctgcaagggcaggacagtgagcgggtgcgcgcctggcagcggggggctttccaccggcctgtgctgggcggcttccgcgagagccgggcggccgaggacggcttccgcaaggcccagaagccctggctgaagaggctgaaggaggttgaggcttccaagaaaagctaccacgcagcccggaaggatgagaagaccgcccagacgagggagagccacgcaaaggcagacagcgccgtctcccaggagcagctgcgcaaactgcaggaacgggtggaacgctgtgccaaggaggccgagaagacaaaagctcagtatgagcagacgctggcagagctgcatcgctacactccacgctacatggaggacatggaacaggcctttgagacctgccaggccgccgagcgccagcggcttcttttcttcaaggatatgctgctcaccttacaccagcacctggacctttccagcagtgagaagttccatgaactccaccgtgacttgcaccagggcattgaggcagccagtgacgaagaggatctgcgctggtggcgcagcacccacgggccaggcatggccatgaactggccacagttcgaggagtggtccttggacacacagaggacaatcagccggaaagagaagggtggccggagccctgatgaggttaccctgaccagcattgtgcctacaagagatggcaccgcacccccaccccagtccccggggtccccaggcacggggcaggatgaggagtggtcagatgaagagagtccccggaaggctgccaccggggttcgggtgagggcactctatgactacgctggccaggaagctgatgagctgagcttccgagcaggggaggagctgctgaagatgagtgaggaggacgagcagggctggtgccaaggccagttgcagagtggccgcattggcctgtaccctgccaactacgtggagtgtgtgggcgcctgagtgtcctgacagcccttctgcaacgtttacccaccctggttcagagcccagcttctcctggagagccggaccctcagggccctgaaccgtcgctctctggctgctcctctgtcccttgagggaggaagtcctgggacccagggaggggaggggcctttgtctagggaagggactggtagggaagggacgagtctaggctgagggcaagatgggaggtcagaggtgacagaagcgttcaggggtgcctgggcctccccaggagctgtggactcagttcctgacctctgctttggggttcctggggtgggcttggggtgagtgtagttctggcctagcagcaccctcttgtggcttgttctagcgtgtattaaaacttgacacacacccacacacaaaaacaaaaacaccactgtcgggctcatgtgcatttttttgataggacacccttgccaggccaccagagggcatctagagagaggcctagcgtctgttatggggccggggttggaaaagggtttgcctgcttggtacctgctctggaacttcgagatactaatctggagtggaggggactcgctgtcaggcttgctgttaaccgagaacggctgaaggctgggcgagacgcgggccaatgcgtctgcccgttcgggccggagggacgaggagtgtttgggcagcctaatccttattcatcgatctgtaattagctggagtgggggtccccgcccccagcctcccgcagcctgcgcggcgtgggggcgactccacctgggggttgcggcgtgggaggggcggggggaagggtactacgcgcgcgaggaggtttgggccggtccgcgcgccgtcgccccgccccggctgcggattggcccggcgcggcgttgattcttgcggccgcggttgtcgtcgccgcccccgtcccgccggctgcccattggtccagatcggactccaatcaccccacccctcggctggcccaggcaccgctgaggccggcctggtgagcccgccctccccgccgtggattggcccgcggcgggacccgtcagccgcggttgtgtctgggaaggagagaaaatggcggcggagccgaacaagaccgaaatccagactctttttaagaggcttcgcgcagttccaaccaacaaggcctgtttcgactgcggcgccaagaatccgagttgggccagcatcacgtacggtgttttcttgtgcattgactgttccggggtgcaccgctccctgggcgtccatctgagcttcatcaggtccacagagttggattccaactggaactggttccagctgaggtgtatgcaggtcggcgggaatgccaatgcgacggctttttttcgccaacatggatgcacagccaatgatgccaacaccaaatataatagccgagctgcccagatgtaccgggagaagatccggcagctggggagtgcggccctggctaggcatggcactgatctttggatagacaacatgagtagtgccgttcctaatcactccccagagaagaaggactctgatttcttcacagaacacactcaaccccctgcctgggatgcgccagccactgagccttcagggacccagcagccagccccgtctacagagagcagtggcctggcacagccggagcatggccccaacacagacctgcttggcacctcacccaaagcctcactggaactgaaaagctccatcattggcaagaagaagccagcagcagctaagaaagggctgggtgccaagaaaggcctaggggcccagaaggtgagcagccagagcttcagtgagattgagcggcaggctcaggtggcagagaagctccgtgagcagcaggcagccgatgccaagaagcaggcggaggagtccatggtcgcctccatgcgtctggcctaccaggagctccagattgatcgtaagaaagaggaaaagaagctacagaatctggaagggaagaagcgagagcaggcagaaagctctgtctcccactccgtgctgtctgagatgcaggtgattgagcaggaaaccccagtgagtgcaaaatcctctcgctcgcagctggacttgtttgacgatgttggtactttcgcctctggacccccaaagtacaaggacaatcccttttccttaggggaaagctttggctcccgctgggatacagatgctgcctggggtatggacagggtagaggagaaggagccagaagtgaccatctcaagcatccggcctatttcagaaagagccacaaaccggagggaagtggagagccggagctcaggcctcgagtctagtgaggcgcgtcagaaattcgcaggagccaaagccatctcatctgacatgttctttgggcgggaggtggatgcggagtatgaggccaggtctcggctgcagcagctctcaggcagcagtgccatcagctcttcagacctctttggggacatggatggagctcacggagcaggaagtgtatctctggggaacgtgctgcctacagcggacattgcccagtttaagcagggtgtcaagtctgtggctgggaaaatggctgtgctggccaatggtgtgatgaattccttgcaggatcgctacggttcctactgatccgagctctgtgactcaggcttacgatggtgacggcaacaagaactccacagttcccaggctggggatgctttgccttgtggaagctggggaggatttgttacttcgtatgtgtggtgtgtgtgtggggtggcctttgaggcgctcactcctgtgaggggaatggtcagtaccagcccttgtcctctgcctgtggactgagccctttattccctctcacaccaccctccgtgtgttagactcttgtccttctgtcctgcccccacagctgctgctcacttatcctgccatactgggaaagggggttcccccacgatggcttattctgggtccagactttccccaggtagggaaagcggaaggtagaaggctttttttgctggctctagggttcttctagttcgaggccttgggtccccatcctctggaaccagggggaggcctggaaggagttcactgtagacccgtcccatggggaaagaggctgcggacttgctgctgctgctgctgccagtggcctcttctgggtgccaggagaggggaaggacctttgtctgggcgttaccaagggctggaaactttacctggtacctaaaggtttcatttggtatcagaccggagacccttgggttctcccgtctcaccacccctttctacagtaagcacttggaagattgtttcagggtgtctcagggtccctctgtaccatctgctgtggaatgcaggaccctctgtgacattctttatcccttcttccccgggttggtggccatggagggtcttgtctgctgtgattcgactctggatgctgtgagcttgatgctggccagggaagcagaggatgtgagaggcagaggcaggctcctggggctgagctccttcctctgcatcattctgggcttggcctggacagcacccgccagtgagagctgtgggcctcaccctctggcagctgagccaagcactgtcattcttggtgccatcttcccctgccgcaccggcagtctcagcccagcccccacctttgggttgtaggttgggctcccaagcaacacagaccactcttccccttgcccctcccccagagggacttgactttctttctggactgtttgtattgaaacaaagtggtgtcaaaataaagcccctgcagggcctggctccctgttggtctgagt

SEQ ID NO: 363983 - DNA, 5213 bp, Homo sapiens
acatgcaaagagtttgtaacggagcattattacggtctaggtacgagctggtgggaatcggccgaggtgaggaggcacgtgtgcgggacggtctgcttccaggagcgcgcccgcatcgagaaggcttatgcccagcagttggctgactgggcccgaaagtggagggggaccgtggagaagggcccccagtatggcacactggagaaggcctggcatgcctttttcacggcggctgagcggctgagcgcgctgcacctggaggtgcgggagaagctgcaagggcaggacagtgagcgggtgcgcgcctggcagcggggggctttccaccggcctgtgctgggcggcttccgcgagagccgggcggccgaggacggcttccgcaaggcccagaagccctggctgaagaggctgaaggaggttgaggcttccaagaaaagctaccacgcagcccggaaggatgagaagaccgcccagacgagggagagccacgcaaaggcagacagcgccgtctcccaggagcagctgcgcaaactgcaggaacgggtggaacgctgtgccaaggaggccgagaagacaaaagctcagtatgagcagacgctggcagagctgcatcgctacactccacgctacatggaggacatggaacaggcctttgagacctgccaggccgccgagcgccagcggcttcttttcttcaaggatatgctgctcaccttacaccagcacctggacctttccagcagtgagaagttccatgaactccaccgtgacttgcaccagggcattgaggcagccagtgacgaagaggatctgcgctggtggcgcagcacccacgggccaggcatggccatgaactggccacagttcgaggagtggtccttggacacacagaggacaatcagccggaaagagaagggtggccggagccctgatgaggttaccctgaccagcattgtgcctacaagagatggcaccgcacccccaccccagtccccggggtccccaggcacggggcaggatgaggagtggtcagatgaagagagtccccggaaggctgccaccggggttcgggtgagggcactctatgactacgctggccaggaagctgatgagctgagcttccgagcaggggaggagctgctgaagatgagtgaggaggacgagcagggctggtgccaaggccagttgcagagtggccgcattggcctgtaccctgccaactacgtggagtgtgtgggcgcctgagtgtcctgacagcccttctgcaacgtttacccaccctggttcagagcccagcttctcctggagagccggaccctcagggccctgaaccgtcgctctctggctgctcctctgtcccttgagggaggaagtcctgggacccagggaggggaggggcctttgtctagggaagggactggtagggaagggacgagtctaggctgagggcaagatgggaggtcagaggtgacagaagcgttcaggggtgcctgggcctccccaggagctgtggactcagttcctgacctctgctttggggttcctggggtgggcttggggtgagtgtagttctggcctagcagcaccctcttgtggcttgttctagcgtgtattaaaacttgacacacacccacacacaaaaacaaaaacaccactgtcgggctcatgtgcatttttttgataggacacccttgccaggccaccagagggcatctagagagaggcctagcgtctgttatggggccggggttggaaaagggtttgcctgcttggtacctgctctggaacttcgagatactaatctggagtggaggggactcgctgtcaggcttgctgttaaccgagaacggctgaaggctgggcgagacgcgggccaatgcgtctgcccgttcgggccggagggacgaggagtgtttgggcagcctaatccttattcatcgatctgtaattagctggagtgggggtccccgcccccagcctcccgcagcctgcgcggcgtgggggcgactccacctgggggttgcggcgtgggaggggcggggggaagggtactacgcgcgcgaggaggtttgggccggtccgcgcgccgtcgccccgccccggctgcggattggcccggcgcggcgttgattcttgcggccgcggttgtcgtcgccgcccccgtcccgccggctgcccattggtccagatcggactccaatcaccccacccctcggctggcccaggcaccgctgaggccggcctggtgagcccgccctccccgccgtggattggcccgcggcgggacccgtcagccgcggttgtgtctgggaaggagagaaaatggcggcggagccgaacaagaccgaaatccagactctttttaagaggcttcgcgcagttccaaccaacaaggtgcgtgagcagggggcgcgcggagtctctcgtcccgctggggcctgagggagggagaagggcggaggtgggttatgtttctggggtgtcggtgcctggcctttactcggggcccctgacgattcgctcatcgccgcctccacccaggcctgtttcgactgcggcgccaagaatccgagttgggccagcatcacgtacggtgttttcttgtgcattgactgttccggggtgcaccgctccctgggcgtccatctgagcttcatcaggtccacagagttggattccaactggaactggttccagctgaggtgtatgcaggtcggcgggaatgccaatgcgacggctttttttcgccaacatggatgcacagccaatgatgccaacaccaaatataatagccgagctgcccagatgtaccgggagaagatccggcagctggggagtgcggccctggctaggcatggcactgatctttggatagacaacatgagtagtgccgttcctaatcactccccagagaagaaggactctgatttcttcacagaacacactcaaccccctgcctgggatgcgccagccactgagccttcagggacccagcagccagccccgtctacagagagcagtggcctggcacagccggagcatggccccaacacagacctgcttggcacctcacccaaagcctcactggaactgaaaagctccatcattggcaagaagaagccagcagcagctaagaaagggctgggtgccaagaaaggcctaggggcccagaaggtgagcagccagagcttcagtgagattgagcggcaggctcaggtggcagagaagctccgtgagcagcaggcagccgatgccaagaagcaggcggaggagtccatggtcgcctccatgcgtctggcctaccaggagctccagattgatcgtaagaaagaggaaaagaagctacagaatctggaagggaagaagcgagagcaggcagaaaggttgggcatgggcttggtatcccgaagctctgtctcccactccgtgctgtctgagatgcaggtgattgagcaggaaaccccagtgagtgcaaaatcctctcgctcgcagctggacttgtttgacgatgttggtactttcgcctctggacccccaaagtacaaggacaatcccttttccttaggggaaagctttggctcccgctgggatacagatgctgcctggggtatggacagggtagaggagaaggagccagaagtgaccatctcaagcatccggcctatttcagaaagagccacaaaccggagggaagtggagagccggagctcaggcctcgagtctagtgaggcgcgtcagaaattcgcaggagccaaagccatctcatctgacatgttctttgggcgggaggtggatgcggagtatgaggccaggtctcggctgcagcagctctcaggcagcagtgccatcagctcttcagacctctttggggacatggatggagctcacggagcaggaagtgtatctctggggaacgtgctgcctacagcggacattgcccagtttaagcagggtgtcaagtctgtggctgggaaaatggctgtgctggccaatggtgtgatgaattccttgcaggatcgctacggttcctactgatccgagctctgtgactcaggcttacgatggtgacggcaacaagaactccacagttcccaggctggggatgctttgccttgtggaagctggggaggatttgttacttcgtatgtgtggtgtgtgtgtggggtggcctttgaggcgctcactcctgtgaggggaatggtcagtaccagcccttgtcctctgcctgtggactgagccctttattccctctcacaccaccctccgtgtgttagactcttgtccttctgtcctgcccccacagctgctgctcacttatcctgccatactgggaaagggggttcccccacgatggcttattctgggtccagactttccccaggtagggaaagcggaaggtagaaggctttttttgctggctctagggttcttctagttcgaggccttgggtccccatcctctggaaccagggggaggcctggaaggagttcactgtagacccgtcccatggggaaagaggctgcggacttgctgctgctgctgctgccagtggcctcttctgggtgccaggagaggggaaggacctttgtctgggcgttaccaagggctggaaactttacctggtacctaaaggtttcatttggtatcagaccggagacccttgggttctcccgtctcaccacccctttctacagtaagcacttggaagattgtttcagggtgtctcagggtccctctgtaccatctgctgtggaatgcaggaccctctgtgacattctttatcccttcttccccgggttggtggccatggagggtcttgtctgctgtgattcgactctggatgctgtgagcttgatgctggccagggaagcagaggatgtgagaggcagaggcaggctcctggggctgagctccttcctctgcatcattctgggcttggcctggacagcacccgccagtgagagctgtgggcctcaccctctggcagctgagccaagcactgtcattcttggtgccatcttcccctgccgcaccggcagtctcagcccagcccccacctttgggttgtaggttgggctcccaagcaacacagaccactcttccccttgcccctcccccagagggacttgactttctttctggactgtttgtattgaaacaaagtggtgtcaaaataaagcccctgcagggcctggctccctgttggtctgagt

SEQ ID NO: 363984 - DNA, 5045 bp, Homo sapiens
acatgcaaagagtttgtaacggagcattattacggtctaggtacgagctggtgggaatcggccgaggtgaggaggcacgtgtgcgggacggtctgcttccaggagcgcgcccgcatcgagaaggcttatgcccagcagttggctgactgggcccgaaagtggagggggaccgtggagaagggcccccagtatggcacactggagaaggcctggcatgcctttttcacggcggctgagcggctgagcgcgctgcacctggaggtgcgggagaagctgcaagggcaggacagtgagcgggtgcgcgcctggcagcggggggctttccaccggcctgtgctgggcggcttccgcgagagccgggcggccgaggacggcttccgcaaggcccagaagccctggctgaagaggctgaaggaggttgaggcttccaagaaaagctaccacgcagcccggaaggatgagaagaccgcccagacgagggagagccacgcaaaggcagacagcgccgtctcccaggagcagctgcgcaaactgcaggaacgggtggaacgctgtgccaaggaggccgagaagacaaaagctcagtatgagcagacgctggcagagctgcatcgctacactccacgctacatggaggacatggaacaggcctttgagacctgccaggccgccgagcgccagcggcttcttttcttcaaggatatgctgctcaccttacaccagcacctggacctttccagcagtgagaagttccatgaactccaccgtgacttgcaccagggcattgaggcagccagtgacgaagaggatctgcgctggtggcgcagcacccacgggccaggcatggccatgaactggccacagttcgaggagtggtccttggacacacagaggacaatcagccggaaagagaagggtggccggagccctgatgaggttaccctgaccagcattgtgcctacaagagatggcaccgcacccccaccccagtccccggggtccccaggcacggggcaggatgaggagtggtcagatgaagagagtccccggaaggctgccaccggggttcgggtgagggcactctatgactacgctggccaggaagctgatgagctgagcttccgagcaggggaggagctgctgaagatgagtgaggaggacgagcagggctggtgccaaggccagttgcagagtggccgcattggcctgtaccctgccaactacgtggagtgtgtgggcgcctgagtgtcctgacagcccttctgcaacgtttacccaccctggttcagagcccagcttctcctggagagccggaccctcagggccctgaaccgtcgctctctggctgctcctctgtcccttgagggaggaagtcctgggacccagggaggggaggggcctttgtctagggaagggactggtagggaagggacgagtctaggctgagggcaagatgggaggtcagaggtgacagaagcgttcaggggtgcctgggcctccccaggagctgtggactcagttcctgacctctgctttggggttcctggggtgggcttggggtgagtgtagttctggcctagcagcaccctcttgtggcttgttctagcgtgtattaaaacttgacacacacccacacacaaaaacaaaaacaccactgtcgggctcatgtgcatttttttgataggacacccttgccaggccaccagagggcatctagagagaggcctagcgtctgttatggggccggggttggaaaagggtttgcctgcttggtacctgctctggaacttcgagatactaatctggagtggaggggactcgctgtcaggcttgctgttaaccgagaacggctgaaggctgggcgagacgcgggccaatgcgtctgcccgttcgggccggagggacgaggagtgtttgggcagcctaatccttattcatcgatctgtaattagctggagtgggggtccccgcccccagcctcccgcagcctgcgcggcgtgggggcgactccacctgggggttgcggcgtgggaggggcggggggaagggtactacgcgcgcgaggaggtttgggccggtccgcgcgccgtcgccccgccccggctgcggattggcccggcgcggcgttgattcttgcggccgcggttgtcgtcgccgcccccgtcccgccggctgcccattggtccagatcggactccaatcaccccacccctcggctggcccaggcaccgctgaggccggcctggtgagcccgccctccccgccgtggattggcccgcggcgggacccgtcagccgcggttgtgtctgggaaggagagaaaatggcggcggagccgaacaagaccgaaatccagactctttttaagaggcttcgcgcagttccaaccaacaaggcctgtttcgactgcggcgccaagaatccgagttgggccagcatcacgtacggtgttttcttgtgcattgactgttccggggtgcaccgctccctgggcgtccatctgagcttcatcaggtccacagagttggattccaactggaactggttccagctgaggtgtatgcagacggctttttttcgccaacatggatgcacagccaatgatgccaacaccaaatataatagccgagctgcccagatgtaccgggagaagatccggcagctggggagtgcggccctggctaggcatggcactgatctttggatagacaacatgagtagtgccgttcctaatcactccccagagaagaaggactctgatttcttcacagaacacactcaaccccctgcctgggatgcgccagccactgagccttcagggacccagcagccagccccgtctacagagagcagtggcctggcacagccggagcatggccccaacacagacctgcttggcacctcacccaaagcctcactggaactgaaaagctccatcattggcaagaagaagccagcagcagctaagaaagggctgggtgccaagaaaggcctaggggcccagaaggtgagcagccagagcttcagtgagattgagcggcaggctcaggtggcagagaagctccgtgagcagcaggcagccgatgccaagaagcaggcggaggagtccatggtcgcctccatgcgtctggcctaccaggagctccagattgatcgtaagaaagaggaaaagaagctacagaatctggaagggaagaagcgagagcaggcagaaaggttgggcatgggcttggtatcccgaagctctgtctcccactccgtgctgtctgagatgcaggtgattgagcaggaaaccccagtgagtgcaaaatcctctcgctcgcagctggacttgtttgacgatgttggtactttcgcctctggacccccaaagtacaaggacaatcccttttccttaggggaaagctttggctcccgctgggatacagatgctgcctggggtatggacagggtagaggagaaggagccagaagtgaccatctcaagcatccggcctatttcagaaagagccacaaaccggagggaagtggagagccggagctcaggcctcgagtctagtgaggcgcgtcagaaattcgcaggagccaaagccatctcatctgacatgttctttgggcgggaggtggatgcggagtatgaggccaggtctcggctgcagcagctctcaggcagcagtgccatcagctcttcagacctctttggggacatggatggagctcacggagcaggaagtgtatctctggggaacgtgctgcctacagcggacattgcccagtttaagcagggtgtcaagtctgtggctgggaaaatggctgtgctggccaatggtgtgatgaattccttgcaggatcgctacggttcctactgatccgagctctgtgactcaggcttacgatggtgacggcaacaagaactccacagttcccaggctggggatgctttgccttgtggaagctggggaggatttgttacttcgtatgtgtggtgtgtgtgtggggtggcctttgaggcgctcactcctgtgaggggaatggtcagtaccagcccttgtcctctgcctgtggactgagccctttattccctctcacaccaccctccgtgtgttagactcttgtccttctgtcctgcccccacagctgctgctcacttatcctgccatactgggaaagggggttcccccacgatggcttattctgggtccagactttccccaggtagggaaagcggaaggtagaaggctttttttgctggctctagggttcttctagttcgaggccttgggtccccatcctctggaaccagggggaggcctggaaggagttcactgtagacccgtcccatggggaaagaggctgcggacttgctgctgctgctgctgccagtggcctcttctgggtgccaggagaggggaaggacctttgtctgggcgttaccaagggctggaaactttacctggtacctaaaggtttcatttggtatcagaccggagacccttgggttctcccgtctcaccacccctttctacagtaagcacttggaagattgtttcagggtgtctcagggtccctctgtaccatctgctgtggaatgcaggaccctctgtgacattctttatcccttcttccccgggttggtggccatggagggtcttgtctgctgtgattcgactctggatgctgtgagcttgatgctggccagggaagcagaggatgtgagaggcagaggcaggctcctggggctgagctccttcctctgcatcattctgggcttggcctggacagcacccgccagtgagagctgtgggcctcaccctctggcagctgagccaagcactgtcattcttggtgccatcttcccctgccgcaccggcagtctcagcccagcccccacctttgggttgtaggttgggctcccaagcaacacagaccactcttccccttgcccctcccccagagggacttgactttctttctggactgtttgtattgaaacaaagtggtgtcaaaataaagcccctgcagggcctggctccctgttggtctgagt

SEQ ID NO: 363985 - DNA, 4930 bp, Homo sapiens
acatgcaaagagtttgtaacggagcattattacggtctaggtacgagctggtgggaatcggccgaggtgaggaggcacgtgtgcgggacggtctgcttccaggagcgcgcccgcatcgagaaggcttatgcccagcagttggctgactgggcccgaaagtggagggggaccgtggagaagggcccccagtatggcacactggagaaggcctggcatgcctttttcacggcggctgagcgctgcgcaaactgcaggaacgggtggaacgctgtgccaaggaggccgagaagacaaaagctcagtatgagcagacgctggcagagctgcatcgctacactccacgctacatggaggacatggaacaggcctttgagacctgccaggccgccgagcgccagcggcttcttttcttcaaggatatgctgctcaccttacaccagcacctggacctttccagcagtgagaagttccatgaactccaccgtgacttgcaccagggcattgaggcagccagtgacgaagaggatctgcgctggtggcgcagcacccacgggccaggcatggccatgaactggccacagttcgaggagtggtccttggacacacagaggacaatcagccggaaagagaagggtggccggagccctgatgaggttaccctgaccagcattgtgcctacaagagatggcaccgcacccccaccccagtccccggggtccccaggcacggggcaggatgaggagtggtcagatgaagagagtccccggaaggctgccaccggggttcgggtgagggcactctatgactacgctggccaggaagctgatgagctgagcttccgagcaggggaggagctgctgaagatgagtgaggaggacgagcagggctggtgccaaggccagttgcagagtggccgcattggcctgtaccctgccaactacgtggagtgtgtgggcgcctgagtgtcctgacagcccttctgcaacgtttacccaccctggttcagagcccagcttctcctggagagccggaccctcagggccctgaaccgtcgctctctggctgctcctctgtcccttgagggaggaagtcctgggacccagggaggggaggggcctttgtctagggaagggactggtagggaagggacgagtctaggctgagggcaagatgggaggtcagaggtgacagaagcgttcaggggtgcctgggcctccccaggagctgtggactcagttcctgacctctgctttggggttcctggggtgggcttggggtgagtgtagttctggcctagcagcaccctcttgtggcttgttctagcgtgtattaaaacttgacacacacccacacacaaaaacaaaaacaccactgtcgggctcatgtgcatttttttgataggacacccttgccaggccaccagagggcatctagagagaggcctagcgtctgttatggggccggggttggaaaagggtttgcctgcttggtacctgctctggaacttcgagatactaatctggagtggaggggactcgctgtcaggcttgctgttaaccgagaacggctgaaggctgggcgagacgcgggccaatgcgtctgcccgttcgggccggagggacgaggagtgtttgggcagcctaatccttattcatcgatctgtaattagctggagtgggggtccccgcccccagcctcccgcagcctgcgcggcgtgggggcgactccacctgggggttgcggcgtgggaggggcggggggaagggtactacgcgcgcgaggaggtttgggccggtccgcgcgccgtcgccccgccccggctgcggattggcccggcgcggcgttgattcttgcggccgcggttgtcgtcgccgcccccgtcccgccggctgcccattggtccagatcggactccaatcaccccacccctcggctggcccaggcaccgctgaggccggcctggtgagcccgccctccccgccgtggattggcccgcggcgggacccgtcagccgcggttgtgtctgggaaggagagaaaatggcggcggagccgaacaagaccgaaatccagactctttttaagaggcttcgcgcagttccaaccaacaaggtgcgtgagcagggggcgcgcggagtctctcgtcccgctggggcctgagggagggagaagggcggaggtgggttatgtttctggggtgtcggtgcctggcctttactcggggcccctgacgattcgctcatcgccgcctccacccaggcctgtttcgactgcggcgccaagaatccgagttgggccagcatcacgtacggtgttttcttgtgcattgactgttccggggtgcaccgctccctgggcgtccatctgagcttcatcaggtccacagagttggattccaactggaactggttccagctgaggtgtatgcaggtcggcgggaatgccaatgcgacggctttttttcgccaacatggatgcacagccaatgatgccaacaccaaatataatagccgagctgcccagatgtaccgggagaagatccggcagctggggagtgcggccctggctaggcatggcactgatctttggatagacaacatgagtagtgccgttcctaatcactccccagagaagaaggactctgatttcttcacagaacacactcaaccccctgcctgggatgcgccagccactgagccttcagggacccagcagccagccccgtctacagagagcagtggcctggcacagccggagcatggccccaacacagacctgcttggcacctcacccaaagcctcactggaactgaaaagctccatcattggcaagaagaagccagcagcagctaagaaagggctgggtgccaagaaaggcctaggggcccagaaggtgagcagccagagcttcagtgagattgagcggcaggctcaggtggcagagaagctccgtgagcagcaggcagccgatgccaagaagcaggcggaggagtccatggtcgcctccatgcgtctggcctaccaggagctccagattgatcgtaagaaagaggaaaagaagctacagaatctggaagggaagaagcgagagcaggcagaaaggttgggcatgggcttggtatcccgaagctctgtctcccactccgtgctgtctgagatgcaggtgattgagcaggaaaccccagtgagtgcaaaatcctctcgctcgcagctggacttgtttgacgatgttggtactttcgcctctggacccccaaagtacaaggacaatcccttttccttaggggaaagctttggctcccgctgggatacagatgctgcctggggtatggacagggtagaggagaaggagccagaagtgaccatctcaagcatccggcctatttcagaaagagccacaaaccggagggaagtggagagccggagctcaggcctcgagtctagtgaggcgcgtcagaaattcgcaggagccaaagccatctcatctgacatgttctttgggcgggaggtggatgcggagtatgaggccaggtctcggctgcagcagctctcaggcagcagtgccatcagctcttcagacctctttggggacatggatggagctcacggagcaggaagtgtatctctggggaacgtgctgcctacagcggacattgcccagtttaagcagggtgtcaagtctgtggctgggaaaatggctgtgctggccaatggtgtgatgaattccttgcaggatcgctacggttcctactgatccgagctctgtgactcaggcttacgatggtgacggcaacaagaactccacagttcccaggctggggatgctttgccttgtggaagctggggaggatttgttacttcgtatgtgtggtgtgtgtgtggggtggcctttgaggcgctcactcctgtgaggggaatggtcagtaccagcccttgtcctctgcctgtggactgagccctttattccctctcacaccaccctccgtgtgttagactcttgtccttctgtcctgcccccacagctgctgctcacttatcctgccatactgggaaagggggttcccccacgatggcttattctgggtccagactttccccaggtagggaaagcggaaggtagaaggctttttttgctggctctagggttcttctagttcgaggccttgggtccccatcctctggaaccagggggaggcctggaaggagttcactgtagacccgtcccatggggaaagaggctgcggacttgctgctgctgctgctgccagtggcctcttctgggtgccaggagaggggaaggacctttgtctgggcgttaccaagggctggaaactttacctggtacctaaaggtttcatttggtatcagaccggagacccttgggttctcccgtctcaccacccctttctacagtaagcacttggaagattgtttcagggtgtctcagggtccctctgtaccatctgctgtggaatgcaggaccctctgtgacattctttatcccttcttccccgggttggtggccatggagggtcttgtctgctgtgattcgactctggatgctgtgagcttgatgctggccagggaagcagaggatgtgagaggcagaggcaggctcctggggctgagctccttcctctgcatcattctgggcttggcctggacagcacccgccagtgagagctgtgggcctcaccctctggcagctgagccaagcactgtcattcttggtgccatcttcccctgccgcaccggcagtctcagcccagcccccacctttgggttgtaggttgggctcccaagcaacacagaccactcttccccttgcccctcccccagagggacttgactttctttctggactgtttgtattgaaacaaagtggtgtcaaaataaagcccctgcagggcctggctccctgttggtctgagt

SEQ ID NO: 363986 - DNA, 5108 bp, Homo sapiens
acatgcaaagagtttgtaacggagcattattacggtctaggtacgagctggtgggaatcggccgaggtgaggaggcacgtgtgcgggacggtctgcttccaggagcgcgcccgcatcgagaaggcttatgcccagcagttggctgactgggcccgaaagtggagggggaccgtggagaagggcccccagtatggcacactggagaaggcctggcatgcctttttcacggcggctgagcggctgagcgcgctgcacctggaggtgcgggagaagctgcaagggcaggacagtgagcgggtgcgcgcctggcagcggggggctttccaccggcctgtgctgggcggcttccgcgagagccgggcggccgaggacggcttccgcaaggcccagaagccctggctgaagaggctgaaggaggttgaggcttccaagaaaagctaccacgcagcccggaaggatgagaagaccgcccagacgagggagagccacgcaaaggcagacagcgccgtctcccaggagcagctgcgcaaactgcaggaacgggtggaacgctgtgccaaggaggccgagaagacaaaagctcagtatgagcagacgctggcagagctgcatcgctacactccacgctacatggaggacatggaacaggcctttgagacctgccaggccgccgagcgccagcggcttcttttcttcaaggatatgctgctcaccttacaccagcacctggacctttccagcagtgagaagttccatgaactccaccgtgacttgcaccagggcattgaggcagccagtgacgaagaggatctgcgctggtggcgcagcacccacgggccaggcatggccatgaactggccacagttcgaggagtggtccttggacacacagaggacaatcagccggaaagagaagggtggccggagccctgatgaggttaccctgaccagcattgtgcctacaagagatggcaccgcacccccaccccagtccccggggtccccaggcacggggcaggatgaggagtggtcagatgaagagagtccccggaaggctgccaccggggttcgggtgagggcactctatgactacgctggccaggaagctgatgagctgagcttccgagcaggggaggagctgctgaagatgagtgaggaggacgagcagggctggtgccaaggccagttgcagagtggccgcattggcctgtaccctgccaactacgtggagtgtgtgggcgcctgagtgtcctgacagcccttctgcaacgtttacccaccctggttcagagcccagcttctcctggagagccggaccctcagggccctgaaccgtcgctctctggctgctcctctgtcccttgagggaggaagtcctgggacccagggaggggaggggcctttgtctagggaagggactggtagggaagggacgagtctaggctgagggcaagatgggaggtcagaggtgacagaagcgttcaggggtgcctgggcctccccaggagctgtggactcagttcctgacctctgctttggggttcctggggtgggcttggggtgagtgtagttctggcctagcagcaccctcttgtggcttgttctagcgtgtattaaaacttgacacacacccacacacaaaaacaaaaacaccactgtcgggctcatgtgcatttttttgataggacacccttgccaggccaccagagggcatctagagagaggcctagcgtctgttatggggccggggttggaaaagggtttgcctgcttggtacctgctctggaacttcgagatactaatctggagtggaggggactcgctgtcaggcttgctgttaaccgagaacggctgaaggctgggcgagacgcgggccaatgcgtctgcccgttcgggccggagggacgaggagtgtttgggcagcctaatccttattcatcgatctgtaattagctggagtgggggtccccgcccccagcctcccgcagcctgcgcggcgtgggggcgactccacctgggggttgcggcgtgggaggggcggggggaagggtactacgcgcgcgaggaggtttgggccggtccgcgcgccgtcgccccgccccggctgcggattggcccggcgcggcgttgattcttgcggccgcggttgtcgtcgccgcccccgtcccgccggctgcccattggtccagatcggactccaatcaccccacccctcggctggcccaggcaccgctgaggccggcctggtgagcccgccctccccgccgtggattggcccgcggcgggacccgtcagccgcggttgtgtctgggaaggagagaaaatggcggcggagccgaacaagaccgaaatccagactctttttaagaggcttcgcgcagttccaaccaacaaggcctgtttcgactgcggcgccaagaatccgagttgggccagcatcacgtacggtgttttcttgtgcattgactgttccggggtgcaccgctccctgggcgtccatctgagcttcatcaggtccacagagttggattccaactggaactggttccagctgaggtgtatgcaggtcggcgggaatgccaatgcgacggctttttttcgccaacatggatgcacagccaatgatgccaacaccaaatataatagccgagctgcccagatgtaccgggagaagatccggcagctggggagtgcggccctggctaggcatggcactgatctttggatagacaacatgagtagtgccgttcctaatcactccccagagaagaaggactctgatttcttcacagaacacactcaagagtggctcaccgaggcatctgtgatctggcctccttttcagccccctgcctgggatgcgccagccactgagccttcagggacccagcagccagccccgtctacagagagcagtggcctggcacagccggagcatggccccaacacagacctgcttggcacctcacccaaagcctcactggaactgaaaagctccatcattggcaagaagaagccagcagcagctaagaaagggctgggtgccaagaaaggcctaggggcccagaaggtgagcagccagagcttcagtgagattgagcggcaggctcaggtggcagagaagctccgtgagcagcaggcagccgatgccaagaagcaggcggaggagtccatggtcgcctccatgcgtctggcctaccaggagctccagattgatcgtaagaaagaggaaaagaagctacagaatctggaagggaagaagcgagagcaggcagaaaggttgggcatgggcttggtatcccgaagctctgtctcccactccgtgctgtctgagatgcaggtgattgagcaggaaaccccagtgagtgcaaaatcctctcgctcgcagctggacttgtttgacgatgttggtactttcgcctctggacccccaaagtacaaggacaatcccttttccttaggggaaagctttggctcccgctgggatacagatgctgcctggggtatggacagggtagaggagaaggagccagaagtgaccatctcaagcatccggcctatttcagaaagagccacaaaccggagggaagtggagagccggagctcaggcctcgagtctagtgaggcgcgtcagaaattcgcaggagccaaagccatctcatctgacatgttctttgggcgggaggtggatgcggagtatgaggccaggtctcggctgcagcagctctcaggcagcagtgccatcagctcttcagacctctttggggacatggatggagctcacggagcaggaagtgtatctctggggaacgtgctgcctacagcggacattgcccagtttaagcagggtgtcaagtctgtggctgggaaaatggctgtgctggccaatggtgtgatgaattccttgcaggatcgctacggttcctactgatccgagctctgtgactcaggcttacgatggtgacggcaacaagaactccacagttcccaggctggggatgctttgccttgtggaagctggggaggatttgttacttcgtatgtgtggtgtgtgtgtggggtggcctttgaggcgctcactcctgtgaggggaatggtcagtaccagcccttgtcctctgcctgtggactgagccctttattccctctcacaccaccctccgtgtgttagactcttgtccttctgtcctgcccccacagctgctgctcacttatcctgccatactgggaaagggggttcccccacgatggcttattctgggtccagactttccccaggtagggaaagcggaaggtagaaggctttttttgctggctctagggttcttctagttcgaggccttgggtccccatcctctggaaccagggggaggcctggaaggagttcactgtagacccgtcccatggggaaagaggctgcggacttgctgctgctgctgctgccagtggcctcttctgggtgccaggagaggggaaggacctttgtctgggcgttaccaagggctggaaactttacctggtacctaaaggtttcatttggtatcagaccggagacccttgggttctcccgtctcaccacccctttctacagtaagcacttggaagattgtttcagggtgtctcagggtccctctgtaccatctgctgtggaatgcaggaccctctgtgacattctttatcccttcttccccgggttggtggccatggagggtcttgtctgctgtgattcgactctggatgctgtgagcttgatgctggccagggaagcagaggatgtgagaggcagaggcaggctcctggggctgagctccttcctctgcatcattctgggcttggcctggacagcacccgccagtgagagctgtgggcctcaccctctggcagctgagccaagcactgtcattcttggtgccatcttcccctgccgcaccggcagtctcagcccagcccccacctttgggttgtaggttgggctcccaagcaacacagaccactcttccccttgcccctcccccagagggacttgactttctttctggactgtttgtattgaaacaaagtggtgtcaaaataaagcccctgcagggcctggctccctgttggtctgagt

SEQ ID NO: 363987 - DNA, 4843 bp, Homo sapiens
acatgcaaagagtttgtaacggagcattattacggtctaggtacgagctggtgggaatcggccgaggtgaggaggcacgtgtgcgggacggtctgcttccaggagcgcgcccgcatcgagaaggcttatgcccagcagttggctgactgggcccgaaagtggagggggaccgtggagaagggcccccagtatggcacactggagaaggcctggcatgcctttttcacggcggctgagcggctgagcgcgctgcacctggaggtgcgggagaagctgcaagggcaggacagtgagcgggtgcgcgcctggcagcggggggctttccaccggcctgtgctgggcggcttccgcgagagccgggcggccgaggacggcttccgcaaggcccagaagccctggctgaagaggctgaaggaggttgaggcttccaagaaaagctaccacgcagcccggaaggatgagaagaccgcccagacgagggagagccacgcaaaggcagacagcgccgtctcccaggagcagctgcgcaaactgcaggaacgggtggaacgctgtgccaaggaggccgagaagacaaaagctcagtatgagcagacgctggcagagctgcatcgctacactccacgctacatggaggacatggaacaggcctttgagacctgccaggccgccgagcgccagcggcttcttttcttcaaggatatgctgctcaccttacaccagcacctggacctttccagcagtgagaagttccatgaactccaccgtgacttgcaccagggcattgaggcagccagtgacgaagaggatctgcgctggtggcgcagcacccacgggccaggcatggccatgaactggccacagttcgaggagtggtccttggacacacagaggacaatcagccggaaagagaagggtggccggagccctgatgaggttaccctgaccagcattgtgcctacaagagatggcaccgcacccccaccccagtccccggggtccccaggcacggggcaggatgaggagtggtcagatgaagagagtccccggaaggctgccaccggggttcgggtgagggcactctatgactacgctggccaggaagctgatgagctgagcttccgagcaggggaggagctgctgaagatgagtgaggaggacgagcagggctggtgccaaggccagttgcagagtggccgcattggcctgtaccctgccaactacgtggagtgtgtgggcgcctgagtgtcctgacagcccttctgcaacgtttacccaccctggttcagagcccagcttctcctggagagccggaccctcagggccctgaaccgtcgctctctggctgctcctctgtcccttgagggaggaagtcctgggacccagggaggggaggggcctttgtctagggaagggactggtagggaagggacgagtctaggctgagggcaagatgggaggtcagaggtgacagaagcgttcaggggtgcctgggcctccccaggagctgtggactcagttcctgacctctgctttggggttcctggggtgggcttggggtgagtgtagttctggcctagcagcaccctcttgtggcttgttctagcgtgtattaaaacttgacacacacccacacacaaaaacaaaaacaccactgtcgggctcatgtgcatttttttgataggacacccttgccaggccaccagagggcatctagagagaggcctagcgtctgttatggggccggggttggaaaagggtttgcctgcttggtacctgctctggaacttcgagatactaatctggagtggaggggactcgctgtcaggcttgctgttaaccgagaacggctgaaggctgggcgagacgcgggccaatgcgtctgcccgttcgggccggagggacgaggagtgtttgggcagcctaatccttattcatcgatctgtaattagctggagtgggggtccccgcccccagcctcccgcagcctgcgcggcgtgggggcgactccacctgggggttgcggcgtgggaggggcggggggaagggtactacgcgcgcgaggaggtttgggccggtccgcgcgccgtcgccccgccccggctgcggattggcccggcgcggcgttgattcttgcggccgcggttgtcgtcgccgcccccgtcccgccggctgcccattggtccagatcggactccaatcaccccacccctcggctggcccaggcaccgctgaggccggcctggtgagcccgccctccccgccgtggattggcccgcggcgggacccgtcagccgcggttgtgtctgggaaggagagaaaatggcggcggagccgaacaagaccgaaatccagactctttttaagaggcttcgcgcagttccaaccaacaaggcctgtttcgactgcggcgccaagaatccgagttgggccagcatcacgtacggtgttttcttgtgcattgactgttccggggtgcaccgctccctgggcgtccatctgagcttcatcaggtccacagagttggattccaactggaactggttccagctgaggtgtatgcaggtcggcgggaatgccaatgcgacggctttttttcgccaacatggatgcacagccaatgatgccaacaccaaatataatagccgagctgcccagatgtaccgggagaagatccggcagctggggagtgcggccctggctaggcatggcactgataactgaaaagctccatcattggcaagaagaagccagcagcagctaagaaagggctgggtgccaagaaaggcctaggggcccagaaggtgagcagccagagcttcagtgagattgagcggcaggctcaggtggcagagaagctccgtgagcagcaggcagccgatgccaagaagcaggcggaggagtccatggtcgcctccatgcgtctggcctaccaggagctccagattgatcgtaagaaagaggaaaagaagctacagaatctggaagggaagaagcgagagcaggcagaaaggttgggcatgggcttggtatcccgaagctctgtctcccactccgtgctgtctgagatgcaggtgattgagcaggaaaccccagtgagtgcaaaatcctctcgctcgcagctggacttgtttgacgatgttggtactttcgcctctggacccccaaagtacaaggacaatcccttttccttaggggaaagctttggctcccgctgggatacagatgctgcctggggtatggacagggtagaggagaaggagccagaagtgaccatctcaagcatccggcctatttcagaaagagccacaaaccggagggaagtggagagccggagctcaggcctcgagtctagtgaggcgcgtcagaaattcgcaggagccaaagccatctcatctgacatgttctttgggcgggaggtggatgcggagtatgaggccaggtctcggctgcagcagctctcaggcagcagtgccatcagctcttcagacctctttggggacatggatggagctcacggagcaggaagtgtatctctggggaacgtgctgcctacagcggacattgcccagtttaagcagggtgtcaagtctgtggctgggaaaatggctgtgctggccaatggtgtgatgaattccttgcaggatcgctacggttcctactgatccgagctctgtgactcaggcttacgatggtgacggcaacaagaactccacagttcccaggctggggatgctttgccttgtggaagctggggaggatttgttacttcgtatgtgtggtgtgtgtgtggggtggcctttgaggcgctcactcctgtgaggggaatggtcagtaccagcccttgtcctctgcctgtggactgagccctttattccctctcacaccaccctccgtgtgttagactcttgtccttctgtcctgcccccacagctgctgctcacttatcctgccatactgggaaagggggttcccccacgatggcttattctgggtccagactttccccaggtagggaaagcggaaggtagaaggctttttttgctggctctagggttcttctagttcgaggccttgggtccccatcctctggaaccagggggaggcctggaaggagttcactgtagacccgtcccatggggaaagaggctgcggacttgctgctgctgctgctgccagtggcctcttctgggtgccaggagaggggaaggacctttgtctgggcgttaccaagggctggaaactttacctggtacctaaaggtttcatttggtatcagaccggagacccttgggttctcccgtctcaccacccctttctacagtaagcacttggaagattgtttcagggtgtctcagggtccctctgtaccatctgctgtggaatgcaggaccctctgtgacattctttatcccttcttccccgggttggtggccatggagggtcttgtctgctgtgattcgactctggatgctgtgagcttgatgctggccagggaagcagaggatgtgagaggcagaggcaggctcctggggctgagctccttcctctgcatcattctgggcttggcctggacagcacccgccagtgagagctgtgggcctcaccctctggcagctgagccaagcactgtcattcttggtgccatcttcccctgccgcaccggcagtctcagcccagcccccacctttgggttgtaggttgggctcccaagcaacacagaccactcttccccttgcccctcccccagagggacttgactttctttctggactgtttgtattgaaacaaagtggtgtcaaaataaagcccctgcagggcctggctccctgttggtctgagt

SEQ ID NO: 363988 - DNA, 4638 bp, Homo sapiens
acatgcaaagagtttgtaacggagcattattacggtctaggtacgagctggtgggaatcggccgaggtgaggaggcacgtgtgcgggacggtctgcttccaggagcgcgcccgcatcgagaaggcttatgcccagcagttggctgactgggcccgaaagtggagggggaccgtggagaagggcccccagtatggcacactggagaaggcctggcatgcctttttcacggcggctgagcggctgagcgcgctgcacctggaggtgcgggagaagctgcaagggcaggacagtgagcgggtgcgcgcctggcagcggggggctttccaccggcctgtgctgggcggcttccgcgagagccgggcggccgaggacggcttccgcaaggcccagaagccctggctgaagaggctgaaggaggttgaggcttccaagaaaagctaccacgcagcccggaaggatgagaagaccgcccagacgagggagagccacgcaaaggcagacagcgccgtctcccaggagcagctgcgcaaactgcaggaacgggtggaacgctgtgccaaggaggccgagaagacaaaagctcagtatgagcagacgctggcagagctgcatcgctacactccacgctacatggaggacatggaacaggcctttgagacctgccaggccgccgagcgccagcggcttcttttcttcaaggatatgctgctcaccttacaccagcacctggacctttccagcagtgagaagttccatgaactccaccgtgacttgcaccagggcattgaggcagccagtgacgaagaggatctgcgctggtggcgcagcacccacgggccaggcatggccatgaactggccacagttcgaggagtggtccttggacacacagaggacaatcagccggaaagagaagggtggccggagccctgatgaggttaccctgaccagcattgtgcctacaagagatggcaccgcacccccaccccagtccccggggtccccaggcacggggcaggatgaggagtggtcagatgaagagagtccccggaaggctgccaccggggttcgggtgagggcactctatgactacgctggccaggaagctgatgagctgagcttccgagcaggggaggagctgctgaagatgagtgaggaggacgagcagggctggtgccaaggccagttgcagagtggccgcattggcctgtaccctgccaactacgtggagtgtgtgggcgcctgagtgtcctgacagcccttctgcaacgtttacccaccctggttcagagcccagcttctcctggagagccggaccctcagggccctgaaccgtcgctctctggctgctcctctgtcccttgagggaggaagtcctgggacccagggaggggaggggcctttgtctagggaagggactggtagggaagggacgagtctaggctgagggcaagatgggaggtcagaggtgacagaagcgttcaggggtgcctgggcctccccaggagctgtggactcagttcctgacctctgctttggggttcctggggtgggcttggggtgagtgtagttctggcctagcagcaccctcttgtggcttgttctagcgtgtattaaaacttgacacacacccacacacaaaaacaaaaacaccactgtcgggctcatgtgcatttttttgataggacacccttgccaggccaccagagggcatctagagagaggcctagcgtctgttatggggccggggttggaaaagggtttgcctgcttggtacctgctctggaacttcgagatactaatctggagtggaggggactcgctgtcaggcttgctgttaaccgagaacggctgaaggctgggcgagacgcgggccaatgcgtctgcccgttcgggccggagggacgaggagtgtttgggcagcctaatccttattcatcgatctgtaattagctggagtgggggtccccgcccccagcctcccgcagcctgcgcggcgtgggggcgactccacctgggggttgcggcgtgggaggggcggggggaagggtactacgcgcgcgaggaggtttgggccggtccgcgcgccgtcgccccgccccggctgcggattggcccggcgcggcgttgattcttgcggccgcggttgtcgtcgccgcccccgtcccgccggctgcccattggtccagatcggactccaatcaccccacccctcggctggcccaggcaccgctgaggccggcctggtgagcccgccctccccgccgtggattggcccgcggcgggacccgtcagccgcggttgtgtctgggaaggagagaaaatggcggcggagccgaacaagaccgaaatccagactctttttaagaggcttcgcgcagttccaaccaacaaggcctgtttcgactgcggcgccaagaatccgagttgggccagcatcacgtacggtgttttcttgtgcattgactgttccggggtgcaccgctccctgggcgtccatctgagcttcatcagaactgaaaagctccatcattggcaagaagaagccagcagcagctaagaaagggctgggtgccaagaaaggcctaggggcccagaaggtgagcagccagagcttcagtgagattgagcggcaggctcaggtggcagagaagctccgtgagcagcaggcagccgatgccaagaagcaggcggaggagtccatggtcgcctccatgcgtctggcctaccaggagctccagattgatcgtaagaaagaggaaaagaagctacagaatctggaagggaagaagcgagagcaggcagaaaggttgggcatgggcttggtatcccgaagctctgtctcccactccgtgctgtctgagatgcaggtgattgagcaggaaaccccagtgagtgcaaaatcctctcgctcgcagctggacttgtttgacgatgttggtactttcgcctctggacccccaaagtacaaggacaatcccttttccttaggggaaagctttggctcccgctgggatacagatgctgcctggggtatggacagggtagaggagaaggagccagaagtgaccatctcaagcatccggcctatttcagaaagagccacaaaccggagggaagtggagagccggagctcaggcctcgagtctagtgaggcgcgtcagaaattcgcaggagccaaagccatctcatctgacatgttctttgggcgggaggtggatgcggagtatgaggccaggtctcggctgcagcagctctcaggcagcagtgccatcagctcttcagacctctttggggacatggatggagctcacggagcaggaagtgtatctctggggaacgtgctgcctacagcggacattgcccagtttaagcagggtgtcaagtctgtggctgggaaaatggctgtgctggccaatggtgtgatgaattccttgcaggatcgctacggttcctactgatccgagctctgtgactcaggcttacgatggtgacggcaacaagaactccacagttcccaggctggggatgctttgccttgtggaagctggggaggatttgttacttcgtatgtgtggtgtgtgtgtggggtggcctttgaggcgctcactcctgtgaggggaatggtcagtaccagcccttgtcctctgcctgtggactgagccctttattccctctcacaccaccctccgtgtgttagactcttgtccttctgtcctgcccccacagctgctgctcacttatcctgccatactgggaaagggggttcccccacgatggcttattctgggtccagactttccccaggtagggaaagcggaaggtagaaggctttttttgctggctctagggttcttctagttcgaggccttgggtccccatcctctggaaccagggggaggcctggaaggagttcactgtagacccgtcccatggggaaagaggctgcggacttgctgctgctgctgctgccagtggcctcttctgggtgccaggagaggggaaggacctttgtctgggcgttaccaagggctggaaactttacctggtacctaaaggtttcatttggtatcagaccggagacccttgggttctcccgtctcaccacccctttctacagtaagcacttggaagattgtttcagggtgtctcagggtccctctgtaccatctgctgtggaatgcaggaccctctgtgacattctttatcccttcttccccgggttggtggccatggagggtcttgtctgctgtgattcgactctggatgctgtgagcttgatgctggccagggaagcagaggatgtgagaggcagaggcaggctcctggggctgagctccttcctctgcatcattctgggcttggcctggacagcacccgccagtgagagctgtgggcctcaccctctggcagctgagccaagcactgtcattcttggtgccatcttcccctgccgcaccggcagtctcagcccagcccccacctttgggttgtaggttgggctcccaagcaacacagaccactcttccccttgcccctcccccagagggacttgactttctttctggactgtttgtattgaaacaaagtggtgtcaaaataaagcccctgcagggcctggctccctgttggtctgagt

SEQ ID NO: 363989 - DNA, 4836 bp, Homo sapiens
acatgcaaagagtttgtaacggagcattattacggtctaggtacgagctggtgggaatcggccgaggtgaggaggcacgtgtgcgggacggtctgcttccaggagcgcgcccgcatcgagaaggcttatgcccagcagttggctgactgggcccgaaagtggagggggaccgtggagaagggcccccagtatggcacactggagaaggcctggcatgcctttttcacggcggctgagcggctgagcgcgctgcacctggaggtgcgggagaagctgcaagggcaggacagtgagcgggtgcgcgcctggcagcggggggctttccaccggcctgtgctgggcggcttccgcgagagccgggcggccgaggacggcttccgcaaggcccagaagccctggctgaagaggctgaaggaggttgaggcttccaagaaaagctaccacgcagcccggaaggatgagaagaccgcccagacgagggagagccacgcaaaggcagacagcgccgtctcccaggagcagctgcgcaaactgcaggaacgggtggaacgctgtgccaaggaggccgagaagacaaaagctcagtatgagcagacgctggcagagctgcatcgctacactccacgctacatggaggacatggaacaggcctttgagacctgccaggccgccgagcgccagcggcttcttttcttcaaggatatgctgctcaccttacaccagcacctggacctttccagcagtgagaagttccatgaactccaccgtgacttgcaccagggcattgaggcagccagtgacgaagaggatctgcgctggtggcgcagcacccacgggccaggcatggccatgaactggccacagttcgaggagtggtccttggacacacagaggacaatcagccggaaagagaagggtggccggagccctgatgaggttaccctgaccagcattgtgcctacaagagatggcaccgcacccccaccccagtccccggggtccccaggcacggggcaggatgaggagtggtcagatgaagagagtccccggaaggctgccaccggggttcgggtgagggcactctatgactacgctggccaggaagctgatgagctgagcttccgagcaggggaggagctgctgaagatgagtgaggaggacgagcagggctggtgccaaggccagttgcagagtggccgcattggcctgtaccctgccaactacgtggagtgtgtgggcgcctgagtgtcctgacagcccttctgcaacgtttacccaccctggttcagagcccagcttctcctggagagccggaccctcagggccctgaaccgtcgctctctggctgctcctctgtcccttgagggaggaagtcctgggacccagggaggggaggggcctttgtctagggaagggactggtagggaagggacgagtctaggctgagggcaagatgggaggtcagaggtgacagaagcgttcaggggtgcctgggcctccccaggagctgtggactcagttcctgacctctgctttggggttcctggggtgggcttggggtgagtgtagttctggcctagcagcaccctcttgtggcttgttctagcgtgtattaaaacttgacacacacccacacacaaaaacaaaaacaccactgtcgggctcatgtgcatttttttgataggacacccttgccaggccaccagagggcatctagagagaggcctagcgtctgttatggggccggggttggaaaagggtttgcctgcttggtacctgctctggaacttcgagatactaatctggagtggaggggactcgctgtcaggcttgctgttaaccgagaacggctgaaggctgggcgagacgcgggccaatgcgtctgcccgttcgggccggagggacgaggagtgtttgggcagcctaatccttattcatcgatctgtaattagctggagtgggggtccccgcccccagcctcccgcagcctgcgcggcgtgggggcgactccacctgggggttgcggcgtgggaggggcggggggaagggtactacgcgcgcgaggaggtttgggccggtccgcgcgccgtcgccccgccccggctgcggattggcccggcgcggcgttgattcttgcggccgcggttgtcgtcgccgcccccgtcccgccggctgcccattggtccagatcggactccaatcaccccacccctcggctggcccaggcaccgctgaggccggcctggtgagcccgccctccccgccgtggattggcccgcggcgggacccgtcagccgcggttgtgtctgggaaggagagaaaatggcggcggagccgaacaagaccgaaatccagactctttttaagaggcttcgcgcagttccaaccaacaaggcctgtttcgactgcggcgccaagaatccgagttgggccagcatcacgtacggtgttttcttgtgcattgactgttccggggtgcaccgctccctgggcgtccatctgagcttcatcaggtccacagagttggattccaactggaactggttccagctgaggtgtatgcaggtcggcgggaatgccaatgcgacggctttttttcgccaacatggatgcacagccaatgatgccaacaccaaatataatagccgagctgcccagatgtaccgggagaagatccggcagctggggagtgcggccctggctaggcatggcactgatctttggatagacaacatgagtagtgccgttcctaatcactccccagagaagaaggactctgatttcttcacagaacacactcaaccccctgcctgggatgcgccagccactgagccttcagggacccagcagccagccccgtctacagagagcagtggcctggcacagccggagcatggccccaacacagacctgcttggcacctcacccaaagcctcactggaactgaaaagctccatcattggcaagaagaagccagcagcagctaagaaagggctgggtgccaagaaaggcctaggggcccagaaggtgagcagccagagcttcagtgagattgagcggcaggctcaggtggcagagaagctccgtgagcagcaggcagccgatgccaagaagcaggcggaggagtccatggtcgcctccatgcgtctggcctaccaggagctccagattgatcgtaagaaagaggaaaagaagctacagaatctggaagggaagaagcgagagcaggcagaaaggttgggcatgggcttggtatcccgaagctctgtctcccactccgtgctgtctgagatgcaggtgattgagcaggaaaccccagtgagtgcaaaatcctctcgctcgcagctggacttgtttgacgatgttggtactttcgcctctggacccccaaagtacaaggacaatcccttttccttaggggaaagctttggctcccgctgggatacagatgctgcctggggtatggacagggtagaggagaaggagccagaagtgaccatctcaagcatccggcctatttcagaaagagccacaaaccggagggaagtggagagccggagctcaggcctcgagtctagtgaggcgcgtcagaaattcgcaggagccaaagccatctcatctgacatgttctttgggcgggaggtggatgcggagtatgaggccaggtctcggctgcagcagctctcaggcagcagtgccatcagctcttcagacctctttggggacatggatggagctcacggagcaggaagtgtatctctggggaacgtgctgcctacagcggacattgcccagtttaagcagggtgtcaagtctgtggctgggaaaatggctgtgctggccaatggtgtgatgaattccttgcaggatcgctacggttcctactgatccgagctctgtgactcaggcttacgatggtgacggcaacaagaactccacagttcccaggctggggatgctttgccttgtggaagctggggaggatttgttacttcgtatgtgtggtgtgtgtgtggggtggcctttgaggcgctcactcctgtgaggggaatggtcagtaccagcccttgtcctctgcctgtggactgagccctttattccctctcacaccaccctccgtgtgttagactcttgtccttctgtcctgcccccacagctgctgctcacttatcctgccatactgggaaagggggttcccccacgatggcttattctgggtccagactttccccaggtagggaaagcggaaggtagaaggctttttttgctggctctagggttcttctagttcgaggccttgggtccccatcctctggaaccagggggaggcctggaaggagttcactgtagacccgtcccatggggaaagaggctgcggacttgctgctgctgctgctgccagtggcctcttctgggtgccaggagaggggaaggacctttgtctgggcgttaccaagggctggaaactttacctggtacctaaaggtttcatttggtatcagaccggagacccttgggttctcccgtctcaccacccctttctacagtaagcacttggaagattgtttcagggtgtctcagggtccctctgtaccatctgctgtggaatgcaggaccctctgtgacattctttatcccttcttccccctgccgcaccggcagtctcagcccagcccccacctttgggttgtaggttgggctcccaagcaacacagaccactcttccccttgcccctcccccagagggacttgactttctttctggactgtttgtattgaaacaaagtggtgtcaaaataaagcccctgcagggcctggctccctgttggtctgagt

SEQ ID NO: 363990 - DNA, 4226 bp, Homo sapiens
acatgcaaagagtttgtaacggagcattattacggtctaggtacgagctggtgggaatcggccgaggtgaggaggcacgtgtgcgggacggtctgcttccaggagcgcgcccgcatcgagaaggcttatgcccagcagttggctgactgggcccgaaagtggagggggaccgtggagaagggcccccagtatggcacactggagaaggcctggcatgcctttttcacggcggctgagcggctgagcgcgctgcacctggaggtgcgggagaagctgcaagggcaggacagtgagcgggtgcgcgcctggcagcggggggctttccaccggcctgtgctgggcggcttccgcgagagccgggcggccgaggacggcttccgcaaggcccagaagccctggctgaagaggctgaaggaggttgaggcttccaagaaaagctaccacgcagcccggaaggatgagaagaccgcccagacgagggagagccacgcaaaggcagacagcgccgtctcccaggagcagctgcgcaaactgcaggaacgggtggaacgctgtgccaaggaggccgagaagacaaaagctcagtatgagcagacgctggcagagctgcatcgctacactccacgctacatggaggacatggaacaggcctttgagacctgccaggccgccgagcgccagcggcttcttttcttcaaggatatgctgctcaccttacaccagcacctggacctttccagcagtgagaagttccatgaactccaccgtgacttgcaccagggcattgaggcagccagtgacgaagaggatctgcgctggtggcgcagcacccacgggccaggcatggccatgaactggccacagttcgaggagtggtccttggacacacagaggacaatcagccggaaagagaagggtggccggagccctgatgaggttaccctgaccagcattgtgcctacaagagatggcaccgcacccccaccccagtccccggggtccccaggcacggggcaggatgaggagtggtcagatgaagagagtccccggaaggctgccaccggggttcgggtgagggcactctatgactacgctggccaggaagctgatgagctgagcttccgagcaggggaggagctgctgaagatgagtgaggaggacgagcagggctggtgccaaggccagttgcagagtggccgcattggcctgtaccctgccaactacgtggagtgtgtgggcgcctgagtgtcctgacagcccttctgcaacgtttacccaccctggttcagagcccagcttctcctggagagccggaccctcagggccctgaaccgtcgctctctggctgctcctctgtcccttgagggaggaagtcctgggacccagggaggggaggggcctttgtctagggaagggactggtagggaagggacgagtctaggctgagggcaagatgggaggtcagaggtgacagaagcgttcaggggtgcctgggcctccccaggagctgtggactcagttcctgacctctgctttggggttcctggggtgggcttggggtgagtgtagttctggcctagcagcaccctcttgtggcttgttctagcgtgtattaaaacttgacacacacccacacacaaaaacaaaaacaccactgtcgggctcatgtgcatttttttgataggacacccttgccaggccaccagagggcatctagagagaggcctagcgtctgttatggggccggggttggaaaagggtttgcctgcttggtacctgctctggaacttcgagatactaatctggagtggaggggactcgctgtcaggcttgctgttaaccgagaacggctgaaggctgggcgagacgcgggccaatgcgtctgcccgttcgggccggagggacgaggagtgtttgggcagcctaatccttattcatcgatctgtaattagctggagtgggggtccccgcccccagcctcccgcagcctgcgcggcgtgggggcgactccacctgggggttgcggcgtgggaggggcggggggaagggtactacgcgcgcgaggaggtttgggccggtccgcgcgccgtcgccccgccccggctgcggattggcccggcgcggcgttgattcttgcggccgcggttgtcgtcgccgcccccgtcccgccggctgcccattggtccagatcggactccaatcaccccacccctcggctggcccaggcaccgctgaggccggcctggtgagcccgccctccccgccgtggattggcccgcggcgggacccgtcagccgcggttgtgtctgggaaggagagaaaatggcggcggagccgaacaagaccgaaatccagactctttttaagaggcttcgcgcagttccaaccaacaaggcctgtttcgactgcggcgccaagaatccgagttgggccagcatcacgtacggtgttttcttgtgcattgactgttccggggtgcaccgctccctgggcgtccatctgagcttcatcaggtccacagagttggattccaactggaactggttccagctgaggtgtatgcaggtcggcgggaatgccaatgcgacggctttttttcgccaacatggatgcacagccaatgatgccaacaccaaatataatagccgagctgcccagatgtaccgggagaagatccggcagctggggagtgcggccctggctaggcatggcactgatctttggatagacaacatgagtagtgccgttcctaatcactccccagagaagaaggactctgatttcttcacagaacacactcaaccccctgcctgggatgcgccagccactgagccttcagggacccagcagccagccccgtctacagagagcagtggcctggcacagccggagcatggccccaacacagacctgcttggcacctcacccaaagcctcactggaactgaaaagctccatcattggcaagaagaagccagcagcagctaagaaagggctgggtgccaagaaaggcctaggggcccagaaggtgagcagccagagcttcagtgagattgagcggcaggctcaggtggcagagaagctccgtgagcagcaggcagccgatgccaagaagcaggcggaggagtccatggtcgcctccatgcgtctggcctaccaggagctccagattgatcgtaagaaagaggaaaagaagctacagaatctggaagggaagaagcgagagcaggcagaaaggttgggcatgggcttggtatcccgaagctctgtctcccactccgtgctgtctgagatgcaggtgattgagcaggaaaccccagtgagtgcaaaatcctctcgctcgcagctggacttgtttgacgatgttggtactttcgcctctggacccccaaagtacaaggacaatcccttttccttaggggaaagctttggctcccgctgggatacagatgctgcctggggtatggacagggtagaggagaaggagccagaagtgaccatctcaagcatccggcctatttcagaaagagccacaaaccggagggaagtggagagccggagctcaggcctcgagtctagtgaggcgcgtcagaaattcgcaggagccaaagccatctcatctgacatgttctttgggcgggaggtggatgcggagtatgaggccaggtctcggctgcagcagctctcaggcagcagtgccatcagctcttcagacctctttggggacatggatggagctcacggagcaggaagtgtatctctggggaacgtgctgcctacagcggacattgcccagtttaagcagggtgtcaagtctgtggctgggaaaatggctgtgctggccaatggtgtgatgaattccttgcaggatcgctacggttcctactgatccgagctctgtgactcaggcttacgatggtgacggcaacaagaactccacagttcccaggctggggatgctttgccttgtggaagctggggaggatttgttacttcgtatgtgtggtgtgtgtgtggggtggcctttgaggcgctcactcctgtgaggggaatggtcagtaccagcccttgtcctctgcctgtggactgagccctttattccctctcacaccaccctccgtgtgttagactcttgtccttctgtcctgcccccacagtcttcgcctgatatcaggcggtgcgtctagcagggctgatgggggccagggcccacagtcttcgcctgat

SEQ ID NO: 363991 - DNA, 4063 bp, Homo sapiens
acatgcaaagagtttgtaacggagcattattacggtctaggtacgagctggtgggaatcggccgaggtgaggaggcacgtgtgcgggacggtctgcttccaggagcgcgcccgcatcgagaaggcttatgcccagcagttggctgactgggcccgaaagtggagggggaccgtggagaagggcccccagtatggcacactggagaaggcctggcatgcctttttcacggcggctgagcggctgagcgcgctgcacctggaggtgcgggagaagctgcaagggcaggacagtgagcgggtgcgcgcctggcagcggggggctttccaccggcctgtgctgggcggcttccgcgagagccgggcggccgaggacggcttccgcaaggcccagaagccctggctgaagaggctgaaggaggttgaggcttccaagaaaagctaccacgcagcccggaaggatgagaagaccgcccagacgagggagagccacgcaaaggcagacagcgccgtctcccaggagcagctgcgcaaactgcaggaacgggtggaacgctgtgccaaggaggccgagaagacaaaagctcagtatgagcagacgctggcagagctgcatcgctacactccacgctacatggaggacatggaacaggcctttgagacctgccaggccgccgagcgccagcggcttcttttcttcaaggatatgctgctcaccttacaccagcacctggacctttccagcagtgagaagttccatgaactccaccgtgacttgcaccagggcattgaggcagccagtgacgaagaggatctgcgctggtggcgcagcacccacgggccaggcatggccatgaactggccacagttcgaggagtggtccttggacacacagaggacaatcagccggaaagagaagggtggccggagccctgatgaggttaccctgaccagcattgtgcctacaagagatggcaccgcacccccaccccagtccccggggtccccaggcacggggcaggatgaggagtggtcagatgaagagagtccccggaaggctgccaccggggttcgggtgagggcactctatgactacgctggccaggaagctgatgagctgagcttccgagcaggggaggagctgctgaagatgagtgaggaggacgagcagggctggtgccaaggccagttgcagagtggccgcattggcctgtaccctgccaactacgtggagtgtgtgggcgcctgagtgtcctgacagcccttctgcaacgtttacccaccctggttcagagcccagcttctcctggagagccggaccctcagggccctgaaccgtcgctctctggctgctcctctgtcccttgagggaggaagtcctgggacccagggaggggaggggcctttgtctagggaagggactggtagggaagggacgagtctaggctgagggcaagatgggaggtcagaggtgacagaagcgttcaggggtgcctgggcctccccaggagctgtggactcagttcctgacctctgctttggggttcctggggtgggcttggggtgagtgtagttctggcctagcagcaccctcttgtggcttgttctagcgtgtattaaaacttgacacacacccacacacaaaaacaaaaacaccactgtcgggctcatgtgcatttttttgataggacacccttgccaggccaccagagggcatctagagagaggcctagcgtctgttatggggccggggttggaaaagggtttgcctgcttggtacctgctctggaacttcgagatactaatctggagtggaggggactcgctgtcaggcttgctgttaaccgagaacggctgaaggctgggcgagacgcgggccaatgcgtctgcccgttcgggccggagggacgaggagtgtttgggcagcctaatccttattcatcgatctgtaattagctggagtgggggtccccgcccccagcctcccgcagcctgcgcggcgtgggggcgactccacctgggggttgcggcgtgggaggggcggggggaagggtactacgcgcgcgaggaggtttgggccggtccgcgcgccgtcgccccgccccggctgcggattggcccggcgcggcgttgattcttgcggccgcggttgtcgtcgccgcccccgtcccgccggctgcccattggtccagatcggactccaatcaccccacccctcggctggcccaggcaccgctgaggccggcctggtgagcccgccctccccgccgtggattggcccgcggcgggacccgtcagccgcggttgtgtctgggaaggagagaaaatggcggcggagccgaacaagaccgaaatccagactctttttaagaggcttcgcgcagttccaaccaacaaggcctgtttcgactgcggcgccaagaatccgagttgggccagcatcacgtacggtgttttcttgtgcattgactgttccggggtgcaccgctccctgggcgtccatctgagcttcatcaggtccacagagttggattccaactggaactggttccagctgaggtgtatgcaggtcggcgggaatgccaatgcgacggctttttttcgccaacatggatgcacagccaatgatgccaacaccaaatataatagccgagctgcccagatgtaccgggagaagatccggcagctggggagtgcggccctggctaggcatggcactgatctttggatagacaacatgagtagtgccgttcctaatcactccccagagaagaaggactctgatttcttcacagaacacactcaaccccctgcctgggatgcgccagccactgagccttcagggacccagcagccagccccgtctacagagagcagtggcctggcacagccggagcatggccccaacacagacctgcttggcacctcacccaaagcctcactggaactgaaaagctccatcattggcaagaagaagccagcagcagctaagaaagggctgggtgccaagaaaggcctaggggcccagaaggtgagcagccagagcttcagtgagattgagcggcaggctcaggtggcagagaagctccgtgagcagcaggcagccgatgccaagaagcaggcggaggagtccatggtcgcctccatgcgtctggcctaccaggagctccagattgatcgtaagaaagaggaaaagaagctacagaatctggaagggaagaagcgagagcaggcagaaaggttgggcatgggcttggtatcccgaagctctgtctcccactccgtgctgtctgagatgcaggtgattgagcaggaaaccccagtgagtgcaaaatcctctcgctcgcagctggacttgtttgacgatgttggtactttcgcctctggacccccaaagtacaaggacaatcccttttccttaggggaaagctttggctcccgctgggatacagatgctgcctggggtatggacagggtagaggagaaggagccagaagtgaccatctcaagcatccggcctatttcagaaagagccacaaaccggagggaagtggagagccggagctcaggcctcgagtctagtgaggcgcgtcagaaattcgcaggagccaaagccatctcatctgacatgttctttgggcgggaggtggatgcggagtatgaggccaggtctcggctgcagcagctctcaggcagcagtgccatcagctcttcagacctctttggggacatggatggagctcacggagcaggaagtgtatctctggggaacgtgctgcctacagcggacattgcccagtttaagcagggtgtcaagtctgtggctgggaaaatggctgtgctgagccaagcactgtcattcttggtgccatcttcccctgccgcaccggcagtctcagcccagcccccacctttgggttgtaggttgggctcccaagcaacacagaccactcttccccttgcccctcccccagagggacttgactttctttctggactgtttgtattgaaacaaagtggtgtcaaaataaagcccctgcagggcctggctccctgttggtctgagt

SEQ ID NO: 363992 - DNA, 3482 bp, Homo sapiens
acatgcaaagagtttgtaacggagcattattacggtctaggtacgagctggtgggaatcggccgaggtgaggaggcacgtgtgcgggacggtctgcttccaggagcgcgcccgcatcgagaaggcttatgcccagcagttggctgactgggcccgaaagtggagggggaccgtggagaagggcccccagtatggcacactggagaaggcctggcatgcctttttcacggcggctgagcggctgagcgcgctgcacctggaggtgcgggagaagctgcaagggcaggacagtgagcgggtgcgcgcctggcagcggggggctttccaccggcctgtgctgggcggcttccgcgagagccgggcggccgaggacggcttccgcaaggcccagaagccctggctgaagaggctgaaggaggttgaggcttccaagaaaagctaccacgcagcccggaaggatgagaagaccgcccagacgagggagagccacgcaaaggcagacagcgccgtctcccaggagcagctgcgcaaactgcaggaacgggtggaacgctgtgccaaggaggccgagaagacaaaagctcagtatgagcagacgctggcagagctgcatcgctacactccacgctacatggaggacatggaacaggcctttgagacctgccaggccgccgagcgccagcggcttcttttcttcaaggatatgctgctcaccttacaccagcacctggacctttccagcagtgagaagttccatgaactccaccgtgacttgcaccagggcattgaggcagccagtgacgaagaggatctgcgctggtggcgcagcacccacgggccaggcatggccatgaactggccacagttcgaggagtggtccttggacacacagaggacaatcagccggaaagagaagggtggccggagccctgatgaggttaccctgaccagcattgtgcctacaagagatggcaccgcacccccaccccagtccccggggtccccaggcacggggcaggatgaggagtggtcagatgaagagagtccccggaaggctgccaccggggttcgggtgagggcactctatgactacgctggccaggaagctgatgagctgagcttccgagcaggggaggagctgctgaagatgagtgaggaggacgagcagggctggtgccaaggccagttgcagagtggccgcattggcctgtaccctgccaactacgtggagtgtgtgggcgcctgagtgtcctgacagcccttctgcaacgtttacccaccctggttcagagcccagcttctcctggagagccggaccctcagggccctgaaccgtcgctctctggctgctcctctgtcccttgagggaggaagtcctgggacccagggaggggaggggcctttgtctagggaagggactggtagggaagggacgagtctaggctgagggcaagatgggaggtcagaggtgacagaagcgttcaggggtgcctgggcctccccaggagctgtggactcagttcctgacctctgctttggggttcctggggtgggcttggggtgagtgtagttctggcctagcagcaccctcttgtggcttgttctagcgtgtattaaaacttgacacacacccacacacaaaaacaaaaacaccactgtcgggctcatgtgcatttttttgataggacacccttgccaggccaccagagggcatctagagagaggcctagcgtctgttatggggccggggttggaaaagggtttgcctgcttggtacctgctctggaacttcgagatactaatctggagtggaggggactcgctgtcaggcttgctgttaaccgagaacggctgaaggctgggcgagacgcgggccaatgcgtctgcccgttcgggccggagggacgaggagtgtttgggcagcctaatccttattcatcgatctgtaattagctggagtgggggtccccgcccccagcctcccgcagcctgcgcggcgtgggggcgactccacctgggggttgcggcgtgggaggggcggggggaagggtactacgcgcgcgaggaggtttgggccggtccgcgcgccgtcgccccgccccggctgcggattggcccggcgcggcgttgattcttgcggccgcggttgtcgtcgccgcccccgtcccgccggctgcccattggtccagatcggactccaatcaccccacccctcggctggcccaggcaccgctgaggccggcctggtgagcccgccctccccgccgtggattggcccgcggcgggacccgtcagccgcggttgtgtctgggaaggagagaaaatggcggcggagccgaacaagaccgaaatccagactctttttaagaggcttcgcgcagttccaaccaacaaggcctgtttcgactgcggcgccaagaatccgagttgggccagcatcacgtacggtgttttcttgtgcattgactgttccggggtgcaccgctccctgggcgtccatctgagcttcatcaggtccacagagttggattccaactggaactggttccagctgaggtgtatgcaggtcggcgggaatgccaatgcgacggctttttttcgccaacatggatgcacagccaatgatgccaacaccaaatataatagccgagctgcccagatgtaccgggagaagatccggcagctggggagtgcggccctggctaggcatggcactgatctttggatagacaacatgagtagtgccgttcctaatcactccccagagaagaaggactctgatttcttcacagaacacactcaaccccctgcctgggatgcgccagccactgagccttcagggacccagcagccagccccgtctacagagagcagtggcctggcacagccggagcatggccccaacacagacctgcttggcacctcacccaaagcctcactggaactgaaaagctccatcattggcaagaagaagccagcagcagctaagaaagggctgggtgccaagaaaggcctaggggcccagaaggtgagcagccagagcttcagtgagattgagcggcaggctcaggtggcagagaagctccgtgagcagcaggcagccgatgccaagaagcaggcggaggagtccatggtcgcctccatgcgtctggcctaccaggagctccagattgatcgtaagaaagaggaaaagaagctacagaatctggaagggaagaagcgagagcaggcagaaaggttgggcatgggcttggtatcccgaagctctgtctcccactccgtgctgtctgagatgcaggtgattgagcaggaaaccccagtgagtgcaaaatcctctcgctcgcagctggacttgtttgacgatgttggtactttcgcctctggacccccaaagggaaacggacaatgcccattcctaagagttagatgttcgttacccgactcgacaacaacgtgtcctgctttagctcgacggtctgtgag

SEQ ID NO: 363993 - DNA, 1642 bp, Homo sapiens
acatgcaaagagtttgtaacggagcattattacggtctaggtacgagctggtgggaatcggccgaggtgaggaggcacgtgtgcgggacggtctgcttccaggagcgcgcccgcatcgagaaggcttatgcccagcagttggctgactgggcccgaaagtggagggggaccgtggagaagggcccccagtatggcacactggagaaggcctggcatgcctttttcacggcggctgagcggctgagcgcgctgcacctggaggtgcgggagaagctgcaagggcaggacagtgagcgggtgcgcgcctggcagcggggggctttccaccggcctgtgctgggcggcttccgcgagagccgggcggccgaggacggcttccgcaaggcccagaagccctggctgaagaggctgaaggaggttgaggcttccaagaaaagctaccacgcagcccggaaggatgagaagaccgcccagacgagggagagccacgcaaaggcagacagcgccgtctcccaggagcagctgcgcaaactgcaggaacgggtggaacgctgtgccaaggaggccgagaagacaaaagctcagtatgagcagacgctggcagagctgcatcgctacactccacgctacatggaggacatggaacaggcctttgagacctgccaggccgccgagcgccagcggcttcttttcttcaaggatatgctgctcaccttacaccagcacctggacctttccagcagtgagaagttccatgaactccaccgtgacttgcaccagggcattgaggcagccagtgacgaagaggatctgcgctggtggcgcagcacccacgggccaggcatggccatgaactggccacagttcgaggagtggtccttggacacacagaggacaatcagccggaaagagaagggtggccggagccctgatgaggttaccctgaccagcattgtgcctacaagagatggcaccgcacccccaccccagtccccggggtccccaggcacggggcaggatgaggagtggtcagatgaagagagtccccggaaggctgccaccggggttcgggtgagggcactctatgactacgctggccaggaagctgatgagctgagcttccgagcaggggaggagctgctgaagatgagtgaggaggacgagcagggctggtgccaaggccagttgcagagtggccgcattggcctgtaccctgccaactacgtggagtgtgtgggcgcctgagtgtcctgacagcccttctgcaacgtttacccaccctggttcagagcccagcttctcctggagagccggaccctcagggccctgaaccgtcgctctctggctgctcctctgtcccttgagggaggaagtcctgggacccagggaggggaggggcctttgtctagggaagggactggtagggaagggacgagtctaggctgagggcaagatgggaggtcagaggtgacagaagcgttcaggggtgcctgggcctccccaggagctgtggactcagttcctgacctctgctttggggttcctggggtgggcttggggtgagtgtagttctggcctagcagcaccctcttgtggcttgttctagcgtgtattaaaacttgacacacacccacacacaaaa

SEQ ID NO: 363994 - DNA, 1491 bp, Homo sapiens
acatgcaaagagtttgtaacggagcattattacggtctaggtacgagctggtgggaatcggccgaggtgaggaggcacgtgtgcgggacggtctgcttccaggagcgcgcccgcatcgagaaggcttatgcccagcagttggctgactgggcccgaaagtggagggggaccgtggagaagggcccccagtatggcacactggagaaggcctggcatgcctttttcacggcggctgagcggctgagcgcgctgcacctggaggtgcgggagaagctgcaagggcaggacagtgagcgggtgcgcgcctggcagcggggggctttccaccggcctgtgctgggcggcttccgcgagagccgggcggccgaggacggcttccgcaaggcccagaagccctggctgaagaggctgaaggaggttgaggcttccaagaaaagctaccacgcagcccggaaggatgagaagaccgcccagacgagggagagccacgcaaaggcagacagcgccgtctcccaggagcagctgcgcaaactgcaggaacgggtggaacgctgtgccaaggaggccgagaagacaaaagctcagtatgagcagacgctggcagagctgcatcgctacactccacgctacatggaggacatggaacaggcctttgagacctgccaggccgccgagcgccagcggcttcttttcttcaaggatatgctgctcaccttacaccagcacctggacctttccagcagtgagaagttccatgaactccaccgtgacttgcaccagggcattgaggcagccagtgacgaagaggatctgcgctggtggcgcagcacccacgggccaggcatggccatgaactggccacagttcgaggagtggtccttggacacacagaggacaatcagccggaaagagaagggtggccggagccctgatgaggttaccctgaccagcattgtgcctacaagagatggcaccgcacccccaccccagtccccggggtccccaggcacggggcaggatgaggagtggtcagatgaagagagtccccggaaggctgccaccggggttcgggtgagggcactctatgactacgctggccaggaagctgatgagctgagcttccgagcaggggaggagctgctgaagatgagtgaggaggacgagcagggctggtgccaaggccagttgcagagtggccgcattggcctgtaccctgccaactacgtggagtgtgtgggcgcctgagtgtcctgacagcccttctgcaacgtttacccaccctggttcagagcccagcttctcctggagagccggaccctcagggccctgaaccgtcgctctctggctgctcctctgtcccttgagggaggaagtcctgggaccttgcccctcccccagagggacttgactttctttctggactgtttgtattgaaacaaagtggtgtcaaaataaagcccctgcagggcctggctccctgttggtctgagt

SEQ ID NO: 363995 - DNA, 413 bp, Homo sapiens
accgaaatccagactctttttaagaggcttcgcgcagttccaaccaacaaggtgcgtgagcagggggcgcgcggagtctctcgtcccgctggggcctgagggagggagaagggcggaggtgggttatgtttctggggtgtcggtgcctggcctttactcggggcccctgacgattcgctcatcgccgcctccacccaggcctgtttcgactgcggcgccaagaatccgagttgggccagcatcacgtacggtgttttcttgtgcattgactgttccggggtgcaccgctccctgggcgtccatctgagcttcatcaggtaggctctccgcgcggttgccgtgtttccacccggccggccaggggtgtctgggcaacaagggagagtggctgcctcgacttgggccgctctgaa

SEQ ID NO: 363996 - DNA, 314 bp, Homo sapiens
gaccgctgggcttgggagctctgtggaggctctggggtgggcctcttgttagccacaagtctgtttctcctccagagtccgtgtatctgtcagctaaaggggcccttcctgccagaggtaactgacagctgcttggggagcccagcccctgttctcagcttcctgctttagaagcggagcctggtgctcaccatatgctccctgcctcgcagtctttgttttggttcagggaatttggacgtctctggtgcttcggacgtctctggtgcttcaggtctaggttcctgtctcactctgctgggtgccagtaaata

SEQ ID NO: 363997 - DNA, 1886 bp, Homo sapiens
gaattcggcacgagctcgtgccgaatcgccgcggcgcgggcccaggagcggcaggactcgggccggagcgtggccggacccccacccgccgaggggcccagggaggacgcggcagagtcacggtggcagcattgagagttggacacccgggtccttgaagtgatctctaggccccagccccaaatccgccaccattccgtgctgcggggacaccatggctccagaagaggacgctggaggggaggccttagggggcagtttctgggaggctggcaactacaggcgcacggtacagcgggtggaggacgggcaccggctgtgcggggacctggtcagctgcttccaggagcgcgcccgcatcgagaaggcttatgcccagcagttggctgactgggcccgaaagtggagggggaccgtggagaagggcccccagtatggcacactggagaaggcctggcatgcctttttcacggcggctgagcggctgagcgcgctgcacctggaggtgcgggagaagctgcaagggcaggacagtgagcgggtgcgcgcctggcagcggggggctttccaccggcctgtgctgggcggcttccgcgagagccgggcggccgaggacggcttccgcaaggcccagaagccctggctgaagaggctgaaggaggttgaggcttccaagaaaagctaccacgcagcccggaaggatgagaagaccgcccagacgagggagagccacgcaaaggcagacagcgccgtctcccaggagcagctgcgcaaactgcaggaacgggtggaacgctgtgccaaggaggccgagaagacaaaagctcagtatgagcagacgctggcagagctgcatcgctacactccacgctacatggaggacatggaacaggcctttgagacctgccaggccgccgagcgccagcggcttcttttcttcaaggatatgctgctcaccttacaccagcacctggacctttccagcagtgagaagttccatgaactccaccgtgacttgcaccagggcattgaggcagccagtgacgaagaggatctgcgctggtggcgcagcacccacgggccaggcatggccatgaactggccacagttcgaggagtggtccttggacacacagaggacaatcagccggaaagagaagggtggccggagccctgatgaggttaccctgaccagcattgtgcctacaagagatggcaccgcacccccaccccagtccccggggtccccaggcacggggcaggatgaggagtggtcagatgaagagagtccccggaaggctgccaccggggttcgggtgagggcactctatgactacgctggccaggaagctgatgagctgagcttccgagcaggggaggagctgctgaagatgagtgaggaggacgagcagggctggtgccaaggccagttgcagagtggccgcattggcctgtaccctgccaactacgtggagtgtgtgggcgcctgagtgtcctgacagcccttctgcaacgtttacccaccctggttcagagcccagcttctcctggagagccggaccctcagggccctgaaccgtcgctctctggctgctcctctgtcccttgagggaggaagtcctgggacccagggaggggaggggcctttgtctagggaagggactggtagggaagggacgagtctaggctgagggcaagatgggaggtcagaggtgacagaagcgttcaggggtgcctgggcctccccaggagctgtggactcagttcctgacctctgctttggggttcctggggtgggcttggggtgagtgtagttctggcctagcagcaccctcttgtggcttgttctagcgtgtattaaaacttgacacacacccacacacaaaa

SEQ ID NO: 363998 - DNA, 5044 bp, Homo sapiens
acatgcaaagagtttgtaacggagcattattacggtctaggtacgagctggtgggaatcggccgaggtgaggaggcacgtgtgcgggacggtctgcttccaggagcgcgcccgcatcgagaaggcttatgcccagcagttggctgactgggcccgaaagtggagggggaccgtggagaagggcccccagtatggcacactggagaaggcctggcatgcctttttcacggcggctgagcggctgagcgcgctgcacctggaggtgcgggagaagctgcaagggcaggacagtgagcgggtgcgcgcctggcagcggggggctttccaccggcctgtgctgggcggcttccgcgagagccgggcggccgaggacggcttccgcaaggcccagaagccctggctgaagaggctgaaggaggttgaggcttccaagaaaagctaccacgcagcccggaaggatgagaagaccgcccagacgagggagagccacgcaaaggcagacagcgccgtctcccaggagcagctgcgcaaactgcaggaacgggtggaacgctgtgccaaggaggccgagaagacaaaagctcagtatgagcagacgctggcagagctgcatcgctacactccacgctacatggaggacatggaacaggcctttgagacctgccaggccgccgagcgccagcggcttcttttcttcaaggatatgctgctcaccttacaccagcacctggacctttccagcagtgagaattgcaccagggcattgaggcagccagtgacgaagaggatctgcgctggtggcgcagcacccacgggccaggcatggccatgaactggccacagttcgaggagtggtccttggacacacagaggacaatcagccggaaagagaagggtggccggagccctgatgaggttaccctgaccagcattgtgcctacaagagatggcaccgcacccccaccccagtccccggggtccccaggcacggggcaggatgaggagtggtcagatgaagagagtccccggaaggctgccaccggggttcgggtgagggcactctatgactacgctggccaggaagctgatgagctgagcttccgagcaggggaggagctgctgaagatgagtgaggaggacgagcagggctggtgccaaggccagttgcagagtggccgcattggcctgtaccctgccaactacgtggagtgtgtgggcgcctgagtgtcctgacagcccttctgcaacgtttacccaccctggttcagagcccagcttctcctggagagccggaccctcagggccctgaaccgtcgctctctggctgctcctctgtcccttgagggaggaagtcctgggacccagggaggggaggggcctttgtctagggaagggactggtagggaagggacgagtctaggctgagggcaagatgggaggtcagaggtgacagaagcgttcaggggtgcctgggcctccccaggagctgtggactcagttcctgacctctgctttggggttcctggggtgggcttggggtgagtgtagttctggcctagcagcaccctcttgtggcttgttctagcgtgtattaaaacttgacacacacccacacacaaaaacaaaaacaccactgtcgggctcatgtgcatttttttgataggacacccttgccaggccaccagagggcatctagagagaggcctagcgtctgttatggggccggggttggaaaagggtttgcctgcttggtacctgctctggaacttcgagatactaatctggagtggaggggactcgctgtcaggcttgctgttaaccgagaacggctgaaggctgggcgagacgcgggccaatgcgtctgcccgttcgggccggagggacgaggagtgtttgggcagcctaatccttattcatcgatctgtaattagctggagtgggggtccccgcccccagcctcccgcagcctgcgcggcgtgggggcgactccacctgggggttgcggcgtgggaggggcggggggaagggtactacgcgcgcgaggaggtttgggccggtccgcgcgccgtcgccccgccccggctgcggattggcccggcgcggcgttgattcttgcggccgcggttgtcgtcgccgcccccgtcccgccggctgcccattggtccagatcggactccaatcaccccacccctcggctggcccaggcaccgctgaggccggcctggtgagcccgccctccccgccgtggattggcccgcggcgggacccgtcagccgcggttgtgtctgggaaggagagaaaatggcggcggagccgaacaagaccgaaatccagactctttttaagaggcttcgcgcagttccaaccaacaaggcctgtttcgactgcggcgccaagaatccgagttgggccagcatcacgtacggtgttttcttgtgcattgactgttccggggtgcaccgctccctgggcgtccatctgagcttcatcaggtccacagagttggattccaactggaactggttccagctgaggtgtatgcaggtcggcgggaatgccaatgcgacggctttttttcgccaacatggatgcacagccaatgatgccaacaccaaatataatagccgagctgcccagatgtaccgggagaagatccggcagctggggagtgcggccctggctaggcatggcactgatctttggatagacaacatgagtagtgccgttcctaatcactccccagagaagaaggactctgatttcttcacagaacacactcaaccccctgcctgggatgcgccagccactgagccttcagggacccagcagccagccccgtctacagagagcagtggcctggcacagccggagcatggccccaacacagacctgcttggcacctcacccaaagcctcactggaactgaaaagctccatcattggcaagaagaagccagcagcagctaagaaagggctgggtgccaagaaaggcctaggggcccagaaggtgagcagccagagcttcagtgagattgagcggcaggctcaggtggcagagaagctccgtgagcagcaggcagccgatgccaagaagcaggcggaggagtccatggtcgcctccatgcgtctggcctaccaggagctccagattgatcgtaagaaagaggaaaagaagctacagaatctggaagggaagaagcgagagcaggcagaaaggttgggcatgggcttggtatcccgaagctctgtctcccactccgtgctgtctgagatgcaggtgattgagcaggaaaccccagtgagtgcaaaatcctctcgctcgcagctggacttgtttgacgatgttggtactttcgcctctggacccccaaagtacaaggacaatcccttttccttaggggaaagctttggctcccgctgggatacagatgctgcctggggtatggacagggtagaggagaaggagccagaagtgaccatctcaagcatccggcctatttcagaaagagccacaaaccggagggaagtggagagccggagctcaggcctcgagtctagtgaggcgcgtcagaaattcgcaggagccaaagccatctcatctgacatgttctttgggcgggaggtggatgcggagtatgaggccaggtctcggctgcagcagctctcaggcagcagtgccatcagctcttcagacctctttggggacatggatggagctcacggagcaggaagtgtatctctggggaacgtgctgcctacagcggacattgcccagtttaagcagggtgtcaagtctgtggctgggaaaatggctgtgctggccaatggtgtgatgaattccttgcaggatcgctacggttcctactgatccgagctctgtgactcaggcttacgatggtgacggcaacaagaactccacagttcccaggctggggatgctttgccttgtggaagctggggaggatttgttacttcgtatgtgtggtgtgtgtgtggggtggcctttgaggcgctcactcctgtgaggggaatggtcagtaccagcccttgtcctctgcctgtggactgagccctttattccctctcacaccaccctccgtgtgttagactcttgtccttctgtcctgcccccacagctgctgctcacttatcctgccatactgggaaagggggttcccccacgatggcttattctgggtccagactttccccaggtagggaaagcggaaggtagaaggctttttttgctggctctagggttcttctagttcgaggccttgggtccccatcctctggaaccagggggaggcctggaaggagttcactgtagacccgtcccatggggaaagaggctgcggacttgctgctgctgctgctgccagtggcctcttctgggtgccaggagaggggaaggacctttgtctgggcgttaccaagggctggaaactttacctggtacctaaaggtttcatttggtatcagaccggagacccttgggttctcccgtctcaccacccctttctacagtaagcacttggaagattgtttcagggtgtctcagggtccctctgtaccatctgctgtggaatgcaggaccctctgtgacattctttatcccttcttccccgggttggtggccatggagggtcttgtctgctgtgattcgactctggatgctgtgagcttgatgctggccagggaagcagaggatgtgagaggcagaggcaggctcctggggctgagctccttcctctgcatcattctgggcttggcctggacagcacccgccagtgagagctgtgggcctcaccctctggcagctgagccaagcactgtcattcttggtgccatcttcccctgccgcaccggcagtctcagcccagcccccacctttgggttgtaggttgggctcccaagcaacacagaccactcttccccttgcccctcccccagagggacttgactttctttctggactgtttgtattgaaacaaagtggtgtcaaaataaagcccctgcagggcctggctccctgttggtctgagt

SEQ ID NO: 363999 - DNA, 4944 bp, Homo sapiens
acatgcaaagagtttgtaacggagcattattacggtctaggtacgagctggtgggaatcggccgaggtgaggaggcacgtgtgcgggacggtctgcttccaggagcgcgcccgcatcgagaaggcttatgcccagcagttggctgactgggcccgaaagtggagggggaccgtggagaagggcccccagtatggcacactggagaaggcctggcatgcctttttcacggcggctgagcggctgagcgcgctgcacctggaggtgcgggagaagctgcaagggcaggacagtgagcgggtgcgcgcctggcagcggggggctttccaccggcctgtgctgggcggcttccgcgagagccgggcggccgaggacggcttccgcaaggcccagaagccctggctgaagaggctgaaggaggttgaggcttccaagaaaagctaccacgcagcccggaaggatgagaagaccgcccagacgagggagagccacgcaaaggcagacagcgccgtctcccaggagcagctgcgcaaactgcaggaacgggtggaacgctgtgccaaggaggccgagaagacaaaagctcagtatgagcagacgctggcagagctgcatcgctacactccacgctacatggaggacatggaacaggcctttgagacctgccaggccgccgagcgccagcggcttcttttcttcaaggatatgctgctcaccttacaccagcacctggacctttccagcagtgagaagttccatgaactccaccgtgacttgcaccagggcattgaggcagccagtgacgaagaggatctgcgctggtggcgcagcacccacgggccaggcatggccatgaactggccacagttcgaggagtggtccttggacacacagaggacaatcagccggaaagagaagggtggccggagccctgatgaggttaccctgaccagcattgtgcctacaagagatggcaccgcacccccaccccagtccccggggtccccagggggaggagctgctgaagatgagtgaggaggacgagcagggctggtgccaaggccagttgcagagtggccgcattggcctgtaccctgccaactacgtggagtgtgtgggcgcctgagtgtcctgacagcccttctgcaacgtttacccaccctggttcagagcccagcttctcctggagagccggaccctcagggccctgaaccgtcgctctctggctgctcctctgtcccttgagggaggaagtcctgggacccagggaggggaggggcctttgtctagggaagggactggtagggaagggacgagtctaggctgagggcaagatgggaggtcagaggtgacagaagcgttcaggggtgcctgggcctccccaggagctgtggactcagttcctgacctctgctttggggttcctggggtgggcttggggtgagtgtagttctggcctagcagcaccctcttgtggcttgttctagcgtgtattaaaacttgacacacacccacacacaaaaacaaaaacaccactgtcgggctcatgtgcatttttttgataggacacccttgccaggccaccagagggcatctagagagaggcctagcgtctgttatggggccggggttggaaaagggtttgcctgcttggtacctgctctggaacttcgagatactaatctggagtggaggggactcgctgtcaggcttgctgttaaccgagaacggctgaaggctgggcgagacgcgggccaatgcgtctgcccgttcgggccggagggacgaggagtgtttgggcagcctaatccttattcatcgatctgtaattagctggagtgggggtccccgcccccagcctcccgcagcctgcgcggcgtgggggcgactccacctgggggttgcggcgtgggaggggcggggggaagggtactacgcgcgcgaggaggtttgggccggtccgcgcgccgtcgccccgccccggctgcggattggcccggcgcggcgttgattcttgcggccgcggttgtcgtcgccgcccccgtcccgccggctgcccattggtccagatcggactccaatcaccccacccctcggctggcccaggcaccgctgaggccggcctggtgagcccgccctccccgccgtggattggcccgcggcgggacccgtcagccgcggttgtgtctgggaaggagagaaaatggcggcggagccgaacaagaccgaaatccagactctttttaagaggcttcgcgcagttccaaccaacaaggcctgtttcgactgcggcgccaagaatccgagttgggccagcatcacgtacggtgttttcttgtgcattgactgttccggggtgcaccgctccctgggcgtccatctgagcttcatcaggtccacagagttggattccaactggaactggttccagctgaggtgtatgcaggtcggcgggaatgccaatgcgacggctttttttcgccaacatggatgcacagccaatgatgccaacaccaaatataatagccgagctgcccagatgtaccgggagaagatccggcagctggggagtgcggccctggctaggcatggcactgatctttggatagacaacatgagtagtgccgttcctaatcactccccagagaagaaggactctgatttcttcacagaacacactcaaccccctgcctgggatgcgccagccactgagccttcagggacccagcagccagccccgtctacagagagcagtggcctggcacagccggagcatggccccaacacagacctgcttggcacctcacccaaagcctcactggaactgaaaagctccatcattggcaagaagaagccagcagcagctaagaaagggctgggtgccaagaaaggcctaggggcccagaaggtgagcagccagagcttcagtgagattgagcggcaggctcaggtggcagagaagctccgtgagcagcaggcagccgatgccaagaagcaggcggaggagtccatggtcgcctccatgcgtctggcctaccaggagctccagattgatcgtaagaaagaggaaaagaagctacagaatctggaagggaagaagcgagagcaggcagaaaggttgggcatgggcttggtatcccgaagctctgtctcccactccgtgctgtctgagatgcaggtgattgagcaggaaaccccagtgagtgcaaaatcctctcgctcgcagctggacttgtttgacgatgttggtactttcgcctctggacccccaaagtacaaggacaatcccttttccttaggggaaagctttggctcccgctgggatacagatgctgcctggggtatggacagggtagaggagaaggagccagaagtgaccatctcaagcatccggcctatttcagaaagagccacaaaccggagggaagtggagagccggagctcaggcctcgagtctagtgaggcgcgtcagaaattcgcaggagccaaagccatctcatctgacatgttctttgggcgggaggtggatgcggagtatgaggccaggtctcggctgcagcagctctcaggcagcagtgccatcagctcttcagacctctttggggacatggatggagctcacggagcaggaagtgtatctctggggaacgtgctgcctacagcggacattgcccagtttaagcagggtgtcaagtctgtggctgggaaaatggctgtgctggccaatggtgtgatgaattccttgcaggatcgctacggttcctactgatccgagctctgtgactcaggcttacgatggtgacggcaacaagaactccacagttcccaggctggggatgctttgccttgtggaagctggggaggatttgttacttcgtatgtgtggtgtgtgtgtggggtggcctttgaggcgctcactcctgtgaggggaatggtcagtaccagcccttgtcctctgcctgtggactgagccctttattccctctcacaccaccctccgtgtgttagactcttgtccttctgtcctgcccccacagctgctgctcacttatcctgccatactgggaaagggggttcccccacgatggcttattctgggtccagactttccccaggtagggaaagcggaaggtagaaggctttttttgctggctctagggttcttctagttcgaggccttgggtccccatcctctggaaccagggggaggcctggaaggagttcactgtagacccgtcccatggggaaagaggctgcggacttgctgctgctgctgctgccagtggcctcttctgggtgccaggagaggggaaggacctttgtctgggcgttaccaagggctggaaactttacctggtacctaaaggtttcatttggtatcagaccggagacccttgggttctcccgtctcaccacccctttctacagtaagcacttggaagattgtttcagggtgtctcagggtccctctgtaccatctgctgtggaatgcaggaccctctgtgacattctttatcccttcttccccgggttggtggccatggagggtcttgtctgctgtgattcgactctggatgctgtgagcttgatgctggccagggaagcagaggatgtgagaggcagaggcaggctcctggggctgagctccttcctctgcatcattctgggcttggcctggacagcacccgccagtgagagctgtgggcctcaccctctggcagctgagccaagcactgtcattcttggtgccatcttcccctgccgcaccggcagtctcagcccagcccccacctttgggttgtaggttgggctcccaagcaacacagaccactcttccccttgcccctcccccagagggacttgactttctttctggactgtttgtattgaaacaaagtggtgtcaaaataaagcccctgcagggcctggctccctgttggtctgagt

SEQ ID NO: 364000 - DNA, 5108 bp, Homo sapiens
acatgcaaagagtttgtaacggagcattattacggtctaggtacgagctggtgggaatcggccgaggtgaggaggcacgtgtgcgggacggtctgcttccaggagcgcgcccgcatcgagaaggcttatgcccagcagttggctgactgggcccgaaagtggagggggaccgtggagaagggcccccagtatggcacactggagaaggcctggcatgcctttttcacggcggctgagcggctgagcgcgctgcacctggaggtgcgggagaagctgcaagggcaggacagtgagcgggtgcgcgcctggcagcggggggctttccaccggcctgtgctgggcggcttccgcgagagccgggcggccgaggacggcttccgcaaggcccagaagccctggctgaagaggctgaaggaggttgaggcttccaagaaaagctaccacgcagcccggaaggatgagaagaccgcccagacgagggagagccacgcaaaggcagacagcgccgtctcccaggagcagctgcgcaaactgcaggaacgggtggaacgctgtgccaaggaggccgagaagacaaaagctcagtatgagcagacgctggcagagctgcatcgctacactccacgctacatggaggacatggaacaggcctttgagacctgccaggccgccgagcgccagcggcttcttttcttcaaggatatgctgctcaccttacaccagcacctggacctttccagcagtgagaagttccatgaactccaccgtgacttgcaccagggcattgaggcagccagtgacgaagaggatctgcgctggtggcgcagcacccacgggccaggcatggccatgaactggccacagttcgaggagtggtccttggacacacagaggacaatcagccggaaagagaagggtggccggagccctgatgaggttaccctgaccagcattgtgcctacaagagatggcaccgcacccccaccccagtccccggggtccccaggcacggggcaggatgaggagtggtcagatgaagagagtccccggaaggctgccaccggggttcgggtgagggcactctatgactacgctggccaggaagctgatgagctgagcttccgagcaggggaggagctgctgaagatgagtgaggaggacgagcagggctggtgccaaggccagttgcagagtggccgcattggcctgtaccctgccaactacgtggagtgtgtgggcgcctgagtgtcctgacagcccttctgcaacgtttacccaccctggttcagagcccagcttctcctggagagccggaccctcagggccctgaaccgtcgctctctggctgctcctctgtcccttgagggaggaagtcctgggacccagggaggggaggggcctttgtctagggaagggactggtagggaagggacgagtctaggctgagggcaagatgggaggtcagaggtgacagaagcgttcaggggtgcctgggcctccccaggagctgtggactcagttcctgacctctgctttggggttcctggggtgggcttggggtgagtgtagttctggcctagcagcaccctcttgtggcttgttctagcgtgtattaaaacttgacacacacccacacacaaaaacaaaaacaccactgtcgggctcatgtgcatttttttgataggacacccttgccaggccaccagagggcatctagagagaggcctagcgtctgttatggggccggggttggaaaagggtttgcctgcttggtacctgctctggaacttcgagatactaatctggagtggaggggactcgctgtcaggcttgctgttaaccgagaacggctgaaggctgggcgagacgcgggccaatgcgtctgcccgttcgggccggagggacgaggagtgtttgggcagcctaatccttattcatcgatctgtaattagctggagtgggggtccccgcccccagcctcccgcagcctgcgcggcgtgggggcgactccacctgggggttgcggcgtgggaggggcggggggaagggtactacgcgcgcgaggaggtttgggccggtccgcgcgccgtcgccccgccccggctgcggattggcccggcgcggcgttgattcttgcggccgcggttgtcgtcgccgcccccgtcccgccggctgcccattggtccagatcggactccaatcaccccacccctcggctggcccaggcaccgctgaggccggcctggtgagcccgccctccccgccgtggattggcccgcggcgggacccgtcagccgcggttgtgtctgggaaggagagaaaatggcggcggagccgaacaagaccgaaatccagactctttttaagaggcttcgcgcagttccaaccaacaaggcctgtttcgactgcggcgccaagaatccgagttgggccagcatcacgtacggtgttttcttgtgcattgactgttccggggtgcaccgctccctgggcgtccatctgagcttcatcaggtccacagagttggattccaactggaactggttccagctgaggtgtatgcaggtcggcgggaatgccaatgcgacggctttttttcgccaacatggatgcacagccaatgatgccaacaccaaatataatagccgagctgcccagatgtaccgggagaagatccggcagctggggagtgcggccctggctaggcatggcactgatctttggatagacaacatgagtagtgccgttcctaatcactccccagagaagaaggactctgatttcttcacagaacacactcaaccccctgcctgggatgcgccagccactgagccttcagggacccagcagccagccccgtctacagagagcagtggcctggcacagccggagcatggccccaacacagacctgcttggcacctcacccaaagcctcactggagtccgtgtatctgtcagctaaaggggcccttcctgccagagaactgaaaagctccatcattggcaagaagaagccagcagcagctaagaaagggctgggtgccaagaaaggcctaggggcccagaaggtgagcagccagagcttcagtgagattgagcggcaggctcaggtggcagagaagctccgtgagcagcaggcagccgatgccaagaagcaggcggaggagtccatggtcgcctccatgcgtctggcctaccaggagctccagattgatcgtaagaaagaggaaaagaagctacagaatctggaagggaagaagcgagagcaggcagaaaggttgggcatgggcttggtatcccgaagctctgtctcccactccgtgctgtctgagatgcaggtgattgagcaggaaaccccagtgagtgcaaaatcctctcgctcgcagctggacttgtttgacgatgttggtactttcgcctctggacccccaaagtacaaggacaatcccttttccttaggggaaagctttggctcccgctgggatacagatgctgcctggggtatggacagggtagaggagaaggagccagaagtgaccatctcaagcatccggcctatttcagaaagagccacaaaccggagggaagtggagagccggagctcaggcctcgagtctagtgaggcgcgtcagaaattcgcaggagccaaagccatctcatctgacatgttctttgggcgggaggtggatgcggagtatgaggccaggtctcggctgcagcagctctcaggcagcagtgccatcagctcttcagacctctttggggacatggatggagctcacggagcaggaagtgtatctctggggaacgtgctgcctacagcggacattgcccagtttaagcagggtgtcaagtctgtggctgggaaaatggctgtgctggccaatggtgtgatgaattccttgcaggatcgctacggttcctactgatccgagctctgtgactcaggcttacgatggtgacggcaacaagaactccacagttcccaggctggggatgctttgccttgtggaagctggggaggatttgttacttcgtatgtgtggtgtgtgtgtggggtggcctttgaggcgctcactcctgtgaggggaatggtcagtaccagcccttgtcctctgcctgtggactgagccctttattccctctcacaccaccctccgtgtgttagactcttgtccttctgtcctgcccccacagctgctgctcacttatcctgccatactgggaaagggggttcccccacgatggcttattctgggtccagactttccccaggtagggaaagcggaaggtagaaggctttttttgctggctctagggttcttctagttcgaggccttgggtccccatcctctggaaccagggggaggcctggaaggagttcactgtagacccgtcccatggggaaagaggctgcggacttgctgctgctgctgctgccagtggcctcttctgggtgccaggagaggggaaggacctttgtctgggcgttaccaagggctggaaactttacctggtacctaaaggtttcatttggtatcagaccggagacccttgggttctcccgtctcaccacccctttctacagtaagcacttggaagattgtttcagggtgtctcagggtccctctgtaccatctgctgtggaatgcaggaccctctgtgacattctttatcccttcttccccgggttggtggccatggagggtcttgtctgctgtgattcgactctggatgctgtgagcttgatgctggccagggaagcagaggatgtgagaggcagaggcaggctcctggggctgagctccttcctctgcatcattctgggcttggcctggacagcacccgccagtgagagctgtgggcctcaccctctggcagctgagccaagcactgtcattcttggtgccatcttcccctgccgcaccggcagtctcagcccagcccccacctttgggttgtaggttgggctcccaagcaacacagaccactcttccccttgcccctcccccagagggacttgactttctttctggactgtttgtattgaaacaaagtggtgtcaaaataaagcccctgcagggcctggctccctgttggtctgagt

SEQ ID NO: 364001 - DNA, 5003 bp, Homo sapiens
acatgcaaagagtttgtaacggagcattattacggtctaggtacgagctggtgggaatcggccgaggtgaggaggcacgtgtgcgggacggtctgcttccaggagcgcgcccgcatcgagaaggcttatgcccagcagttggctgactgggcccgaaagtggagggggaccgtggagaagggcccccagtatggcacactggagaaggcctggcatgcctttttcacggcggctgagcggctgagcgcgctgcacctggaggtgcgggagaagctgcaagggcaggacagtgagcgggtgcgcgcctggcagcggggggctttccaccggcctgtgctgggcggcttccgcgagagccgggcggccgaggacggcttccgcaaggcccagaagccctggctgaagaggctgaaggaggttgaggcttccaagaaaagctaccacgcagcccggaaggatgagaagaccgcccagacgagggagagccacgcaaaggcagacagcgccgtctcccaggagcagctgcgcaaactgcaggaacgggtggaacgctgtgccaaggaggccgagaagacaaaagctcagtatgagcagacgctggcagagctgcatcgctacactccacgctacatggaggacatggaacaggcctttgagacctgccaggccgccgagcgccagcggcttcttttcttcaaggatatgctgctcaccttacaccagcacctggacctttccagcagtgagaagttccatgaactccaccgtgacttgcaccagggcattgaggcagccagtgacgaagaggatctgcgctggtggcgcagcacccacgggccaggcatggccatgaactggccacagttcgaggagtggtccttggacacacagaggacaatcagccggaaagagaagggtggccggagccctgatgaggttaccctgaccagcattgtgcctacaagagatggcaccgcacccccaccccagtccccggggtccccaggcacggggcaggatgaggagtggtcagatgaagagagtccccggaaggctgccaccggggttcgggtgagggcactctatgactacgctggccaggaagctgatgagctgagcttccgagcaggggaggagctgctgaagatgagtgaggaggacgagcagggctggtgccaaggccagttgcagagtggccgcattggcctgtaccctgccaactacgtggagtgtgtgggcgcctgagtgtcctgacagcccttctgcaacgtttacccaccctggttcagagcccagcttctcctggagagccggaccctcagggccctgaaccgtcgctctctggctgctcctctgtcccttgagggaggaagtcctgggacccagggaggggaggggcctttgtctagggaagggactggtagggaagggacgagtctaggctgagggcaagatgggaggtcagaggtgacagaagcgttcaggggtgcctgggcctccccaggagctgtggactcagttcctgacctctgctttggggttcctggggtgggcttggggtgagtgtagttctggcctagcagcaccctcttgtggcttgttctagcgtgtattaaaacttgacacacacccacacacaaaaacaaaaacaccactgtcgggctcatgtgcatttttttgataggacacccttgccaggccaccagagggcatctagagagaggcctagcgtctgttatggggccggggttggaaaagggtttgcctgcttggtacctgctctggaacttcgagatactaatctggagtggaggggactcgctgtcaggcttgctgttaaccgagaacggctgaaggctgggcgagacgcgggccaatgcgtctgcccgttcgggccggagggacgaggagtgtttgggcagcctaatccttattcatcgatctgtaattagctggagtgggggtccccgcccccagcctcccgcagcctgcgcggcgtgggggcgactccacctgggggttgcggcgtgggaggggcggggggaagggtactacgcgcgcgaggaggtttgggccggtccgcgcgccgtcgccccgccccggctgcggattggcccggcgcggcgttgattcttgcggccgcggttgtcgtcgccgcccccgtcccgccggctgcccattggtccagatcggactccaatcaccccacccctcggctggcccaggcaccgctgaggccggcctggtgagcccgccctccccgccgtggattggcccgcggcgggacccgtcagccgcggttgtgtctgggaaggagagaaaatggcggcggagccgaacaagaccgaaatccagactctttttaagaggcttcgcgcagttccaaccaacaaggcctgtttcgactgcggcgccaagaatccgagttgggccagcatcacgtacggtgttttcttgtgcattgactgttccggggtgcaccgctccctgggcgtccatctgagcttcatcaggtccacagagttggattccaactggaactggttccagctgaggtgtatgcaggtcggcgggaatgccaatgcgacggctttttttcgccaacatggatgcacagccaatgatgccaacaccaaatataatagccgagctgcccagatgtaccgggagaagatccggcagctggggagtgcggccctggctaggcatggcactgatctttggatagacaacatgagtagtgccgttcctaatcactccccagagaagaaggactctgatttcttcacagaacacactcaaccccctgcctgggatgcgccagccactgagccttcagggacccagcagccagccccgtctacagagagcagtggcctggcacagccggagcatggccccaacacagacctgcttggcacctcacccaaagcctcactggaactgaaaagctccatcattggcaagaagaaccagagcttcagtgagattgagcggcaggctcaggtggcagagaagctccgtgagcagcaggcagccgatgccaagaagcaggcggaggagtccatggtcgcctccatgcgtctggcctaccaggagctccagattgatcgtaagaaagaggaaaagaagctacagaatctggaagggaagaagcgagagcaggcagaaaggttgggcatgggcttggtatcccgaagctctgtctcccactccgtgctgtctgagatgcaggtgattgagcaggaaaccccagtgagtgcaaaatcctctcgctcgcagctggacttgtttgacgatgttggtactttcgcctctggacccccaaagtacaaggacaatcccttttccttaggggaaagctttggctcccgctgggatacagatgctgcctggggtatggacagggtagaggagaaggagccagaagtgaccatctcaagcatccggcctatttcagaaagagccacaaaccggagggaagtggagagccggagctcaggcctcgagtctagtgaggcgcgtcagaaattcgcaggagccaaagccatctcatctgacatgttctttgggcgggaggtggatgcggagtatgaggccaggtctcggctgcagcagctctcaggcagcagtgccatcagctcttcagacctctttggggacatggatggagctcacggagcaggaagtgtatctctggggaacgtgctgcctacagcggacattgcccagtttaagcagggtgtcaagtctgtggctgggaaaatggctgtgctggccaatggtgtgatgaattccttgcaggatcgctacggttcctactgatccgagctctgtgactcaggcttacgatggtgacggcaacaagaactccacagttcccaggctggggatgctttgccttgtggaagctggggaggatttgttacttcgtatgtgtggtgtgtgtgtggggtggcctttgaggcgctcactcctgtgaggggaatggtcagtaccagcccttgtcctctgcctgtggactgagccctttattccctctcacaccaccctccgtgtgttagactcttgtccttctgtcctgcccccacagctgctgctcacttatcctgccatactgggaaagggggttcccccacgatggcttattctgggtccagactttccccaggtagggaaagcggaaggtagaaggctttttttgctggctctagggttcttctagttcgaggccttgggtccccatcctctggaaccagggggaggcctggaaggagttcactgtagacccgtcccatggggaaagaggctgcggacttgctgctgctgctgctgccagtggcctcttctgggtgccaggagaggggaaggacctttgtctgggcgttaccaagggctggaaactttacctggtacctaaaggtttcatttggtatcagaccggagacccttgggttctcccgtctcaccacccctttctacagtaagcacttggaagattgtttcagggtgtctcagggtccctctgtaccatctgctgtggaatgcaggaccctctgtgacattctttatcccttcttccccgggttggtggccatggagggtcttgtctgctgtgattcgactctggatgctgtgagcttgatgctggccagggaagcagaggatgtgagaggcagaggcaggctcctggggctgagctccttcctctgcatcattctgggcttggcctggacagcacccgccagtgagagctgtgggcctcaccctctggcagctgagccaagcactgtcattcttggtgccatcttcccctgccgcaccggcagtctcagcccagcccccacctttgggttgtaggttgggctcccaagcaacacagaccactcttccccttgcccctcccccagagggacttgactttctttctggactgtttgtattgaaacaaagtggtgtcaaaataaagcccctgcagggcctggctccctgttggtctgagt

SEQ ID NO: 364002 - DNA, 5026 bp, Homo sapiens
acatgcaaagagtttgtaacggagcattattacggtctaggtacgagctggtgggaatcggccgaggtgaggaggcacgtgtgcgggacggtctgcttccaggagcgcgcccgcatcgagaaggcttatgcccagcagttggctgactgggcccgaaagtggagggggaccgtggagaagggcccccagtatggcacactggagaaggcctggcatgcctttttcacggcggctgagcggctgagcgcgctgcacctggaggtgcgggagaagctgcaagggcaggacagtgagcgggtgcgcgcctggcagcggggggctttccaccggcctgtgctgggcggcttccgcgagagccgggcggccgaggacggcttccgcaaggcccagaagccctggctgaagaggctgaaggaggttgaggcttccaagaaaagctaccacgcagcccggaaggatgagaagaccgcccagacgagggagagccacgcaaaggcagacagcgccgtctcccaggagcagctgcgcaaactgcaggaacgggtggaacgctgtgccaaggaggccgagaagacaaaagctcagtatgagcagacgctggcagagctgcatcgctacactccacgctacatggaggacatggaacaggcctttgagacctgccaggccgccgagcgccagcggcttcttttcttcaaggatatgctgctcaccttacaccagcacctggacctttccagcagtgagaagttccatgaactccaccgtgacttgcaccagggcattgaggcagccagtgacgaagaggatctgcgctggtggcgcagcacccacgggccaggcatggccatgaactggccacagttcgaggagtggtccttggacacacagaggacaatcagccggaaagagaagggtggccggagccctgatgaggttaccctgaccagcattgtgcctacaagagatggcaccgcacccccaccccagtccccggggtccccaggcacggggcaggatgaggagtggtcagatgaagagagtccccggaaggctgccaccggggttcgggtgagggcactctatgactacgctggccaggaagctgatgagctgagcttccgagcaggggaggagctgctgaagatgagtgaggaggacgagcagggctggtgccaaggccagttgcagagtggccgcattggcctgtaccctgccaactacgtggagtgtgtgggcgcctgagtgtcctgacagcccttctgcaacgtttacccaccctggttcagagcccagcttctcctggagagccggaccctcagggccctgaaccgtcgctctctggctgctcctctgtcccttgagggaggaagtcctgggacccagggaggggaggggcctttgtctagggaagggactggtagggaagggacgagtctaggctgagggcaagatgggaggtcagaggtgacagaagcgttcaggggtgcctgggcctccccaggagctgtggactcagttcctgacctctgctttggggttcctggggtgggcttggggtgagtgtagttctggcctagcagcaccctcttgtggcttgttctagcgtgtattaaaacttgacacacacccacacacaaaaacaaaaacaccactgtcgggctcatgtgcatttttttgataggacacccttgccaggccaccagagggcatctagagagaggcctagcgtctgttatggggccggggttggaaaagggtttgcctgcttggtacctgctctggaacttcgagatactaatctggagtggaggggactcgctgtcaggcttgctgttaaccgagaacggctgaaggctgggcgagacgcgggccaatgcgtctgcccgttcgggccggagggacgaggagtgtttgggcagcctaatccttattcatcgatctgtaattagctggagtgggggtccccgcccccagcctcccgcagcctgcgcggcgtgggggcgactccacctgggggttgcggcgtgggaggggcggggggaagggtactacgcgcgcgaggaggtttgggccggtccgcgcgccgtcgccccgccccggctgcggattggcccggcgcggcgttgattcttgcggccgcggttgtcgtcgccgcccccgtcccgccggctgcccattggtccagatcggactccaatcaccccacccctcggctggcccaggcaccgctgaggccggcctggtgagcccgccctccccgccgtggattggcccgcggcgggacccgtcagccgcggttgtgtctgggaaggagagaaaatggcggcggagccgaacaagaccgaaatccagactctttttaagaggcttcgcgcagttccaaccaacaaggcctgtttcgactgcggcgccaagaatccgagttgggccagcatcacgtacggtgttttcttgtgcattgactgttccggggtgcaccgctccctgggcgtccatctgagcttcatcaggtccacagagttggattccaactggaactggttccagctgaggtgtatgcaggtcggcgggaatgccaatgcgacggctttttttcgccaacatggatgcacagccaatgatgccaacaccaaatataatagccgagctgcccagatgtaccgggagaagatccggcagctggggagtgcggccctggctaggcatggcactgatctttggatagacaacatgagtagtgccgttcctaatcactccccagagaagaaggactctgatttcttcacagaacacactcaaccccctgcctgggatgcgccagccactgagccttcagggacccagcagccagccccgtctacagagagcagtggcctggcacagccggagcatggccccaacacagacctgcttggcacctcacccaaagcctcactggaactgaaaagctccatcattggcaagaagaagccagcagcagctaagaaagggctgggtgccaagaaaggcctaggggcccagaaggtgagcagccagagcttcagtgagattgagcggcaggctcaggtggcagagaagctccgtgagcagcaggcagccgatgccaagaagcaggcggaggagtccatggtcgcctccatgcgtctggcctaccaggagctccagattgatcgtaagaaagaggaaaagaagctacagaatctggaagggaagaagcgagagcaggcagaaaggttgggcatgggcttggtatcccgaagctctgtctcccactccgtgctgtctgagatgcaggtgattgagcaggaaaccccagtgagtgcaaaatcctctcgctcgcagctggacttgtttgacgatgttggtactttcgcctctggacccccaaagtacaaggacaatcccttttccttaggggaaagctttggctcccgctgggatacagatgctgcctggggtatggacagggtagaggagaaggagccagaagtgaccatctcaagcatccggcctatttcagaaagagccacaaaccggagggaagtggagagccggagctcaggcctcgagtctagtgaggcgcgtcagaaattcgcaggagccaaagccatctcatctgacatgttctttgggcgggaggtggatgcggagtatgaggccaggtctcggctgcagcagctctcaggcagcagtgccatcagctcttcagacctctttggggacatggatggagctcacggagcaggaagtgtatctctggggaacgtgctgcctacagcggacattgcccagtttaagcagggtgtcaagtctgtggctgggaaaatggctgtgctggccaatggtgtgatgaattccttgcaggatcgctacggttcctactgatccgagctctgtgactcaggcttacgatggtgacggcaacaagaactccacagttcccaggctggggatgctttgccttgtggaagctggggaggatttgttacttcgtatgtgtggtgtgtgtgtggggtggcctttgaggcgctcactcctgtgaggggaatggtcagtaccagcccttgtcctctgcctgtggactgagccctttattccctctcacaccaccagctgctgctcacttatcctgccatactgggaaagggggttcccccacgatggcttattctgggtccagactttccccaggtagggaaagcggaaggtagaaggctttttttgctggctctagggttcttctagttcgaggccttgggtccccatcctctggaaccagggggaggcctggaaggagttcactgtagacccgtcccatggggaaagaggctgcggacttgctgctgctgctgctgccagtggcctcttctgggtgccaggagaggggaaggacctttgtctgggcgttaccaagggctggaaactttacctggtacctaaaggtttcatttggtatcagaccggagacccttgggttctcccgtctcaccacccctttctacagtaagcacttggaagattgtttcagggtgtctcagggtccctctgtaccatctgctgtggaatgcaggaccctctgtgacattctttatcccttcttccccgggttggtggccatggagggtcttgtctgctgtgattcgactctggatgctgtgagcttgatgctggccagggaagcagaggatgtgagaggcagaggcaggctcctggggctgagctccttcctctgcatcattctgggcttggcctggacagcacccgccagtgagagctgtgggcctcaccctctggcagctgagccaagcactgtcattcttggtgccatcttcccctgccgcaccggcagtctcagcccagcccccacctttgggttgtaggttgggctcccaagcaacacagaccactcttccccttgcccctcccccagagggacttgactttctttctggactgtttgtattgaaacaaagtggtgtcaaaataaagcccctgcagggcctggctccctgttggtctgagt

SEQ ID NO: 364003 - DNA, 4569 bp, Homo sapiens
acatgcaaagagtttgtaacggagcattattacggtctaggtacgagctggtgggaatcggccgaggtgaggaggcacgtgtgcgggacggtctgcttccaggagcgcgcccgcatcgagaaggcttatgcccagcagttggctgactgggcccgaaagtggagggggaccgtggagaagggcccccagtatggcacactggagaaggcctggcatgcctttttcacggcggctgagcggctgagcgcgctgcacctggaggtgcgggagaagctgcaagggcaggacagtgagcgggtgcgcgcctggcagcggggggctttccaccggcctgtgctgggcggcttccgcgagagccgggcggccgaggacggcttccgcaaggcccagaagccctggctgaagaggctgaaggaggttgaggcttccaagaaaagctaccacgcagcccggaaggatgagaagaccgcccagacgagggagagccacgcaaaggcagacagcgccgtctcccaggagcagctgcgcaaactgcaggaacgggtggaacgctgtgccaaggaggccgagaagacaaaagctcagtatgagcagacgctggcagagctgcatcgctacactccacgctacatggaggacatggaacaggcctttgagacctgccaggccgccgagcgccagcggcttcttttcttcaaggatatgctgctcaccttacaccagcacctggacctttccagcagtgagaagttccatgaactccaccgtgacttgcaccagggcattgaggcagccagtgacgaagaggatctgcgctggtggcgcagcacccacgggccaggcatggccatgaactggccacagttcgaggagtggtccttggacacacagaggacaatcagccggaaagagaagggtggccggagccctgatgaggttaccctgaccagcattgtgcctacaagagatggcaccgcacccccaccccagtccccggggtccccaggcacggggcaggatgaggagtggtcagatgaagagagtccccggaaggctgccaccggggttcgggtgagggcactctatgactacgctggccaggaagctgatgagctgagcttccgagcaggggaggagctgctgaagatgagtgaggaggacgagcagggctggtgccaaggccagttgcagagtggccgcattggcctgtaccctgccaactacgtggagtgtgtgggcgcctgagtgtcctgacagcccttctgcaacgtttacccaccctggttcagagcccagcttctcctggagagccggaccctcagggccctgaaccgtcgctctctggctgctcctctgtcccttgagggaggaagtcctgggacccagggaggggaggggcctttgtctagggaagggactggtagggaagggacgagtctaggctgagggcaagatgggaggtcagaggtgacagaagcgttcaggggtgcctgggcctccccaggagctgtggactcagttcctgacctctgctttggggttcctggggtgggcttggggtgagtgtagttctggcctagcagcaccctcttgtggcttgttctagcgtgtattaaaacttgacacacacccacacacaaaaacaaaaacaccactgtcgggctcatgtgcatttttttgataggacacccttgccaggccaccagagggcatctagagagaggcctagcgtctgttatggggccggggttggaaaagggtttgcctgcttggtacctgctctggaacttcgagatactaatctggagtggaggggactcgctgtcaggcttgctgttaaccgagaacggctgaaggctgggcgagacgcgggccaatgcgtctgcccgttcgggccggagggacgaggagtgtttgggcagcctaatccttattcatcgatctgtaattagctggagtgggggtccccgcccccagcctcccgcagcctgcgcggcgtgggggcgactccacctgggggttgcggcgtgggaggggcggggggaagggtactacgcgcgcgaggaggtttgggccggtccgcgcgccgtcgccccgccccggctgcggattggcccggcgcggcgttgattcttgcggccgcggttgtcgtcgccgcccccgtcccgccggctgcccattggtccagatcggactccaatcaccccacccctcggctggcccaggcaccgctgaggccggcctggtgagcccgccctccccgccgtggattggcccgcggcgggacccgtcagccgcggttgtgtctgggaaggagagaaaatggcggcggagccgaacaagaccgaaatccagactctttttaagaggcttcgcgcagttccaaccaacaaggcctgtttcgactgcggcgccaagaatccgagttgggccagcatcacgtacggtgttttcttgtgcattgactgttccggggtgcaccgctccctgggcgtccatctgagcttcatcaggtccacagagttggattccaactggaactggttccagctgaggtgtatgcaggtcggcgggaatgccaatgcgacggctttttttcgccaacatggatgcacagccaatgatgccaacaccaaatataatagccgagctgcccagatgtaccgggagaagatccggcagctggggagtgcggccctggctaggcatggcactgatctttggatagacaacatgagtagtgccgttcctaatcactccccagagaagaaggactctgatttcttcacagaacacactcaaccccctgcctgggatgcgccagccactgagccttcagggacccagcagccagccccgtctacagagagcagtggcctggcacagccggagcatggccccaacacagacctgcttggcacctcacccaaagcctcactggaactgaaaagctccatcattggcaagaagaagccagcagcagctaagaaagggctgggtgccaagaaaggcctaggggcccagaaggtgagcagccagagcttcagtgagattgagcggcaggctcaggtggcagagaagctccgtgagcagcaggcagccgatgccaagaagcaggcggaggagtccatggtcgcctccatgcgtctggcctaccaggagctccagattgatcgtaagaaagaggaaaagaagctacagaatctggaagggaagaagcgagagcaggcagaaaggttgggcatgggcttggtatcccgaagctctgtctcccactccgtgctgtctgagatgcaggtgattgagcaggaaaccccagtgagtgcaaaatcctctcgctcgcagctggacttgtttgacgatgttggtactttcgcctctggacccccaaagtacaaggacaatcccttttccttaggggaaagctttggctcccgctgggatacagatgctgcctggggtatggacagggtagaggagaaggagccagaagtgaccatctcaagcatccggcctatttcagaaagagccacaaaccggagggaagtggagagccggagctcaggcctcgagtctagtgaggcgcgtcagaaattcgcaggagccaaagccatctcatctgacatgttctttgggcgggaggtggatgcggagtatgaggccaggtctcggctgcagcagctctcaggcagcagtgccatcagctcttcagacctctttggggacatggatggagctcacggagcaggaagtgtatctctggggaacgtgctgcctacagcggacattgcccagtttaagcagggtgtcaagtctgtggctgggaaaatggctgtgctggccaatggtgtgatgaattccttgcaggatcgctacggttcctactgatccgagctctgtgactcaggcttacgatggtgacggcaacaagaactccacagttcccaggctggggatgctttgccttgtggaagctggggaggatttgttacttcgtatgtgtggtgtgtgtgtggggtggcctttgaggcgctcactcctgtgaggggaatggtcagtaccagcccttgtcctctgcctgtggactgagccctttattccctctcacaccaccctccgtgtgttagactcttgtccttctgtcctgcccccacagctgctgctcacttatcctgccatactgggaaagggggttcccccacgatggcttattctgggtccagactttccccaggtagggaaagcggaaggtagaaggctttttttgctggctctagggttcttctagttcgaggccttgggtccccatcctctggaaccagggggaggcctggaaggagttcactgtagacccgtcccatggggaaagaggctggggtgggattgtgtgtgtgtgcagtggctctctggtggcggggggaggcttgttggcttcaggggggattcggtctaggtctggtcgcggccggttccggtacccctttgagctgggtgttggtgggccgcccggggggggccgggaaccccgggggggggggaccgggggggggaggggcgttgaggggccgg

SEQ ID NO: 364004 - DNA, 4036 bp, Homo sapiens
acatgcaaagagtttgtaacggagcattattacggtctaggtacgagctggtgggaatcggccgaggtgaggaggcacgtgtgcgggacggtctgcttccaggagcgcgcccgcatcgagaaggcttatgcccagcagttggctgactgggcccgaaagtggagggggaccgtggagaagggcccccagtatggcacactggagaaggcctggcatgcctttttcacggcggctgagcggctgagcgcgctgcacctggaggtgcgggagaagctgcaagggcaggacagtgagcgggtgcgcgcctggcagcggggggctttccaccggcctgtgctgggcggcttccgcgagagccgggcggccgaggacggcttccgcaaggcccagaagccctggctgaagaggctgaaggaggttgaggcttccaagaaaagctaccacgcagcccggaaggatgagaagaccgcccagacgagggagagccacgcaaaggcagacagcgccgtctcccaggagcagctgcgcaaactgcaggaacgggtggaacgctgtgccaaggaggccgagaagacaaaagctcagtatgagcagacgctggcagagctgcatcgctacactccacgctacatggaggacatggaacaggcctttgagacctgccaggccgccgagcgccagcggcttcttttcttcaaggatatgctgctcaccttacaccagcacctggacctttccagcagtgagaagttccatgaactccaccgtgacttgcaccagggcattgaggcagccagtgacgaagaggatctgcgctggtggcgcagcacccacgggccaggcatggccatgaactggccacagttcgaggagtggtccttggacacacagaggacaatcagccggaaagagaagggtggccggagccctgatgaggttaccctgaccagcattgtgcctacaagagatggcaccgcacccccaccccagtccccggggtccccaggcacggggcaggatgaggagtggtcagatgaagagagtccccggaaggctgccaccggggttcgggtgagggcactctatgactacgctggccaggaagctgatgagctgagcttccgagcaggggaggagctgctgaagatgagtgaggaggacgagcagggctggtgccaaggccagttgcagagtggccgcattggcctgtaccctgccaactacgtggagtgtgtgggcgcctgagtgtcctgacagcccttctgcaacgtttacccaccctggttcagagcccagcttctcctggagagccggaccctcagggccctgaaccgtcgctctctggctgctcctctgtcccttgagggaggaagtcctgggacccagggaggggaggggcctttgtctagggaagggactggtagggaagggacgagtctaggctgagggcaagatgggaggtcagaggtgacagaagcgttcaggggtgcctgggcctccccaggagctgtggactcagttcctgacctctgctttggggttcctggggtgggcttggggtgagtgtagttctggcctagcagcaccctcttgtggcttgttctagcgtgtattaaaacttgacacacacccacacacaaaaacaaaaacaccactgtcgggctcatgtgcatttttttgataggacacccttgccaggccaccagagggcatctagagagaggcctagcgtctgttatggggccggggttggaaaagggtttgcctgcttggtacctgctctggaacttcgagatactaatctggagtggaggggactcgctgtcaggcttgctgttaaccgagaacggctgaaggctgggcgagacgcgggccaatgcgtctgcccgttcgggccggagggacgaggagtgtttgggcagcctaatccttattcatcgatctgtaattagctggagtgggggtccccgcccccagcctcccgcagcctgcgcggcgtgggggcgactccacctgggggttgcggcgtgggaggggcggggggaagggtactacgcgcgcgaggaggtttgggccggtccgcgcgccgtcgccccgccccggctgcggattggcccggcgcggcgttgattcttgcggccgcggttgtcgtcgccgcccccgtcccgccggctgcccattggtccagatcggactccaatcaccccacccctcggctggcccaggcaccgctgaggccggcctggtgagcccgccctccccgccgtggattggcccgcggcgggacccgtcagccgcggttgtgtctgggaaggagagaaaatggcggcggagccgaacaagaccgaaatccagactctttttaagaggcttcgcgcagttccaaccaacaaggcctgtttcgactgcggcgccaagaatccgagttgggccagcatcacgtacggtgttttcttgtgcattgactgttccggggtgcaccgctccctgggcgtccatctgagcttcatcaggtccacagagttggattccaactggaactggttccagctgaggtgtatgcaggtcggcgggaatgccaatgcgacggctttttttcgccaacatggatgcacagccaatgatgccaacaccaaatataatagccgagctgcccagatgtaccgggagaagatccggcagctggggagtgcggccctggctaggcatggcactgatctttggatagacaacatgagtagtgccgttcctaatcactccccagagaagaaggactctgatttcttcacagaacacactcaaccccctgcctgggatgcgccagccactgagccttcagggacccagcagccagccccgtctacagagagcagtggcctggcacagccggagcatggccccaacacagacctgcttggcacctcacccaaagcctcactggaactgaaaagctccatcattggcaagaagaagccagcagcagctaagaaagggctgggtgccaagaaaggcctaggggcccagaaggtgagcagccagagcttcagtgagattgagcggcaggctcaggtggcagagaagctccgtgagcagcaggcagccgatgccaagaagcaggcggaggagtccatggtcgcctccatgcgtctggcctaccaggagctccagattgatcgtaagaaagaggaaaagaagctacagaatctggaagggaagaagcgagagcaggcagaaagctctgtctcccactccgtgctgtctgagatgcaggtgattgagcaggaaaccccagtgagtgcaaaatcctctcgctcgcagctggacttgtttgacgatgttggtactttcgcctctggacccccaaagtacaaggacaatcccttttccttaggggaaagctttggctcccgctgggatacagatgctgcctggggtatggacagggtagaggagaaggagccagaagtgaccatctcaagcatccggcctatttcagaaagagccacaaaccggagggaagtggagagccggagctcaggcctcgagtctagtgaggcgcgtcagaaattcgcaggagccaaagccatctcatctgacatgttctttgggcgggaggtggatgcggagtatgaggccaggtctcggctgcagcagctctcaggcagcagtgccatcagctcttcagacctctttggggacatggatggagctcacggagcaggaagtgtatctctggggaacgtgctgcctacagcggacattgcccagtttaagcagggtgtcaagtctgtggctgggaaaatggctgtgctgagccaagcactgtcattcttggtgccatcttcccctgccgcaccggcagtctcagcccagcccccacctttgggttgtaggttgggctcccaagcaacacagaccactcttccccttgcccctcccccagagggacttgactttctttctggactgtttgtattgaaacaaagtggtgtcaaaataaagcccctgcagggcctggctccctgttggtctgagt

SEQ ID NO: 364005 - DNA, 3249 bp, Homo sapiens
acatgcaaagagtttgtaacggagcattattacggtctaggtacgagctggtgggaatcggccgaggtgaggaggcacgtgtgcgggacggtctgcttccaggagcgcgcccgcatcgagaaggcttatgcccagcagttggctgactgggcccgaaagtggagggggaccgtggagaagggcccccagtatggcacactggagaaggcctggcatgcctttttcacggcggctgagcggctgagcgcgctgcacctggaggtgcgggagaagctgcaagggcaggacagtgagcgggtgcgcgcctggcagcggggggctttccaccggcctgtgctgggcggcttccgcgagagccgggcggccgaggacggcttccgcaaggcccagaagccctggctgaagaggctgaaggaggttgaggcttccaagaaaagctaccacgcagcccggaaggatgagaagaccgcccagacgagggagagccacgcaaaggcagacagcgccgtctcccaggagcagctgcgcaaactgcaggaacgggtggaacgctgtgccaaggaggccgagaagacaaaagctcagtatgagcagacgctggcagagctgcatcgctacactccacgctacatggaggacatggaacaggcctttgagacctgccaggccgccgagcgccagcggcttcttttcttcaaggatatgctgctcaccttacaccagcacctggacctttccagcagtgagaagttccatgaactccaccgtgacttgcaccagggcattgaggcagccagtgacgaagaggatctgcgctggtggcgcagcacccacgggccaggcatggccatgaactggccacagttcgaggagtggtccttggacacacagaggacaatcagccggaaagagaagggtggccggagccctgatgaggttaccctgaccagcattgtgcctacaagagatggcaccgcacccccaccccagtccccggggtccccaggcacggggcaggatgaggagtggtcagatgaagagagtccccggaaggctgccaccggggttcgggtgagggcactctatgactacgctggccaggaagctgatgagctgagcttccgagcaggggaggagctgctgaagatgagtgaggaggacgagcagggctggtgccaaggccagttgcagagtggccgcattggcctgtaccctgccaactacgtggagtgtgtgggcgcctgagtgtcctgacagcccttctgcaacgtttacccaccctggttcagagcccagcttctcctggagagccggaccctcagggccctgaaccgtcgctctctggctgctcctctgtcccttgagggaggaagtcctgggacccagggaggggaggggcctttgtctagggaagggactggtagggaagggacgagtctaggctgagggcaagatgggaggtcagaggtgacagaagcgttcaggggtgcctgggcctccccaggagctgtggactcagttcctgacctctgctttggggttcctggggtgggcttggggtgagtgtagttctggcctagcagcaccctcttgtggcttgttctagcgtgtattaaaacttgacacacacccacacacaaaaacaaaaacaccactgtcgggctcatgtgcatttttttgataggacacccttgccaggccaccagagggcatctagagagaggcctagcgtctgttatggggccggggttggaaaagggtttgcctgcttggtacctgctctggaacttcgagatactaatctggagtggaggggactcgctgtcaggcttgctgttaaccgagaacggctgaaggctgggcgagacgcgggccaatgcgtctgcccgttcgggccggagggacgaggagtgtttgggcagcctaatccttattcatcgatctgtaattagctggagtgggggtccccgcccccagcctcccgcagcctgcgcggcgtgggggcgactccacctgggggttgcggcgtgggaggggcggggggaagggtactacgcgcgcgaggaggtttgggccggtccgcgcgccgtcgccccgccccggctgcggattggcccggcgcggcgttgattcttgcggccgcggttgtcgtcgccgcccccgtcccgccggctgcccattggtccagatcggactccaatcaccccacccctcggctggcccaggcaccgctgaggccggcctggtgagcccgccctccccgccgtggattggcccgcggcgggacccgtcagccgcggttgtgtctgggaaggagagaaaatggcggcggagccgaacaagaccgaaatccagactctttttaagaggcttcgcgcagttccaaccaacaaggcctgtttcgactgcggcgccaagaatccgagttgggccagcatcacgtacggtgttttcttgtgcattgactgttccggggtgcaccgctccctgggcgtccatctgagcttcatcaggtccacagagttggattccaactggaactggttccagctgaggtgtatgcaggtcggcgggaatgccaatgcgacggctttttttcgccaacatggatgcacagccaatgatgccaacaccaaatataatagccgagctgcccagatgtaccgggagaagatccggcagctggggagtgcggccctggctaggcatggcactgatctttggatagacaacatgagtagtgccgttcctaatcactccccagagaagaaggactctgatttcttcacagaacacactcaaccccctgcctgggatgcgccagccactgagccttcagggacccagcagccagccccgtctacagagagcagtggcctggcacagccggagcatggccccaacacagacctgcttggcacctcacccaaagcctcactggaactgaaaagctccatcattggcaagaagaagccagcagcagctaagaaaggggtaggtggggagaggtggtatggtagaggggttaggagctgggtgcaggctacctgggttcactccttgaccttaccacttaccagctatatgactttggcaaaggtactgtgtttctccgaacctcgcctgtgaaagggatttaaagatttaaagggatttaaagcctgtcttcaagggctgctgggaggagtcggtgagatggagcacatctagtgcttggcggagtgcttggcacatacttggccctgtcag

SEQ ID NO: 364006 - DNA, 1641 bp, Homo sapiens
  misc_feature (1132)..(1132): n is a, c, g, or t
  misc_feature (1137)..(1137): n is a, c, g, or t
  misc_feature (1178)..(1178): n is a, c, g, or t
acatgcaaagagtttgtaacggagcattattacggtctaggtacgagctggtgggaatcggccgaggtgaggaggcacgtgtgcgggacggtctgcttccaggagcgcgcccgcatcgagaaggcttatgcccagcagttggctgactgggcccgaaagtggagggggaccgtggagaagggcccccagtatggcacactggagaaggcctggcatgcctttttcacggcggctgagcggctgagcgcgctgcacctggaggtgcgggagaagctgcaagggcaggacagtgagcgggtgcgcgcctggcagcggggggctttccaccggcctgtgctgggcggcttccgcgagagccgggcggccgaggacggcttccgcaaggcccagaagccctggctgaagaggctgaaggaggttgaggcttccaagaaaagctaccacgcagcccggaaggatgagaagaccgcccagacgagggagagccacgcaaaggcagacagcgccgtctcccaggagcagctgcgcaaactgcaggaacgggtggaacgctgtgccaaggaggccgagaagacaaaagctcagtatgagcagacgctggcagagctgcatcgctacactccacgctacatggaggacatggaacaggcctttgagacctgccaggccgccgagcgccagcggcttcttttcttcaaggatatgctgctcaccttacaccagcacctggacctttccagcagtgagaagttccatgaactccaccgtgacttgcaccagggcattgaggcagccagtgacgaagaggatctgcgctggtggcgcagcacccacgggccaggcatggccatgaactggccacagttcgaggagtggtccttggacacacagaggacaatcagccggaaagagaagggtggccggagccctgatgaggttaccctgaccagcattgtgcctacaagagatggcaccgcacccccaccccagtccccggggtccccaggcacggggcaggatgaggagtggtcagatgaagagagtccccggaaggctgccaccggggttcgggtgagggcactctatgactacgctggccaggaagctgatgagctgagcttccgagcagggnggtgnttctgtagtttttttttttttatttttttttctggttcttnttttttttgcagagtggccgcattggcctgtaccctgccaactacgtggagtgtgtgggcgcctgagtgtcctgacagcccttctgcaacgtttacccaccctggttcagagcccagcttctcctggagagccggaccctcagggccctgaaccgtcgctctctggctgctcctctgtcccttgagggaggaagtcctgggacccagggaggggaggggcctttgtctagggaagggactggtagggaagggacgagtctaggctgagggcaagatgggaggtcagaggtgacagaagcgttcaggggtgcctgggcctccccaggagctgtggactcagttcctgacctctgctttggggttcctggggtgggcttggggtgagtgtagttctggcctagcagcaccctcttgtggcttgttctagcgtgtattaaaacttgacacacacccacacacaaaa

SEQ ID NO: 364007 - DNA, 723 bp, Homo sapiens
taccaaacaaacccagacttacagaactaaaagctgataatttaattctgatcagtgtcttcctcaaggccaagaagagtctatttggtgtagagagcgcagtctttctgtctcatgatactgattaccacacaaaagcattggtgaagaaacaactgactgagttgagttagggagttttttcagagtaattttgactagttgcaattttcgatttgtgctttatttagacttgcaaacccagccaaactcgtaagataagagtttccttcaaggcaacaagcacagagcatgcagaaggcacagtatcccacggacacaggcaaaggaaggcccacttgaagaaatcctgtggagaggaacagtggctcccatcagactggaagactgccttaggcctgccacaggcagcacccacagcttccacagtcagcttggctgttggtccaaagacagggtttcatggccgcacagccagagctcctgtgtcatcagccaccatacctagcaacccctgctgacgatcacgtctgatttttggcatgcatcaagtccagcatatggggaactggatttattttgcatagaggcataaacagtaagggatgtcatgataacttatcacatataatttagaagcaaaccttactatttttttattttcagagaccgaaaggaagaaatagtcttaaagaataaaaaggaaaaaattaggttggatat

SEQ ID NO: 364008 - DNA, 566 bp, Homo sapiens
  misc_feature (36)..(36): n is a, c, g, or t
cacaaagctgggaataattctttctccaatgaaccnaagtggaaagatctcataattaacagggcatatttagacttgcaaacccagccaaactcgtaagataagagtttccttcaaggcaacaagcacagagcatgcagaaggcacagtatcccacggacacaggcaaaggaaggcccacttgaagaaatcctgtggagaggaacagtggctcccatcagactggaagactgccttaggcctgccacaggcagcacccacagcttccacagtcagcttggctgttggtccaaagacagggtttcatggccgcacagccagagctcctgtgtcatcagccaccatacctagcaacccctgctgacgatcacgtctgatttttggcatgcatcaagtccagcatatggggaactggatttattttgcatagaggcataaacagtaagggatgtcatgataacttatcacatataatttagaagcaaaccttactatttttttattttcagagaccgaaaggaagaaatagtcttaaagaataaaaaggaaaaaattaggttggatat

SEQ ID NO: 364009 - DNA, 513 bp, Homo sapiens
ctcatctgaggatgtccttatattatttcttctgtccagtaggatttggtatctctgtgtaatgcacagcgagttgcttagctatcctgtccattctcagccattttccacacatatttgacgcaggactggtttgggaacaacataaaaggactagaagactagaattggtgggattctctcttgccatttaatatacagtgggactgatgaataactgataaaatatctaaatagctggccaggcatggtggctcatgcctgtaatcccagcactttgggaggctgaggtgggcgtatcacctgaggctgggagtttgacaccagcctggccaacatggtgaagccccatctctattaaaaatataaaaattagctgggcatggtggtgcgcgcctgtactcaggaagccgaggcaggagaaccgctggaatccaggaggcagaggttacagtgagctgagatcatgccgctggcactccagcctggttgacagaggaagactctgtctta

SEQ ID NO: 364010 - DNA, 3620 bp, Homo sapiens
  misc_feature (2899)..(2899): n is a, c, g, or t
tgactggctatactttccttccttattaccccagtctggtccctttggtctctatgccaaagatgacagcagctgcagcccttgctctaaattgcatgtctttgaatgatagtcatggtcaggatgcagacacaccctggctctgggatgggccccagctggcagggatcatgccctccctggaggcctgctccctaaattctccacctggccttgtagctgctcaccagccagccctcatccactgagacctcactctgtgccaggccctgggctgaatgctggggacaagggggcaaaaaccagctccttgcccacccagagcccaccatgcggtgggaggaggcagacatttgaacaaaagacattaggcggcttccaccttagggcaagagtggatggggcttagaagtgttgtgatgtagttacataagtctgggttcaagttttagctctgccacctactggctttgtgatcctgggtaagtaactgaacctctctgaggatgagtttccttatctgtaaaactaacagcagcctcatagttttgctatgaagatgaaatgagataatataggtaaacatctagctttagtggttctcaaactttcttgcccattagaatcacctgggcaacttttcaaagtccagatgtccatgctgcaccccagacacaatcaaatctgaggctccgaggatggggactgggcatgagtattttttaaagactcctccccatgggatgcagaaccatgtttggactgttggccgctgttcatggtgctggtagtggtggtgcaaattgtaaaaagtggccagcccagatcctagaagagtggctacttattgtaaatgctccgtaaaatgttcacccagccataagcagtagatcactggtttcgatactgagtactgtaggacctcaggccaggcatttatctattccaagactttaggctgtctttctcataacaaaactgatgggggcaatcattgggataatcatctcgggccgttgtaaatagtgttgcagcagggacaattttagacttctgagtatatgtttagaacattaatcagcaccttccttctctataaaaaaaaaacgactttgctctgtaatttctgtgtcattcccaggccactacaatggatggagttaacctcagcaccgaggttgtctacaaaaaaggccaggattataggtttgcttgctacgaccggggcagagcctgccggagctaccgtgtacggttcctctgtgggaagcctggtaagcagccccttgtcggggacacagatgcaactatggctcggttccttgaactggcagctatgcaggcaacttccagacctctcagtgagacagtgctcccaaaggagagcacttttgtgacacgggagcagtgggaggatccttggagttggcaggagacagcagaaccccaccctgcccataagcctttcaggaaggggaagggcctggtccaaggcagtcaaggtacaaatggacagagctgccctcccctgcagagatgtgcagttctttgcctctttgggtgctattattttaaatccagtacctaaggtgcttgttagaagagattggaaatggtcgggttgttctcggaggcacttggccatctccagaaggcagtcattaggaatgaaagtttagggggagaagtttatggctaccgaaaataatagttgagaggaactatatttgttttacatcttgagcaaagtgggtggggtgaggcagccacatttaactccagctaagaagttagtggaaaattcccccgcccagagctaatgaatggctcttttctggtagggtttttgttgacttcaaaaacctttaccaagagtgggatggagcaagccagtgatctgggttttggataggcaaacctggcatttagttatttagggaggggaagggaaaaaagaggtagccaaaagtttgccaagagcaaagggctctatctcagtctttcctgttttgggttacagtgaggcccaaactcacagtcaccattgacaccaatgtgaacagcaccattctgaacttggaggataatgtacagtcatggaaacctggagataccctggtcattgccagtactgattactccatgtaccaggcagaagagttccaggtgcttccctgcagatcctgcgcccccaaccaggtcaaagtggcaggtaggacttttactaatcccttcctagactggatgaatctgaaaattgttaggcttaaagtaaactgaagttacaacaaatctgtatcagtcagctatggctgtaataatgctgcataacaaaaaaaatcttaaaacttcatgacaggtctttatttcttactcatgtatctgcaggttgtctagggatcagcttctctagactgagcctgactccaggctgagagttgggttcaagtcacttccatatgactcccattcttcccaaaacatattcttctcacgggggagattgcaaactcctagtggtgagcagaaacacagaactcttaaggcctaggctcaaagatggcacattctcacacattccattggctaaagtaagtcacatggtaaagcacaacacaaataggctagggaagcatatgtctgtcaccaagtttgagggggaggaagtgaatatttgttagacagttattcaatctactacaaaatttttaatctcttgtatctgtgagtttggggtttttctttttcttctcctaaatcttgatttagatgtcctgtaatttatgttattggaggttactggaatcacagattgttgaaggtaaaaagagacttcaaatataatccaggtcaattattcttagtagggggagttatgtatcaattagagttctttggntgttagcaacagaatccaacttgactatcttaagcaaaacaggaatttattgagaggctattcaacttggagaactaaaggataagctgaataactaacctccaaaaggacagggaacagggtagcttctgggatctgggtagcaggaactaatggactgtatccttaaggcatcatctttaagaaccatgcttaggccatgggacatagtgctcaaaagtcaccttccagggagagagcatctgcttgggctggtggcttgtgtgctcaccctttggctaggaaaggcaggaacagtcattgaaagttcttctaagactgcattaaatggataaatggctgttccgcaaaggaaaattgggatatattaccagaagaaaggggaatcagaacttaagaggtgttaaacgtatcacatgctacaggaccataccacctggaggagtattagaatatggggttgggagaaagaccatggattgagaaagcgtatccaatatactcaccatatctattattttggaaagaaacccacagaacataaaattcaacacaatctttttggctgcctgagatgtgcttgtggaagaatctgtggaggcaaagtttaaaaaatctgagaacactgatggaattcagtccccttatcttaacactcatgggggaggcggacctagaggtcatgtggtggaggcagtccacaaacaatgcagctgtgatg

SEQ ID NO: 364011 - DNA, 652 bp, Homo sapiens
tatgaagatgaacagaaagcattagctggattacacagtaaggcctgggctgcgtccatcagcagaaagagatgtccccttatttggcctttctttcattcaagccttctaaaaagggttctgtaaagagaaagtgcctttgaaagtgcggtctatagtcagatgttagccagacgctcttggaataatccttcgtaatagcctcattgtgtgtttcctttttgggttttaaaagatgtacattcaagcctacaagaccagtaacctgcgaatgaagatcatcaagaatgacttccccagccaccctctttacctggagggggcgctcaccaggagcacccattaccagcaataccaaccggttgtcaccctgcagaagggctacaccatccactgggaccagacggcccccgccgaactcgccatctggctcatcaacttcaacaagtgagtgggtgtccagccaggagcagtgagctcaaagctgataacgatgccttgttgcaaagtcctggacttgcgtctaacgaaaccacaggctagcccatgtgatccatgcaggagtacctagaggggttgacatcacccaggagttaagaattaaaggacacagccaagcccccgctccagcatgggtaaccttggccagcgc

SEQ ID NO: 364012 - DNA, 7021 bp, Homo sapiens
gaggttgaaaatattccaaataatttgcacctgtaccgaacatgtacagatttttccttgtcattatttccttaaaatacagtttgacaactatttatacagtatttacattgaactaggtattataagcaatctagagatgatttcaagtatatgggaggatgtgcataggttagatgcaaatatgcaaatactatgccatttaatcagcgactggagcatccatggagtttggtatctgggaggtgctggaaccaattcccttcagatactgagggatgactttacttgtaagtacaccaagcataggaatgtttggaagatgtgcctttttgcctgccccggtgagatggggagtgcttagggagtctgcccttggctctgatataaccttacccttaacactgtgttattaaacctccccccaatgctacctcttcaggcaagctggtcattaaagaccacgacgagccgattgttttgcgaacccggcacatcctgattgacaacggaggagagctgcatgctgggagtgccctctgccctttccagggcaatttcaccatcattttgtatggaagggctgatgaaggtattcagccggatccttactatggtctgaagtacattggggttggtaaaggaggcgctcttgagttgcatggacagaaaaagctctcctggacatttctgaacaagacccttcacccaggtggcatggcagaaggaggctatttttttgaaaggagctggggccaccgtggagttattgttcatgtcatcgaccccaaatcaggcacagtcatccattctgaccggtttgacacctatagatccaagaaagagagtgaacgtctggtccagtatttgaacgcggtgcccgatggcaggatcctttctgttgcagtgaatgatgaaggttctcgaaatctggatgacatggccaggaaggcgatgaccaaattgggaagcaaacacttcctgcaccttggatttagacacccttggagttttctaactgtgaaaggaaatccatcatcttcagtggaagaccatattgaatatcatggacatcgaggctctgctgctgcccgggtattcaaattgttccagacagagcatggcgaatatttcaatgtttctttgtccagtgagtgggttcaagacgtggagtggacggagtggttcgatcatgataaagtatctcagactaaggtggggagaaaatttcagacctctggaaagctcacccaggaaaaatatgcaatcgtcccattgatatacaggccactacaatggatggagttaacctcagcaccgaggttgtctacaaaaaaggccaggattataggtttgcttgctacgaccggggcagagcctgccggagctaccgtgtacggttcctctgtgggaagcctgtgaggcccaaactcacagtcaccattgacaccaatgtgaacagcaccattctgaacttggaggataatgtacagtcatggaaacctggagataccctggtcattgccagtactgattactccatgtaccaggcagaagagttccaggtgcttccctgcagatcctgcgcccccaaccaggtcaaagtggcagggaaaccaatgtacctgcacatcggggaggagatagacggcgtggacatgcgggcggaggttgggcttctgagccggaacatcatagtgatgggggagatggaggacaaatgctacccctacagaaaccacatctgcaatttctttgacttcgatacctttgggggccacatcaagtttgctctgggatttaaggcagcacacttggagggcacggagctgaagcatatgggacagcagctggtgggtcagtacccgattcacttccacctggccggtgatgtagacgaaaggggaggttatgacccacccacatacatcagggacctctccatccatcatacattctctcgctgcgtcacagtccatggctccaatggcttgttgatcaaggacgttgtgggctataactctttgggccactgcttcttcacggaagatgggccggaggaacgcaacacttttgaccactgtcttggcctccttgtcaagtctggaaccctcctcccctcggaccgtgacagcaagatgtgcaagatgatcacagaggactcctacccagggtacatccccaagcccaggcaagactgcaatgctgtgtccaccttctggatggccaatcccaacaacaacctcatcaactgtgccgctgcaggatctgaggaaactggattttggtttatttttcaccacgtaccaacgggcccctccgtgggaatgtactccccaggttattcagagcacattccactgggaaaattctataacaaccgagcacattccaactaccgggctggcatgatcatagacaacggagtcaaaaccaccgaggcctctgccaaggacaagcggccgttcctctcaatcatctctgccagatacagccctcaccaggacgccgacccgctgaagccccgggagccggccatcatcagacacttcattgcctacaagaaccaggaccacggggcctggctgcgcggcggggatgtgtggctggacagctgccggtttgctgacaatggcattggcctgaccctggccagtggtggaaccttcccgtatgacgacggctccaagcaagagataaagaacagcttgtttgttggcgagagtggcaacgtggggacggaaatgatggacaataggatctggggccctggcggcttggaccatagcggaaggaccctccctataggccagaattttccaattagaggaattcagttatatgatggccccatcaacatccaaaactgcactttccgaaagtttgtggccctggagggccggcacaccagcgccctggccttccgcctgaataatgcctggcagagctgcccccataacaacgtgaccggcattgcctttgaggacgttccgattacttccagagtgttcttcggagagcctgggccctggttcaaccagctggacatggatggggataagacatctgtgttccatgacgtcgacggctccgtgtccgagtaccctggctcctacctcacgaagaatgacaactggctggtccggcacccagactgcatcaatgttcccgactggagaggggccatttgcagtgggtgctatgcacagatgtacattcaagcctacaagaccagtaacctgcgaatgaagatcatcaagaatgacttccccagccaccctctttacctggagggggcgctcaccaggagcacccattaccagcaataccaaccggttgtcaccctgcagaagggctacaccatccactgggaccagacggcccccgccgaactcgccatctggctcatcaacttcaacaagggcgactggatccgagtggggctctgctacccgcgaggcaccacattctccatcctctcggatgttcacaatcgcctgctgaagcaaacgtccaagacgggcgtcttcgtgaggaccttgcagatggacaaagtggagcagagctaccctggcaggagccactactactgggacgaggactcagggctgttgttcctgaagctgaaagctcagaacgagagagagaagtttgctttctgctccatgaaaggctgtgagaggataaagattaaagctctgattccaaagaacgcaggcgtcagtgactgcacagccacagcttaccccaagttcaccgagagggctgtcgtagacgtgccgatgcccaagaagctctttggttctcagctgaaaacaaaggaccatttcttggaggtgaagatggagagttccaagcagcacttcttccacctctggaacgacttcgcttacattgaagtggatgggaagaagtaccccagttcggaggatggcatccaggtggtggtgattgacgggaaccaagggcgcgtggtgagccacacgagcttcaggaactccattctgcaaggcataccatggcagcttttcaactatgtggcgaccatccctgacaattccatagtgcttatggcatcaaagggaagatacgtctccagaggcccatggaccagagtgctggaaaagcttggggcagacaggggtctcaagttgaaagagcaaatggcattcgttggcttcaaaggcagcttccggcccatctgggtgacactggacactgaggatcacaaagccaaaatcttccaagttgtgcccatccctgtggtgaagaagaagaagttgtgaggacagctgccgcccggtgccacctcgtggtagactatgacggtgactcttggcagcagaccagtgggggatggctgggtcccccagcccctgccagcagctgcctgggaaggccgtgtttcagccctgatgggccaagggaaggctatcagagaccctggtgctgccacctgcccctactcaagtgtctacctggagcccctggggcggtgctggccaatgctggaaacattcactttcctgcagcctcttgggtgcttctctcctatctgtgcctcttcagtgggggtttggggaccatatcaggagacctgggttgtgctgacagcaaagatccactttggcaggagccctgacccagctaggaggtagtctggagggctggtcattcacagatccccatggtcttcagcagacaagtgagggtggtaaatgtaggagaaagagccttggccttaaggaaatctttactcctgtaagcaagagccaacctcacaggattaggagctggggtagaactggctatccttggggaagaggcaagccctgcctctggccgtgtccacctttcaggagactttgagtggcaggtttggacttggactagatgactctcaaaggcccttttagttctgagattccagaaatctgctgcatttcacatggtacctggaacccaacagttcatggatatccactgatatccatgatgctgggtgccccagcgcacacgggatggagaggtgagaactaatgcctagcttgaggggtctgcagtccagtagggcaggcagtcaggtccatgtgcactgcaatgccaggtggagaaatcacagagaggtaaaatggaggccagtgccatttcagaggggaggctcaggaaggcttcttgcttacaggaatgaaggctgggggcattttgctggggggagatgaggcagcctctggaatggctcagggattcagccctccctgccgctgcctgctgaagctggtgactacggggtcgccctttgctcacgtctctctggcccactcatgatggagaagtgtggtcagaggggagcaatgggctttgctgcttatgagcacagaggaattcagtccccaggcagccctgcctctgactccaagagggtgaagtccacagaagtgagctcctgccttagggcctcatttgctcttcatccagggaactgagcacagggggcctccaggagaccctagatgtgctcgtactccctcggcctgggatttcagagctggaaatatagaaaatatctagcccaaagccttcattttaacagatggggaaagtgagcccccaagatgggaaagaaccacacagctaagggagggcctggggagccccaccctagcccttgctgccacaccacattgcctcaacaaccggccccagagtgcccaggcactcctgaggtagcttctggaaatggggacaagtcccctcgaaggaaaggaaatgactagagtagaatgacagctagcagatctcttccctcctgctcccagcgcacacaaacccgccctccccttggtgttggcggtccctgtggccttcactttgttcactacctgtcagcccagcctgggtgcacagtagctgcaactccccattggtgctacctggctctcctgtctctgcagctctacaggtgaggcccagcagagggagtagggctcgccatgtttctggtgagccaatttggctgatcttgggtgtctgaacagctattgggtccaccccagtccctttcagctgctgcttaatgccctgctctctccctggcccaccttatagagagcccaaagagctcctgtaagagggagaactctatctgtggtttataatcttgcacgaggcaccagagtctccctgggtcttgtgatgaactacatttatcccctttcctgccccaaccacaaactctttccttcaaagagggcctgcctggctccctccacccaactgcacccatgagactcggtccaagagtccattccccaggtgggagccaactgtcagggaggtctttcccaccaaacatctttcagctgctgggaggtgaccatagggctctgcttttaaagatatggctgcttcaaaggccagagtcacaggaaggacttcttccagggagattagtggtgatggagaggagagttaaaatgacctcatgtccttcttgtccacggttttgttgagttttcactcttctaatgcaagggtctcacactgtgaaccacttaggatgtgatcactttcaggtggccaggaatgttgaatgtctttggctcagttcatttaaaaaagatatctatttgaaagttctcagagttgtacatatgtttcacagtacaggatctgtacataaaagtttctttcctaaaccattcaccaagagccaatatctaggcattttcttggtagcacaaattttcttattgcttagaaaattgtcctccttgttatttctgtttgtaagacttaagtgagttaggtctttaaggaaagcaacgctcctctgaaatgcttgtcttttttctgttgccgaaatagctggtcctttttcgggagttagatgtatagagtgtttgtatgtaaacatttcttgtaggcatcaccatgaacaaagatatattttctatttatttattatatgtgcacttcaagaagtcactgtcagagaaataaagaattgtcttaaatgtca

SEQ ID NO: 364013 - DNA, 7622 bp, Homo sapiens
tgactggctatactttccttccttattaccccagtctggtccctttggtctctatgccaaagatgacagcagctgcagcccttgctctaaattgcatgtctttgaatgatagtcatggtcaggatgcagacacaccctggctctgggatgggccccagctggcagggatcatgccctccctggaggcctgctccctaaattctccacctggccttgtagctgctcaccagccagccctcatccactgagacctcactctgtgccaggccctgggctgaatgctggggacaagggggcaaaaaccagctccttgcccacccagagcccaccatgcggtgggaggaggcagacatttgaacaaaagacattaggcggcttccaccttagggcaagagtggatggggcttagaagtgttgtgatgtagttacataagtctgggttcaagttttagctctgccacctactggctttgtgatcctgggtaagtaactgaacctctctgaggatgagtttccttatctgtaaaactaacagcagcctcatagttttgctatgaagatgaaatgagataatataggtaaacatctagctttagtggttctcaaactttcttgcccattagaatcacctgggcaacttttcaaagtccagatgtccatgctgcaccccagacacaatcaaatctgaggctccgaggatggggactgggcatgagtattttttaaagactcctccccatgggatgcagaaccatgtttggactgttggccgctgttcatggtgctggtagtggtggtgcaaattgtaaaaagtggccagcccagatcctagaagagtggctacttattgtaaatgctccgtaaaatgttcacccagccataagcagtagatcactggtttcgatactgagtactgtaggacctcaggccaggcatttatctattccaagactttaggctgtctttctcataacaaaactgatgggggcaatcattgggataatcatctcgggccgttgtaaatagtgttgcagcagggacaattttagacttctgagtatatgtttagaacattaatcagcaccttccttctctataaaaaaaaaacgactttgctctgtaatttctgtgtcattcccaggccactacaatggatggagttaacctcagcaccgaggttgtctacaaaaaaggccaggattataggtttgcttgctacgaccggggcagagcctgccggagctaccgtgtacggttcctctgtgggaagcctggtaagcagccccttgtcggggacacagatgcaactatggctcggttccttgaactggcagctatgcaggcaacttccagacctctcagtgagacagtgctcccaaaggagagcacttttgtgacacgggagcagtgggaggatccttggagttggcaggagacagcagaaccccaccctgcccataagcctttcaggaaggggaagggcctggtccaaggcagtcaaggtacaaatggacagagctgccctcccctgcagagatgtgcagttctttgcctctttgggtgctattattttaaatccagtacctaaggtgcttgttagaagagattggaaatggtcgggttgttctcggaggcacttggccatctccagaaggcagtcattaggaatgaaagtttagggggagaagtttatggctaccgaaaataatagttgagaggaactatatttgttttacatcttgagcaaagtgggtggggtgaggcagccacatttaactccagctaagaagttagtggaaaattcccccgcccagagctaatgaatggctcttttctggtagggtttttgttgacttcaaaaacctttaccaagagtgggatggagcaagccagtgatctgggttttggataggcaaacctggcatttagttatttagggaggggaagggaaaaaagaggtagccaaaagtttgccaagagcaaagggctctatctcagtctttcctgttttgggttacagtgaggcccaaactcacagtcaccattgacaccaatgtgaacagcaccattctgaacttggaggataatgtacagtcatggaaacctggagataccctggtcattgccagtactgattactccatgtaccaggcagaagagttccaggtgcttccctgcagatcctgcgcccccaaccaggtcaaagtggcagggaaaccaatgtacctgcacatcggggaggagatagacggcgtggacatgcgggcggaggttgggcttctgagccggaacatcatagtgatgggggagatggaggacaaatgctacccctacagaaaccacatctgcaatttctttgacttcgatacctttgggggccacatcaagtttgctctgggatttaaggcagcacacttggagggcacggagctgaagcatatgggacagcagctggtgggtcagtacccgattcacttccacctggccggtgatgtagacgaaaggggaggttatgacccacccacatacatcagggacctctccatccatcatacattctctcgctgcgtcacagtccatggctccaatggcttgttgatcaaggacgttgtgggctataactctttgggccactgcttcttcacggaagatgggccggaggaacgcaacacttttgaccactgtcttggcctccttgtcaagtctggaaccctcctcccctcggaccgtgacagcaagatgtgcaagatgatcacagaggactcctacccagggtacatccccaagcccaggcaagactgcaatgctgtgtccaccttctggatggccaatcccaacaacaacctcatcaactgtgccgctgcaggatctgaggaaactggattttggtttatttttcaccacgtaccaacgggcccctccgtgggaatgtactccccaggttattcagagcacattccactgggaaaattctataacaaccgagcacattccaactaccgggctggcatgatcatagacaacggagtcaaaaccaccgaggcctctgccaaggacaagcggccgttcctctcaatcatctctgccagatacagccctcaccaggacgccgacccgctgaagccccgggagccggccatcatcagacacttcattgcctacaagaaccaggaccacggggcctggctgcgcggcggggatgtgtggctggacagctgccggtttgctgacaatggcattggcctgaccctggccagtggtggaaccttcccgtatgacgacggctccaagcaagagataaagaacagcttgtttgttggcgagagtggcaacgtggggacggaaatgatggacaataggatctggggccctggcggcttggaccatagcggaaggaccctccctataggccagaattttccaattagaggaattcagttatatgatggccccatcaacatccaaaactgcactttccgaaagtttgtggccctggagggccggcacaccagcgccctggccttccgcctgaataatgcctggcagagctgcccccataacaacgtgaccggcattgcctttgaggacgttccgattacttccagagtgttcttcggagagcctgggccctggttcaaccagctggacatggatggggataagacatctgtgttccatgacgtcgacggctccgtgtccgagtaccctggctcctacctcacgaagaatgacaactggctggtccggcacccagactgcatcaatgttcccgactggagaggggccatttgcagtgggtgctatgcacagatgtacattcaagcctacaagaccagtaacctgcgaatgaagatcatcaagaatgacttccccagccaccctctttacctggagggggcgctcaccaggagcacccattaccagcaataccaaccggttgtcaccctgcagaagggctacaccatccactgggaccagacggcccccgccgaactcgccatctggctcatcaacttcaacaagggcgactggatccgagtggggctctgctacccgcgaggcaccacattctccatcctctcggatgttcacaatcgcctgctgaagcaaacgtccaagacgggcgtcttcgtgaggaccttgcagatggacaaagtggagcagagctaccctggcaggagccactactactgggacgaggactcagggctgttgttcctgaagctgaaagctcagaacgagagagagaagtttgctttctgctccatgaaaggctgtgagaggataaagattaaagctctgattccaaagaacgcaggcgtcagtgactgcacagccacagcttaccccaagttcaccgagagggctgtcgtagacgtgccgatgcccaagaagctctttggttctcagctgaaaacaaaggaccatttcttggaggtgaagatggagagttccaagcagcacttcttccacctctggaacgacttcgcttacattgaagtggatgggaagaagtaccccagttcggaggatggcatccaggtggtggtgattgacgggaaccaagggcgcgtggtgagccacacgagcttcaggaactccattctgcaaggcataccatggcagcttttcaactatgtggcgaccatccctgacaattccatagtgcttatggcatcaaagggaagatacgtctccagaggcccatggaccagagtgctggaaaagcttggggcagacaggggtctcaagttgaaagagcaaatggcattcgttggcttcaaaggcagcttccggcccatctgggtgacactggacactgaggatcacaaagccaaaatcttccaagttgtgcccatccctgtggtgaagaagaagaagttgtgaggacagctgccgcccggtgccacctcgtggtagactatgacggtgactcttggcagcagaccagtgggggatggctgggtcccccagcccctgccagcagctgcctgggaaggccgtgtttcagccctgatgggccaagggaaggctatcagagaccctggtgctgccacctgcccctactcaagtgtctacctggagcccctggggcggtgctggccaatgctggaaacattcactttcctgcagcctcttgggtgcttctctcctatctgtgcctcttcagtgggggtttggggaccatatcaggagacctgggttgtgctgacagcaaagatccactttggcaggagccctgacccagctaggaggtagtctggagggctggtcattcacagatccccatggtcttcagcagacaagtgagggtggtaaatgtaggagaaagagccttggccttaaggaaatctttactcctgtaagcaagagccaacctcacaggattaggagctggggtagaactggctatccttggggaagaggcaagccctgcctctggccgtgtccacctttcaggagactttgagtggcaggtttggacttggactagatgactctcaaaggcccttttagttctgagattccagaaatctgctgcatttcacatggtacctggaacccaacagttcatggatatccactgatatccatgatgctgggtgccccagcgcacacgggatggagaggtgagaactaatgcctagcttgaggggtctgcagtccagtagggcaggcagtcaggtccatgtgcactgcaatgccaggtggagaaatcacagagaggtaaaatggaggccagtgccatttcagaggggaggctcaggaaggcttcttgcttacaggaatgaaggctgggggcattttgctggggggagatgaggcagcctctggaatggctcagggattcagccctccctgccgctgcctgctgaagctggtgactacggggtcgccctttgctcacgtctctctggcccactcatgatggagaagtgtggtcagaggggagcaatgggctttgctgcttatgagcacagaggaattcagtccccaggcagccctgcctctgactccaagagggtgaagtccacagaagtgagctcctgccttagggcctcatttgctcttcatccagggaactgagcacagggggcctccaggagaccctagatgtgctcgtactccctcggcctgggatttcagagctggaaatatagaaaatatctagcccaaagccttcattttaacagatggggaaagtgagcccccaagatgggaaagaaccacacagctaagggagggcctggggagccccaccctagcccttgctgccacaccacattgcctcaacaaccggccccagagtgcccaggcactcctgaggtagcttctggaaatggggacaagtcccctcgaaggaaaggaaatgactagagtagaatgacagctagcagatctcttccctcctgctcccagcgcacacaaacccgccctccccttggtgttggcggtccctgtggccttcactttgttcactacctgtcagcccagcctgggtgcacagtagctgcaactccccattggtgctacctggctctcctgtctctgcagctctacaggtgaggcccagcagagggagtagggctcgccatgtttctggtgagccaatttggctgatcttgggtgtctgaacagctattgggtccaccccagtccctttcagctgctgcttaatgccctgctctctccctggcccaccttatagagagcccaaagagctcctgtaagagggagaactctatctgtggtttataatcttgcacgaggcaccagagtctccctgggtcttgtgatgaactacatttatcccctttcctgccccaaccacaaactctttccttcaaagagggcctgcctggctccctccacccaactgcacccatgagactcggtccaagagtccattccccaggtgggagccaactgtcagggaggtctttcccaccaaacatctttcagctgctgggaggtgaccatagggctctgcttttaaagatatggctgcttcaaaggccagagtcacaggaaggacttcttccagggagattagtggtgatggagaggagagttaaaatgacctcatgtccttcttgtccacggttttgttgagttttcactcttctaatgcaagggtctcacactgtgaaccacttaggatgtgatcactttcaggtggccaggaatgttgaatgtctttggctcagttcatttaaaaaagatatctatttgaaagttctcagagttgtacatatgtttcacagtacaggatctgtacataaaagtttctttcctaaaccattcaccaagagccaatatctaggcattttcttggtagcacaaattttcttattgcttagaaaattgtcctccttgttatttctgtttgtaagacttaagtgagttaggtctttaaggaaagcaacgctcctctgaaatgcttgtcttttttctgttgccgaaatagctggtcctttttcgggagttagatgtatagagtgtttgtatgtaaacatttcttgtaggcatcaccatgaacaaagatatattttctatttatttattatatgtgcacttcaagaagtcactgtcagagaaataaagaattgtcttaaatgtca

SEQ ID NO: 364014 - DNA, 7417 bp, Homo sapiens
tgactggctatactttccttccttattaccccagtctggtccctttggtctctatgccaaagatgacagcagctgcagcccttgctctaaattgcatgtctttgaatgatagtcatggtcaggatgcagacacaccctggctctgggatgggccccagctggcagggatcatgccctccctggaggcctgctccctaaattctccacctggccttgtagctgctcaccagccagccctcatccactgagacctcactctgtgccaggccctgggctgaatgctggggacaagggggcaaaaaccagctccttgcccacccagagcccaccatgcggtgggaggaggcagacatttgaacaaaagacattaggcggcttccaccttagggcaagagtggatggggcttagaagtgttgtgatgtagttacataagtctgggttcaagttttagctctgccacctactggctttgtgatcctgggtaagtaactgaacctctctgaggatgagtttccttatctgtaaaactaacagcagcctcatagttttgctatgaagatgaaatgagataatataggtaaacatctagctttagtggttctcaaactttcttgcccattagaatcacctgggcaacttttcaaagtccagatgtccatgctgcaccccagacacaatcaaatctgaggctccgaggatggggactgggcatgagtattttttaaagactcctccccatgggatgcagaaccatgtttggactgttggccgctgttcatggtgctggtagtggtggtgcaaattgtaaaaagtggccagcccagatcctagaagagtggctacttattgtaaatgctccgtaaaatgttcacccagccataagcagtagatcactggtttcgatactgagtactgtaggacctcaggccaggcatttatctattccaagactttaggctgtctttctcataacaaaactgatgggggcaatcattgggataatcatctcgggccgttgtaaatagtgttgcagcagggacaattttagacttctgagtatatgtttagaacattaatcagcaccttccttctctataaaaaaaaaacgactttgctctgtaatttctgtgtcattcccaggccactacaatggatggagttaacctcagcaccgaggttgtctacaaaaaaggccaggattataggtttgcttgctacgaccggggcagagcctgccggagctaccgtgtacggttcctctgtgggaagcctggtaagcagccccttgtcggggacacagatgcaactatggctcggttccttgaactggcagctatgcaggcaacttccagacctctcagtgagacagtgctcccaaaggagagcacttttgtgacacgggagcagtgggaggatccttggagttggcaggagacagcagaaccccaccctgcccataagcctttcaggaaggggaagggcctggtccaaggcagtcaaggtacaaatggacagagctgccctcccctgcagagatgtgcagttctttgcctctttgggtgctattattttaaatccagtacctaaggtgcttgttagaagagattggaaatggtcgggttgttctcggaggcacttggccatctccagaaggcagtcattaggaatgaaagtttagggggagaagtttatggctaccgaaaataatagttgagaggaactatatttgttttacatcttgagcaaagtgggtggggtgaggcagccacatttaactccagctaagaagttagtggaaaattcccccgcccagagctaatgaatggctcttttctggtagggtttttgttgacttcaaaaacctttaccaagagtgggatggagcaagccagtgatctgggttttggataggcaaacctggcatttagttatttagggaggggaagggaaaaaagaggtagccaaaagtttgccaagagcaaagggctctatctcagtctttcctgttttgggttacagtgaggcccaaactcacagtcaccattgacaccaatgtgaacagcaccattctgaacttggaggataatgtacagtcatggaaacctggagataccctggtcattgccagtactgattactccatgtaccaggcagaagagttccaggtgcttccctgcagatcctgcgcccccaaccaggtcaaagtggcagggaaaccaatgtacctgcacatcggggaggagatagacggcgtggacatgcgggcggaggttgggcttctgagccggaacatcatagtgatgggggagatggaggacaaatgctacccctacagaaaccacatctgcaatttctttgacttcgatacctttgggggccacatcaagtttgctctgggatttaaggcagcacacttggagggcacggagctgaagcatatgggacagcagctggtgggtcagtacccgattcacttccacctggccggtgatgtagacgaaaggggaggttatgacccacccacatacatcagggacctctccatccatcatacattctctcgctgcgtcacagtccatggctccaatggcttgttgatcaaggacgttgtgggctataactctttgggccactgcttcttcacggaagatgggccggaggaacgcaacacttttgaccactgtcttggcctccttgtcaagtctggaaccctcctcccctcggaccgtgacagcaagatgtgcaagatgatcacagaggactcctacccagggtacatccccaagcccaggcaagactgcaatgctgtgtccaccttctggatggccaatcccaacaacaacctcatcaactgtgccgctgcaggatctgaggaaactggattttggtttatttttcaccacgtaccaacgggcccctccgtgggaatgtactccccaggttattcagagcacattccactgggaaaattctataacaaccgagcacattccaactaccgggctggcatgatcatagacaacggagtcaaaaccaccgaggcctctgccaaggacaagcggccgttcctctcaatcatctctgccagatacagccctcaccaggacgccgacccgctgaagccccgggagccggccatcatcagacacttcattgcctacaagaaccaggaccacggggcctggctgcgcggcggggatgtgtggctggacagctgccggtttgctgacaatggcattggcctgaccctggccagtggtggaaccttcccgtatgacgacggctccaagcaagagataaagaacagcttgtttgttggcgagagtggcaacgtggggacggaaatgatggacaataggatctggggccctggcggcttggaccatagcggaaggaccctccctataggccagaattttccaattagaggaattcagttatatgatggccccatcaacatccaaaactgcactttccgaaagtttgtggccctggagggccggcacaccagcgccctggccttccgcctgaataatgcctggcagagctgcccccataacaacgtgaccggcattgcctttgaggacgttccgattacttccagagtgttcttcggagagcctgggccctggttcaaccagctggacatggatggggataagacatctgtgttccatgacgtcgacggctccgtgtccgagtaccctggctcctacctcacgaagaatgacaactggctggtccggcacccagactgcatcaatgttcccgactggagaggggccatttgcagtgggtgctatgcacagatgtacattcaagcctacaagaccagtaacctgcgaatgaagatcatcaagaatgacttccccagccaccctctttacctggagggggcgctcaccaggagcacccattaccagcaataccaaccggttgtcaccctgcagaagggctacaccatccactgggaccagacggcccccgccgaactcgccatctggctcatcaacttcaacaagggcgactggatccgagtggggctctgctacccgcgaggcaccacattctccatcctctcggatgttcacaatcgcctgctgaagcaaacgtccaagacgggcgtcttcgtgaggaccttgcagatggacaaagtggagcagagctaccctggcaggagccactactactgggacgaggactcaggaaaacaaaggaccatttcttggaggtgaagatggagagttccaagcagcacttcttccacctctggaacgacttcgcttacattgaagtggatgggaagaagtaccccagttcggaggatggcatccaggtggtggtgattgacgggaaccaagggcgcgtggtgagccacacgagcttcaggaactccattctgcaaggcataccatggcagcttttcaactatgtggcgaccatccctgacaattccatagtgcttatggcatcaaagggaagatacgtctccagaggcccatggaccagagtgctggaaaagcttggggcagacaggggtctcaagttgaaagagcaaatggcattcgttggcttcaaaggcagcttccggcccatctgggtgacactggacactgaggatcacaaagccaaaatcttccaagttgtgcccatccctgtggtgaagaagaagaagttgtgaggacagctgccgcccggtgccacctcgtggtagactatgacggtgactcttggcagcagaccagtgggggatggctgggtcccccagcccctgccagcagctgcctgggaaggccgtgtttcagccctgatgggccaagggaaggctatcagagaccctggtgctgccacctgcccctactcaagtgtctacctggagcccctggggcggtgctggccaatgctggaaacattcactttcctgcagcctcttgggtgcttctctcctatctgtgcctcttcagtgggggtttggggaccatatcaggagacctgggttgtgctgacagcaaagatccactttggcaggagccctgacccagctaggaggtagtctggagggctggtcattcacagatccccatggtcttcagcagacaagtgagggtggtaaatgtaggagaaagagccttggccttaaggaaatctttactcctgtaagcaagagccaacctcacaggattaggagctggggtagaactggctatccttggggaagaggcaagccctgcctctggccgtgtccacctttcaggagactttgagtggcaggtttggacttggactagatgactctcaaaggcccttttagttctgagattccagaaatctgctgcatttcacatggtacctggaacccaacagttcatggatatccactgatatccatgatgctgggtgccccagcgcacacgggatggagaggtgagaactaatgcctagcttgaggggtctgcagtccagtagggcaggcagtcaggtccatgtgcactgcaatgccaggtggagaaatcacagagaggtaaaatggaggccagtgccatttcagaggggaggctcaggaaggcttcttgcttacaggaatgaaggctgggggcattttgctggggggagatgaggcagcctctggaatggctcagggattcagccctccctgccgctgcctgctgaagctggtgactacggggtcgccctttgctcacgtctctctggcccactcatgatggagaagtgtggtcagaggggagcaatgggctttgctgcttatgagcacagaggaattcagtccccaggcagccctgcctctgactccaagagggtgaagtccacagaagtgagctcctgccttagggcctcatttgctcttcatccagggaactgagcacagggggcctccaggagaccctagatgtgctcgtactccctcggcctgggatttcagagctggaaatatagaaaatatctagcccaaagccttcattttaacagatggggaaagtgagcccccaagatgggaaagaaccacacagctaagggagggcctggggagccccaccctagcccttgctgccacaccacattgcctcaacaaccggccccagagtgcccaggcactcctgaggtagcttctggaaatggggacaagtcccctcgaaggaaaggaaatgactagagtagaatgacagctagcagatctcttccctcctgctcccagcgcacacaaacccgccctccccttggtgttggcggtccctgtggccttcactttgttcactacctgtcagcccagcctgggtgcacagtagctgcaactccccattggtgctacctggctctcctgtctctgcagctctacaggtgaggcccagcagagggagtagggctcgccatgtttctggtgagccaatttggctgatcttgggtgtctgaacagctattgggtccaccccagtccctttcagctgctgcttaatgccctgctctctccctggcccaccttatagagagcccaaagagctcctgtaagagggagaactctatctgtggtttataatcttgcacgaggcaccagagtctccctgggtcttgtgatgaactacatttatcccctttcctgccccaaccacaaactctttccttcaaagagggcctgcctggctccctccacccaactgcacccatgagactcggtccaagagtccattccccaggtgggagccaactgtcagggaggtctttcccaccaaacatctttcagctgctgggaggtgaccatagggctctgcttttaaagatatggctgcttcaaaggccagagtcacaggaaggacttcttccagggagattagtggtgatggagaggagagttaaaatgacctcatgtccttcttgtccacggttttgttgagttttcactcttctaatgcaagggtctcacactgtgaaccacttaggatgtgatcactttcaggtggccaggaatgttgaatgtctttggctcagttcatttaaaaaagatatctatttgaaagttctcagagttgtacatatgtttcacagtacaggatctgtacataaaagtttctttcctaaaccattcaccaagagccaatatctaggcattttcttggtagcacaaattttcttattgcttagaaaattgtcctccttgttatttctgtttgtaagacttaagtgagttaggtctttaaggaaagcaacgctcctctgaaatgcttgtcttttttctgttgccgaaatagctggtcctttttcgggagttagatgtatagagtgtttgtatgtaaacatttcttgtaggcatcaccatgaacaaagatatattttctatttatttattatatgtgcacttcaagaagtcactgtcagagaaataaagaattgtcttaaatgtca

SEQ ID NO: 364015 - DNA, 7734 bp, Homo sapiens
tgactggctatactttccttccttattaccccagtctggtccctttggtctctatgccaaagatgacagcagctgcagcccttgctctaaattgcatgtctttgaatgatagtcatggtcaggatgcagacacaccctggctctgggatgggccccagctggcagggatcatgccctccctggaggcctgctccctaaattctccacctggccttgtagctgctcaccagccagccctcatccactgagacctcactctgtgccaggccctgggctgaatgctggggacaagggggcaaaaaccagctccttgcccacccagagcccaccatgcggtgggaggaggcagacatttgaacaaaagacattaggcggcttccaccttagggcaagagtggatggggcttagaagtgttgtgatgtagttacataagtctgggttcaagttttagctctgccacctactggctttgtgatcctgggtaagtaactgaacctctctgaggatgagtttccttatctgtaaaactaacagcagcctcatagttttgctatgaagatgaaatgagataatataggtaaacatctagctttagtggttctcaaactttcttgcccattagaatcacctgggcaacttttcaaagtccagatgtccatgctgcaccccagacacaatcaaatctgaggctccgaggatggggactgggcatgagtattttttaaagactcctccccatgggatgcagaaccatgtttggactgttggccgctgttcatggtgctggtagtggtggtgcaaattgtaaaaagtggccagcccagatcctagaagagtggctacttattgtaaatgctccgtaaaatgttcacccagccataagcagtagatcactggtttcgatactgagtactgtaggacctcaggccaggcatttatctattccaagactttaggctgtctttctcataacaaaactgatgggggcaatcattgggataatcatctcgggccgttgtaaatagtgttgcagcagggacaattttagacttctgagtatatgtttagaacattaatcagcaccttccttctctataaaaaaaaaacgactttgctctgtaatttctgtgtcattcccaggccactacaatggatggagttaacctcagcaccgaggttgtctacaaaaaaggccaggattataggtttgcttgctacgaccggggcagagcctgccggagctaccgtgtacggttcctctgtgggaagcctggtaagcagccccttgtcggggacacagatgcaactatggctcggttccttgaactggcagctatgcaggcaacttccagacctctcagtgagacagtgctcccaaaggagagcacttttgtgacacgggagcagtgggaggatccttggagttggcaggagacagcagaaccccaccctgcccataagcctttcaggaaggggaagggcctggtccaaggcagtcaaggtacaaatggacagagctgccctcccctgcagagatgtgcagttctttgcctctttgggtgctattattttaaatccagtacctaaggtgcttgttagaagagattggaaatggtcgggttgttctcggaggcacttggccatctccagaaggcagtcattaggaatgaaagtttagggggagaagtttatggctaccgaaaataatagttgagaggaactatatttgttttacatcttgagcaaagtgggtggggtgaggcagccacatttaactccagctaagaagttagtggaaaattcccccgcccagagctaatgaatggctcttttctggtagggtttttgttgacttcaaaaacctttaccaagagtgggatggagcaagccagtgatctgggttttggataggcaaacctggcatttagttatttagggaggggaagggaaaaaagaggtagccaaaagtttgccaagagcaaagggctctatctcagtctttcctgttttgggttacagtgaggcccaaactcacagtcaccattgacaccaatgtgaacagcaccattctgaacttggaggataatgtacagtcatggaaacctggagataccctggtcattgccagtactgattactccatgtaccaggcagaagagttccaggtgcttccctgcagatcctgcgcccccaaccaggtcaaagtggcagggaaaccaatgtacctgcacatcggggaggagatagacggcgtggacatgcgggcggaggttgggcttctgagccggaacatcatagtgatgggggagatggaggacaaatgctacccctacagaaaccacatctgcaatttctttgacttcgatacctttgggggccacatcaagtttgctctgggatttaaggcagcacacttggagggcacggagctgaagcatatgggacagcagctggtgggtcagtacccgattcacttccacctggccggtgatgtagacgaaaggggaggttatgacccacccacatacatcagggacctctccatccatcatacattctctcgctgcgtcacagtccatggctccaatggcttgttgatcaaggacgttgtgggctataactctttgggccactgcttcttcacggaagatgggccggaggaacgcaacacttttgaccactgtcttggcctccttgtcaagtctggaaccctcctcccctcggaccgtgacagcaagatgtgcaagatgatcacagaggactcctacccagggtacatccccaagcccaggcaagactgcaatgctgtgtccaccttctggatggccaatcccaacaacaacctcatcaactgtgccgctgcaggatctgaggaaactggattttggtttatttttcaccacgtaccaacgggcccctccgtgggaatgtactccccaggttattcagagcacattccactgggaaaattctataacaaccgagcacattccaactaccgggctggcatgatcatagacaacggagtcaaaaccaccgaggcctctgccaaggacaagcggccgttcctctcaatcatctctgccagatacagccctcaccaggacgccgacccgctgaagccccgggagccggccatcatcagacacttcattgcctacaagaaccaggaccacggggcctggctgcgcggcggggatgtgtggctggacagctgccggtttgctgacaatggcattggcctgaccctggccagtggtggaaccttcccgtatgacgacggctccaagcaagagataaagaacagcttgtttgttggcgagagtggcaacgtggggacggaaatgatggacaataggatctggggccctggcggcttggaccatagcggaaggaccctccctataggccagaattttccaattagaggaattcagttatatgatggccccatcaacatccaaaactgcactttccgaaagtttgtggccctggagggccggcacaccagcgccctggccttccgcctgaataatgcctggcagagctgcccccataacaacgtgaccggcattgcctttgaggacgttccgattacttccagagtgttcttcggagagcctgggccctggttcaaccagctggacatggatggggataagacatctgtgttccatgacgtcgacggctccgtgtccgagtaccctggctcctacctcacgaagaatgacaactggctggtccggcacccagactgcatcaatgttcccgactggagaggggccatttgcagtgggtgctatgcacagatgtacattcaagcctacaagaccagtaacctgcgaatgaagatcatcaagaatgacttccccagccaccctctttacctggagggggcgctcaccaggagcacccattaccagcaataccaaccggttgtcaccctgcagaagggctacaccatccactgggaccagacggcccccgccgaactcgccatctggctcatcaacttcaacaagggcgactggatccgagtggggctctgctacccgcgaggcaccacattctccatcctctcggatgttcacaatcgcctgctgaagcaaacgtccaagacgggcgtcttcgtgaggaccttgcagatggacaaagtggagcagagctaccctggcaggagccactactactgggacgaggactcagggctgttgttcctgaagctgaaagctcagaacgagagagagaagtttgctttctgctccatgaaaggctgtgagaggataaagattaaagctctgattccaaagaacgcaggcgtcagtgactgcacagccacagcttaccccaagttcaccgagagggctgtcgtagacgtgccgatgcccaagaagctctttggttctcagctgaaaacaaaggaccatttcttggaggtgaagatggagagttccaagcagcacttcttccacctctggaacgacttcgcttacattgaagtggatgggaagaagtaccccagttcggaggatggcatccaggtggtggtgattgacgggaaccaagggcgcgtggtgagccacacgagcttcaggaactccattctgcaaggcataccatggcagcttttcaactatgtggcgaccatccctgacaattccatagtgcttatggcatcaaagggaagatacgtctccagaggcccatggaccagagtgctggaaaagcttggggcagacaggggtctcaagttgaaagagcaaatggcattcgttggcttcaaaggcagcttccggcccatctgggtgacactggacactgaggatcacaaagccaaaatcttccaagttgtgcccatccctgtggtgaagaagaagaagttgtgaggacagctgccgcccggtgccacctcgtggtagactatgacggtgactcttggcagcagaccagtgggggatggctgggtcccccagcccctgccagcagctgcctgggaaggccgtgtttcagccctgatgggccaagggaaggctatcagagaccctggtgctgccacctgcccctactcaagtgtctacctggagcccctggggcggtgctggccaatgctggaaacattcactttcctgcagcctcttgggtgcttctctcctatctgtgcctcttcagtgggggtttggggaccatatcaggagacctgggttgtgctgacagcaaagatccactttggcaggagccctgacccagctaggaggtagtctggagggctggtcattcacagatccccatggtcttcagcagacaagtgagggtggtaaatgtaggagaaagagccttggccttaaggaaatctttactcctgtaagcaagagccaacctcacaggattaggagctggggtagaactggctatccttggggaagaggcaagccctgcctctggccgtgtccacctttcaggagactttgagtggcaggtttggacttggactagatgactctcaaaggcccttttagttctgagattccagaaatctgctgcatttcacatggtacctggaacccaacagttcatggatatccactgatatccatgatgctgggtgccccagcgcacacgggatggagaggtgagaactaatgcctagcttgaggggtctgcagtccagtagggcaggcagtcaggtccatgtgcactgcaatgccaggtggagaaatcacagagaggtaaaatggaggccagtgccatttcagaggggaggctcaggaaggcttcttgcttacaggaatgaaggctgggggcattttgctggggggagatgaggcagcctctggaatggctcagggattcagccctccctgccgctgcctgctgaagctggtgactacggggtcgccctttgctcacgtctctctggcccactcatgatggagaagtgtggtcagaggggagcaatgggctttgctgcttatgagcacagaggaattcagtccccaggcagccctgcctctgactccaagagggtgaagtccacagaagtgagctcctgccttagggcctcatttgctcttcatccagggaactgagcacagggggcctccaggagaccctagatgtgctcgtactccctcggcctgggatttcagagctggaaatatagaaaatatctagcccaaagccttcattttaacagatggggaaagtgagcccccaagatgggaaagaaccacacagctaagggagggcctggggagccccaccctagcccttgctgccacaccacattgcctcaacaaccggccccagagtgcccaggcactcctgaggtagcttctggaaatggggacaagtcccctcgaaggaaaggaaatgactagagtagaatgacagctagcagatctcttccctcctgctcccagcgcacacaaacccgccctccccttggtgttggcggtccctgtggccttcactttgttcactacctgtcagcccagcctgggtgcacagtagctgcaactccccattggtgctacctggctctcctgtctctgcagctctacaggtgaggcccagcagagggagtagggctcgccatgtttctggtgagccaatttggctgatcttgggtgtctgaacagctattgggtccaccccagtccctttcagctgctgcttaatgccctgctctctccctggcccaccttatagagagcccaaagagctcctgtaagagggagaactctatctgtggtttataatcttgcacgaggcaccagagtctccctgggtcttgtgatgaactacatttatcccctttcctgccccaaccacaaactctttccttcaaagagggcctgcctggctccctccacccaactgcacccatgagactcggtccaagagtccattccccaggtgggagccaactgtcagggaggtctttcccaccaaacatctttcagctgctgggaggtgaccatagggctctgcttttaaagatatggctgcttcaaaggccagagtcacaggaaggacttcttccagggagattagtggtgatggagaggagagttaaaatgacctcatgtccttcttgtccacggttttgttgagttttcactcttctaatgcaagggtctcacactgtgaaccacttaggatgtgatcactttcaggtggccaggaatgttgaatgtctttggctcagttcatttaaaaaagatatctatttgaaagttctcagagttgtacatatgtttcacagtacaggatctgtacataaaagtttctttcctaaaccattcaccaagagccaatatctaggcattttcttggtagcacaaattttcttattgcttagaaaattgtcctccttgttatttctgtttgtaagacttaagtgagttaggtctttaaggaaagcaacgctcctctgaaatgcttgtcttttttctgttgccgaaatagctggtcctttttcgggagttagatgtatagagtgtttgtatgtaaacatttcttgtaggcatcaccatgaacaaagatatattttctatttatttattatatgtgcacttcaagaagtcactgtcagagaaataaagaattgtcttaaatgtcatgattggagatgtcctttgcattgcttggaaggggtgtacctagagccaaggaaattggctctggtttggaaaaattttgctgttattatagtaaacatacaaaggatgtca

SEQ ID NO: 364016 - DNA, 7529 bp, Homo sapiens
tgactggctatactttccttccttattaccccagtctggtccctttggtctctatgccaaagatgacagcagctgcagcccttgctctaaattgcatgtctttgaatgatagtcatggtcaggatgcagacacaccctggctctgggatgggccccagctggcagggatcatgccctccctggaggcctgctccctaaattctccacctggccttgtagctgctcaccagccagccctcatccactgagacctcactctgtgccaggccctgggctgaatgctggggacaagggggcaaaaaccagctccttgcccacccagagcccaccatgcggtgggaggaggcagacatttgaacaaaagacattaggcggcttccaccttagggcaagagtggatggggcttagaagtgttgtgatgtagttacataagtctgggttcaagttttagctctgccacctactggctttgtgatcctgggtaagtaactgaacctctctgaggatgagtttccttatctgtaaaactaacagcagcctcatagttttgctatgaagatgaaatgagataatataggtaaacatctagctttagtggttctcaaactttcttgcccattagaatcacctgggcaacttttcaaagtccagatgtccatgctgcaccccagacacaatcaaatctgaggctccgaggatggggactgggcatgagtattttttaaagactcctccccatgggatgcagaaccatgtttggactgttggccgctgttcatggtgctggtagtggtggtgcaaattgtaaaaagtggccagcccagatcctagaagagtggctacttattgtaaatgctccgtaaaatgttcacccagccataagcagtagatcactggtttcgatactgagtactgtaggacctcaggccaggcatttatctattccaagactttaggctgtctttctcataacaaaactgatgggggcaatcattgggataatcatctcgggccgttgtaaatagtgttgcagcagggacaattttagacttctgagtatatgtttagaacattaatcagcaccttccttctctataaaaaaaaaacgactttgctctgtaatttctgtgtcattcccaggccactacaatggatggagttaacctcagcaccgaggttgtctacaaaaaaggccaggattataggtttgcttgctacgaccggggcagagcctgccggagctaccgtgtacggttcctctgtgggaagcctggtaagcagccccttgtcggggacacagatgcaactatggctcggttccttgaactggcagctatgcaggcaacttccagacctctcagtgagacagtgctcccaaaggagagcacttttgtgacacgggagcagtgggaggatccttggagttggcaggagacagcagaaccccaccctgcccataagcctttcaggaaggggaagggcctggtccaaggcagtcaaggtacaaatggacagagctgccctcccctgcagagatgtgcagttctttgcctctttgggtgctattattttaaatccagtacctaaggtgcttgttagaagagattggaaatggtcgggttgttctcggaggcacttggccatctccagaaggcagtcattaggaatgaaagtttagggggagaagtttatggctaccgaaaataatagttgagaggaactatatttgttttacatcttgagcaaagtgggtggggtgaggcagccacatttaactccagctaagaagttagtggaaaattcccccgcccagagctaatgaatggctcttttctggtagggtttttgttgacttcaaaaacctttaccaagagtgggatggagcaagccagtgatctgggttttggataggcaaacctggcatttagttatttagggaggggaagggaaaaaagaggtagccaaaagtttgccaagagcaaagggctctatctcagtctttcctgttttgggttacagtgaggcccaaactcacagtcaccattgacaccaatgtgaacagcaccattctgaacttggaggataatgtacagtcatggaaacctggagataccctggtcattgccagtactgattactccatgtaccaggcagaagagttccaggtgcttccctgcagatcctgcgcccccaaccaggtcaaagtggcagggaaaccaatgtacctgcacatcggggaggagatagacggcgtggacatgcgggcggaggttgggcttctgagccggaacatcatagtgatgggggagatggaggacaaatgctacccctacagaaaccacatctgcaatttctttgacttcgatacctttgggggccacatcaagtttgctctgggatttaaggcagcacacttggagggcacggagctgaagcatatgggacagcagctggtgggtcagtacccgattcacttccacctggccggtgatgtagacgaaaggggaggttatgacccacccacatacatcagggacctctccatccatcatacattctctcgctgcgtcacagtccatggctccaatggcttgttgatcaaggacgttgtgggctataactctttgggccactgcttcttcacggaagatgggccggaggaacgcaacacttttgaccactgtcttggcctccttgtcaagtctggaaccctcctcccctcggaccgtgacagcaagatgtgcaagatgatcacagaggactcctacccagggtacatccccaagcccaggcaagactgcaatgctgtgtccaccttctggatggccaatcccaacaacaacctcatcaactgtgccgctgcaggatctgaggaaactggattttggtttatttttcaccacgtaccaacgggcccctccgtgggaatgtactccccaggttattcagagcacattccactgggaaaattctataacaaccgagcacattccaactaccgggctggcatgatcatagacaacggagtcaaaaccaccgaggcctctgccaaggacaagcggccgttcctctcaatcatctctgccagatacagccctcaccaggacgccgacccgctgaagccccgggagccggccatcatcagacacttcattgcctacaagaaccaggaccacggggcctggctgcgcggcggggatgtgtggctggacagctgccggtttgctgacaatggcattggcctgaccctggccagtggtggaaccttcccgtatgacgacggctccaagcaagagataaagaacagcttgtttgttggcgagagtggcaacgtggggacggaaatgatggacaataggatctggggccctggcggcttggaccatagcggaaggaccctccctataggccagaattttccaattagaggaattcagttatatgatggccccatcaacatccaaaactgcactttccgaaagtttgtggccctggagggccggcacaccagcgccctggccttccgcctgaataatgcctggcagagctgcccccataacaacgtgaccggcattgcctttgaggacgttccgattacttccagagtgttcttcggagagcctgggccctggttcaaccagctggacatggatggggataagacatctgtgttccatgacgtcgacggctccgtgtccgagtaccctggctcctacctcacgaagaatgacaactggctggtccggcacccagactgcatcaatgttcccgactggagaggggccatttgcagtgggtgctatgcacagatgtacattcaagcctacaagaccagtaacctgcgaatgaagatcatcaagaatgacttccccagccaccctctttacctggagggggcgctcaccaggagcacccattaccagcaataccaaccggttgtcaccctgcagaagggctacaccatccactgggaccagacggcccccgccgaactcgccatctggctcatcaacttcaacaagggcgactggatccgagtggggctctgctacccgcgaggcaccacattctccatcctctcggatgttcacaatcgcctgctgaagcaaacgtccaagacgggcgtcttcgtgaggaccttgcagatggacaaagtggagcagagctaccctggcaggagccactactactgggacgaggactcagggctgttgttcctgaagctgaaagctcagaacgagagagagaagtttgctttctgctccatgaaaggctgtgagaggataaagattaaagctctgattccaaagaacgcaggcgtcagtgactgcacagccacagcttaccccaagttcaccgagagggctgtcgtagacgtgccgatgcccaagaagctctttggttctcagctgaaaacaaaggaccatttcttggaggtgaagatggagagttccaagcagcacttcttccacctctggaacgacttcgcttacattgaagtggatgggaagaagtaccccagttcggaggatggcatccaggtggtggtgattgacgggaaccaagggcgcgtggtgagccacacgagcttcaggaactccattctgcaaggcataccatggcagcttttcaactatgtggcgaccatccctgacaattccatagtgcttatggcatcaaagggaagatacgtctccagaggcccatggaccagagtgctggaaaagcttggggcagacaggggtctcaagttgaaagagcaaatggcattcgttggcttcaaaggcagcttccggcccatctgggtgacactggacactgaggatcacaaagccaaaatcttccaagttgtgcccatccctgtggtgaagaagaagaagttgtgaggacagctgccgcccggtgccacctcgtggtagactatgacggtgactcttggcagcagaccagtgggggatggctgggtcccccagcccctgccagcagctgcctgggaaggccgtgtttcagccctgatgggccaagggaaggctatcagagaccctggtgctgccacctgcccctactcaagtgtctacctggagcccctggggcggtgctggccaatgctggaaacattcactttcctgcagcctcttgggtgcttctctcctatctgtgcctcttcagtgggggtttggggaccatatcaggagacctgggttgtgctgacagcaaagatccactttggcaggagccctgacccagctaggaggtagtctggagggctggtcattcacagatccccatggtcttcagcagacaagtgagggtggtaaatgtaggagaaagagccttggccttaaggaaatctttactcctgtaagcaagagccaacctcacaggattaggagctggggtagaactggctatccttggggaagaggcaagccctgcctctggccgtgtccacctttcaggagactttgagtggcaggtttggacttggactagatgactctcaaaggcccttttagttctgagattccagaaatctgctgcatttcacatggtacctggaacccaacagttcatggatatccactgatatccatgatgctgggtgccccagcgcacacgggatggagaggtgagaactaatgcctagcttgaggggtctgcagtccagtagggcaggcagtcaggtccatgtgcactgcaatgccaggtggagaaatcacagagaggtaaaatggaggccagtgccatttcagaggggaggctcaggaaggcttcttgcttacaggaatgaaggctgggggcattttgctggggggagatgaggcagcctctggaatggctcagggattcagccctccctgccgctgcctgctgaagctggtgactacggggtcgccctttgctcacgtctctctggcccactcatgatggagaagtgtggtcagaggggagcaatgggctttgctgcttatgagcacagaggaattcagtccccaggcagccctgcctctgactccaagagggtgaagtccacagaagtgagctcctgccttagggcctcatttgctcttcatccagggaactgagcacagggggcctccaggagaccctagatgtgctcgtactccctcggcctgggatttcagagctggaaatatagaaaatatcctagcccttgctgccacaccacattgcctcaacaaccggccccagagtgcccaggcactcctgaggtagcttctggaaatggggacaagtcccctcgaaggaaaggaaatgactagagtagaatgacagctagcagatctcttccctcctgctcccagcgcacacaaacccgccctccccttggtgttggcggtccctgtggccttcactttgttcactacctgtcagcccagcctgggtgcacagtagctgcaactccccattggtgctacctggctctcctgtctctgcagctctacaggtgaggcccagcagagggagtagggctcgccatgtttctggtgagccaatttggctgatcttgggtgtctgaacagctattgggtccaccccagtccctttcagctgctgcttaatgccctgctctctccctggcccaccttatagagagcccaaagagctcctgtaagagggagaactctatctgtggtttataatcttgcacgaggcaccagagtctccctgggtcttgtgatgaactacatttatcccctttcctgccccaaccacaaactctttccttcaaagagggcctgcctggctccctccacccaactgcacccatgagactcggtccaagagtccattccccaggtgggagccaactgtcagggaggtctttcccaccaaacatctttcagctgctgggaggtgaccatagggctctgcttttaaagatatggctgcttcaaaggccagagtcacaggaaggacttcttccagggagattagtggtgatggagaggagagttaaaatgacctcatgtccttcttgtccacggttttgttgagttttcactcttctaatgcaagggtctcacactgtgaaccacttaggatgtgatcactttcaggtggccaggaatgttgaatgtctttggctcagttcatttaaaaaagatatctatttgaaagttctcagagttgtacatatgtttcacagtacaggatctgtacataaaagtttctttcctaaaccattcaccaagagccaatatctaggcattttcttggtagcacaaattttcttattgcttagaaaattgtcctccttgttatttctgtttgtaagacttaagtgagttaggtctttaaggaaagcaacgctcctctgaaatgcttgtcttttttctgttgccgaaatagctggtcctttttcgggagttagatgtatagagtgtttgtatgtaaacatttcttgtaggcatcaccatgaacaaagatatattttctatttatttattatatgtgcacttcaagaagtcactgtcagagaaataaagaattgtcttaaatgtca

SEQ ID NO: 364017 - DNA, 698 bp, Homo sapiens
gagctagcgctcaagcagagcccagcgcggtgctatcggacagagcctggcgagcgcaagcggcgcggggagccagcggggctgagcgcggccagggtctgaacccagatttcccagactagctaccactccgcttgcccacgccccgggagctcgcggcgcctggcggtcagcgaccagacgtccggggccgctgcgctcctggcccgcgaggcgtgacactgtctcggctacagacccagagggagcacactgccaggatgggagctgctgggaggcaggacttcctcttcaaggccatgctgaccatcagctggctcactctgacctgcttccctggggccacatccacagtggctgctgggtgccctgaccagagccctgagttgcaaccctggaaccctggccatgaccaagaccaccatgtgcatatcggccagggcaagacactgctgctcacctcttctgccacggtctattccatccacatctcagagggaggtaagccaatctctctctgctgctccctcttccctccactgccccagagcttagcagataggatgcaggttgccatgagctcagatggacagaataaacatcacatgctttgggttcatgttggcatttggttgtctgagataaccatcagctctgagctgttaggaatggcttgtcggaggtccaatcttagtgaa

SEQ ID NO: 364018 - DNA, 572 bp, Homo sapiens
agcggaaggaccctccctataggccagtaggtttgcaaccatgtagctccttattctgagtggcttaacctaagtggctgtgatggaagggaaaaagttaatgggtagtttctacctgttgactatgaattcttctaccagccagaggaatcactgaggtgactgagactaacaattaagggatgaaatctggaatggggagagagaagtcaaaaagtggtgttgaatatgagtcaacagggtgacgtggccatcaaaatgcgtaatgcattcctgggctatgttaatgggaatttagtgtgtctgggatcagggactgtgagtccttttctctgacagcactctcacttggagtgtagcatccactcctgaggatggcagagcaatagagtcaggccgaagcacacttaaaggagaataaccaggagggtgacaaaagccgaagctatgtcacatgcaggttggggtcttcaaccagaagacaggatcatcactttggggacaacatgggggatattgttacatgttctcagagctgctgtgcacataggggatgagactcattctacacg

SEQ ID NO: 364019 - DNA, 467 bp, Homo sapiens
cacatgaataactggatgcttggtgaaacacccctgtcttgacccctgcagatcaaggacgttgtgggctataactctttgggccactgcttcttcacggaagatgggccggaggaacgcaacacttttgaccactgtcttggcctccttgtcaagtctggaaccctcctcccctcggaccgtgacagcaagatgtgcaagatgatcacagaggactcctacccagggtacatccccaagcccaggcaagactgcaagtaagtgcctggacccctctctgtgtgctggggggaaggggtgtacatgtgtgtgcatgtgttcactcagctcagcccagcaccagacttctgcacttcggggctctgaggagcttgggcctcacagcccttaaccacctacggctccagcttcctgcaaagcaggtgggagggagggtgtcttctcccttctcccttctcagtttgcct

SEQ ID NO: 364020 - DNA, 626 bp, Homo sapiens
gagaccccgtctcaaaaaaatttaaaaaaaaagagctaaagcgacactttagatgggccttcaggacacagtagtagcctcctttgcccagcaaaggctgcgggaagcgctgcagttctaatgccaaggaggaattcagaccgtgagacatgctagagctctgcaatctgaatttgttgggaggctggaactaaactttcaaaactgaaacaaaagaatggatgatcatctcttcccaagtgaatgaatgtcctaattttcttttatttacttaaaaaatatttttaaagaaatgagtcaatgcccatgtgcgtaggggggtttccttgccttggagtcacaactttttgaatttgggggtctgtccagctcctaaagggtctcgtttctctgacaggacatcgaggctctgctgctgcccgggtattcaaattgttccagacagagcatggcgaatatttcaatgtttctttgtccagtgagtgggttcaaggtgaggagtttcagacaatttggtgacacctaacagtgggatagaagaccagaaatcactgtctttgcagaactaggatttatctcttataccagtaggaccactttaatttttgcagaatcaactaaaaatg

SEQ ID NO: 364021 - DNA, 4558 bp, Homo sapiens
gagctagcgctcaagcagagcccagcgcggtgctatcggacagagcctggcgagcgcaagcggcgcggggagccagcggggctgagcgcggccagggtctgaacccagatttcccagactagctaccactccgcttgcccacgccccgggagctcgcggcgcctggcggtcagcgaccagacgtccggggccgctgcgctcctggcccgcgaggcgtgacactgtctcggctacagacccagagggagcacactgccaggatgggagctgctgggaggcaggacttcctcttcaaggccatgctgaccatcagctggctcactctgacctgcttccctggggccacatccacagtggctgctgggtgccctgaccagagccctgagttgcaaccctggaaccctggccatgaccaagaccaccatgtgcatatcggccagggcaagacactgctgctcacctcttctgccacggtctattccatccacatctcagagggaggcaagctggtcattaaagaccacgacgagccgattgttttgcgaacccggcacatcctgattgacaacggaggagagctgcatgctgggagtgccctctgccctttccagggcaatttcaccatcattttgtatggaagggctgatgaaggtattcagccggatccttactatggtctgaagtacattggggttggtaaaggaggcgctcttgagttgcatggacagaaaaagctctcctggacatttctgaacaagacccttcacccaggtggcatggcagaaggaggctatttttttgaaaggagctggggccaccgtggagttattgttcatgtcatcgaccccaaatcaggcacagtcatccattctgaccggtttgacacctatagatccaagaaagagagtgaacgtctggtccagtatttgaacgcggtgcccgatggcaggatcctttctgttgcagtgaatgatgaaggttctcgaaatctggatgacatggccaggaaggcgatgaccaaattgggaagcaaacacttcctgcaccttggatttagacacccttggagttttctaactgtgaaaggaaatccatcatcttcagtggaagaccatattgaatatcatggacatcgaggctctgctgctgcccgggtattcaaattgttccagacagagcatggcgaatatttcaatgtttctttgtccagtgagtgggttcaagacgtggagtggacggagtggttcgatcatgataaagtatctcagactaaggtggggagaaaatttcagacctctggaaagctcacccaggaaaaatatgcaatcgtcccattgatatacaggccactacaatggatggagttaacctcagcaccgaggttgtctacaaaaaaggccaggattataggtttgcttgctacgaccggggcagagcctgccggagctaccgtgtacggttcctctgtgggaagcctgtgaggcccaaactcacagtcaccattgacaccaatgtgaacagcaccattctgaacttggaggataatgtacagtcatggaaacctggagataccctggtcattgccagtactgattactccatgtaccaggcagaagagttccaggtgcttccctgcagatcctgcgcccccaaccaggtcaaagtggcagggaaaccaatgtacctgcacatcggggaggagatagacggcgtggacatgcgggcggaggttgggcttctgagccggaacatcatagtgatgggggagatggaggacaaatgctacccctacagaaaccacatctgcaatttctttgacttcgatacctttgggggccacatcaagtttgctctgggatttaaggcagcacacttggagggcacggagctgaagcatatgggacagcagctggtgggtcagtacccgattcacttccacctggccggtgatgtagacgaaaggggaggttatgacccacccacatacatcagggacctctccatccatcatacattctctcgctgcgtcacagtccatggctccaatggcttgttgatcaaggacgttgtgggctataactctttgggccactgcttcttcacggaagatgggccggaggaacgcaacacttttgaccactgtcttggcctccttgtcaagtctggaaccctcctcccctcggaccgtgacagcaagatgtgcaagatgatcacagaggactcctacccagggtacatccccaagcccaggcaagactgcaatgctgtgtccaccttctggatggccaatcccaacaacaacctcatcaactgtgccgctgcaggatctgaggaaactggattttggtttatttttcaccacgtaccaacgggcccctccgtgggaatgtactccccaggttattcagagcacattccactgggaaaattctataacaaccgagcacattccaactaccgggctggcatgatcatagacaacggagtcaaaaccaccgaggcctctgccaaggacaagcggccgttcctctcaatcatctctgccagatacagccctcaccaggacgccgacccgctgaagccccgggagccggccatcatcagacacttcattgcctacaagaaccaggaccacggggcctggctgcgcggcggggatgtgtggctggacagctgccgtgccatttcagaggggaggctcaggaaggcttcttgcttacaggaatgaaggctgggggcattttgctggggggagatgaggcagcctctggaatggctcagggattcagccctccctgccgctgcctgctgaagctggtgactacggggtcgccctttgctcacgtctctctggcccactcatgatggagaagtgtggtcagaggggagcaatgggctttgctgcttatgagcacagaggaattcagtccccaggcagccctgcctctgactccaagagggtgaagtccacagaagtgagctcctgccttagggcctcatttgctcttcatccagggaactgagcacagggggcctccaggagaccctagatgtgctcgtactccctcggcctgggatttcagagctggaaatatagaaaatatctagcccaaagccttcattttaacagatggggaaagtgagcccccaagatgggaaagaaccacacagctaagggagggcctggggagccccaccctagcccttgctgccacaccacattgcctcaacaaccggccccagagtgcccaggcactcctgaggtagcttctggaaatggggacaagtcccctcgaaggaaaggaaatgactagagtagaatgacagctagcagatctcttccctcctgctcccagcgcacacaaacccgccctccccttggtgttggcggtccctgtggccttcactttgttcactacctgtcagcccagcctgggtgcacagtagctgcaactccccattggtgctacctggctctcctgtctctgcagctctacaggtgaggcccagcagagggagtagggctcgccatgtttctggtgagccaatttggctgatcttgggtgtctgaacagctattgggtccaccccagtccctttcagctgctgcttaatgccctgctctctccctggcccaccttatagagagcccaaagagctcctgtaagagggagaactctatctgtggtttataatcttgcacgaggcaccagagtctccctgggtcttgtgatgaactacatttatcccctttcctgccccaaccacaaactctttccttcaaagagggcctgcctggctccctccacccaactgcacccatgagactcggtccaagagtccattccccaggtgggagccaactgtcagggaggtctttcccaccaaacatctttcagctgctgggaggtgaccatagggctctgcttttaaagatatggctgcttcaaaggccagagtcacaggaaggacttcttccagggagattagtggtgatggagaggagagttaaaatgacctcatgtccttcttgtccacggttttgttgagttttcactcttctaatgcaagggtctcacactgtgaaccacttaggatgtgatcactttcaggtggccaggaatgttgaatgtctttggctcagttcatttaaaaaagatatctatttgaaagttctcagagttgtacatatgtttcacagtacaggatctgtacataaaagtttctttcctaaaccattcaccaagagccaatatctaggcattttcttggtagcacaaattttcttattgcttagaaaattgtcctccttgttatttctgtttgtaagacttaagtgagttaggtctttaaggaaagcaacgctcctctgaaatgcttgtcttttttctgttgccgaaatagctggtcctttttcgggagttagatgtatagagtgtttgtatgtaaacatttcttgtaggcatcaccatgaacaaagatatattttctatttatttattatatgtgcacttcaagaagtcactgtcagagaaataaagaattgtcttaaatgtca

SEQ ID NO: 364022 - DNA, 7080 bp, Homo sapiens
gagctagcgctcaagcagagcccagcgcggtgctatcggacagagcctggcgagcgcaagcggcgcggggagccagcggggctgagcgcggccagggtctgaacccagatttcccagactagctaccactccgcttgcccacgccccgggagctcgcggcgcctggcggtcagcgaccagacgtccggggccgctgcgctcctggcccgcgaggcgtgacactgtctcggctacagacccagagggagcacactgccaggatgggagctgctgggaggcaggacttcctcttcaaggccatgctgaccatcagctggctcactctgacctgcttccctggggccacatccacagtggctgctgggtgccctgaccagagccctgagttgcaaccctggaaccctggccatgaccaagaccaccatgtgcatatcggccagggcaagacactgctgctcacctcttctgccacggtctattccatccacatctcagagggaggcaagctggtcattaaagaccacgacgagccgattgttttgcgaacccggcacatcctgattgacaacggaggagagctgcatgctgggagtgccctctgccctttccagggcaatttcaccatcattttgtatggaagggctgatgaaggtattcagccggatccttactatggtctgaagtacattggggttggtaaaggaggcgctcttgagttgcatggacagaaaaagctctcctggacatttctgaacaagacccttcacccaggtggcatggcagaaggaggctatttttttgaaaggagctggggccaccgtggagttattgttcatgtcatcgaccccaaatcaggcacagtcatccattctgaccggtttgacacctatagatccaagaaagagagtgaacgtctggtccagtatttgaacgcggtgcccgatggcaggatcctttctgttgcagtgaatgatgaaggttctcgaaatctggatgacatggccaggaaggcgatgaccaaattgggaagcaaacacttcctgcaccttggatttagacacccttggagttttctaactgtgaaaggaaatccatcatcttcagtggaagaccatattgaatatcatggacatcgaggctctgctgctgcccgggtattcaaattgttccagacagagcatggcgaatatttcaatgtttctttgtccagtgagtgggttcaagacgtggagtggacggagtggttcgatcatgataaagtatctcagactaaggtggggagaaaatttcagacctctggaaagctcacccaggaaaaatatgcaatcgtcccattgatatacaggccactacaatggatggagttaacctcagcaccgaggttgtctacaaaaaaggccaggattataggtttgcttgctacgaccggggcagagcctgccggagctaccgtgtacggttcctctgtgggaagcctgtgaggcccaaactcacagtcaccattgacaccaatgtgaacagcaccattctgaacttggaggataatgtacagtcatggaaacctggagataccctggtcattgccagtactgattactccatgtaccaggcagaagagttccaggtgcttccctgcagatcctgcgcccccaaccaggtcaaagtggcagggaaaccaatgtacctgcacatcggggaggagatagacggcgtggacatgcgggcggaggttgggcttctgagccggaacatcatagtgatgggggagatggaggacaaatgctacccctacagaaaccacatctgcaatttctttgacttcgatacctttgggggccacatcaagtttgctctgggatttaaggcagcacacttggagggcacggagctgaagcatatgggacagcagctggtgggtcagtacccgattcacttccacctggccggtgatgtagacgaaaggggaggttatgacccacccacatacatcagggacctctccatccatcatacattctctcgctgcgtcacagtccatggctccaatggcttgttgatcaaggacgttgtgggctataactctttgggccactgcttcttcacggaagatgggccggaggaacgcaacacttttgaccactgtcttggcctccttgtcaagtctggaaccctcctcccctcggaccgtgacagcaagatgtgcaagatgatcacagaggactcctacccagggtacatccccaagcccaggcaagactgcaatgctgtgtccaccttctggatggccaatcccaacaacaacctcatcaactgtgccgctgcaggatctgaggaaactggattttggtttatttttcaccacgtaccaacgggcccctccgtgggaatgtactccccaggttattcagagcacattccactgggaaaattctataacaaccgagcacattccaactaccgggctggcatgatcatagacaacggagtcaaaaccaccgaggcctctgccaaggacaagcggccgttcctctcaatcatctctgccagatacagccctcaccaggacgccgacccgctgaagccccgggagccggccatcatcagacacttcattgcctacaagaaccaggaccacggggcctggctgcgcggcggggatgtgtggctggacagctgccggtttgctgacaatggcattggcctgaccctggccagtggtggaaccttcccgtatgacgacggctccaagcaagagataaagaacagcttgtttgttggcgagagtggcaacgtggggacggaaatgatggacaataggatctggggccctggcggcttggaccatagcggaaggaccctccctataggccagaattttccaattagaggaattcagttatatgatggccccatcaacatccaaaactgcactttccgaaagtttgtggccctggagggccggcacaccagcgccctggccttccgcctgaataatgcctggcagagctgcccccataacaacgtgaccggcattgcctttgaggacgttccgattacttccagagtgttcttcggagagcctgggccctggttcaaccagctggacatggatggggataagacatctgtgttccatgacgtcgacggctccgtgtccgagtaccctggctcctacctcacgaagaatgacaactggctggtccggcacccagactgcatcaatgttcccgactggagaggggccatttgcagtgggtgctatgcacagatgtacattcaagcctacaagaccagtaacctgcgaatgaagatcatcaagaatgacttccccagccaccctctttacctggagggggcgctcaccaggagcacccattaccagcaataccaaccggttgtcaccctgcagaagggctacaccatccactgggaccagacggcccccgccgaactcgccatctggctcatcaacttcaacaagggcgactggatccgagtggggctctgctacccgcgaggcaccacattctccatcctctcggatgttcacaatcgcctgctgaagcaaacgtccaagacgggcgtcttcgtgaggaccttgcagatggacaaagtggagcagagctaccctggcaggagccactactactgggacgaggactcagggctgttgttcctgaagctgaaagctcagaacgagagagagaagtttgctttctgctccatgaaaggctgtgagaggataaagattaaagctctgattccaaagaacgcaggcgtcagtgactgcacagccacagcttaccccaagttcaccgagagggctgtcgtagacgtgccgatgcccaagaagctctttggttctcagctgaaaacaaaggaccatttcttggaggtgaagatggagagttccaagcagcacttcttccacctctggaacgacttcgcttacattgaagtggatgggaagaagtaccccagttcggaggatggcatccaggtggtggtgattgacgggaaccaagggcgcgtggtgagccacacgagcttcaggaactccattctgcaaggcataccatggcagcttttcaactatgtggcgaccatccctgacaattccatagtgcttatggcatcaaagggaagatacgtctccagaggcccatggaccagagtgctggaaaagcttggggcagacaggggtctcaagttgaaagagcaaatggcattcgttggcttcaaaggcagcttccggcccatctgggtgacactggacactgaggatcacaaagccaaaatcttccaagttgtgcccatccctgtggtgaagaagaagaagttgtgaggacagctgccgcccggtgccacctcgtggtagactatgacggtgactcttggcagcagaccagtgggggatggctgggtcccccagcccctgccagcagctgcctgggaaggccgtgtttcagccctgatgggccaagggaaggctatcagagaccctggtgctgccacctgcccctactcaagtgtctacctggagcccctggggcggtgctggccaatgctggaaacattcactttcctgcagcctcttgggtgcttctctcctatctgtgcctcttcagtgggggtttggggaccatatcaggagacctgggttgtgctgacagcaaagatccactttggcaggagccctgacccagctaggaggtagtctggagggctggtcattcacagatccccatggtcttcagcagacaagtgagggtggtaaatgtaggagaaagagccttggccttaaggaaatctttactcctgtaagcaagagccaacctcacaggattaggagctggggtagaactggctatccttggggaagaggcaagccctgcctctggccgtgtccacctttcaggagactttgagtggcaggtttggacttggactagatgactctcaaaggcccttttagttctgagattccagaaatctgctgcatttcacatggtacctggaacccaacagttcatggatatccactgatatccatgatgctgggtgccccagcgcacacgggatggagaggtgagaactaatgcctagcttgaggggtctgcagtccagtagggcaggcagtcaggtccatgtgcactgcaatgccaggtggagaaatcacagagaggtaaaatggaggccagtgccatttcagaggggaggctcaggaaggcttcttgcttacaggaatgaaggctgggggcattttgctggggggagatgaggcagcctctggaatggctcagggattcagccctccctgccgctgcctgctgaagctggtgactacggggtcgccctttgctcacgtctctctggcccactcatgatggagaagtgtggtcagaggggagcaatgggctttgctgcttatgagcacagaggaattcagtccccaggcagccctgcctctgactccaagagggtgaagtccacagaagtgagctcctgccttagggcctcatttgctcttcatccagggaactgagcacagggggcctccaggagaccctagatgtgctcgtactccctcggcctgggatttcagagctggaaatatagaaaatatctagcccaaagccttcattttaacagatggggaaagtgagcccccaagatgggaaagaaccacacagctaagggagggcctggggagccccaccctagcccttgctgccacaccacattgcctcaacaaccggccccagagtgcccaggcactcctgaggtagcttctggaaatggggacaagtcccctcgaaggaaaggaaatgactagagtagaatgacagctagcagatctcttccctcctgctcccagcgcacacaaacccgccctccccttggtgttggcggtccctgtggccttcactttgttcactacctgtcagcccagcctgggtgcacagtagctgcaactccccattggtgctacctggctctcctgtctctgcagctctacaggtgaggcccagcagagggagtagggctcgccatgtttctggtgagccaatttggctgatcttgggtgtctgaacagctattgggtccaccccagtccctttcagctgctgcttaatgccctgctctctccctggcccaccttatagagagcccaaagagctcctgtaagagggagaactctatctgtggtttataatcttgcacgaggcaccagagtctccctgggtcttgtgatgaactacatttatcccctttcctgccccaaccacaaactctttccttcaaagagggcctgcctggctccctccacccaactgcacccatgagactcggtccaagagtccattccccaggtgggagccaactgtcagggaggtctttcccaccaaacatctttcagctgctgggaggtgaccatagggctctgcttttaaagatatggctgcttcaaaggccagagtcacaggaaggacttcttccagggagattagtggtgatggagaggagagttaaaatgacctcatgtccttcttgtccacggttttgttgagttttcactcttctaatgcaagggtctcacactgtgaaccacttaggatgtgatcactttcaggtggccaggaatgttgaatgtctttggctcagttcatttaaaaaagatatctatttgaaagttctcagagttgtacatatgtttcacagtacaggatctgtacataaaagtttctttcctaaaccattcaccaagagccaatatctaggcattttcttggtagcacaaattttcttattgcttagaaaattgtcctccttgttatttctgtttgtaagacttaagtgagttaggtctttaaggaaagcaacgctcctctgaaatgcttgtcttttttctgttgccgaaatagctggtcctttttcgggagttagatgtatagagtgtttgtatgtaaacatttcttgtaggcatcaccatgaacaaagatatattttctatttatttattatatgtgcacttcaagaagtcactgtcagagaaataaagaattgtcttaaatgtca

SEQ ID NO: 364023 - DNA, 2999 bp, Homo sapiens
tctccctctggtctaattggtttcttctcacacagttccatagtgcttatggcatcaaagggaagatacgtctccagaggcccatggaccagagtgctggaaaagcttggggcagacaggggtctcaagttgaaagagcaaatggcattcgttggcttcaaaggcagcttccggcccatctgggtgacactggacactgaggatcacaaagccaaaatcttccaagttgtgcccatccctgtggtgaagaagaagaagttgtgaggacagctgccgcccggtgccacctcgtggtagactatgacggtgactcttggcagcagaccagtgggggatggctgggtcccccagcccctgccagcagctgcctgggaaggccgtgtttcagccctgatgggccaagggaaggctatcagagaccctggtgctgccacctgcccctactcaagtgtctacctggagcccctggggcggtgctggccaatgctggaaacattcactttcctgcagcctcttgggtgcttctctcctatctgtgcctcttcagtgggggtttggggaccatatcaggagacctgggttgtgctgacagcaaagatccactttggcaggagccctgacccagctaggaggtagtctggagggctggtcattcacagatccccatggtcttcagcagacaagtgagggtggtaaatgtaggagaaagagccttggccttaaggaaatctttactcctgtaagcaagagccaacctcacaggattaggagctggggtagaactggctatccttggggaagaggcaagccctgcctctggccgtgtccacctttcaggagactttgagtggcaggtttggacttggactagatgactctcaaaggcccttttagttctgagattccagaaatctgctgcatttcacatggtacctggaacccaacagttcatggatatccactgatatccatgatgctgggtgccccagcgcacacgggatggagaggtgagaactaatgcctagcttgaggggtctgcagtccagtagggcaggcagtcaggtccatgtgcactgcaatgccaggtggagaaatcacagagaggtaaaatggaggccagtgccatttcagaggggaggctcaggaaggcttcttgcttacaggaatgaaggctgggggcattttgctggggggagatgaggcagcctctggaatggctcagggattcagccctccctgccgctgcctgctgaagctggtgactacggggtcgccctttgctcacgtctctctggcccactcatgatggagaagtgtggtcagaggggagcaatgggctttgctgcttatgagcacagaggaattcagtccccaggcagccctgcctctgactccaagagggtgaagtccacagaagtgagctcctgccttagggcctcatttgctcttcatccagggaactgagcacagggggcctccaggagaccctagatgtgctcgtactccctcggcctgggatttcagagctggaaatatagaaaatatctagcccaaagccttcattttaacagatggggaaagtgagcccccaagatgggaaagaaccacacagctaagggagggcctggggagccccaccctagcccttgctgccacaccacattgcctcaacaaccggccccagagtgcccaggcactcctgaggtagcttctggaaatggggacaagtcccctcgaaggaaaggaaatgactagagtagaatgacagctagcagatctcttccctcctgctcccagcgcacacaaacccgccctccccttggtgttggcggtccctgtggccttcactttgttcactacctgtcagcccagcctgggtgcacagtagctgcaactccccattggtgctacctggctctcctgtctctgcagctctacaggtgaggcccagcagagggagtagggctcgccatgtttctggtgagccaatttggctgatcttgggtgtctgaacagctattgggtccaccccagtccctttcagctgctgcttaatgccctgctctctccctggcccaccttatagagagcccaaagagctcctgtaagagggagaactctatctgtggtttataatcttgcacgaggcaccagagtctccctgggtcttgtgatgaactacatttatcccctttcctgccccaaccacaaactctttccttcaaagagggcctgcctggctccctccacccaactgcacccatgagactcggtccaagagtccattccccaggtgggagccaactgtcagggaggtctttcccaccaaacatctttcagctgctgggaggtgaccatagggctctgcttttaaagatatggctgcttcaaaggccagagtcacaggaaggacttcttccagggagattagtggtgatggagaggagagttaaaatgacctcatgtccttcttgtccacggttttgttgagttttcactcttctaatgcaagggtctcacactgtgaaccacttaggatgtgatcactttcaggtggccaggaatgttgaatgtctttggctcagttcatttaaaaaagatatctatttgaaagttctcagagttgtacatatgtttcacagtacaggatctgtacataaaagtttctttcctaaaccattcaccaagagccaatatctaggcattttcttggtagcacaaattttcttattgcttagaaaattgtcctccttgttatttctgtttgtaagacttaagtgagttaggtctttaaggaaagcaacgctcctctgaaatgcttgtcttttttctgttgccgaaatagctggtcctttttcgggagttagatgtatagagtgtttgtatgtaaacatttcttgtaggcatcaccatgaacaaagatatattttctatttatttattatatgtgcacttcaagaagtcactgtcagagaaataaagaattgtcttaaatgtca

SEQ ID NO: 364024 - DNA, 3453 bp, Homo sapiens
tgactggctatactttccttccttattaccccagtctggtccctttggtctctatgccaaagatgacagcagctgcagcccttgctctaaattgcatgtctttgaatgatagtcatggtcaggatgcagacacaccctggctctgggatgggccccagctggcagggatcatgccctccctggaggcctgctccctaaattctccacctggccttgtagctgctcaccagccagccctcatccactgagacctcactctgtgccaggccctgggctgaatgctggggacaagggggcaaaaaccagctccttgcccacccagagcccaccatgcggtgggaggaggcagacatttgaacaaaagacattaggcggcttccaccttagggcaagagtggatggggcttagaagtgttgtgatgtagttacataagtctgggttcaagttttagctctgccacctactggctttgtgatcctgggtaagtaactgaacctctctgaggatgagtttccttatctgtaaaactaacagcagcctcatagttttgctatgaagatgaaatgagataatataggtaaacatctagctttagtggttctcaaactttcttgcccattagaatcacctgggcaacttttcaaagtccagatgtccatgctgcaccccagacacaatcaaatctgaggctccgaggatggggactgggcatgagtattttttaaagactcctccccatgggatgcagaaccatgtttggactgttggccgctgttcatggtgctggtagtggtggtgcaaattgtaaaaagtggccagcccagatcctagaagagtggctacttattgtaaatgctccgtaaaatgttcacccagccataagcagtagatcactggtttcgatactgagtactgtaggacctcaggccaggcatttatctattccaagactttaggctgtctttctcataacaaaactgatgggggcaatcattgggataatcatctcgggccgttgtaaatagtgttgcagcagggacaattttagacttctgagtatatgtttagaacattaatcagcaccttccttctctataaaaaaaaaacgactttgctctgtaatttctgtgtcattcccaggccactacaatggatggagttaacctcagcaccgaggttgtctacaaaaaaggccaggattataggtttgcttgctacgaccggggcagagcctgccggagctaccgtgtacggttcctctgtgggaagcctggtaagcagccccttgtcggggacacagatgcaactatggctcggttccttgaactggcagctatgcaggcaacttccagacctctcagtgagacagtgctcccaaaggagagcacttttgtgacacgggagcagtgggaggatccttggagttggcaggagacagcagaaccccaccctgcccataagcctttcaggaaggggaagggcctggtccaaggcagtcaaggtacaaatggacagagctgccctcccctgcagagatgtgcagttctttgcctctttgggtgctattattttaaatccagtacctaaggtgcttgttagaagagattggaaatggtcgggttgttctcggaggcacttggccatctccagaaggcagtcattaggaatgaaagtttagggggagaagtttatggctaccgaaaataatagttgagaggaactatatttgttttacatcttgagcaaagtgggtggggtgaggcagccacatttaactccagctaagaagttagtggaaaattcccccgcccagagctaatgaatggctcttttctggtagggtttttgttgacttcaaaaacctttaccaagagtgggatggagcaagccagtgatctgggttttggataggcaaacctggcatttagttatttagggaggggaagggaaaaaagaggtagccaaaagtttgccaagagcaaagggctctatctcagtctttcctgttttgggttacagtgaggcccaaactcacagtcaccattgacaccaatgtgaacagcaccattctgaacttggaggataatgtacagtcatggaaacctggagataccctggtcattgccagtactgattactccatgtaccaggcagaagagttccaggtgcttccctgcagatcctgcgcccccaaccaggtcaaagtggcagggaaaccaatgtacctgcacatcggggaggagatagacggcgtggacatgcgggcggaggttgggcttctgagccggaacatcatagtgatgggggagatggaggacaaatgctacccctacagaaaccacatctgcaatttctttgacttcgatacctttgggggccacatcaagtttgctctgggatttaaggcagcacacttggagggcacggagctgaagcatatgggacagcagctggtgggtcagtacccgattcacttccacctggccggtgatgtagacgaaaggggaggttatgacccacccacatacatcagggacctctccatccatcatacattctctcgctgcgtcacagtccatggctccaatggcttgttgatcaaggacgttgtgggctataactctttgggccactgcttcttcacggaagatgggccggaggaacgcaacacttttgaccactgtcttggcctccttgtcaagtctggaaccctcctcccctcggaccgtgacagcaagatgtgcaagatgatcacagaggactcctacccagggtacatccccaagcccaggcaagactgcaatgctgtgtccaccttctggatggccaatcccaacaacaacctcatcaactgtgccgctgcaggatctgaggaaactggattttggtttatttttcaccacgtaccaacgggcccctccgtgggaatgtactccccaggttattcagagcacattccactgggaaaattctataacaaccgagcacattccaactaccgggctggcatgatcatagacaacggagtcaaaaccaccgaggcctctgccaaggacaagcggccgttcctctcaatcatctctgccagatacagccctcaccaggacgccgacccgctgaagccccgggagccggccatcatcagacacttcattgcctacaagaaccaggaccacggggcctggctgcgcggcggggatgtgtggctggacagctgccggtttgctgacaatggcattggcctgaccctggccagtggtggaaccttcccgtatgacgacggctccaagcaagagataaagaacagcttgtttgttggcgagagtggcaacgtggggacggaaatgatggacaataggatctggggccctggcgaggctaggacactggcgaggctaggacactggcgaggctaggacactggcgaggctaggacactggcgaggctagga

SEQ ID NO: 364025 - DNA, 357 bp, Homo sapiens
tgctcagaatagaattgccattctcattagctttttcttcaatgcatttgttccttatttctccaactacatgcaactcggtggtagacatggttccattctataaggccgctgggtctacctgctatgaccagctcagagtaaatgtctcggtgggtgggaggagaagagggaggtttgagtgtccaagcaaatgcccagcaatgctccttgtgtgcaggctgttgttcctgaagctgaaagctcagaacgagagagagaagtttgctttctgctccatgaaaggctgtgagaggataaagattaaagctctgattccaaagaacgcaggcgtcagtgactgcacagccacagctt

SEQ ID NO: 364026 - DNA, 401 bp, Homo sapiens
tagagatgggtgtcctggttatttcctttgttctccacctggtagctgcctgcactcacagcatgttgggaatggtgattataaatgtaaccatgctctcttcttgtaagtggagagcccaggtacctcttatccagcatgtgaccctctttctacctcaggatagtcatactcttaggctacctggatttattcagggccaaaggagtggtcaaggtcctttttgttttgccctattccctttggaaaacatttagtttatgcccatgttacagattgcaaaatacaggcacatattctcactaatgtggtctgcatgtccctttgcaaggatcacgaggtcaggagatggagaccatcctggctaacacagtgaaacacagtctctactaaaaaataca

SEQ ID NO: 364027 - DNA, 747 bp, Homo sapiens
tatcgtcgacccacgccgctcggagttggaaacatgcggctgtcggtcgctgcagcgatctcccatggccgcgtatttcgccgtatgggcctcggtcccgagtcccgcatccatctgttgcggaacttgctcacagggctggtgcggcacgaacgcatcgaggcaccatgggcgcgtgtggacgaaatgaggggctacgcggagaagctcatcgactatgggaagctgggagacactaacgaacgagccatgcgcatggctgacttctggctcacagagaaggatttgatcccaaagctgtttcaagtactggcccctcggtacaaagatcaaactgggggctacacaagaatgctgcagatcccaaatcggagtttggatcgggccaagatggcagtgatcgagtataaagggaattgcctcccacccctgcctctgcctcgcagagacagccaccttacactcctaaaccagctgctgcagggtttgcggcaggacctcaggcaaagccaggaagcaagcaaccacagctcccacacagctcaaacaccagggatttaactggatctgaagagtctgcagcccttaatcagtacccatgatcacaggcctttggagcacttttactctctgagaagaactggagctagagatgtaaaatggacagtcttgatggggttgagaaccttctggggagccagatgaccctctctttgcacaatagataaaagtctttatatgaatata

SEQ ID NO: 364028 - DNA, 758 bp, Homo sapiens
aacttaggcttaggtacgaggcctgggtggttgaagttggaaacatgcggctgtcggtcgctgcagcgatctcccatggccgcgtatttcgccgtatgggcctcggtcccgagtcccgcatccatctgttgcggaacttgctcacagggctggtgcggcacgaacgcatcgaggcaccatgggcgcgtgtggacgaaatgaggggctacgcggagaagctcatcgactatgggaagctgggagacactaacgaacgagccatgcgcatggctgacttctggctcacagagaaggatttgatcccaaagctgtttcaagtactggcccctcggtacaaagatcaaactgggggctacacaagaatgctgcagatcccaaatcggagtttggatcgggccaagatggcagtgatcgagtataaagggaattgcctcccacccctgcctctgcctcgcagagacagccaccttacactcctaaaccagctgctgcagggtttgcggcaggacctcaggcaaagccaggaagcaagcaaccacagctcccacacagctcaaacaccagggatttaactggatctgaagagtctgcagcccttaatcagtacccatgatcacaggcctttggagcacttttactctctgagaagaactggagctagagatgtaaaatggacagtcttgatggggttgagaaccttctggggagccagatgaccctctctttgcacaatagataaaagtctttatatgaatata

SEQ ID NO: 364029 - DNA, 994 bp, Homo sapiens
cagttccggcctccaaggggcgggcagaagttggaaacatgcggctgtcggtcgctgcagcgatctcccatggccgcgtatttcgccgtatgggcctcggtcccgagtcccgcatccatctgttgcggaacttgctcacagggctggtgcggcacgaacgcatcgaggcaccatgggcgcgtgtggacgaaatgaggggctacgcggagaagctcatcgactatgggaagctgggagacactaacgaacgagccatgcgcatggctgacttctggctcacagagaaggatttgatcccaaagctgtttcaagtactggcccctcggtacaaagatcaaactgggggctacacaagaatgctgcagatcccaaatcggagtttggatcgggccaagatggcagtgatcgagtataaagggaattgcctcccacccctgcctctgcctcgcagagacagccaccttacactcctaaaccagctgctgcagggtttgcggcaggacctcaggcaaagccaggaagcaagcaaccacagctcccacacagctcaaacaccagggatttaactggatctgaagagtctgcagcccttaatcagtacccatgatcacaggcctttggagcacttttactctctgagaagaactggagctagagatgtaaaatggacagtcttgatggggttgagaaccttctggggagccagatgaccctctctttgcacaatagataaaagtctttatatgaatatatataaatttatttattttttccttcctgtgggatttctggagaatgagaattatccaaatgctcagtctacctgagatagtaaattcatggcttatgcttctggtccttaaaaaaaaaaaaaaagggggggggtaaagaatctgaggggtcaagtatcggtccaggtcttggaaggggcccaggggggaataaacaggcgcggcgctaaaagcggggcaagcgcgggttgggaacacatggg

SEQ ID NO: 364030 - DNA, 3203 bp, Homo sapiens
aacttaggcttaggtacgaggcctgggtggttgaagttggaaacatgcggctgtcggtcgctgcagcgatctcccatggccgcgtatttcgccgtatgggcctcggtcccgagtcccgcatccatctgttgcggaacttgctcacagggctggtgcggcacgaacgcatcgaggcaccatgggcgcgtgtggacgaaatgaggggctacgcggagaaggtgaggagcgcggccctcttgtccactctgcgggtctggtctgagggggcggagccggctgcaagtggaaagggaccgggaccaacctggtaaaccattccccaagtctgagtcccccagaaccttgggctgaacccgcccctccatcgcctctaatggaagactggttagggctgcggagttaggggtggcgtagattggagatgcttggctagtggaaagaatggattgccttccggcattagagaaattagattggcaccttgttttcttgctcggttggatccgtgatgttatgtcctcacagctcatcgactatgggaagctgggagacactaacgaacgagccatgcgcatggctgacttctggctcacagagaaggatttgatcccaaagctgtttcaagtactggcccctcggtacaaagatcaaactgggggctacacaagaatgctgcagatcccaaatcggagtttggatcgggccaagatggcagtgatcgagtataaagggaattgcctcccacccctgcctctgcctcgcagagacagccaccttacactcctaaaccagctgctgcagggtttgcggcaggacctcaggcaaagccaggaagcaagcaaccacagctcccacacagctcaaacaccagggatttaactggatctgaagagtctgcagcccttaatcagtacccatgatcacaggcctttggagcacttttactctctgagaagaactggagctagagatgtaaaatggacagtcttgatggggttgagaaccttctggggagccagatgaccctctctttgcacaatagataaaagtctttatatgaatatatataaatttatttattttttccttcctgtgggatttctggagaatgagaattatccaaatgctcagtctacctgagatagtaaattcatggcttatgcttctggtccttaaatttgggttatttttggttagtgcaattttgtttttcttaatgccagtttacatgggaatgcatcctataattccaaatgttgccagaggtggttgtgttttgacatctggtctcctagagatgagtgcttgggatttcttagagaaagattacttcctgacaggggtaggggagtgacaatctgcaagtgaaacttccttaaacaatctagtaccctgcgaaccttcaggggatactgcaatcagtcctctgttttgaggcaggatcacacattaccttaatgtgttcccttcaaccccctgaatgggcctgggaggagaggacccaagaactcagatgttccaccagtttggccaaaggggtggagacattcagcagaggatgttgggctccaggataagctccttcctcttggtgaggggaaggggtaagaaagagggtctatgcgagagaaggattaggaaattaaacctcctaggaatttcctggaagtttttattgttgtcaaatctggcctctctgggaacccagaaaagggaaatccggcttcagaatgtgagaagctgggagcccctttcttggcacagccaggctgccgttcccttgggttcagaggctttagtagggtagtagttatggaaggacttagaaaggagccatcagtcttggtccaaacacttgatagcagtgcctgataattgccatatccccagtaaagtgggtagaagagattttatcttaggctctatcttctgagtgtatttggcccactgaacccatccactgtctgagataataagtaagagtaagggtaaagggatcactggtgtagcagacatggcttcagtgacagaacgaactattctggtgctaatttagctgtagctgccttagtctgatactcatctactcccaacagagctctttatctctttttctctactatggtttgttcttcacactatagccagaaagctcttatattttaaatgaaatatagtagacactcaaaacatttatgaaataaagctacaactctgcttctgctaaaaaatatacccctcttctgtcttagcatgaatatccaccctagctaggtatctaggagtcatacctaacttctagagaaaccactttccttaaaaccacatctttattttaaatagatggattgtggctgggctcctgtagcttttcctcttagaccccagaaatatatctccctttgggacttccaacagttccctacatgctttttgagcatctgctagttcccagcatcaatttaggcagaagggatacaatatccactgttcatctaatagagactagagataagaaacaacctgtaccatcaatgagctcacaataacaggccactgccactaccacagtggcctcaagggacactgcttcccctttaatgttttggtccaaataaaagtacatgaatcctaaaacatttgctaaaggctcagggataacacaaggaaagtaacagcatcaagaattttactgccgggtgcggtggctcacgcctgtaatccccacactttgggaggccaaggcaggcagatcataaggtcaggagatcaagaccatcctggctaacacggtgaaaccccgtctccactaaaaatacaaaaagttagctgggcgtggttgcgggcacctatagtcccagctactcaggaggctgaggcaggagaatggcgtgaacctgggaggcggagcttgcagtgagctgagattgtgccactgcactccagcctgggcaacagagcgagactctgtctcaaaaaaaaagaattttactaatctggcttataaataacttcttcaactagtggactgctccccccaagtccatctaggcacctctttaatgcgttccaaacccaagagcaccactctcaaaggttcccaccgtcttgggcgccgttctttacagtaaggtagacaaagtaatgatcactcctttctcaaaaggtaacaagtttaggctttacagttaatacactgtaag

SEQ ID NO: 364031 - DNA, 1943 bp, Homo sapiens
cagttccggcctccaaggggcgggcagaagttggaaacatgcggctgtcggtcgctgcagcgatctcccatggccgcgtatttcgccgtatgggcctcggtcccgagtcccgcatccatctgttgcggaacttgctcacagggctggtgcggcacgaacgcatcgaggcaccatgggcgcgtgtggacgaaatgaggggctacgcggagaagctcatcgactatgggaagctgggagacactaacgaacgagccatgcgcatggctgacttctggctcacagagaaggatttgatcccaaagctgtttcaagtactggcccctcggtacaaagatcaaactgggggctacacaagaatgctgcagatcccaaatcggagtttggatcgggccaagatggcagtgatcgagtataaagggaattgcctcccacccctgcctctgcctcgcagagacagccaccttacactcctaaaccagctgctgcagggtttgcggcaggacctcaggctgccgttcccttgggttcagaggctttagtagggtagtagttatggaaggacttagaaaggagccatcagtcttggtccaaacacttgatagcagtgcctgataattgccatatccccagtaaagtgggtagaagagattttatcttaggctctatcttctgagtgtatttggcccactgaacccatccactgtctgagataataagtaagagtaagggtaaagggatcactggtgtagcagacatggcttcagtgacagaacgaactattctggtgctaatttagctgtagctgccttagtctgatactcatctactcccaacagagctctttatctctttttctctactatggtttgttcttcacactatagccagaaagctcttatattttaaatgaaatatagtagacactcaaaacatttatgaaataaagctacaactctgcttctgctaaaaaatatacccctcttctgtcttagcatgaatatccaccctagctaggtatctaggagtcatacctaacttctagagaaaccactttccttaaaaccacatctttattttaaatagatggattgtggctgggctcctgtagcttttcctcttagaccccagaaatatatctccctttgggacttccaacagttccctacatgctttttgagcatctgctagttcccagcatcaatttaggcagaagggatacaatatccactgttcatctaatagagactagagataagaaacaacctgtaccatcaatgagctcacaataacaggccactgccactaccacagtggcctcaagggacactgcttcccctttaatgttttggtccaaataaaagtacatgaatcctaaaacatttgctaaaggctcagggataacacaaggaaagtaacagcatcaagaattttactgccgggtgcggtggctcacgcctgtaatccccacactttgggaggccaaggcaggcagatcataaggtcaggagatcaagaccatcctggctaacacggtgaaaccccgtctccactaaaaatacaaaaagttagctgggcgtggttgcgggcacctatagtcccagctactcaggaggctgaggcaggagaatggcgtgaacctgggaggcggagcttgcagtgagctgagattgtgccactgcactccagcctgggcaacagagcgagactctgtctcaaaaaaaaagaattttactaatctggcttataaataacttcttcaactagtggactgctccccccaagtccatctaggcacctctttaatgcgttccaaacccaagagcaccactctcaaaggttcccaccgtcttgggcgccgttctttacagtaaggtagacaaagtaatgatcactcctttctcaaaaggtaacaagtttaggctttacagttaatacactgtaag

SEQ ID NO: 364032 - DNA, 752 bp, Homo sapiens
cagttccggcctccaaggggcgggcagaagttggaaacatgcggctgtcggtcgctgcagcgatctcccatggccgcgtatttcgccgtatgggcctcggtcccgagtcccgcatccatctgttgcggaacttgctcacagggctggtgcggcacgaacgcatcgaggcaccatgggcgcgtgtggacgaaatgaggggctacgcggagaagctcatcgactatgggaagctgggagacactaacgaacgagccatgcgcatggctgacttctggctcacagagaaggatttgatcccaaagctgtttcaagtactggcccctcggtacaaagatcaaactgggggctacacaagaatgctgcagatcccaaatcggagtttggatcgggccaagatggcagtgatcgagtataaagggaattgcctcccacccctgcctctgcctcgcagagacagccaccttacactcctaaaccagctgctgcagggtttgcggcaggacctcaggcaaagccaggaagcaagcaaccacagctcccacacagctcaaacaccagggatttaactggatctgaagagtctgcagcccttaatcagtacccatgatcacaggcctttggagcacttttactctctgagaagaactggagctagagatgtaaaatggacagtcttgatggggttgagaaccttctggggagccagatgaccctctctttgcacaatagataaaagtctttatatgaatata

SEQ ID NO: 364033 - DNA, 2890 bp, Homo sapiens
cagttccggcctccaaggggcgggcagaagttggaaacatgcggctgtcggtcgctgcagcgatctcccatggccgcgtatttcgccgtatgggcctcggtcccgagtcccgcatccatctgttgcggaacttgctcacagggctggtgcggcacgaacgcatcgaggcaccatgggcgcgtgtggacgaaatgaggggctacgcggagaagctcatcgactatgggaagctgggagacactaacgaacgagccatgcgcatggctgacttctggctcacagagaaggatttgatcccaaagctgtttcaagtactggcccctcggtacaaagatcaaactgggggctacacaagaatgctgcagatcccaaatcggagtttggatcgggccaagatggcagtgatcgagtataaagggaattgcctcccacccctgcctctgcctcgcagagacagccaccttacactcctaaaccagctgctgcagggtttgcggcaggacctcaggcaaagccaggaagcaagcaaccacagctcccacacagctcaaacaccagggatttaactggatctgaagagtctgcagcccttaatcagtacccatgatcacaggcctttggagcacttttactctctgagaagaactggagctagagatgtaaaatggacagtcttgatggggttgagaaccttctggggagccagatgaccctctctttgcacaatagataaaagtctttatatgaatatatataaatttatttattttttccttcctgtgggatttctggagaatgagaattatccaaatgctcagtctacctgagatagtaaattcatggcttatgcttctggtccttaaatttgggttatttttggttagtgcaattttgtttttcttaatgccagtttacatgggaatgcatcctataattccaaatgttgccagaggtggttgtgttttgacatctggtctcctagagatgagtgcttgggatttcttagagaaagattacttcctgacaggggtaggggagtgacaatctgcaagtgaaacttccttaaacaatctagtaccctgcgaaccttcaggggatactgcaatcagtcctctgttttgaggcaggatcacacattaccttaatgtgttcccttcaaccccctgaatgggcctgggaggagaggacccaagaactcagatgttccaccagtttggccaaaggggtggagacattcagcagaggatgttgggctccaggataagctccttcctcttggtgaggggaaggggtaagaaagagggtctatgcgagagaaggattaggaaattaaacctcctaggaatttcctggaagtttttattgttgtcaaatctggcctctctgggaacccagaaaagggaaatccggcttcagaatgtgagaagctgggagcccctttcttggcacagccaggctgccgttcccttgggttcagaggctttagtagggtagtagttatggaaggacttagaaaggagccatcagtcttggtccaaacacttgatagcagtgcctgataattgccatatccccagtaaagtgggtagaagagattttatcttaggctctatcttctgagtgtatttggcccactgaacccatccactgtctgagataataagtaagagtaagggtaaagggatcactggtgtagcagacatggcttcagtgacagaacgaactattctggtgctaatttagctgtagctgccttagtctgatactcatctactcccaacagagctctttatctctttttctctactatggtttgttcttcacactatagccagaaagctcttatattttaaatgaaatatagtagacactcaaaacatttatgaaataaagctacaactctgcttctgctaaaaaatatacccctcttctgtcttagcatgaatatccaccctagctaggtatctaggagtcatacctaacttctagagaaaccactttccttaaaaccacatctttattttaaatagatggattgtggctgggctcctgtagcttttcctcttagaccccagaaatatatctccctttgggacttccaacagttccctacatgctttttgagcatctgctagttcccagcatcaatttaggcagaagggatacaatatccactgttcatctaatagagactagagataagaaacaacctgtaccatcaatgagctcacaataacaggccactgccactaccacagtggcctcaagggacactgcttcccctttaatgttttggtccaaataaaagtacatgaatcctaaaacatttgctaaaggctcagggataacacaaggaaagtaacagcatcaagaattttactgccgggtgcggtggctcacgcctgtaatccccacactttgggaggccaaggcaggcagatcataaggtcaggagatcaagaccatcctggctaacacggtgaaaccccgtctccactaaaaatacaaaaagttagctgggcgtggttgcgggcacctatagtcccagctactcaggaggctgaggcaggagaatggcgtgaacctgggaggcggagcttgcagtgagctgagattgtgccactgcactccagcctgggcaacagagcgagactctgtctcaaaaaaaaagaattttactaatctggcttataaataacttcttcaactagtggactgctccccccaagtccatctaggcacctctttaatgcgttccaaacccaagagcaccactctcaaaggttcccaccgtcttgggcgccgttctttacagtaaggtagacaaagtaatgatcactcctttctcaaaaggtaacaagtttaggctttacagttaatacactgtaag

SEQ ID NO: 364034 - DNA, 1913 bp, Homo sapiens
cagttccggcctccaaggggcgggcagaagttggaaacatgcggctgtcggtcgctgcagcgatctcccatggccgcgtatttcgccgtatgggcctcggtcccgagtcccgcatccatctgttgcggaacttgctcacagggctggtgcggcacgaacgcatcgaggcaccatgggcgcgtgtggacgaaatgaggggctacgcggagaagctcatcgactatgggaagctgggagacactaacgaacgagccatgcgcatggctgacttctggctcacagagaaggatttgatcccaaagctgtttcaagtactggcccctcggtacaaagatcaaactgggggctacacaagaatgctgcagatcccaaatcggagtttggatcgggccaagatggcagtgatcgagtataaagggaattgcctcccacccctgcctctgcctcgcagagacagccaccttacactcctaaaccagctgctgcagggtttgcggcaggacctcaggcaaagccaggaagcaagcaaccacagctcccacacagctcaaacaccagggatttaactggatctgaagagtctgcagcccttaatcagtacccatgatcacaggcctttggagcacttttactctctgagaagaactggagctagagatgtaaaatggacagtcttgatggggttgagaaccttctggggagccagatgaccctctctttgcacaatagataaaagtctttatatgaatatatataaatttatttattttttccttcctgtgggatttctggagaatgagaattatccaaatgctcagtctacctgagatagtaaattcatggcttatgcttctggtccttaaatttgggttatttttggttagtgcaattttgtttttcttaatgccagtttacatgggaatgcatcctataattccaaatgttgccagaggtggttgtgttttgacatctggtctcctagagatgagtgcttgggatttcttagagaaagattacttcctgacaggggtaggggagtgacaatctgcaagtgaaacttccttaaacaatctagtaccctgcgaaccttcaggggatactgcaatcagtcctctgttttgaggcaggatcacacattaccttaatgtgttcccttcaaccccctgaatgggcctgggaggagaggacccaagaactcagatgttccaccagtttggccaaaggggtggagacattcagcagaggatgttgggctccaggataagctccttcctcttggtgaggggaaggggtaagaaagagggtctatgcgagagaaggattaggaaattaaacctcctaggaatttcctggaagtttttattgttgtcaaatctggcctctctgggaacccagaaaagggaaatccggcttcagaatgtgagaagctgggagcccctttcttggcacagccaggctgccgttcccttgggttcagaggctttagtagggtagtagttatggaaggacttagaaaggagccatcagtcttggtccaaacacttgatagcagtgcctgataattgccatatccccagtaaagtgggtagaagagattttatcttaggctctatcttctgagtgtatttggcccactgaacccatccactgtctgagataataagtaagagtaagggtaaagggatcactggtgtagcagacatggcttcagtgacagaacgaactattctggtgctaatttagctgtagctgccttagtctgatactcatctactcccaacagagctctttatctctttttctctactatggtttgttcttcacactatagccagaaagctcttatattttaaatgaaatatagtagacactcaaaacatttatgaaataaagctacaactctgcttctgcta

SEQ ID NO: 364035 - DNA, 1065 bp, Homo sapiens
aacttaggcttaggtacgaggcctgggtggttgaagttggaaacatgcggctgtcggtcgctgcagcgatctcccatggccgcgtatttcgccgtatgggcctcggtcccgagtcccgcatccatctgttgcggaacttgctcacagggctggtgcggcacgaacgcatcgaggcaccatgggcgcgtgtggacgaaatgaggggctacgcggagaaggtgaggagcgcggccctcttgtccactctgcgggtctggtctgagggggcggagccggctgcaagtggaaagggaccgggaccaacctggtaaaccattccccaagtctgagtcccccagaaccttgggctgaacccgcccctccatcgcctctaatggaagactggttagggctgcggagttaggggtggcgtagattggagatgcttggctagtggaaagaatggattgccttccggcattagagaaattagattggcaccttgttttcttgctcggttggatccgtgatgttatgtcctcacagctcatcgactatgggaagctgggagacactaacgaacgagccatgcgcatggctgacttctggctcacagagaaggatttgatcccaaagctgtttcaagtactggcccctcggtacaaagatcaaactgggggctacacaagaatgctgcagatcccaaatcggagtttggatcgggccaagatggcagtgatcgagtataaagggaattgcctcccacccctgcctctgcctcgcagagacagccaccttacactcctaaaccagctgctgcagggtttgcggcaggacctcaggcaaagccaggaagcaagcaaccacagctcccacacagctcaaacaccagggatttaactggatctgaagagtctgcagcccttaatcagtacccatgatcacaggcctttggagcacttttactctctgagaagaactggagctagagatgtaaaatggacagtcttgatggggttgagaaccttctggggagccagatgaccctctctttgcacaatagataaaagtctttatatgaatata

SEQ ID NO: 364036 - DNA, 2827 bp, Homo sapiens
aacttaggcttaggtacgaggcctgggtggttgaagttggaaacatgcggctgtcggtcgctgcagcgatctcccatggccgcgtatttcgccgtatgggcctcggtcccgagtcccgcatccatctgttgcggaacttgctcacagggctggtgcggcacgaacgcatcgaggcaccatgggcgcgtgtggacgaaatgaggggctacgcggagaaggagaaggatttgatcccaaagctgtttcaagtactggcccctcggtacaaagatcaaactgggggctacacaagaatgctgcagatcccaaatcggagtttggatcgggccaagatggcagtgatcgagtataaagggaattgcctcccacccctgcctctgcctcgcagagacagccaccttacactcctaaaccagctgctgcagggtttgcggcaggacctcaggcaaagccaggaagcaagcaaccacagctcccacacagctcaaacaccagggatttaactggatctgaagagtctgcagcccttaatcagtacccatgatcacaggcctttggagcacttttactctctgagaagaactggagctagagatgtaaaatggacagtcttgatggggttgagaaccttctggggagccagatgaccctctctttgcacaatagataaaagtctttatatgaatatatataaatttatttattttttccttcctgtgggatttctggagaatgagaattatccaaatgctcagtctacctgagatagtaaattcatggcttatgcttctggtccttaaatttgggttatttttggttagtgcaattttgtttttcttaatgccagtttacatgggaatgcatcctataattccaaatgttgccagaggtggttgtgttttgacatctggtctcctagagatgagtgcttgggatttcttagagaaagattacttcctgacaggggtaggggagtgacaatctgcaagtgaaacttccttaaacaatctagtaccctgcgaaccttcaggggatactgcaatcagtcctctgttttgaggcaggatcacacattaccttaatgtgttcccttcaaccccctgaatgggcctgggaggagaggacccaagaactcagatgttccaccagtttggccaaaggggtggagacattcagcagaggatgttgggctccaggataagctccttcctcttggtgaggggaaggggtaagaaagagggtctatgcgagagaaggattaggaaattaaacctcctaggaatttcctggaagtttttattgttgtcaaatctggcctctctgggaacccagaaaagggaaatccggcttcagaatgtgagaagctgggagcccctttcttggcacagccaggctgccgttcccttgggttcagaggctttagtagggtagtagttatggaaggacttagaaaggagccatcagtcttggtccaaacacttgatagcagtgcctgataattgccatatccccagtaaagtgggtagaagagattttatcttaggctctatcttctgagtgtatttggcccactgaacccatccactgtctgagataataagtaagagtaagggtaaagggatcactggtgtagcagacatggcttcagtgacagaacgaactattctggtgctaatttagctgtagctgccttagtctgatactcatctactcccaacagagctctttatctctttttctctactatggtttgttcttcacactatagccagaaagctcttatattttaaatgaaatatagtagacactcaaaacatttatgaaataaagctacaactctgcttctgctaaaaaatatacccctcttctgtcttagcatgaatatccaccctagctaggtatctaggagtcatacctaacttctagagaaaccactttccttaaaaccacatctttattttaaatagatggattgtggctgggctcctgtagcttttcctcttagaccccagaaatatatctccctttgggacttccaacagttccctacatgctttttgagcatctgctagttcccagcatcaatttaggcagaagggatacaatatccactgttcatctaatagagactagagataagaaacaacctgtaccatcaatgagctcacaataacaggccactgccactaccacagtggcctcaagggacactgcttcccctttaatgttttggtccaaataaaagtacatgaatcctaaaacatttgctaaaggctcagggataacacaaggaaagtaacagcatcaagaattttactgccgggtgcggtggctcacgcctgtaatccccacactttgggaggccaaggcaggcagatcataaggtcaggagatcaagaccatcctggctaacacggtgaaaccccgtctccactaaaaatacaaaaagttagctgggcgtggttgcgggcacctatagtcccagctactcaggaggctgaggcaggagaatggcgtgaacctgggaggcggagcttgcagtgagctgagattgtgccactgcactccagcctgggcaacagagcgagactctgtctcaaaaaaaaagaattttactaatctggcttataaataacttcttcaactagtggactgctccccccaagtccatctaggcacctctttaatgcgttccaaacccaagagcaccactctcaaaggttcccaccgtcttgggcgccgttctttacagtaaggtagacaaagtaatgatcactcctttctcaaaaggtaacaagtttaggctttacagttaatacactgtaag

SEQ ID NO: 364037 - DNA, 899 bp, Homo sapiens
gttggaaacatgcggctgtcggtcgctgcagcgatctcccatggccgcgtatttcgccgtatgggcctcggtcccgagtcccgcatccatctgttgcggaacttgctcacagggctggtgcggcacgaacgcatcgaggcaccatgggcgcgtgtggacgaaatgaggggctacgcggagaaggtgaggagcgcggccctcttgtccactctgcgggtctggtctgagggggcggagccggctgcaagtggaaagggaccgggaccaacctggtaaaccattccccaagtctgagtcccccagaaccttgggctgaacccgcccctccatcgcctctaatggaagactggttagggctgcggagttaggggtggcgtagattggagatgcttggctagtggaaagaatggattgccttccggcattagagaaattagattggcaccttgttttcttgctcggttggatccgtgatgttatgtcctcacagctcatcgactatgggaagctgggagacactaacgaacgagccatgcgcatggctgacttctggctcacagtgagtgcgacctatctgccttcaaaatcccaccctttgctccctgggggtgggggttggaaaaaggagaactatgcagaattaaacttgggtactcacttatgggccagtgctgctaactaaattagaaactgtgtcttaagttagttgaagtcgatgtgaatatacctctgcacaactgcctataaacgacccctttgtgtaacactgactatgccagattggcgaggggagggggaggtctttctatgtgtggatggaccttacctttgggaatggtgtaaagttaaatgcctctgcagttttgcctgactctgctgtctcttggataattctccct

SEQ ID NO: 364038 - DNA, 2456 bp, Homo sapiens
  misc_feature (2450)..(2450): n is a, c, g, or t
  misc_feature (2452)..(2452): n is a, c, g, or t
  misc_feature (2456)..(2456): n is a, c, g, or t
tgggccgggagggtctcccggggcggggcggaggaggagggaatgcaaaacagagcctcgtccccggaacccaagaagcagcaacgcccctcactataaattcggagctgcctcctcgccaatgattccagcgcctgacagccaggaccccaggcagcagcgagtgacaggacgtctggaccggcgcgccgctagcagctctgccgggccgcggcggtgatcgatggggagcggctggagcggacccagcgagtgagggcgcacagccgggacgccgaggcggcgggcgggagacccgcaccagcgcagccggccctcggcgggacgtgacgcagcgcccggggcgcgggtttgatatttgacaaattgatctaaaatggctgggtttttatctgaataactcactgatgccatcccagaaagtcggcaccagggtgtatttgatatagtgtttgcaacaaattcgacccaggtgatcaaaatgattctcaactcttctactgaagatggtattaaaagaatccaagatgattgtcccaaagctggaaggcataattacatatttgtcatgattcctactttatacagtatcatctttgtggtgggaatatttggaaacagcttggtggtgatagtcatttacttttatatgaagctgaagactgtggccagtgtttttcttttgaatttagcactggctgacttatgctttttactgactttgccactatgggctgtctacacagctatggaataccgctggccctttggcaattacctatgtaagattgcttcagccagcgtcagtttcaacctgtacgctagtgtgtttctactcacgtgtctcagcattgatcgatacctggctattgttcacccaatgaagtcccgccttcgacgcacaatgcttgtagccaaagtcacctgcatcatcatttggctgctggcaggcttggccagtttgccagctataatccatcgaaatgtatttttcattgagaacaccaatattacagtttgtgctttccattatgagtcccaaaattcaacccttccgatagggctgggcctgaccaaaaatatactgggtttcctgtttccttttctgatcattcttacaagttatactcttatttggaaggccctaaagaaggcttatgaaattcagaagaacaaaccaagaaatgatgatatttttaagataattatggcaattgtgcttttctttttcttttcctggattccccaccaaatattcacttttctggatgtattgattcaactaggcatcatacgtgactgtagaattgcagatattgtggacacggccatgcctatcaccatttgtatagcttattttaacaattgcctgaatcctcttttttatggctttctggggaaaaaatttaaaagatattttctccagcttctaaaatatattcccccaaaagccaaatcccactcaaacctttcaacaaaaatgagcacgctttcctaccgcccctcagataatgtaagctcatccaccaagaagcctgcaccatgttttgaggttgagtgacatgttcgaaacctgtccataaagtaattttgtgaaagaaggagcaagagaacattcctctgcagcacttcactaccaaatgagcattagctacttttcagaattgaaggagaaaatgcattatgtggactgaaccgacttttctaaagctctgaacaaaagcttttctttccttttgcaacaagacaaagcaaagccacattttgcattagacagatgacggctgctcgaagaacaatgtcagaaactcgatgaatgtgttgatttgagaaattttactgacagaaatgcaatctccctagcctgcttttgtcctgttattttttatttccacataaaggtatttagaatatattaaatcgttagaggagcaacaggagatgagagttccagattgttctgtccagtttccaaagggcagtaaagttttcgtgccggttttcagctattagcaactgtgctacacttgcacctggtactgcacattttgtacaaagatatgctaagcagtagtcgtcaagttgcagatctttttgtgaaattcaacctgtgtcttataggtttacactgccaaaacaatgcccgtaagatggcttatttgtataatggtgttactaaagtcacatataaaagttaaactacttgtaaaggtgctgcactggtcccaagtagtagtgtcctcctagtatattagtttgatttaatatctgagaagtgtatatagtttgtggtaaaaagattatatatcataaagtatgccttcctgtttaaaaaaagtatatattctacacatatatatatatgtatatctatatctctaaactgctgttaattgattaaaatctggcaaagttatatttactttaaaataaaataattttattgcaangnattn

SEQ ID NO: 364039 - DNA, 2448 bp, Homo sapiens
  misc_feature (2442)..(2442): n is a, c, g, or t
  misc_feature (2444)..(2444): n is a, c, g, or t
  misc_feature (2448)..(2448): n is a, c, g, or t
aaaggaacaataatgaggacatgcaaccaaaaacttacatagggagaacaactttacttactcagggaaggcaaagagaccacttaagaactccttcacatgtgttatgtcttaaaagctgactactggagttgtatcccttgcacagcatccccttgcaccaaagtgaacactactctaagaacatgtgttcagctctcctgaatgccaagcacaaccatgcttggcatggcagtggtgtcttatttctgctcctctttttccccagggcatgccattgcaagagaatgctcagccatgttcatctggggacctgctcctggtagagcaataggatctgtgtgcccagcaccactgcccacctagctgtcctggcctgtgcccaatgctgaccttcacctcagagtgtggctgtaccacattcgggtgtatttgatatagtgtttgcaacaaattcgacccaggtgatcaaaatgattctcaactcttctactgaagatggtattaaaagaatccaagatgattgtcccaaagctggaaggcataattacatatttgtcatgattcctactttatacagtatcatctttgtggtgggaatatttggaaacagcttggtggtgatagtcatttacttttatatgaagctgaagactgtggccagtgtttttcttttgaatttagcactggctgacttatgctttttactgactttgccactatgggctgtctacacagctatggaataccgctggccctttggcaattacctatgtaagattgcttcagccagcgtcagtttcaacctgtacgctagtgtgtttctactcacgtgtctcagcattgatcgatacctggctattgttcacccaatgaagtcccgccttcgacgcacaatgcttgtagccaaagtcacctgcatcatcatttggctgctggcaggcttggccagtttgccagctataatccatcgaaatgtatttttcattgagaacaccaatattacagtttgtgctttccattatgagtcccaaaattcaacccttccgatagggctgggcctgaccaaaaatatactgggtttcctgtttccttttctgatcattcttacaagttatactcttatttggaaggccctaaagaaggcttatgaaattcagaagaacaaaccaagaaatgatgatatttttaagataattatggcaattgtgcttttctttttcttttcctggattccccaccaaatattcacttttctggatgtattgattcaactaggcatcatacgtgactgtagaattgcagatattgtggacacggccatgcctatcaccatttgtatagcttattttaacaattgcctgaatcctcttttttatggctttctggggaaaaaatttaaaagatattttctccagcttctaaaatatattcccccaaaagccaaatcccactcaaacctttcaacaaaaatgagcacgctttcctaccgcccctcagataatgtaagctcatccaccaagaagcctgcaccatgttttgaggttgagtgacatgttcgaaacctgtccataaagtaattttgtgaaagaaggagcaagagaacattcctctgcagcacttcactaccaaatgagcattagctacttttcagaattgaaggagaaaatgcattatgtggactgaaccgacttttctaaagctctgaacaaaagcttttctttccttttgcaacaagacaaagcaaagccacattttgcattagacagatgacggctgctcgaagaacaatgtcagaaactcgatgaatgtgttgatttgagaaattttactgacagaaatgcaatctccctagcctgcttttgtcctgttattttttatttccacataaaggtatttagaatatattaaatcgttagaggagcaacaggagatgagagttccagattgttctgtccagtttccaaagggcagtaaagttttcgtgccggttttcagctattagcaactgtgctacacttgcacctggtactgcacattttgtacaaagatatgctaagcagtagtcgtcaagttgcagatctttttgtgaaattcaacctgtgtcttataggtttacactgccaaaacaatgcccgtaagatggcttatttgtataatggtgttactaaagtcacatataaaagttaaactacttgtaaaggtgctgcactggtcccaagtagtagtgtcctcctagtatattagtttgatttaatatctgagaagtgtatatagtttgtggtaaaaagattatatatcataaagtatgccttcctgtttaaaaaaagtatatattctacacatatatatatatgtatatctatatctctaaactgctgttaattgattaaaatctggcaaagttatatttactttaaaataaaataattttattgcaangnattn

SEQ ID NO: 364040 - DNA, 2430 bp, Homo sapiens
  misc_feature (2424)..(2424): n is a, c, g, or t
  misc_feature (2426)..(2426): n is a, c, g, or t
  misc_feature (2430)..(2430): n is a, c, g, or t
tgggccgggagggtctcccggggcggggcggaggaggagggaatgcaaaacagagcctcgtccccggaacccaagaagcagcaacgcccctcactataaattcggagctgcctcctcgccaatgattccagcgcctgacagccaggaccccaggcagcagcgagtgacaggacgtctggaccggcgcgccgctagcagctctgccgggccgcggcggtgatcgatggggagcggctggagcggacccagcgagtgagggcgcacagccgggacgccgaggcggcgggcgggagacccgcaccagcgcagccggccctcggcgggacgtgacgcagcgcccggggcgcggatgaagaaaatgaatcacaagtcaactgacagtccaaaggctccacagctcagaggagggtgtatttgatatagtgtttgcaacaaattcgacccaggtgatcaaaatgattctcaactcttctactgaagatggtattaaaagaatccaagatgattgtcccaaagctggaaggcataattacatatttgtcatgattcctactttatacagtatcatctttgtggtgggaatatttggaaacagcttggtggtgatagtcatttacttttatatgaagctgaagactgtggccagtgtttttcttttgaatttagcactggctgacttatgctttttactgactttgccactatgggctgtctacacagctatggaataccgctggccctttggcaattacctatgtaagattgcttcagccagcgtcagtttcaacctgtacgctagtgtgtttctactcacgtgtctcagcattgatcgatacctggctattgttcacccaatgaagtcccgccttcgacgcacaatgcttgtagccaaagtcacctgcatcatcatttggctgctggcaggcttggccagtttgccagctataatccatcgaaatgtatttttcattgagaacaccaatattacagtttgtgctttccattatgagtcccaaaattcaacccttccgatagggctgggcctgaccaaaaatatactgggtttcctgtttccttttctgatcattcttacaagttatactcttatttggaaggccctaaagaaggcttatgaaattcagaagaacaaaccaagaaatgatgatatttttaagataattatggcaattgtgcttttctttttcttttcctggattccccaccaaatattcacttttctggatgtattgattcaactaggcatcatacgtgactgtagaattgcagatattgtggacacggccatgcctatcaccatttgtatagcttattttaacaattgcctgaatcctcttttttatggctttctggggaaaaaatttaaaagatattttctccagcttctaaaatatattcccccaaaagccaaatcccactcaaacctttcaacaaaaatgagcacgctttcctaccgcccctcagataatgtaagctcatccaccaagaagcctgcaccatgttttgaggttgagtgacatgttcgaaacctgtccataaagtaattttgtgaaagaaggagcaagagaacattcctctgcagcacttcactaccaaatgagcattagctacttttcagaattgaaggagaaaatgcattatgtggactgaaccgacttttctaaagctctgaacaaaagcttttctttccttttgcaacaagacaaagcaaagccacattttgcattagacagatgacggctgctcgaagaacaatgtcagaaactcgatgaatgtgttgatttgagaaattttactgacagaaatgcaatctccctagcctgcttttgtcctgttattttttatttccacataaaggtatttagaatatattaaatcgttagaggagcaacaggagatgagagttccagattgttctgtccagtttccaaagggcagtaaagttttcgtgccggttttcagctattagcaactgtgctacacttgcacctggtactgcacattttgtacaaagatatgctaagcagtagtcgtcaagttgcagatctttttgtgaaattcaacctgtgtcttataggtttacactgccaaaacaatgcccgtaagatggcttatttgtataatggtgttactaaagtcacatataaaagttaaactacttgtaaaggtgctgcactggtcccaagtagtagtgtcctcctagtatattagtttgatttaatatctgagaagtgtatatagtttgtggtaaaaagattatatatcataaagtatgccttcctgtttaaaaaaagtatatattctacacatatatatatatgtatatctatatctctaaactgctgttaattgattaaaatctggcaaagttatatttactttaaaataaaataattttattgcaangnattn

SEQ ID NO: 364041 - DNA, 204 bp, Homo sapiens
  misc_feature (198)..(198): n is a, c, g, or t
  misc_feature (200)..(200): n is a, c, g, or t
  misc_feature (204)..(204): n is a, c, g, or t
tcttcctgtatattagtttgattaatatctgagaagtgtattagtctaccacacctctcctacatcagtcgccccccctccccaagtacattttcccatcatatatatatatgtatatctatatctctaaactgctgttaattgattaaaatctggcaaagttatatttactttaaaataaaataattttattgcaangnattn

SEQ ID NO: 364042 - DNA, 2402 bp, Homo sapiens
  misc_feature (2396)..(2396): n is a, c, g, or t
  misc_feature (2398)..(2398): n is a, c, g, or t
  misc_feature (2402)..(2402): n is a, c, g, or t
tgggccgggagggtctcccggggcggggcggaggaggagggaatgcaaaacagagcctcgtccccggaacccaagaagcagcaacgcccctcactataaattcggagctgcctcctcgccaatgattccagcgcctgacagccaggaccccaggcagcagcgagtgacaggacgtctggaccggcgcgccgctagcagctctgccgggccgcggcggtgatcgatggggagcggctggagcggacccagcgagtgagggcgcacagccgggacgccgaggcggcgggcgggagacccgcaccagcgcagccggccctcggcgggacgtgacgcagcgcccggggcgcgggtttgatatttgacaaattgatctaaaatggctgggtttttatctgaataactcactgatgccatcccagaaagtcggcaccagggtgtatttgatatagtgtttgcaacaaattcgacccaggtgatcaaaatgattctcaactcttctactgaagatggtattatgattcctactttatacagtatcatctttgtggtgggaatatttggaaacagcttggtggtgatagtcatttacttttatatgaagctgaagactgtggccagtgtttttcttttgaatttagcactggctgacttatgctttttactgactttgccactatgggctgtctacacagctatggaataccgctggccctttggcaattacctatgtaagattgcttcagccagcgtcagtttcaacctgtacgctagtgtgtttctactcacgtgtctcagcattgatcgatacctggctattgttcacccaatgaagtcccgccttcgacgcacaatgcttgtagccaaagtcacctgcatcatcatttggctgctggcaggcttggccagtttgccagctataatccatcgaaatgtatttttcattgagaacaccaatattacagtttgtgctttccattatgagtcccaaaattcaacccttccgatagggctgggcctgaccaaaaatatactgggtttcctgtttccttttctgatcattcttacaagttatactcttatttggaaggccctaaagaaggcttatgaaattcagaagaacaaaccaagaaatgatgatatttttaagataattatggcaattgtgcttttctttttcttttcctggattccccaccaaatattcacttttctggatgtattgattcaactaggcatcatacgtgactgtagaattgcagatattgtggacacggccatgcctatcaccatttgtatagcttattttaacaattgcctgaatcctcttttttatggctttctggggaaaaaatttaaaagatattttctccagcttctaaaatatattcccccaaaagccaaatcccactcaaacctttcaacaaaaatgagcacgctttcctaccgcccctcagataatgtaagctcatccaccaagaagcctgcaccatgttttgaggttgagtgacatgttcgaaacctgtccataaagtaattttgtgaaagaaggagcaagagaacattcctctgcagcacttcactaccaaatgagcattagctacttttcagaattgaaggagaaaatgcattatgtggactgaaccgacttttctaaagctctgaacaaaagcttttctttccttttgcaacaagacaaagcaaagccacattttgcattagacagatgacggctgctcgaagaacaatgtcagaaactcgatgaatgtgttgatttgagaaattttactgacagaaatgcaatctccctagcctgcttttgtcctgttattttttatttccacataaaggtatttagaatatattaaatcgttagaggagcaacaggagatgagagttccagattgttctgtccagtttccaaagggcagtaaagttttcgtgccggttttcagctattagcaactgtgctacacttgcacctggtactgcacattttgtacaaagatatgctaagcagtagtcgtcaagttgcagatctttttgtgaaattcaacctgtgtcttataggtttacactgccaaaacaatgcccgtaagatggcttatttgtataatggtgttactaaagtcacatataaaagttaaactacttgtaaaggtgctgcactggtcccaagtagtagtgtcctcctagtatattagtttgatttaatatctgagaagtgtatatagtttgtggtaaaaagattatatatcataaagtatgccttcctgtttaaaaaaagtatatattctacacatatatatatatgtatatctatatctctaaactgctgttaattgattaaaatctggcaaagttatatttactttaaaataaaataattttattgcaangnattn

SEQ ID NO: 364043 - DNA, 651 bp, Homo sapiens
ctttagtttcttccacttctagcaccacgtgtagtttcccaatttctcttacccaaatttgctcgcagggaaaaaaataaattaaattagccatttacaccacagtgtgaacttaataacaccaacaaaagttccaaagctctagggtctcatagcacctccagatccatgatctcattcggtgtttccaacaatgttttgcaccaaactggacacatgcttgctacttcatcatcctcatcgtgaacattattattattatcatcattttccagatgaagaaaatgaatcacaagtcaactgacagtccaaaggctccacagctcagaggaggtaaatcatgtgcttaattcagaacttttggctcccatcactatgctcttcccactgtcttaactctggttgtcacctgagccattgtgtttcttctcaggtagatcttagttcttcctgagaaggtatgaaggtgggtattccaccctacctgaattataggaatttcagatatctgtgagcagctgcaaaggggattttactagatgacatcctgctgggcacactttacgccagtcctgaatgtgtaatagaaatctgcagtttaatgagtaagtttctcatattcagtttttgatgcttcataaatgttaaatg

SEQ ID NO: 364044 - DNA, 2372 bp, Homo sapiens
  misc_feature (2366)..(2366): n is a, c, g, or t
  misc_feature (2368)..(2368): n is a, c, g, or t
  misc_feature (2372)..(2372): n is a, c, g, or t
tgggccgggagggtctcccggggcggggcggaggaggagggaatgcaaaacagagcctcgtccccggaacccaagaagcagcaacgcccctcactataaattcggagctgcctcctcgccaatgattccagcgcctgacagccaggaccccaggcagcagcgagtgacaggacgtctggaccggcgcgccgctagcagctctgccgggccgcggcggtgatcgatggggagcggctggagcggacccagcgagtgagggcgcacagccgggacgccgaggcggcgggcgggagacccgcaccagcgcagccggccctcggcgggacgtgacgcagcgcccggggcgcggggtgtatttgatatagtgtttgcaacaaattcgacccaggtgatcaaaatgattctcaactcttctactgaagatggtattaaaagaatccaagatgattgtcccaaagctggaaggcataattacatatttgtcatgattcctactttatacagtatcatctttgtggtgggaatatttggaaacagcttggtggtgatagtcatttacttttatatgaagctgaagactgtggccagtgtttttcttttgaatttagcactggctgacttatgctttttactgactttgccactatgggctgtctacacagctatggaataccgctggccctttggcaattacctatgtaagattgcttcagccagcgtcagtttcaacctgtacgctagtgtgtttctactcacgtgtctcagcattgatcgatacctggctattgttcacccaatgaagtcccgccttcgacgcacaatgcttgtagccaaagtcacctgcatcatcatttggctgctggcaggcttggccagtttgccagctataatccatcgaaatgtatttttcattgagaacaccaatattacagtttgtgctttccattatgagtcccaaaattcaacccttccgatagggctgggcctgaccaaaaatatactgggtttcctgtttccttttctgatcattcttacaagttatactcttatttggaaggccctaaagaaggcttatgaaattcagaagaacaaaccaagaaatgatgatatttttaagataattatggcaattgtgcttttctttttcttttcctggattccccaccaaatattcacttttctggatgtattgattcaactaggcatcatacgtgactgtagaattgcagatattgtggacacggccatgcctatcaccatttgtatagcttattttaacaattgcctgaatcctcttttttatggctttctggggaaaaaatttaaaagatattttctccagcttctaaaatatattcccccaaaagccaaatcccactcaaacctttcaacaaaaatgagcacgctttcctaccgcccctcagataatgtaagctcatccaccaagaagcctgcaccatgttttgaggttgagtgacatgttcgaaacctgtccataaagtaattttgtgaaagaaggagcaagagaacattcctctgcagcacttcactaccaaatgagcattagctacttttcagaattgaaggagaaaatgcattatgtggactgaaccgacttttctaaagctctgaacaaaagcttttctttccttttgcaacaagacaaagcaaagccacattttgcattagacagatgacggctgctcgaagaacaatgtcagaaactcgatgaatgtgttgatttgagaaattttactgacagaaatgcaatctccctagcctgcttttgtcctgttattttttatttccacataaaggtatttagaatatattaaatcgttagaggagcaacaggagatgagagttccagattgttctgtccagtttccaaagggcagtaaagttttcgtgccggttttcagctattagcaactgtgctacacttgcacctggtactgcacattttgtacaaagatatgctaagcagtagtcgtcaagttgcagatctttttgtgaaattcaacctgtgtcttataggtttacactgccaaaacaatgcccgtaagatggcttatttgtataatggtgttactaaagtcacatataaaagttaaactacttgtaaaggtgctgcactggtcccaagtagtagtgtcctcctagtatattagtttgatttaatatctgagaagtgtatatagtttgtggtaaaaagattatatatcataaagtatgccttcctgtttaaaaaaagtatatattctacacatatatatatatgtatatctatatctctaaactgctgttaattgattaaaatctggcaaagttatatttactttaaaataaaataattttattgcaangnattn

SEQ ID NO: 364045 - DNA, 2514 bp, Homo sapiens
  misc_feature (2508)..(2508): n is a, c, g, or t
  misc_feature (2510)..(2510): n is a, c, g, or t
  misc_feature (2514)..(2514): n is a, c, g, or t
tgggccgggagggtctcccggggcggggcggaggaggagggaatgcaaaacagagcctcgtccccggaacccaagaagcagcaacgcccctcactataaattcggagctgcctcctcgccaatgattccagcgcctgacagccaggaccccaggcagcagcgagtgacaggacgtctggaccggcgcgccgctagcagctctgccgggccgcggcggtgatcgatggggagcggctggagcggacccagcgagtgagggcgcacagccgggacgccgaggcggcgggcgggagacccgcaccagcgcagccggccctcggcgggacgtgacgcagcgcccggggcgcgggtttgatatttgacaaattgatctaaaatggctgggtttttatctgaataactcactgatgccatcccagaaagtcggcaccagatgaagaaaatgaatcacaagtcaactgacagtccaaaggctccacagctcagaggagggtgtatttgatatagtgtttgcaacaaattcgacccaggtgatcaaaatgattctcaactcttctactgaagatggtattaaaagaatccaagatgattgtcccaaagctggaaggcataattacatatttgtcatgattcctactttatacagtatcatctttgtggtgggaatatttggaaacagcttggtggtgatagtcatttacttttatatgaagctgaagactgtggccagtgtttttcttttgaatttagcactggctgacttatgctttttactgactttgccactatgggctgtctacacagctatggaataccgctggccctttggcaattacctatgtaagattgcttcagccagcgtcagtttcaacctgtacgctagtgtgtttctactcacgtgtctcagcattgatcgatacctggctattgttcacccaatgaagtcccgccttcgacgcacaatgcttgtagccaaagtcacctgcatcatcatttggctgctggcaggcttggccagtttgccagctataatccatcgaaatgtatttttcattgagaacaccaatattacagtttgtgctttccattatgagtcccaaaattcaacccttccgatagggctgggcctgaccaaaaatatactgggtttcctgtttccttttctgatcattcttacaagttatactcttatttggaaggccctaaagaaggcttatgaaattcagaagaacaaaccaagaaatgatgatatttttaagataattatggcaattgtgcttttctttttcttttcctggattccccaccaaatattcacttttctggatgtattgattcaactaggcatcatacgtgactgtagaattgcagatattgtggacacggccatgcctatcaccatttgtatagcttattttaacaattgcctgaatcctcttttttatggctttctggggaaaaaatttaaaagatattttctccagcttctaaaatatattcccccaaaagccaaatcccactcaaacctttcaacaaaaatgagcacgctttcctaccgcccctcagataatgtaagctcatccaccaagaagcctgcaccatgttttgaggttgagtgacatgttcgaaacctgtccataaagtaattttgtgaaagaaggagcaagagaacattcctctgcagcacttcactaccaaatgagcattagctacttttcagaattgaaggagaaaatgcattatgtggactgaaccgacttttctaaagctctgaacaaaagcttttctttccttttgcaacaagacaaagcaaagccacattttgcattagacagatgacggctgctcgaagaacaatgtcagaaactcgatgaatgtgttgatttgagaaattttactgacagaaatgcaatctccctagcctgcttttgtcctgttattttttatttccacataaaggtatttagaatatattaaatcgttagaggagcaacaggagatgagagttccagattgttctgtccagtttccaaagggcagtaaagttttcgtgccggttttcagctattagcaactgtgctacacttgcacctggtactgcacattttgtacaaagatatgctaagcagtagtcgtcaagttgcagatctttttgtgaaattcaacctgtgtcttataggtttacactgccaaaacaatgcccgtaagatggcttatttgtataatggtgttactaaagtcacatataaaagttaaactacttgtaaaggtgctgcactggtcccaagtagtagtgtcctcctagtatattagtttgatttaatatctgagaagtgtatatagtttgtggtaaaaagattatatatcataaagtatgccttcctgtttaaaaaaagtatatattctacacatatatatatatgtatatctatatctctaaactgctgttaattgattaaaatctggcaaagttatatttactttaaaataaaataattttattgcaangnattn

SEQ ID NO: 364046 - DNA, 2318 bp, Homo sapiens
  misc_feature (2312)..(2312): n is a, c, g, or t
  misc_feature (2314)..(2314): n is a, c, g, or t
  misc_feature (2318)..(2318): n is a, c, g, or t
tgggccgggagggtctcccggggcggggcggaggaggagggaatgcaaaacagagcctcgtccccggaacccaagaagcagcaacgcccctcactataaattcggagctgcctcctcgccaatgattccagcgcctgacagccaggaccccaggcagcagcgagtgacaggacgtctggaccggcgcgccgctagcagctctgccgggccgcggcggtgatcgatggggagcggctggagcggacccagcgagtgagggcgcacagccgggacgccgaggcggcgggcgggagacccgcaccagcgcagccggccctcggcgggacgtgacgcagcgcccggggcgcggggtgtatttgatatagtgtttgcaacaaattcgacccaggtgatcaaaatgattctcaactcttctactgaagatggtattaaaagaatccaagatgattgtcccaaagctggaaggcataattacatatttgtcatgattcctactttatacagtatcatctttgtggtgggaatatttggaaacagcttggtggtgatagtcatttacttttatatgaagctgaagactgtggccagtgtttttcttttgaatttagcactggctgacttatgctttttactgactttgccactatgggctgtctacacagctatggaataccgctggccctttggcaattacctatgtaagattgcttcagccagcgtcagtttcaacctgtacgctagtgtgtttctactcacgtgtctcagcattgatcgatacctggctattgttcacccaatgaagtcccgccttcgacgcacaatgcttgtagccaaagtcacctgcatcatcatttggctgctggcaggcttggccagtttgccagctataatccatcgaaatgtatttttcattgagaacaccaatattacagtttgtgctttccattatgagtcccaaaattcaacccttccgatagggctgggcctgaccaaaaatatactgggtttcctgtttccttttctgatcattcttacaagttatactcttatttggaaggccctaaagaaggcttatgaaattcagaagaacaaaccaagaaatgatgatatttttaagataattatggcaattgtgcttttctttttcttttcctggattccccaccaaatattcacttttctggatgtattgattcaactaggcatcatacgtgactgtagaattgcagatattgtggacacggccatgcctatcaccatttgtatagcttattttaacaattgcctgaatcctcttttttatggctttctggggaaaaaatttaaaagatattttctccagcttctaaaatatattcccccaaaagccaaatcccactcaaacctttcaacaaagcctgcaccatgttttgaggttgagtgacatgttcgaaacctgtccataaagtaattttgtgaaagaaggagcaagagaacattcctctgcagcacttcactaccaaatgagcattagctacttttcagaattgaaggagaaaatgcattatgtggactgaaccgacttttctaaagctctgaacaaaagcttttctttccttttgcaacaagacaaagcaaagccacattttgcattagacagatgacggctgctcgaagaacaatgtcagaaactcgatgaatgtgttgatttgagaaattttactgacagaaatgcaatctccctagcctgcttttgtcctgttattttttatttccacataaaggtatttagaatatattaaatcgttagaggagcaacaggagatgagagttccagattgttctgtccagtttccaaagggcagtaaagttttcgtgccggttttcagctattagcaactgtgctacacttgcacctggtactgcacattttgtacaaagatatgctaagcagtagtcgtcaagttgcagatctttttgtgaaattcaacctgtgtcttataggtttacactgccaaaacaatgcccgtaagatggcttatttgtataatggtgttactaaagtcacatataaaagttaaactacttgtaaaggtgctgcactggtcccaagtagtagtgtcctcctagtatattagtttgatttaatatctgagaagtgtatatagtttgtggtaaaaagattatatatcataaagtatgccttcctgtttaaaaaaagtatatattctacacatatatatatatgtatatctatatctctaaactgctgttaattgattaaaatctggcaaagttatatttactttaaaataaaataattttattgcaangnattn

SEQ ID NO: 364047 - DNA, 2956 bp, Homo sapiens
ggcaactttagctaccgccgctgtcgctcccgctgccgccgccgcccagacgcactctgggaaagcgcggcgagcacccgcctccgggaccgagccgggcggcagggaggggttcggtcacggctctccggttggtccgcgcgggtgctgcgagtcgggagccgcggccaataggctgcgcgttcccggccacgcccgcgcgagcgctcttctcgcgaggccggctaggcccgaatgtcgttagccgtggggaaagatggcggaaaatttaaaaggctgcagcgtgtgttgcaagtcttcttggaatcagctgcaggacctgtgccgcctggccaagctctcctgccctgccctcggtatctctaagaggaacctctatgactttgaagtcgagtacctgtgcgattacaagaagatccgcgaacaggaatattacctggtgaaatggcgtggatatccagactcagagagcacctgggagccacggcagaatctcaagtgtgtgcgtatcctcaagcagttccacaaggacttagaaagggagctgctccggcggcaccaccggtcaaagaccccccggcacctggacccaagcttggccaactacctggtgcagaaggccaagcagaggcgggcgctccgtcgctgggagcaggagctcaatgccaagcgcagccatctgggacgcatcactgtagagaatgaggtggacctggacggccctccgcgggccttcgtgtacatcaatgagtaccgtgttggtgagggcatcaccctcaaccaggtggctgtgggctgcgagtgccaggactgtctgtgggcacccactggaggctgctgcccgggggcgtcactgcacaagtttgcctacaatgaccagggccaggtgcggcttcgagccgggctgcccatctacgagtgcaactcccgctgccgctgcggctatgactgcccaaatcgtgtggtacagaagggtatccgatatgacctctgcatcttccgcacggatgatgggcgtggctggggcgtccgcaccctggagaagattcgcaagaacagcttcgtcatggagtacgtgggagagatcattacctcagaggaggcagagcggcggggccagatctacgaccgtcagggcgccacctacctctttgacctggactacgtggaggacgtgtacaccgtggatgccgcctactatggcaacatctcccactttgtcaaccacagttgtgaccccaacctgcaggtgtacaacgtcttcatagacaaccttgacgagcggctgccccgcatcgctttctttgccacaagaaccatccgggcaggcgaggagctcacctttgattacaacatgcaagtggaccccgtggacatggagagcacccgcatggactccaactttggcctggctgggctccctggctcccctaagaagcgggtccgtattgaatgcaagtgtgggactgagtcctgccgcaaatacctcttctagcccttagaagtctgaggccagactgactgagggggcctgaagctacatgcacctcccccactgctgccctcctgtcgagaatgactgccagggcctcgcctgcctccacctgcccccacctgctcctacctgctctacgttcagggctgtggccgtggtgaggaccgactccaggagtcccctttccctgtcccagccccatctgtgggttgcacttacaaacccccacccaccttcagaaatagtttttcaacatcaagactctctgtcgttgggattcatggcctattaaggaggtccaaggggtgagtcccaacccagccccagaatatatttgtttttgcacctgcttctgcctggagattgaggggtctgctgcaggcctcctccctgctgccccaaaggtatggggaagcaaccccagagcaggcagacatcagaggccagagtgcctagcccgacatgaagctggttccccaaccacagaaactttgtactagtgaaagaaagggggtccctgggctacgggctgaggctggtttctgctcgtgcttacagtgctgggtagtgttggccctaagagctgtagggtctcttcttcagggctgcatatctgagaagtggatgcccacatgccactggaagggaagtgggtgtccatgggccactgagcagtgagaggaaggcagtgcagagctggccagccctggaggtaggctgggaccaagctctgccttcacagtgcagtgaaggtacctagggctcttgggagctctgcggttgctaggggccctgacctggggtgtcatgaccgctgacaccactcagagctggaaccaagatctagatagtccgtagatagcacttaggacaagaatgtgcattgatggggtggtgatgaggtgccaggcactgggtagagcacctggtccacgtggattgtctcagggaagccttgaaaaccacggaggtggatgccaggaaagggcccatgtggcagaaggcaaagtacaggccaagaattgggggtgggggagatggcttccccactatgggatgacgaggcgagagggaagcccttgctgcctgccattcccagaccccagccctttgtgctcaccctggttccactggtctcaaaagtcacctgcctacaaatgtacaaaaggcgaaggttctgatggctgccttgctccttgctcccccaccccctgtgaggacttctctaggaagtccttcctgactacctgtgcccagagtgcccctacatgagactgtatgccctgctatcagatgccagatctatgtgtctgtctgtgtgtccatcccgccgaccccccagactaacctccaggcatggactgaatctggttctcctcttgtacacccctcaaccctatgcagcctggagtgggcatcaataaaatgaactgtcgactgaaaaaaaaaaaaataacgtgc

SEQ ID NO: 364048 - DNA, 454 bp, Homo sapiens
  misc_feature (78)..(78): n is a, c, g, or t
gccaggaaagggcccatgtggcagaaggcaaagtacaggcactggtctcaaaagtcacctgcctacaaatgtacaaanggcgaaggttctgatggcttccccactatgggatgacgaggcgagagggaagcccttgctgcctgccattcccagaccccagccctttgtgctcaccctggttccactggtctcaaaagtcaccccctgtgaggacttctctaggaagtccttcctgactacctgtgcccagagtgcccctacatgagactgtatgccctgctatcagatgccagatctatgtgtctgtctgtgtgtccatcccgccgaccccccagactaacctccaggcatggactgaatctggttctcctcttgtacacccctcaaccctatgcagcctggagtgggcatcaataaaatgaactgtcgactgaaaaaaaaaaaaataacgtgc

SEQ ID NO: 364049 - DNA, 2781 bp, Homo sapiens
ggcaactttagctaccgccgctgtcgctcccgctgccgccgccgcccagacgcactctgggaaagcgcggcgagcacccgcctccgggaccgagccgggcggcagggaggggttcggtcacggctctccggttggtccgcgcgggtgctgcgagtcgggagccgcggccaataggctgcgcgttcccggccacgcccgcgcgagcgctcttctcgcgaggccggctaggcccgaatgtcgttagccgtggggaaagatggcggaaaatttaaaaggctgcagcgtgtgttgcaagtcttcttggaatcagctgcaggacctgtgccgcctggccaagctctcctgccctgccctcggtatctctaagaggaacctctatgactttgaagtcgagtacctgtgcgattacaagaagatccgcgaacaggaatattacctggtgaaatggcgtggatatccagactcagagagcacctgggagccacggcagaatctcaagtgtgtgcgtatcctcaagcagttccacaaggacttagaaagggagctgctccggcggcaccaccggtcaaagaccccccggcacctggacccaagcttggccaactacctggtgcagaaggccaagcagaggcgggcgctccgtcgctgggagcaggagctcaatgccaagcgcagccatctgggacgcatcactgtagagaatgaggtggacctggacggccctccgcgggccttcgtgtacatcaatgagtaccgtgttggtgagggcatcaccctcaaccaggtggctgtgggctgcgagtgccaggactgtctgtgggcacccactggaggctgctgcccgggggcgtcactgcacaagtttgcctacaatgaccagggccaggtgcggcttcgagccgggctgcccatctacgagtgcaactcccgctgccgctgcggctatgactgcccaaatcgtgtggtacagaagggtatccgatatgacctctgcatcttccgcacggatgatgggcgtggctggggcgtccgcaccctggagaagattcgcaagaacagcttcgtcatggagtacgtgggagagatcattacctcagaggaggcagacggctgccccgcatcgctttctttgccacaagaaccatccgggcaggcgaggagctcacctttgattacaacatgcaagtggaccccgtggacatggagagcacccgcatggactccaactttggcctggctgggctccctggctcccctaagaagcgggtccgtattgaatgcaagtgtgggactgagtcctgccgcaaatacctcttctagcccttagaagtctgaggccagactgactgagggggcctgaagctacatgcacctcccccactgctgccctcctgtcgagaatgactgccagggcctcgcctgcctccacctgcccccacctgctcctacctgctctacgttcagggctgtggccgtggtgaggaccgactccaggagtcccctttccctgtcccagccccatctgtgggttgcacttacaaacccccacccaccttcagaaatagtttttcaacatcaagactctctgtcgttgggattcatggcctattaaggaggtccaaggggtgagtcccaacccagccccagaatatatttgtttttgcacctgcttctgcctggagattgaggggtctgctgcaggcctcctccctgctgccccaaaggtatggggaagcaaccccagagcaggcagacatcagaggccagagtgcctagcccgacatgaagctggttccccaaccacagaaactttgtactagtgaaagaaagggggtccctgggctacgggctgaggctggtttctgctcgtgcttacagtgctgggtagtgttggccctaagagctgtagggtctcttcttcagggctgcatatctgagaagtggatgcccacatgccactggaagggaagtgggtgtccatgggccactgagcagtgagaggaaggcagtgcagagctggccagccctggaggtaggctgggaccaagctctgccttcacagtgcagtgaaggtacctagggctcttgggagctctgcggttgctaggggccctgacctggggtgtcatgaccgctgacaccactcagagctggaaccaagatctagatagtccgtagatagcacttaggacaagaatgtgcattgatggggtggtgatgaggtgccaggcactgggtagagcacctggtccacgtggattgtctcagggaagccttgaaaaccacggaggtggatgccaggaaagggcccatgtggcagaaggcaaagtacaggccaagaattgggggtgggggagatggcttccccactatgggatgacgaggcgagagggaagcccttgctgcctgccattcccagaccccagccctttgtgctcaccctggttccactggtctcaaaagtcacctgcctacaaatgtacaaaaggcgaaggttctgatggctgccttgctccttgctcccccaccccctgtgaggacttctctaggaagtccttcctgactacctgtgcccagagtgcccctacatgagactgtatgccctgctatcagatgccagatctatgtgtctgtctgtgtgtccatcccgccgaccccccagactaacctccaggcatggactgaatctggttctcctcttgtacacccctcaaccctatgcagcctggagtgggcatcaataaaatgaactgtcgactgaaaaaaaaaaaaataacgtgc

SEQ ID NO: 364050 - DNA, 2693 bp, Homo sapiens
ggcaactttagctaccgccgctgtcgctcccgctgccgccgccgcccagacgcactctgggaaagcgcggcgagcacccgcctccgggaccgagccgggcggcagggaggggttcggtcacggctctccggttggtccgcgcgggtgctgcgagtcgggagccgcggccaataggctgcgcgttcccggccacgcccgcgcgagcgctcttctcgcgaggccggctaggcccgaatgtcgttagccgtggggaaagatggcggaaaatttaaaaggctgcagcgtgtgttgcaagtcttcttggaatcagctgcaggacctgtgccgcctggccaagctctcctgccctgccctcggtatctctaagaggaacctctatgactttgaagtcgagtacctgtgcgattacaagaagatccgcgaacaggaatattacctggtgaaatggcgtggatatccagactcagagagcacctgggagccacggcagaatctcaagtgtgtgcgtatcctcaagcagttccacaaggacttagaaagggagctgctccggcggcaccaccggtcaaagaccccccggcacctggacccaagcttggccaactacctggtgcagaaggccaagcagaggcgggcgctccgtcgctgggagcaggagctcaatgccaagcgcagccatctgggacgcatcactgtagagaatgaggtggacctggacggccctccgcgggccttcgtgtacatcaatgagtaccgtgttggtgagggcatcaccctcaaccaggtggctgtgggctgcgagtgccaggactgtctgtgggcacccactggaggctgctgcccgggggcgtcactgcacaagtttgcctacaatgaccagggccaggtgcggcttcgagccgggctgcccatctacgagtgcaactcccgctgccgctgcggctatgactgcccaaatcgtgtggtacagaagggtatccgatatgacctctgcatcttccgcacggatgatgggcgtggctggggcgtccgcaccctggagaagattcgcaagaacagcttcgtcatggagtacgtgggagagatcattacctcagaggaggcagagcggcggggccagatctacgaccgtcagggcgccacctacctctttgacctggactacgtggaggacgtgtacaccgtggatgccgcctactatggcaacatctcccactttgtcaaccacagttgtgaccccaacctgcaggtgtacaacgtcttcatagacaaccttgacgagcggctgccccgcatcgctttctttgccacaagaaccatccgggcaggcgaggagctcacctttgattacaacatgcaagtggaccccgtggacatggagagcacccgcatggactccaactttggcctggctgggctccctggctcccctaagaagcgggtccgtattgaatgcaagtgtgggactgagtcctgccgcaaatacctcttctagcccttagaagtctgaggccagactgactgagggggcctgaagctacatgcacctcccccactgctgccctcctgtcgagaatgactgccagggcctcgcctgcctccacctgcccccacctgctcctacctgctctacgttcagggctgtggccgtggtgaggaccgactccaggagtcccctttccctgtcccagccccatctgtgggttgcacttacaaacccccacccaccttcagaaatagtttttcaacatcaagactctctgtcgttgggattcatggcctattaaggaggtccaaggggtgagtcccaacccagccccagaatatatttgtttttgcacctgcttctgcctggagattgaggggtctgctgcaggcctcctccctgctgccccaaaggtatggggaagcaaccccagagcaggcagacatcagaggccagagtgcctagcccgacatgaagctggttccccaaccacagaaactttgtactagtgaaagaaagggggtccctgggctacgggctgaggctggtttctgctcgtgcttacagtgctgggtagtgttggccctaagagctgtagggtctcttcttcagggctgcatatctgagaagtggatgcccacatgccactggaagggaagtgggtgtccatgggccactgagcagtgagaggaaggcagtgcagagctggccagccctggaggtaggctgggaccaagctctgccttcacagtgcagtgaaggtacctagggctcttgggagctctgcggttgctaggggccctgacctggggtgtcatgaccgctgacaccactcagagctggaaccaagatctagatagtccgtagatagcacttaggacaagaatgtgcattgatggggtggtgatgaggtgccaggcactgggtagagcacctggtccacgtggattgtctcagggaagccttgaaaaccacggagtccttcctgactacctgtgcccagagtgcccctacatgagactgtatgccctgctatcagatgccagatctatgtgtctgtctgtgtgtccatcccgccgaccccccagactaacctccaggcatggactgaatctggttctcctcttgtacacccctcaaccctatgcagcctggagtgggcatcaataaaatgaactgtcgactgaaaaaaaaaaaaataacgtgc

SEQ ID NO: 364051 - DNA, 1977 bp, Homo sapiens
ggcaactttagctaccgccgctgtcgctcccgctgccgccgccgcccagacgcactctgggaaagcgcggcgagcacccgcctccgggaccgagccgggcggcagggaggggttcggtcacggctctccggttggtccgcgcgggtgctgcgagtcgggagccgcggccaataggctgcgcgttcccggccacgcccgcgcgagcgctcttctcgcgaggccggctaggcccgaatgtcgttagccgtggggaaagatggcggaaaatttaaaaggctgcagcgtgtgttgcaagtcttcttggaatcagctgcaggacctgtgccgcctggccaagctctcctgccctgccctcggtatctctaagaggaacctctatgactttgaagtcgagtacctgtgcgattacaagaagatccgcgaacaggaatattacctggtgaaatggcgtggatatccagactcagagagcacctgggagccacggcagaatctcaagtgtgtgcgtatcctcaagcagttccacaaggacttagaaagggagctgctccggcggcaccaccggtcaaagaccccccggcacctggacccaagcttggccaactacctggtgcagaaggccaagcagaggcgggcgctccgtcgctgggagcaggagctcaatgccaagcgcagccatctgggacgcatcactgtagagaatgaggtggacctggacggccctccgcgggccttcgtgtacatcaatgagtaccgtgttggtgagggcatcaccctcaaccaggtggctgtgggctgcgagtgccaggactgtctgtgggcacccactggaggctgctgcccgggggcgtcactgcacaagtttgcctacaatgaccagggccaggtgcggcttcgagccgggctgcccatctacgagtgcaactcccgctgccgctgcggctatgactgcccaaatcgtgtggtacagaagggtatccgatatgacctctgcatcttccgcacggatgatgggcgtggctggggcgtccgcaccctggagaagattcgcaagaacagcttcgtcatggagtacgtgggagagatcattacctcagaggaggcagagcggcggggccagatctacgaccgtcagggcgccacctacctctttgacctggactacgtggaggacgtgtacaccgtggatgccgcctactatggcaacatctcccactttgtcaaccacagttgtgaccccaacctgcaggtgtacaacgtcttcatagacaaccttgacgagcggctgccccgcatcgctttctttgccacaagaaccatccgggcaggcgaggagctcacctttgattacaacatgcaagtggaccccgtggacatggagagcacccgcatggactccaactttggcctggctgggctccctggctcccctaagaagcgggtccgtattgaatgcaagtgtgggactgagtcctgccgcaaatacctcttctagcccttagaagtctgaggccagactgactgagggggcctgaagctacatgcacctcccccactgctgccctcctgtcgagaatgactgccagggcctcgcctgcctccacctgcccccacctgctcctacctgctctacgttcagggctgtggccgtggtgaggaccgactccaggagtcccctttccctgtcccagccccatctgtgggttgcacttacaaacccccaccccctgtgaggacttctctaggaagtccttcctgactacctgtgcccagagtgcccctacatgagactgtatgccctgctatcagatgccagatctatgtgtctgtctgtgtgtccatcccgccgaccccccagactaacctccaggcatggactgaatctggttctcctcttgtacacccctcaaccctatgcagcctggagtgggcatcaataaaatgaactgtcgactgaaaaaaaaaaaaataacgtgc

SEQ ID NO: 364052 - DNA, 2844 bp, Homo sapiens
ccaggcggccacaggtcctgcagctgattccaagaagacttgcaacacacgctgcagcctgtcagtgggtcagccagtctgtcatttctcaggcgactcatccccaccattggtcaagtcagtctcctctgatgcgttgaagctgagattctatcagggcagacagtccgtaaccacgtacagccatcgagtcagacagctatgccgattttgctcctggccaagctctcctgccctgccctcggtatctctaagaggaacctctatgactttgaagtcgagtacctgtgcgattacaagaagatccgcgaacaggaatattacctggtgaaatggcgtggatatccagactcagagagcacctgggagccacggcagaatctcaagtgtgtgcgtatcctcaagcagttccacaaggacttagaaagggagctgctccggcggcaccaccggtcaaagaccccccggcacctggacccaagcttggccaactacctggtgcagaaggccaagcagaggcgggcgctccgtcgctgggagcaggagctcaatgccaagcgcagccatctgggacgcatcactgtagagaatgaggtggacctggacggccctccgcgggccttcgtgtacatcaatgagtaccgtgttggtgagggcatcaccctcaaccaggtggctgtgggctgcgagtgccaggactgtctgtgggcacccactggaggctgctgcccgggggcgtcactgcacaagtttgcctacaatgaccagggccaggtgcggcttcgagccgggctgcccatctacgagtgcaactcccgctgccgctgcggctatgactgcccaaatcgtgtggtacagaagggtatccgatatgacctctgcatcttccgcacggatgatgggcgtggctggggcgtccgcaccctggagaagattcgcaagaacagcttcgtcatggagtacgtgggagagatcattacctcagaggaggcagagcggcggggccagatctacgaccgtcagggcgccacctacctctttgacctggactacgtggaggacgtgtacaccgtggatgccgcctactatggcaacatctcccactttgtcaaccacagttgtgaccccaacctgcaggtgtacaacgtcttcatagacaaccttgacgagcggctgccccgcatcgctttctttgccacaagaaccatccgggcaggcgaggagctcacctttgattacaacatgcaagtggaccccgtggacatggagagcacccgcatggactccaactttggcctggctgggctccctggctcccctaagaagcgggtccgtattgaatgcaagtgtgggactgagtcctgccgcaaatacctcttctagcccttagaagtctgaggccagactgactgagggggcctgaagctacatgcacctcccccactgctgccctcctgtcgagaatgactgccagggcctcgcctgcctccacctgcccccacctgctcctacctgctctacgttcagggctgtggccgtggtgaggaccgactccaggagtcccctttccctgtcccagccccatctgtgggttgcacttacaaacccccacccaccttcagaaatagtttttcaacatcaagactctctgtcgttgggattcatggcctattaaggaggtccaaggggtgagtcccaacccagccccagaatatatttgtttttgcacctgcttctgcctggagattgaggggtctgctgcaggcctcctccctgctgccccaaaggtatggggaagcaaccccagagcaggcagacatcagaggccagagtgcctagcccgacatgaagctggttccccaaccacagaaactttgtactagtgaaagaaagggggtccctgggctacgggctgaggctggtttctgctcgtgcttacagtgctgggtagtgttggccctaagagctgtagggtctcttcttcagggctgcatatctgagaagtggatgcccacatgccactggaagggaagtgggtgtccatgggccactgagcagtgagaggaaggcagtgcagagctggccagccctggaggtaggctgggaccaagctctgccttcacagtgcagtgaaggtacctagggctcttgggagctctgcggttgctaggggccctgacctggggtgtcatgaccgctgacaccactcagagctggaaccaagatctagatagtccgtagatagcacttaggacaagaatgtgcattgatggggtggtgatgaggtgccaggcactgggtagagcacctggtccacgtggattgtctcagggaagccttgaaaaccacggaggtggatgccaggaaagggcccatgtggcagaaggcaaagtacaggccaagaattgggggtgggggagatggcttccccactatgggatgacgaggcgagagggaagcccttgctgcctgccattcccagaccccagccctttgtgctcaccctggttccactggtctcaaaagtcacctgcctacaaatgtacaaaaggcgaaggttctgatggctgccttgctccttgctcccccaccccctgtgaggacttctctaggaagtccttcctgactacctgtgcccagagtgcccctacatgagactgtatgccctgctatcagatgccagatctatgtgtctgtctgtgtgtccatcccgccgaccccccagactaacctccaggcatggactgaatctggttctcctcttgtacacccctcaaccctatgcagcctggagtgggcatcaataaaatgaactgtcgactgaaaaaaaaaaaaataacgtgc

SEQ ID NO: 364053 - DNA, 2762 bp, Homo sapiens
ggcaactttagctaccgccgctgtcgctcccgctgccgccgccgcccagacgcactctgggaaagcgcggcgagcacccgcctccgggaccgagccgggcggcagggaggggttcggtcacggctctccggttggtccgcgcgggtgctgcgagtcgggagccgcggccaataggctgcgcgttcccggccacgcccgcgcgagcgctcttctcgcgaggccggctaggcccgaatgtcgttagccgtggggaaagatggcggaaaatttaaaaggctgcagcgtgtgttgcaagtcttcttggaatcagctgcaggacctgtgccgcctggccaagctctcctgccctgccctcggtatctctaagaggaacctctatgactttgaagtcgagtacctgtgcgattacaagaagatccgcgaacaggaatattacctggtgaaatggcgtggatatccagactcagagagcacctgggagccacggcagaatctcaagtgtgtgcgtatcctcaagcagttccacaaggacttagaaagggagctgctccggcggcaccaccggtcaaagaccccccggcacctggacccaagcttggccaactacctggtgcagaaggccaagcagaggcgggcgctccgtcgctgggagcaggagctcaatgccaagcgcagccatctgggacgcatcactgtagagaatgaggtggacctggacggccctccgcgggccttcgtgtacatcaatgagtaccgtgttggtgagggcatcaccctcaaccaggtggctgtgggctgcgagtgccaggactgtctgtgggcacccactggaggctgctgcccgggggcgtcactgcacaagtttgcctacaatgaccagggccaggtgcggcttcgagccgggctgcccatctacgagtgcaactcccgctgccgctgcggctatgactgcccaaatcgtgtggtacagaagggtatccgatatgacctctgcatcttccgcacggatgatgggcgtggctggggcgtccgcaccctggagaagattcgcaagaacagcttcgtcatggagtacgtgggagagatcattacctcagaggaggcagagcggcggggccagatctacgaccgtcagggcgccacctacctctttgacctggactacgtggaggacgtgtacaccgtggatgccgcctactatggcaacatctcccactttgtcaaccacagttgtgaccccaacctgcaggtgtacaacgtcttcatagacaaccttgacgagcggctgccccgcatcgctttctttgccacaagaaccatccgggcaggcgaggagctcacctttgattacaacatgcaagtggaccccgtggacatggagagcacccgcatggactccaactttggcctggctgggctccctggctcccctaagaagcgggtccgtattgaatgcaagtgtgggactgagtcctgccgcaaatacctcttctagcccttagaagtctgaggccagactgactgagggggcctgaagctacatgcacctcccccactgctgccctcctgtcgagaatgactgccagggcctcgcctgcctccacctgcccccacctgctcctacctgctctacgttcagggctgtggccgtggtgaggaccgactccaggagtcccctttccctgtcccagccccatctgtgggttgcacttacaaacccccacccaccttcagaaatagtttttcaacatcaagactctctgtcgttgggattcatggcctattaaggaggtccaaggggtgagtcccaacccagccccagaatatatttgtttttgcacctgcttctgcctggagattgaggggtctgctgcaggcctcctccctgctgccccaaaggtatggggaagcaaccccagagcaggcagacatcagaggccagagtgcctagcccgacatgaagctggttccccaaccacagaaactttgtactagtgaaagaaagggggtccctgggctacgggctgaggctggtttctgctcgtgcttacagtgctgggtagtgttggccctaagagctgtagggtctcttcttcagggctgcatatctgagaagtggatgcccacatgccactggaagggaagtgggtgtccatgggccactgagcagtgagaggaaggcagtgcagagctggccagccctggaggtaggctgggaccaagctctgccttcacagtgcagtgaaggtacctagggctcttgggagctctgcggttgctaggggccctgacctggggtgtcatgaccgctgacaccactcagagctggaaccaagatctagatagtccgtagatagcacttaggacaagaatgtgcattgatggggtggtgatgaggtgccaggcactgggtagagcacctggtccacgtggattgtctcagggaagccttgaaaaccacggaggtggatgccaggaaagggcccatgtggcagaaggcaaagtacagcccctgtgaggacttctctaggaagtccttcctgactacctgtgcccagagtgcccctacatgagactgtatgccctgctatcagatgccagatctatgtgtctgtctgtgtgtccatcccgccgaccccccagactaacctccaggcatggactgaatctggttctcctcttgtacacccctcaaccctatgcagcctggagtgggcatcaataaaatgaactgtcgactgaaaaaaaaaaaaataacgtgc

SEQ ID NO: 364054 - DNA, 1965 bp, Homo sapiens
gacagaggacaggctgctaagccaggaagcagaatcaaagtaaacagcagtccccatgtgtctcctgtgtgctgtgcactgttcttggctgagatcattacctcagaggaggcagagcggcggggccagatctacgaccgtcagggcgccacctacctctttgacctggactacgtggaggacgtgtacaccgtggatgccgcctactatggcaacatctcccactttgtcaaccacagttgtgaccccaacctgcaggtgtacaacgtcttcatagacaaccttgacgagcggctgccccgcatcgctttctttgccacaagaaccatccgggcaggcgaggagctcacctttgattacaacatgcaagtggaccccgtggacatggagagcacccgcatggactccaactttggcctggctgggctccctggctcccctaagaagcgggtccgtattgaatgcaagtgtgggactgagtcctgccgcaaatacctcttctagcccttagaagtctgaggccagactgactgagggggcctgaagctacatgcacctcccccactgctgccctcctgtcgagaatgactgccagggcctcgcctgcctccacctgcccccacctgctcctacctgctctacgttcagggctgtggccgtggtgaggaccgactccaggagtcccctttccctgtcccagccccatctgtgggttgcacttacaaacccccacccaccttcagaaatagtttttcaacatcaagactctctgtcgttgggattcatggcctattaaggaggtccaaggggtgagtcccaacccagccccagaatatatttgtttttgcacctgcttctgcctggagattgaggggtctgctgcaggcctcctccctgctgccccaaaggtatggggaagcaaccccagagcaggcagacatcagaggccagagtgcctagcccgacatgaagctggttccccaaccacagaaactttgtactagtgaaagaaagggggtccctgggctacgggctgaggctggtttctgctcgtgcttacagtgctgggtagtgttggccctaagagctgtagggtctcttcttcagggctgcatatctgagaagtggatgcccacatgccactggaagggaagtgggtgtccatgggccactgagcagtgagaggaaggcagtgcagagctggccagccctggaggtaggctgggaccaagctctgccttcacagtgcagtgaaggtacctagggctcttgggagctctgcggttgctaggggccctgacctggggtgtcatgaccgctgacaccactcagagctggaaccaagatctagatagtccgtagatagcacttaggacaagaatgtgcattgatggggtggtgatgaggtgccaggcactgggtagagcacctggtccacgtggattgtctcagggaagccttgaaaaccacggaggtggatgccaggaaagggcccatgtggcagaaggcaaagtacaggccaagaattgggggtgggggagatggcttccccactatgggatgacgaggcgagagggaagcccttgctgcctgccattcccagaccccagccctttgtgctcaccctggttccactggtctcaaaagtcacctgcctacaaatgtacaaaaggcgaaggttctgatggctgccttgctccttgctcccccaccccctgtgaggacttctctaggaagtccttcctgactacctgtgcccagagtgcccctacatgagactgtatgccctgctatcagatgccagatctatgtgtctgtctgtgtgtccatcccgccgaccccccagactaacctccaggcatggactgaatctggttctcctcttgtacacccctcaaccctatgcagcctggagtgggcatcaataaaatgaactgtcgactgaaaaaaaaaaaaataacgtgc

SEQ ID NO: 364055 - DNA, 352 bp, Homo sapiens
gttcctgcaaccagccccatccgcttggttctgggcccctaaactgcctcctcttctcatgcactatgcactgggttgaacgcagcaacaatacagacttccctcccagcacggtggctcatgcctgtgattctagcgctttgtgatattagtccgcccaggcggacggactgcttgagctcaggagttcgagaacagcctaggcaacaaaacgagaccctacaaaaactacaaaaaattagtcgggtgtggtgtcgcgcacctgtggtcccagctgctccacaggctgaggcgggaggatagctggagcccaagaaggcgaggctgcactgagcagtgatcacgccactgc

SEQ ID NO: 364056 - DNA, 1253 bp, Homo sapiens
  misc_feature (1231)..(1231): n is a, c, g, or t
agcagaaccgtttggcagggaaaaccatacactgaaagcggacctcgccgctatctcgggcctgatggcgcggacgcaaacgtggccccacccccttcttcccggcgtccgtgcgcaggggacgggccgtcgctacgcagactggcccaccgacagccctcccagcccgcccccgactcagccacctcctctcggagaaagcagctgggggcggagacggagatcagccctgcgctttgcggcattgtatgacgtcaagtaggcgaggcttcggaggcgagcgaagggcgggaccaaggccaagagcccgacagttacgccactcacacttgcggaagagttaacgggacagtggtgcaggccaatcgcaaccagtcctctggaggcagggagactggggtggagacttcggagactgcagttgcagttgttccgtgtaggctgttgttgactctcgtatgaaagcccacgcgatccaagtgccctgcaggttttggtccagggaaaagttggtctctgcagatgactgtaaatgactacctggaggtcgattaaagtgcggtactgcgggattcagccgatttccttcttcctctgactgcccggaaatatcagccaaaggccagcgttctaaggacatatggaattggctatggataattcatatgctttcaatcaacgaagcacatgtaatggaattccatctgagaagaaaaacaacttccttgtatcagaagatcatggacaaaaaatcttaagtgtactacagaattttagagaacaaaatgtcttttatgatttcaaaataattatgaaagatgaaataatcccgtgtcatcgttgtgtgttagcagcatgcagtgactttttcagggctatgtttgaagtaaacatgaaagaaagagatgatggaagtgttaccattactaatttgtcctccaaggcagtaaaagcatttctcgattatgcctatactggaaaaacaaaaataacagatgataatgtggaaatgttcttccagttgtcatcattctcagttcttctatcaagctgcgtgcttttataaaagtttatctgtcgaaacacaaaaaaaaaaaaaaatgtgggccgccgccctgaagtttacaatttgggcgcgggccggagaacggccgggccaaacgggcgaggggggtcccaaaaccggcgggtggaccaggtggtctgtacaggcctcacccccgcggggggngcgaagaggaaacgctctacag

SEQ ID NO: 364057 - DNA, 533 bp, Homo sapiens
  misc_feature (15)..(15): n is a, c, g, or t
ccccttcgtgccggnagactgcagtgcagttgttccgtgtaggggtccagggaaaagttggtctctgcagatgactgtaaatgactacctggaggtcgattaaagtgcggtactgcgggattcagccgatttccttcttcctctgactgcccggaaatatcagccaaaggccagcgttctaaggacatatggaattggctatggataattcatatgctttcaatcaacgaagcacatgtaatggaattccatctgagaagaaaaacaacttccttgtatcagaagatcatggacaaaaaatcttaagtgtactacagaattttagagaacaaaatgtcttttatgatttcaaaataattatgaaagatgaaataatcccgtgtcatcgttgtgtgttagcagcatgcagtgactttttcaggtactttaccttgtctatgcctcagattttatgatttggataattaagttctattttatactgcactcaagtttttccccacaagaacatgcaacagtaatttttaattcta

SEQ ID NO: 364058 - DNA, 1174 bp, Homo sapiens
agcagaaccgtttggcagggaaaaccatacactgaaagcggacctcgccgctatctcgggcctgatggcgcggacgcaaacgtggccccacccccttcttcccggcgtccgtgcgcaggggacgggccgtcgctacgcagactggcccaccgacagccctcccagcccgcccccgactcagccacctcctctcggagaaagcagctgggggcggagacggagatcagccctgcgctttgcggcattgtatgacgtcaagtaggcgaggcttcggaggcgagcgaagggcgggaccaaggccaagagcccgacagttacgccactcacacttgcggaagagttaacgggacagtggtgcaggccaatcgcaaccagtcctctggaggcagggagactggggtggagacttcggagactgcagttgcagttctaaggacatatggaattggctatggataattcatatgctttcaatcaacgaagcacatgtaatggaattccatctgagaagaaaaacaacttccttgtatcagaagatcatggacaaaaaatcttaagtgtactacagaattttagagaacaaaatgtcttttatgatttcaaaataattatgaaagatgaaataatcccgtgtcatcgttgtgtgttagcagcatgcagtgactttttcaggtcttcccaggtcagcatttcccaaagttctctggaacattaatcccttgaactacgctgggacagaagaaatttttttgatggtgtcagctttgtttgggggatccctgtgttgtattattttagaaaaagaagacgacaggttgaacaaaaatggaagcaaaatttgaagaaaataactctgcgagaaaagaaaatttccgtcctgtgttgtattcatgtattacggggagaggagggtctaaccgatttaaaaatttatcctctccttagcaaattcatcctctccttatattagggaaaagtacttcttagctataaggcatttcttgaaagctctcagcttgttctaattctaagcaaccttctgaatataatttggtttcccatgtagatcaccctaaagagaatgtcctattcataacactgcagtaatcactatgatgacagcagatttccatttctgcgaagttaagggtcagacacatgaccttgcaattac

SEQ ID NO: 364059 - DNA, 2220 bp, Homo sapiens
agcagaaccgtttggcagggaaaaccatacactgaaagcggacctcgccgctatctcgggcctgatggcgcggacgcaaacgtggccccacccccttcttcccggcgtccgtgcgcaggggacgggccgtcgctacgcagactggcccaccgacagccctcccagcccgcccccgactcagccacctcctctcggagaaagcagctgggggcggagacggagatcagccctgcgctttgcggcattgtatgacgtcaagtaggcgaggcttcggaggcgagcgaagggcgggaccaaggccaagagcccgacagttacgccactcacacttgcggaagagttaacgggacagtggtgcaggccaatcgcaaccagtcctctggaggcagggagactggggtggagacttcggagactgcagttgcagttgttccgtgtaggctgttgttgactctcgtatgaaagcccacgcgatccaagtgccctgcaggttttggtccagggaaaagttggtctctgcagatgactgtaaatgactacctggaggtcgattaaagtgcggtactgcgggattcagccgatttccttcttcctctgactgcccggaaatatcagccaaaggccagcgttctaaggacatatggaattggctatggataattcatatgctttcaatcaacgaagcacatgtaatggaattccatctgagaagaaaaacaacttccttgtatcagaagatcatggacaaaaaatcttaagtgtactacagaattttagagaacaaaatgtcttttatgatttcaaaataattatgaaagatgaaataatcccgtgtcatcgttgtgtgttagcagcatgcagtgactttttcagggctatgtttgaagtaaacatgaaagaaagagatgatggaagtgttaccattactaatttgtcctccaaggcagtaaaagcatttctcgattatgcctatactggaaaaacaaaaataacagatgataatgtggaaatgttcttccagttgtcatcatttcttcaagtttccttcctatccaaagcttgcagtgactttttaataaaaagtattaatcttgtcaattgtttacagttattatctatatcagatagctatggctccaccagtttgtttgatcatgcattacactttgtacaacatcacttttctttattatttaaatccagtgatttcttagagatgaattttggagtactacagaaatgtctggaatcagatgaattaaatgttcctgaagaagaaatggtactgaaagttgtccttagttggactaaacataacttagaatcaaggcaaaagtatctgcctcatttgattgaaaaagtgagattacatcagttatctgaggagacacttcaggactgtctgttcaatgaagagagtttactcaaaagcacaaactgttttgacataatcatggatgcaattaagtgtgtgcaaggttctggtggactcttccctgatgctcgaccatccacaactgagaaatacatattcattcacaaaactgaggaaaatggagaaaatcaatatacattttgctataacattaaatctgattcatggaaaatactgccgcaatcacacctgattgatttgccaggatctagtctttcgagttacggagagaaaatattcttgacaggtggttgcaaagggaaatgttgtcgaacggttcgactgcatattgccgagtcatatcatgatgccactgatcaaacctggtgctactgtccagtgaaaaatgatttcttcttggtatcaactatgaaaacaccaagaaccatgcatacatcagttatggctctcgatagattatttgtcataggtggaaaaactagaggatcccgggacattaaaagtctcttagatgttgaatcttacaatcctctttccaaagaatggatatctgttagcccattacccagaggcatatactatccagaagcaagcacatgccaaaatgtaatttatgttcttggatcagaggtagagattacagatgcttttaacccatcacttgattgcttttttaaatacaatgctacaactgatcagtggtctgaactagtagcagagtttgggcaattttttcatgcaacattaattaaagctgtaccagtaaactgtacactgtatatatgtgacctttccacctataaggtttatagtttttgtccaga

SEQ ID NO: 364060 - DNA, 1552 bp, Homo sapiens
ttgtaatataggcattttgtaatatgtttgttggcagataaataatatattatataattattctagatattaattaggaggcaattaaaatatgcttttataaatatatttaagtcaagagtaaggaaacctctttaaggtaatattgaaaataattatggaataaaatattcttgctgtttttctgtgttctttatttttgcagggctatgtttgaagtaaacatgaaagaaagagatgatggaagtgttaccattactaatttgtcctccaaggcagtaaaagcatttctcgattatgcctatactggaaaaacaaaaataacagatgataatgtggaaatgttcttccagttgtcatcatttcttcaagtttccttcctatccaaagcttgcagtgactttttaataaaaagtattaatcttgtcaattgtttacagttattatctatatcagatagctatggctccaccagtttgtttgatcatgcattacactttgtacaacatcacttttctttattatttaaatccagtgatttcttagagatgaattttggagtactacagaaatgtctggaatcagatgaattaaatgttcctgaagaagaaatggtactgaaagttgtccttagttggactaaacataacttagaatcaaggcaaaagtatctgcctcatttgattgaaaaagtgagattacatcagttatctgaggagacacttcaggactgtctgttcaatgaagagagtttactcaaaagcacaaactgttttgacataatcatggatgcaattaagtgtgtgcaaggttctggtggactcttccctgatgctcgaccatccacaactgagaaatacatattcattcacaaaactgaggaaaatggagaaaatcaatatacattttgctataacattaaatctgattcatggaaaatactgccgcaatcacacctgattgatttgccaggatctagtctttcgagttacggagagaaaatattcttgacaggtggttgcaaagggaaatgttgtcgaacggttcgactgcatattgccgagtcatatcatgatgccactgatcaaacctggtgctactgtccagtgaaaaatgatttcttcttggtatcaactatgaaaacaccaagaaccatgcatacatcagttatggctctcgatagattatttgtcataggtggaaaaactagaggatcccgggacattaaaagtctcttagatgttgaatcttacaatcctctttccaaagaatggatatctgttagcccattacccagaggcatatactatccagaagcaagcacatgccaaaatgtaatttatgttcttggatcagaggtagagattacagatgcttttaacccatcacttgattgcttttttaaatacaatgctacaactgatcagtggtctgaactagtagcagagtttgggcaattttttcatgcaacattaattaaagctgtaccagtaaactgtacactgtatatatgtgacctttccacctataaggtttatagtttttgtccaga

SEQ ID NO: 364061 - DNA, 1975 bp, Homo sapiens
agcagaaccgtttggcagggaaaaccatacactgaaagcggacctcgccgctatctcgggcctgatggcgcggacgcaaacgtggccccacccccttcttcccggcgtccgtgcgcaggggacgggccgtcgctacgcagactggcccaccgacagccctcccagcccgcccccgactcagccacctcctctcggagaaagcagctgggggcggagacggagatcagccctgcgctttgcggcattgtatgacgtcaagtaggcgaggcttcggaggcgagcgaagggcgggaccaaggccaagagcccgacagttacgccactcacacttgcggaagagttaacgggacagtggtgcaggccaatcgcaaccagtcctctggaggcagggagactggggtggagacttcggagactgcagttgcagttgttccgtgtaggctgttgttgactctcgtatgaaagcccacgcgatccaagtgccctgcaggttttggtccagggaaaagttggtctctgcagatgactgtaaatgactacctggaggtcgattaaagtgcggtactgcgggattcagccgatttccttcttcctctgactgcccggaaatatcagccaaaggccagcgggctatgtttgaagtaaacatgaaagaaagagatgatggaagtgttaccattactaatttgtcctccaaggcagtaaaagcatttctcgattatgcctatactggaaaaacaaaaataacagatgataatgtggaaatgttcttccagttgtcatcatttcttcaagtttccttcctatccaaagcttgcagtgactttttaataaaaagtattaatcttgtcaattgtttacagttattatctatatcagatagctatggctccaccagtttgtttgatcatgcattacactttgtacaacatcacttttctttattatttaaatccagtgatttcttagagatgaattttggagtactacagaaatgtctggaatcagatgaattaaatgttcctgaagaagaaatggtactgaaagttgtccttagttggactaaacataacttagaatcaaggcaaaagtatctgcctcatttgattgaaaaagtgagattacatcagttatctgaggagacacttcaggactgtctgttcaatgaagagagtttactcaaaagcacaaactgttttgacataatcatggatgcaattaagtgtgtgcaaggttctggtggactcttccctgatgctcgaccatccacaactgagaaatacatattcattcacaaaactgaggaaaatggagaaaatcaatatacattttgctataacattaaatctgattcatggaaaatactgccgcaatcacacctgattgatttgccaggatctagtctttcgagttacggagagaaaatattcttgacaggtggttgcaaagggaaatgttgtcgaacggttcgactgcatattgccgagtcatatcatgatgccactgatcaaacctggtgctactgtccagtgaaaaatgatttcttcttggtatcaactatgaaaacaccaagaaccatgcatacatcagttatggctctcgatagattatttgtcataggtggaaaaactagaggatcccgggacattaaaagtctcttagatgttgaatcttacaatcctctttccaaagaatggatatctgttagcccattacccagaggcatatactatccagaagcaagcacatgccaaaatgtaatttatgttcttggatcagaggtagagattacagatgcttttaacccatcacttgattgcttttttaaatacaatgctacaactgatcagtggtctgaactagtagcagagtttgggcaattttttcatgcaacattaattaaagctgtaccagtaaactgtacactgtatatatgtgacctttccacctataaggtttatagtttttgtccaga

SEQ ID NO: 364062 - DNA, 2068 bp, Homo sapiens
cccgcccccgactgcgcggcgcccgccctagcggagtcagagctgctcgtctgaggctgctgaggcgacggccggtgtcgtggtcgcggtacctgttccaacacggctcgcgggcccgtgccggctccggtccccggcgcggctgtccgagcccctgcggcgggcggacgatggtgtggcggagcacgcggacgcgggcggcgcggcggcgggcatgaaggaggatggaagggcaggacgaggtgtcggcgcgggagcagcacttccacagccaagtgcgggagtccacgatatgtttccttctttttgccattctctacgttgtttcctacttcatcatcacaagatacaagagaaaatcagatgaacaagaagatgaagatgccatcgtcaacaggatttcgttgtttttgagcacgttcactctcgcagtgtcagctggggctgttttgcttttacccttctcaatcatcagcaatgaaatcctgctttcttttcctcagaactactatattcagtggctaaatggctccctgattcatggtttgtggaatcttgcttcccttttttccaacctttgtttatttgtattgatgccctttgcctttttctttctggaatcagaaggctttgctggcctgaaaaagggaatccgagcccgcattttagagactttggtcatgcttcttcttcttgcgttactcattcttgggatagtgtgggtagcttcagcactcattgacaacgatgccgcaagcatggaatctttatatgatctctgggagttctatctaccctatttatattcctgtatatcattgatgggatgtttgttacttctctggcttcataaacttcacttaccaaatacttcaagggattcagaaacagccaagccttctgtaaatgggcatcagaaagcactgtgagacgcacagacggcgtcttctgccaccaagagacccgagaactccagattcacgacattcctgtcccatgtagaagcatttccattcaaccgtggcccctcttcagaacctagacctatcagtgccatttttttttcataatctacgaagaacttggctatggctgatcttttttaaatttaactttctgatggaccctgtagtttccagttaagtgcagattccttacagacatatagaacagcgcattcttctgtagacatttgctcatgttggtaaatacaatcacccatatgaaaaaattgttttcacctgatatgaaaatgttagaaaaggcaaactccgggacttctaaagatttacttaaatcccattatgtactttattcagaatgtagaagctgacttgaaaggcatccttggtactaagtgaagcttattcagaaaatgcatttttcaaatgcaatggcaactgcttgtagatatcatttttgcagtgtatgttggagctgtaatggttgcaattatgtttcttatttccttaaaagcaaaaagcgtagtttctgatttatgttatagaatgatactgattagactttgagccaaggggaaaatactaaattcttttaaacctggagccttagagagccacaggaatatcttctgttgtacagtctaataagctgtggtaggaagtatcatgtaatcacagtttaatgacagtttatgtatatatataattcagtattccctctgataacatagttgccagtgtttaatacacttgtaacttggatttttaccttataggctatatgtatactcagttttttaaagcatttttttcagagatcacttaattccccatgcttctgcaatgcatataaaaactataaatgccgagtggtagaaactcctctttcttcatagtcctcaggctttggttacatttgcatatgccatttgaagcctccagcttttaccagtttaacatccaaagttcacagcatcagcattcatggtgtaagaacagttttgcagtataacacgatctgataatcattcagttattaaattgtaaataattattgggatggtttcttggctttaagtccactgaataaaaactatgaaattgca

SEQ ID NO: 364063 - DNA, 1109 bp, Homo sapiens
  misc_feature (3)..(3): n is a, c, g, or t
acntgataagtatatctaaactatatcatactatatgtgtgtgattcatcttgtgtttgtggttgctggtatctttgtactacagctgtatttcagtagagggactggtcggtagaccgttttctccagctaagcagggaatgttgtgcgtgtattgcaggcgagagttcagtaccagtgtatgccggttagtaagtatgagagccgtgttccttgctggtgacatgtgccagtgcttaatacgctggtaactgtgagttctcctatagcatcctgatctcaagttgtcgaccatttttttcagagatcacttaattccccatgcttctgcaatgcatataaaaactataaatgccgagtggtagaaactcctctttcttcatagtcctcaggctttggttacatttgcatatgccatttgaagcctccagcttttaccagtttaacatccaaagttcacagcatcagcattcatggtgtaagaacagttttgcagtataacacgatctgataatcattcagttattaaattgtaaataattattgggatggtttcttggctttaagtccactgaataaaaactatgaaattgcactctgtgtcaaccatccactaggatagaataccgaaatctgtgcatgcaaaaataggagatgggcccatttgcacacaattcgtagttatgcagtctgctatataaatatgttcacatgcactgtgtgtatgaaaatagatggtctgtgttcagacaaaagtaaaacatttttttcaaattgttacatttaaaggttttctgggagaaatttatgaaacgcaggctgtgtctatttgacatcagaaatttccactttaaaccaaaataataagaaactttaatctgtatatttacaacctttgttgagtacacttcccccttatttatacgtctgcatttccttccgagcttcacatctttctaaaatgcagcttggttttaaaataaaagaacattcattttgtgattctaaacaagcttcagtaaataccaccagtatagtactggtgaatttctcagcataaaatcgacatacctaaaaagttaataaaattcagctcttttccaatttca

SEQ ID NO: 364064 - DNA, 348 bp, Homo sapiens
cccgcccccgactgcgcggcgcccgccctagcggagtcagagctgctcgtctgaggctgctgaggcgacggccggtgtcgtggtcgcggtacctgttccaacacggctcgcgggcccgtgccggctccggtccccggcgcggctgtccgagcccctgcggcgggcggacgatggtgtggcggagcacgcggacgcgggcggcgcggcggcgggcatgaaggaggatggaagggcaggacgaggtgtcggcgcgggagcagcacttccacagccaagtgcgggagtccacggtgcgtggggaccgaggcagccctgacagtcccgcgtgcccgcccgggccctccgtcc

SEQ ID NO: 364065 - DNA, 6125 bp, Homo sapiens
cccgcccccgactgcgcggcgcccgccctagcggagtcagagctgctcgtctgaggctgctgaggcgacggccggtgtcgtggtcgcggtacctgttccaacacggctcgcgggcccgtgccggctccggtccccggcgcggctgtccgagcccctgcggcgggcggacgatggtgtggcggagcacgcggacgcgggcggcgcggcggcgggcatgaaggaggatggaagggcaggacgaggtgtcggcgcgggagcagcacttccacagccaagtgcgggagtccacgatatgtttccttctttttgccattctctacgttgtttcctacttcatcatcacaagatacaagagaaaatcagatgaacaagaagatgaagatgccatcgtcaacaggatttcgttgtttttgagcacgttcactctcgcagtgtcagctggggctgttttgcttttacccttctcaatcatcagcaatgaaatcctgctttcttttcctcagaactactatattcagtggctaaatggctccctgattcatggtttgtggaatcttgcttcccttttttccaacctttgtttatttgtattgatgccctttgcctttttctttctggaatcagaaggctttgctggcctgaaaaagggaatccgagcccgcattttagagactttggtcatgcttcttcttcttgcgttactcattcttgggatagtgtgggtagcttcagcactcattgacaacgatgccgcaagcatggaatctttatatgatctctgggagttctatctaccctatttatattcctgtatatcattgatgggatgtttgttacttctcttgtgtacaccagttggcctttctcgtatgttcacagtgatgggtcagttgctagtgaagccaacaattcttgaagacctggatgaacaaatttatatcattaccttagaggaagaagcactccagagacgactaaatgggctgtcttcatcggtggaatacaacataatggagttggaacaagaacttgaaaatgtaaagactcttaagacaaaattagagaggcgaaaaaaggcttcagcatgggaaagaaatttggtgtatcccgctgttatggttctccttcttattgagacatccatctcggtcctcttggtggcttgtaatattctttgcctattggttgatgaaacagcaatgccaaaaggaacaagggggcctggaataggaaatgcctctctttctacgtttggttttgtgggagctgcgcttgaaatcattttgattttctatcttatggtgtcctctgttgtcggcttctatagccttcgattttttggaaactttactcccaagaaagatgacacaactatgacaaagatcattggaaattgtgtgtccatcttggttttgagctctgctctgcctgtgatgtcgagaacactgggaatcactagatttgatctacttggcgactttggaaggtttaattggctgggaaatttctatattgtattatcctacaatttgctttttgctattgtgacaacattgtgtctggtccgaaaattcacctctgcagttcgagaagaacttttcaaggccctagggcttcataaacttcacttaccaaatacttcaagggattcagaaacagccaagccttctgtaaatgggcatcagaaagcactgtgagacgcacagacggcgtcttctgccaccaagagacccgagaactccagattcacgacattcctgtcccatgtagaagcatttccattcaaccgtggcccctcttcagaacctagacctatcagtgccatttttttttcataatctacgaagaacttggctatggctgatcttttttaaatttaactttctgatggaccctgtagtttccagttaagtgcagattccttacagacatatagaacagcgcattcttctgtagacatttgctcatgttggtaaatacaatcacccatatgaaaaaattgttttcacctgatatgaaaatgttagaaaaggcaaactccgggacttctaaagatttacttaaatcccattatgtactttattcagaatgtagaagctgacttgaaaggcatccttggtactaagtgaagcttattcagaaaatgcatttttcaaatgcaatggcaactgcttgtagatatcatttttgcagtgtatgttggagctgtaatggttgcaattatgtttcttatttccttaaaagcaaaaagcgtagtttctgatttatgttatagaatgatactgattagactttgagccaaggggaaaatactaaattcttttaaacctggagccttagagagccacaggaatatcttctgttgtacagtctaataagctgtggtaggaagtatcatgtaatcacagtttaatgacagtttatgtatatatataattcagtattccctctgataacatagttgccagtgtttaatacacttgtaacttggatttttaccttataggctatatgtatactcagttttttaaagcatttttttcagagatcacttaattccccatgcttctgcaatgcatataaaaactataaatgccgagtggtagaaactcctctttcttcatagtcctcaggctttggttacatttgcatatgccatttgaagcctccagcttttaccagtttaacatccaaagttcacagcatcagcattcatggtgtaagaacagttttgcagtataacacgatctgataatcattcagttattaaattgtaaataattattgggatggtttcttggctttaagtccactgaataaaaactatgaaattgcactctgtgtcaaccatccactaggatagaataccgaaatctgtgcatgcaaaaataggagatgggcccatttgcacacaattcgtagttatgcagtctgctatataaatatgttcacatgcactgtgtgtatgaaaatagatggtctgtgttcagacaaaagtaaaacatttttttcaaattgttacatttaaaggttttctgggagaaatttatgaaacgcaggctgtgtctatttgacatcagaaatttccactttaaaccaaaataataagaaactttaatctgtatatttacaacctttgttgagtacacttcccccttatttatacgtctgcatttccttccgagcttcacatctttctaaaatgcagcttggttttaaaataaaagaacattcattttgtgattctaaacaagcttcagtaaataccaccagtatagtactggtgaatttctcagcataaaatcgacatacctaaaaagttaataaaattcagctcttttccaatttcattgttatgcctattgaagtattaattgccaggtttgatttttagtgaagcttggagtccatactttgagcagaccaagtgaagggaagaacagaaagaaactcaggagtagagtaatatcacttctcacttacaccactttcaggcacatccaaagagttcctagatacttggaaaatgtctgaaaatttttaagtaaaatactaaacttttcagtgtttagctcaactttttgttcatttggaagtttctctccatccgaggacttaagccagttttggatttgtaagccctgagtacaatacacttcctggaggcatcctcactgctgttgaagcaaaggatatgcatggggtggaaggacggcttcgaacctgggactcatatgccttgagaacaaatagattgttacagccttgggctgctgcgtaatcacggttcctcgaggctcttcctgagcacatgcccaagcatctgcctctggagagactgactccaaatgcaggtgcttccattggagctaggtcggaggctgctttatatgacgaactccagaaatggatgccagaatacggaggccaaacgttctgagtcctggtaaggacagtcgctctgggggtcctcattttactgcagttcctgcacgccagtgaaagagaggagatagaccctggaaggcagagctgcagatgctcatcatcaggtcaattctggagctacagttttgtttctgactggatagggatgcaccagtgactgtcacatcaagcagtccttttattctctctcctttagtatcgattttaaagggcattaggcactatggttccagagtttcttggggaaaacttgcagattcttattaattggttctgcaatacttaaataaattattttacaattataagttttcagattataacatttgtattaatttttactgattttccaagatacttcttagatttactatttacgtagctttatgtacattctctgtaaaaatagacctctaaatatgaggctttacatgaaatttgtacacacatacacactaatgttagctccttaaattgctgcactaaggtgctggttagtagagatggacggagcctctcgcgttttgctctcagatgtgttaaaggcgcacgtgtacctgctctcagcggcagtgcggcctccccatctgctgggtgcccatggccctccctgcagcctcagtgatgacctcgtctgccagggacacaggttttcatcatttacaggctcttatgtgctagttttgttggtagcacgttatttaatgcataaaggcagaattcttacaagtttttttttttaatgtgaacatagatgcagcaccgactttttaaacttgaaaaaactggtataatgttaacttttaaaaataacatttggacacactagtaattgatttttgtttacagattgttttgtttacaaattgttagtctttgtttctatgagatacttttagtgtgactttttaaatgtcttagaaattaaaagttgtacaaaaagtgatttcatatttggtttataagcatttatatgtggggtttatttgttcttttgttttttccatcttaaatattatcatggctaaaacttaagggtatttatagtttaattccatttcagttttatagagggcagtaattattctgatgaatgttgaattaagaaatggatattttctttctctgttgtgcagttattggtagatcaatttcttataacccacaatgtagcatcaataattgatagcatgtattttatttaattacttgaattatttagacttgatttctctaattttttccataaaaggactgaacagcacctacttgtggtctggacagcttaacccagagttcctggaagaataaatgctgttagcatctggttaatttactggcagacagaagcctacttacagtggctttcaactttttgaccacatctttactgtggaatctcatcaaagacttggaagcaagggtggtgagaggggcctggggcgtggtgtggagggtcgagttctttgtcgtcccacagtcacccccaggaccaccttgcgaagccgaaaatacacatctgcattttaccgacaaggaacgccgctcagaaagctgcagacatttgcctggggtcacgcttacagtgggcagatgaactggatgtaaatacaggctgccctggaccattcctcagaactcatgggattttcgcgaccctcatcctcagtgaagttagatgaccattcctgcctttcatcccaccgattttcctaagtatctgttgcctgcaactaacactagttcctgtgtcagtaaagtactgcacttggttgcaaagaatagagatggactctgccaacataggcacggaaggtttacggggtggatggcatggctcacagatgtgatgagaaagccccggaagaagtgttgggcacagccttaggcacaacctttcctgggctcttcccatcactgaatgatccatgtatctccgggactctccttctagatccaaagtttagggcggcggaatcggactgctctggcctttgacacgtgcctgtgctttgcctgtcaacgctatggggagagagatgtcagcttacagaaaattgaggttctgtgattcagtttccctctgctctcttagaataaaagtgcttactcattgtttaaagcattctccaaattagtctgcaaattctttgatagtatacatccttaaaaaaaaa

SEQ ID NO: 364066 - DNA, 5855 bp, Homo sapiens
cccgcccccgactgcgcggcgcccgccctagcggagtcagagctgctcgtctgaggctgctgaggcgacggccggtgtcgtggtcgcggtacctgttccaacacggctcgcgggcccgtgccggctccggtccccggcgcggctgtccgagcccctgcggcgggcggacgatggtgtggcggagcacgcggacgcgggcggcgcggcggcgggcatgaaggaggatggaagggcaggacgaggtgtcggcgcgggagcagcacttccacagccaagtgcgggagtccacgatatgtttccttctttttgccattctctacgttgtttcctacttcatcatcacaagatacaagagaaaatcagatgaacaagaagatgaagatgccatcgtcaacaggatttcgttgtttttgagcacgttcactctcgcagtgtcagctggggctgttttgcttttacccttctcaatcatcagcaatgaaatcctgctttcttttcctcagaactactatattcagtggctaaatggctccctgattcatggtttgtggaatcttgcttcccttttttccaacctttgtttatttgtattgatgccctttgcctttttctttctggaatcagaaggctttgctggcctgaaaaagggaatccgagcccgcattttagagactttggtcatgcttcttcttcttgcgttactcattcttgggatagtgtgggtagcttcagcactcattgacaacgatgccgcaagcatggaatctttatatgatctctgggagttctatctaccctatttatattcctgtatatcattgatgggatgtttgttacttctcttgtgtacaccagttggcctttctcgtatgttcacagtgatgggtcagttgctagtgaagccaacaattcttgaagacctggatgaacaaatttatatcattaccttagaggaagaagcactccagagacgactaaatgggctgtcttcatcggtggaatacaacataatggagttggaacaagaacttgaaaatgtaaagactcttaagacaaaattagagaggcgaaaaaaggcttcagcatgggaaagaaatttggtgtatcccgctgttatggttctccttcttattgagacatccatctcggtcctcttggtggcttgtaatattctttgcctattggttgatgaaacagcaatgccaaaaggaacaagggggcctggaataggaaatgcctctctttctacgtttggttttgtgggagctgcgcttgaaatcattttgattttctatcttatggtgtcctctgttgtcggcttctatagccttcgattttttggaaactttactcccaagaaagatgacacaactatgacaaagatcattggaaattgtgtgtccatcttggttttgagctctgctctgcctgtgatgtcgagaacactgggaatcactagatttgatctacttggcgactttggaaggtttaattggctgggaaatttctatattgtattatcctacaatttgctttttgctattgtgacaacattgtgtctggtccgaaaattcacctctgcagttcgagaagaacttttcaaggccctagggcttcataaacttcacttaccaaatacttcaagggattcagaaacagccaagccttctgtaaatgggcatcagaaagcactgtgagacgcacagacggcgtcttctgccaccaagagacccgagaactccagattcacgacattcctgtcccatgtagaagcatttccattcaaccgtggcccctcttcagaacctagacctatcagtgccatttttttttcataatctacgaagaacttggctatggctgatcttttttaaatttaactttctgatggaccctgtagtttccagttaagtgcagattccttacagacatatagaacagcgcattcttctgtagacatttgctcatgttggtaaatacaatcacccatatgaaaaaattgttttcacctgatatgaaaatgttagaaaaggcaaactccgggacttctaaagatttacttaaatcccattatgtactttattcagaatgtagaagctgacttgaaaggcatccttggtactaagtgaagcttattcagaaaatgcatttttcaaatgcaatggcaactgcttgtagatatcatttttgcagtgtatgttggagctgtaatggttgcaattatgtttcttatttccttaaaagcaaaaagcgtagtttctgatttatgttatagaatgatactgattagactttgagccaaggggaaaatactaaattcttttaaacctggagccttagagagccacaggaatatcttctgttgtacagtctaataagctgtggtaggaagtatcatgtaatcacagtttaatgacagtttatgtatatatataattcagtattccctctgataacatagttgccagtgtttaatacacttgtaacttggatttttaccttataggctatatgtatactcagttttttaaagcatttttttcagagatcacttaattccccatgcttctgcaatgcatataaaaactataaatgccgagtggtagaaactcctctttcttcatagtcctcaggctttggttacatttgcatatgccatttgaagcctccagcttttaccagtttaacatccaaagttcacagcatcagcattcatggtgtaagaacagttttgcagtataacacgatctgataatcattcagttattaaattgtaaataattattgggatggtttcttggctttaagtccactgaataaaaactatgaaattgcactctgtgtcaaccatccactaggatagaataccgaaatctgtgcatgcaaaaataggagatgggcccatttgcacacaattcgtagttatgcagtctgctatataaatatgttcacatgcactgtgtgtatgaaaatagatggtctgtgttcagacaaaagtaaaacatttttttcaaattgttacatttaaaggttttctgggagaaatttatgaaacgcaggctgtgtctatttgacatcagaaatttccactttaaaccaaaataataagaaactttaatctgtatatttacaacctttgttgagtacacttcccccttatttatacgtctgcatttccttccgagcttcacatctttctaaaatgcagcttggttttaaaataaaagaacattcattttgtgattctaaacaagcttcagtaaataccaccagtatagtactggtgaatttctcagcataaaatcgacatacctaaaaagttaataaaattcagctcttttccaatttcattgttatgcctattgaagtattaattgccaggtttgatttttagtgaagcttggagtccatactttgagcagaccaagtgaagggaagaacagaaagaaactcaggagtagagtaatatcacttctcacttacaccactttcaggcacatccaaagagttcctagatacttggaaaatgtctgaaaatttttaagtaaaatactaaacttttcagtgtttagctcaactttttgttcatttggaagtttctctccatccgaggacttaagccagttttggatttgtaagccctgagtacaatacacttcctggaggcatcctcactgctgttgaagcaaaggatatgcatggggtggaaggacggcttcgaacctgggactcatatgccttgagaacaaatagattgttacagccttgggctgctgcgtaatcacggttcctcgaggctcttcctgagcacatgcccaagcatctgcctctggagagactgactccaaatgcaggtgcttccattggagctaggtcggaggctgctttatatgacgaactccagaaatggatgccagaatacggaggccaaacgttctgagtcctggtaaggacagtcgctctgggggtcctcattttactgcagttcctgcacgccagtgaaagagaggagatagaccctggaaggcagagctgcagatgctcatcatcaggtcaattctggagctacagttttgtttctgactggatagggatgcaccagtgactgtcacatcaagcagtccttttattctctctcctttagtatcgattttaaagggcattaggcactatggttccagagtttcttggggaaaacttgcagattcttattaattggttctgcaatacttaaataaattattttacaattataagttttcagattataacatttgtattaatttttactgattttccaagatacttcttagatttactatttacgtagctttatgtacattctctgtaaaaatagacctctaaatatgaggctttacatgaaatttgtacacacatacacactaatgttagctccttaaattgctgcactaaggtgctggttagtagagatggacggagcctctcgcgttttgctctcagatgtgttaaaggcgcacgtgtacctgctctcagcggcagtgcggcctccccatctgctgggtgcccatggccctccctgcagcctcagtgatgacctcgtctgccagggacacaggttttcatcatttacaggctcttatgtgctagttttgttggtagcacgttatttaatgcataaaggcagaattcttacaagtttttttttttaatgtgaacatagatgcagcaccgactttttaaacttgaaaaaactggtataatgttaacttttaaaaataacatttggacacactagtaattgatttttgtttacagattgttttgtttacaaattgttagtctttgtttctatgagatacttttagtgtgactttttaaatgtcttagaaattaaaagttgtacaaaaagtgatttcatatttggtttataagcatttatatgtggggtttatttgttcttttgttttttccatcttaaatattatcatggctaaaacttaagggtatttatagtttaattccatttcagttttatagagggcagtaattattctgatgaatgttgaattaagaaatggatattttctttctctgttgtgcagttattggtagatcaatttcttataacccacaatgtagcatcaataattgatagcatgtattttatttaattacttgaattatttagacttgatttctctaattttttccataaaaggactgaacagcacctacttgtggtctggacagcttaacccagagttcctggaagaataaatgctgttagcatctggttaatttactggcagacagaagcctacttacagtggctttcaactttttgaccacagtaagaaataacccattacacacacacacacacacacactctctctctctctctctctctctctctctctgtctctcagatacgtataagcaaaaatttaacaagacagtacttgtttttcctaagtgtgcatgctggcatcttctgttttattatttttaaaaatactagacacagacactaagttactttgtggcctcctaatagatggcagacttcagtttgaaaagcatccctttggaatgtggtttaaaagaagaaataatacaaagacctttttggagttttttttttttttggtttttgaatattgtttaggtaaaaattattgctgcaaacacaactgaagcaaaagtactgtgtacgcaaattacttgttgcactgtagaaaatgtaatatcaggagaagttcctaaaactcacaaatatatacaaaatttcaaaacttggtgattgatccatatgtcttgaaggaatattaggcaataaacttaccttttcaagagagttatttaacttccaa

SEQ ID NO: 364067 - DNA, 4873 bp, Homo sapiens
cccgcccccgactgcgcggcgcccgccctagcggagtcagagctgctcgtctgaggctgctgaggcgacggccggtgtcgtggtcgcggtacctgttccaacacggctcgcgggcccgtgccggctccggtccccggcgcggctgtccgagcccctgcggcgggcggacgatggtgtggcggagcacgcggacgcgggcggcgcggcggcgggcatgaaggaggatggaagggcaggacgaggtgtcggcgcgggagcagcacttccacagccaagtgcgggagtccacgatatgtttccttctttttgccattctctacgttgtttcctacttcatcatcacaagatacaagagaaaatcagatgaacaagaagatgaagatgccatcgtcaacaggatttcgttgtttttgagcacgttcactctcgcagtgtcagctggggctgttttgcttttacccttctcaatcatcagcaatgaaatcctgctttcttttcctcagaactactatattcagtggctaaatggctccctgattcatggtttgtggaatcttgcttcccttttttccaacctttgtttatttgtattgatgccctttgcctttttctttctggaatcagaaggctttgctggcctgaaaaagggaatccgagcccgcattttagagactttggtcatgcttcttcttcttgcgttactcattcttgggatagtgtgggtagcttcagcactcattgacaacgatgccgcaagcatggaatctttatatgatctctgggagttctatctaccctatttatattcctgtatatcattgatgggatgtttgttacttctcttgtgtacaccagttggcctttctcgtatgttcacagtgatgggtcagttgctagtgaagccaacaattcttgaagacctggatgaacaaatttatatcattaccttagaggaagaagcactccagagacgactaaatgggctgtcttcatcggtggaatacaacataatggagttggaacaagaacttgaaaatgtaaagactcttaagacaaaattagagaggcgaaaaaaggcttcagcatgggaaagaaatttggtgtatcccgctgttatggttctccttcttattgagacatccatctcggtcctcttggtggcttgtaatattctttgcctattggttgatgaaacagcaatgccaaaaggaacaagggggcctggaataggaaatgcctctctttctacgtttggttttgtgggagctgcgcttgaaatcattttgattttctatcttatggtgtcctctgttgtcggcttctatagccttcgattttttggaaactttactcccaagaaagatgacacaactatgacaaagatcattggaaattgtgtgtccatcttggttttgagctctgctctgcctgtgatgtcgagaacactgggaatcactagatttgatctacttggcgactttggaaggtttaattggctgggaaatttctatattgtattatcctacaatttgctttttgctattgtgacaacattgtgtctggtccgaaaattcacctctgcagttcgagaagaacttttcaaggccctagggcttcataaacttcacttaccaaatacttcaagggattcagaaacagccaagccttctgtaaatgggcatcagaaagcactgtgagacgcacagacggcgtcttctgccaccaagagacccgagaactccagattcacgacattcctgtcccatgtagaagcatttccattcaaccgtggcccctcttcagaacctagacctatcagtgccatttttttttcataatctacgaagaacttggctatggctgatcttttttaaatttaactttctgatggaccctgtagtttccagttaagtgcagattccttacagacatatagaacagcgcattcttctgtagacatttgctcatgttggtaaatacaatcacccatatgaaaaaattgttttcacctgatatgaaaatgttagaaaaggcaaactccgggacttctaaagatttacttaaatcccattatgtactttattcagaatgtagaagctgacttgaaaggcatccttggtactaagtgaagcttattcagaaaatgcatttttcaaatgcaatggcaactgcttgtagatatcatttttgcagtgtatgttggagctgtaatggttgcaattatgtttcttatttccttaaaagcaaaaagcgtagtttctgatttatgttatagaatgatactgattagactttgagccaaggggaaaatactaaattcttttaaacctggagccttagagagccacaggaatatcttctgttgtacagtctaataagctgtggtaggaagtatcatgtaatcacagtttaatgacagtttatgtatatatataattcagtattccctctgataacatagttgccagtgtttaatacacttgtaacttggatttttaccttataggctatatgtatactcagttttttaaagcatttttttcagagatcacttaattccccatgcttctgcaatgcatataaaaactataaatgccgagtggtagaaactcctctttcttcatagtcctcaggctttggttacatttgcatatgccatttgaagcctccagcttttaccagtttaacatccaaagttcacagcatcagcattcatggtgtaagaacagttttgcagtataacacgatctgataatcattcagttattaaattgtaaataattccactgaataaaaactatgaaattgcactctgtgtcaaccatccactaggatagaataccgaaatctgtgcatgcaaaaataggagatgggcccatttgcacacaattcgtagttatgcagtctgctatataaatatgttcacatgcactgtgtgtatgaaaatagatggtctgtgttcagacaaaagtaaaacatttttttcaaattgttacatttaaaggttttctgggagaaatttatgaaacgcaggctgtgtctatttgacatcagaaatttccactttaaaccaaaataataagaaactttaatctgtatatttacaacctttgttgagtacacttcccccttatttatacgtctgcatttccttccgagcttcacatctttctaaaatgcagcttggttttaaaataaaagaacattcattttgtgattctaaacaagcttcagtaaataccaccagtatagtactggtgaatttctcagcataaaatcgacatacctaaaaagttaataaaattcagctcttttccaatttcattgttatgcctattgaagtattaattgccaggtttgatttttagtgaagcttggagtccatactttgagcagaccaagtgaagggaagaacagaaagaaactcaggagtagagtaatatcacttctcacttacaccactttcaggcacatccaaagagttcctagatacttggaaaatgtctgaaaatttttaagtaaaatactaaacttttcagtgtttagctcaactttttgttcatttggaagtttctctccatccgaggacttaagccagttttggatttgtaagccctgagtacaatacacttcctggaggcatcctcactgctgttgaagcaaaggatatgcatggggtggaaggacggcttcgaacctgggactcatatgccttgagaacaaatagattgttacagccttgggctgctgcgtaatcacggttcctcgaggctcttcctgagcacatgcccaagcatctgcctctggagagactgactccaaatgcaggtgcttccattggagctaggtcggaggctgctttatatgacgaactccagaaatggatgccagaatacggaggccaaacgttctgagtcctggtaaggacagtcgctctgggggtcctcattttactgcagttcctgcacgccagtgaaagagaggagatagaccctggaaggcagagctgcagatgctcatcatcaggtcaattctggagctacagttttgtttctgactggatagggatgcaccagtgactgtcacatcaagcagtccttttattctctctcctttagtatcgattttaaagggcattaggcactatggttccagagtttcttggggaaaacttgcagattcttattaattggttctgcaatacttaaataaattattttacaattataagttttcagattataacatttgtattaatttttactgattttccaagatacttcttagatttactatttacgtagctttatgtacattctctgtaaaaatagacctctaaatatgaggctttacatgaaatttgtacacacatacacactaatgttagctccttaaattgctgcactaaggtgctggttagtagagatggacggagcctctcgcgttttgctctcagatgtgttaaaggcgcacgtgtacctgctctcagcggcagtgcggcctccccatctgctgggtgcccatggccctccctgcagcctcagtgatgacctcgtctgccagggacacaggttttcatcatttacaggctcttatgtgctagttttgttggtagcacgttatttaatgcataaaggcagaattcttacaagtttttttttttaatgtgaacatagatgcagcaccgactttttaaacttgaaaaaactggtataatgttaacttttaaaaataacatttggacacactagtaattgatttttgtttacagattgttttgtttacaaattgttagtctttgtttctatgagatacttttagtgtgactttttaaatgtcttagaaattaaaagttgtacaaaaagtgatttca

SEQ ID NO: 364068 - DNA, 4786 bp, Homo sapiens
cccgcccccgactgcgcggcgcccgccctagcggagtcagagctgctcgtctgaggctgctgaggcgacggccggtgtcgtggtcgcggtacctgttccaacacggctcgcgggcccgtgccggctccggtccccggcgcggctgtccgagcccctgcggcgggcggacgatggtgtggcggagcacgcggacgcgggcggcgcggcggcgggcatgaaggaggatggaagggcaggacgaggtgtcggcgcgggagcagcacttccacagccaagtgcgggagtccacggttgtttttgagcacgttcactctcgcagtgtcagctggggctgttttgcttttacccttctcaatcatcagcaatgaaatcctgctttcttttcctcagaactactatattcagtggctaaatggctccctgattcatggtttgtggaatcttgcttcccttttttccaacctttgtttatttgtattgatgccctttgcctttttctttctggaatcagaaggctttgctggcctgaaaaagggaatccgagcccgcattttagagactttggtcatgcttcttcttcttgcgttactcattcttgggatagtgtgggtagcttcagcactcattgacaacgatgccgcaagcatggaatctttatatgatctctgggagttctatctaccctatttatattcctgtatatcattgatgggatgtttgttacttctcttgtgtacaccagttggcctttctcgtatgttcacagtgatgggtcagttgctagtgaagccaacaattcttgaagacctggatgaacaaatttatatcattaccttagaggaagaagcactccagagacgactaaatgggctgtcttcatcggtggaatacaacataatggagttggaacaagaacttgaaaatgtaaagactcttaagacaaaattagagaggcgaaaaaaggcttcagcatgggaaagaaatttggtgtatcccgctgttatggttctccttcttattgagacatccatctcggtcctcttggtggcttgtaatattctttgcctattggttgatgaaacagcaatgccaaaaggaacaagggggcctggaataggaaatgcctctctttctacgtttggttttgtgggagctgcgcttgaaatcattttgattttctatcttatggtgtcctctgttgtcggcttctatagccttcgattttttggaaactttactcccaagaaagatgacacaactatgacaaagatcattggaaattgtgtgtccatcttggttttgagctctgctctgcctgtgatgtcgagaacactgggaatcactagatttgatctacttggcgactttggaaggtttaattggctgggaaatttctatattgtattatcctacaatttgctttttgctattgtgacaacattgtgtctggtccgaaaattcacctctgcagttcgagaagaacttttcaaggccctagggcttcataaacttcacttaccaaatacttcaagggattcagaaacagccaagccttctgtaaatgggcatcagaaagcactgtgagacgcacagacggcgtcttctgccaccaagagacccgagaactccagattcacgacattcctgtcccatgtagaagcatttccattcaaccgtggcccctcttcagaacctagacctatcagtgccatttttttttcataatctacgaagaacttggctatggctgatcttttttaaatttaactttctgatggaccctgtagtttccagttaagtgcagattccttacagacatatagaacagcgcattcttctgtagacatttgctcatgttggtaaatacaatcacccatatgaaaaaattgttttcacctgatatgaaaatgttagaaaaggcaaactccgggacttctaaagatttacttaaatcccattatgtactttattcagaatgtagaagctgacttgaaaggcatccttggtactaagtgaagcttattcagaaaatgcatttttcaaatgcaatggcaactgcttgtagatatcatttttgcagtgtatgttggagctgtaatggttgcaattatgtttcttatttccttaaaagcaaaaagcgtagtttctgatttatgttatagaatgatactgattagactttgagccaaggggaaaatactaaattcttttaaacctggagccttagagagccacaggaatatcttctgttgtacagtctaataagctgtggtaggaagtatcatgtaatcacagtttaatgacagtttatgtatatatataattcagtattccctctgataacatagttgccagtgtttaatacacttgtaacttggatttttaccttataggctatatgtatactcagttttttaaagcatttttttcagagatcacttaattccccatgcttctgcaatgcatataaaaactataaatgccgagtggtagaaactcctctttcttcatagtcctcaggctttggttacatttgcatatgccatttgaagcctccagcttttaccagtttaacatccaaagttcacagcatcagcattcatggtgtaagaacagttttgcagtataacacgatctgataatcattcagttattaaattgtaaataattattgggatggtttcttggctttaagtccactgaataaaaactatgaaattgcactctgtgtcaaccatccactaggatagaataccgaaatctgtgcatgcaaaaataggagatgggcccatttgcacacaattcgtagttatgcagtctgctatataaatatgttcacatgcactgtgtgtatgaaaatagatggtctgtgttcagacaaaagtaaaacatttttttcaaattgttacatttaaaggttttctgggagaaatttatgaaacgcaggctgtgtctatttgacatcagaaatttccactttaaaccaaaataataagaaactttaatctgtatatttacaacctttgttgagtacacttcccccttatttatacgtctgcatttccttccgagcttcacatctttctaaaatgcagcttggttttaaaataaaagaacattcattttgtgattctaaacaagcttcagtaaataccaccagtatagtactggtgaatttctcagcataaaatcgacatacctaaaaagttaataaaattcagctcttttccaatttcattgttatgcctattgaagtattaattgccaggtttgatttttagtgaagcttggagtccatactttgagcagaccaagtgaagggaagaacagaaagaaactcaggagtagagtaatatcacttctcacttacaccactttcaggcacatccaaagagttcctagatacttggaaaatgtctgaaaatttttaagtaaaatactaaacttttcagtgtttagctcaactttttgttcatttggaagtttctctccatccgaggacttaagccagttttggatttgtaagccctgagtacaatacacttcctggaggcatcctcactgctgttgaagcaaaggatatgcatggggtggaaggacggcttcgaacctgggactcatatgccttgagaacaaatagattgttacagccttgggctgctgcgtaatcacggttcctcgaggctcttcctgagcacatgcccaagcatctgcctctggagagactgactccaaatgcaggtgcttccattggagctaggtcggaggctgctttatatgacgaactccagaaatggatgccagaatacggaggccaaacgttctgagtcctggtaaggacagtcgctctgggggtcctcattttactgcagttcctgcacgccagtgaaagagaggagatagaccctggaaggcagagctgcagatgctcatcatcaggtcaattctggagctacagttttgtttctgactggatagggatgcaccagtgactgtcacatcaagcagtccttttattctctctcctttagtatcgattttaaagggcattaggcactatggttccagagtttcttggggaaaacttgcagattcttattaattggttctgcaatacttaaataaattattttacaattataagttttcagattataacatttgtattaatttttactgattttccaagatacttcttagatttactatttacgtagctttatgtacattctctgtaaaaatagacctctaaatatgaggctttacatgaaatttgtacacacatacacactaatgttagctccttaaattgctgcactaaggtgctggttagtagagatggacggagcctctcgcgttttgctctcagatgtgttaaaggcgcacgtgtacctgctctcagcggcagtgcggcctccccatctgctgggtgcccatggccctccctgcagcctcagtgatgacctcgtctgccagggacacaggttttcatcatttacaggctcttatgtgctagttttgttggtagcacgttatttaatgcataaaggcagaattcttacaagtttttttttttaatgtgaacatagatgcagcaccgactttttaaacttgaaaaaactggtataatgttaacttttaaaaataacatttggacacactagtaattgatttttgtttacagattgttttgtttacaaattgttagtctttgtttctatgagatacttttagtgtgactttttaaatgtcttagaaattaaaagttgtacaaaaagtgatttca

SEQ ID NO: 364069 - DNA, 5095 bp, Homo sapiens
cccgcccccgactgcgcggcgcccgccctagcggagtcagagctgctcgtctgaggctgctgaggcgacggccggtgtcgtggtcgcggtacctgttccaacacggctcgcgggcccgtgccggctccggtccccggcgcggctgtccgagcccctgcggcgggcggacgatggtgtggcggagcacgcggacgcgggcggcgcggcggcgggcatgaaggaggatggaagggcaggacgaggtgtcggcgcgggagcagcacttccacagccaagtgcgggagtccacgatatgtttccttctttttgccattctctacgttgtttcctacttcatcatcacaagatacaagagaaaatcaggatctccttctgtcccctaggccggagagcagtggggcaatcatggctgactgtagcctcgacctcctgggctcaagtgattctccaacctcagcctcctgagtatcctgcactacagatgaacaagaagatgaagatgccatcgtcaacaggatttcgttgtttttgagcacgttcactctcgcagtgtcagctggggctgttttgcttttacccttctcaatcatcagcaatgaaatcctgctttcttttcctcagaactactatattcagtggctaaatggctccctgattcatggtttgtggaatcttgcttcccttttttccaacctttgtttatttgtattgatgccctttgcctttttctttctggaatcagaaggctttgctggcctgaaaaaggagggcaagatgtccaggcaaaaccttgtttaaatgttcatcaccatagaaacatgacagcttctccatagagcttttggaatccgagcccgcattttagagactttggtcatgcttcttcttcttgcgttactcattcttgggatagtgtgggtagcttcagcactcattgacaacgatgccgcaagcatggaatctttatatgatctctgggagttctatctaccctatttatattcctgtatatcattgatgggatgtttgttacttctcttgtgtacaccagttggcctttctcgtatgttcacagtgatgggtcagttgctagtgaagccaacaattcttgaagacctggatgaacaaatttatatcattaccttagaggaagaagcactccagagacgactaaatgggctgtcttcatcggtggaatacaacataatggagttggaacaagaacttgaaaatgtaaagactcttaagacaaaattagagaggcgaaaaaaggcttcagcatgggaaagaaatttggtgtatcccgctgttatggttctccttcttattgagacatccatctcggtcctcttggtggcttgtaatattctttgcctattggttgatgaaacagcaatgccaaaaggaacaagggggcctggaataggaaatgcctctctttctacgtttggttttgtgggagctgcgcttgaaatcattttgattttctatcttatggtgtcctctgttgtcggcttctatagccttcgattttttggaaactttactcccaagaaagatgacacaactatgacaaagatcattggaaattgtgtgtccatcttggttttgagctctgctctgcctgtgatgtcgagaacactgggaatcactagatttgatctacttggcgactttggaaggtttaattggctgggaaatttctatattgtattatcctacaatttgctttttgctattgtgacaacattgtgtctggtccgaaaattcacctctgcagttcgagaagaacttttcaaggccctagggcttcataaacttcacttaccaaatacttcaagggattcagaaacagccaagccttctgtaaatgggcatcagaaagcactgtgagacgcacagacggcgtcttctgccaccaagagacccgagaactccagattcacgacattcctgtcccatgtagaagcatttccattcaaccgtggcccctcttcagaacctagacctatcagtgccatttttttttcataatctacgaagaacttggctatggctgatcttttttaaatttaactttctgatggaccctgtagtttccagttaagtgcagattccttacagacatatagaacagcgcattcttctgtagacatttgctcatgttggtaaatacaatcacccatatgaaaaaattgttttcacctgatatgaaaatgttagaaaaggcaaactccgggacttctaaagatttacttaaatcccattatgtactttattcagaatgtagaagctgacttgaaaggcatccttggtactaagtgaagcttattcagaaaatgcatttttcaaatgcaatggcaactgcttgtagatatcatttttgcagtgtatgttggagctgtaatggttgcaattatgtttcttatttccttaaaagcaaaaagcgtagtttctgatttatgttatagaatgatactgattagactttgagccaaggggaaaatactaaattcttttaaacctggagccttagagagccacaggaatatcttctgttgtacagtctaataagctgtggtaggaagtatcatgtaatcacagtttaatgacagtttatgtatatatataattcagtattccctctgataacatagttgccagtgtttaatacacttgtaacttggatttttaccttataggctatatgtatactcagttttttaaagcatttttttcagagatcacttaattccccatgcttctgcaatgcatataaaaactataaatgccgagtggtagaaactcctctttcttcatagtcctcaggctttggttacatttgcatatgccatttgaagcctccagcttttaccagtttaacatccaaagttcacagcatcagcattcatggtgtaagaacagttttgcagtataacacgatctgataatcattcagttattaaattgtaaataattattgggatggtttcttggctttaagtccactgaataaaaactatgaaattgcactctgtgtcaaccatccactaggatagaataccgaaatctgtgcatgcaaaaataggagatgggcccatttgcacacaattcgtagttatgcagtctgctatataaatatgttcacatgcactgtgtgtatgaaaatagatggtctgtgttcagacaaaagtaaaacatttttttcaaattgttacatttaaaggttttctgggagaaatttatgaaacgcaggctgtgtctatttgacatcagaaatttccactttaaaccaaaataataagaaactttaatctgtatatttacaacctttgttgagtacacttcccccttatttatacgtctgcatttccttccgagcttcacatctttctaaaatgcagcttggttttaaaataaaagaacattcattttgtgattctaaacaagcttcagtaaataccaccagtatagtactggtgaatttctcagcataaaatcgacatacctaaaaagttaataaaattcagctcttttccaatttcattgttatgcctattgaagtattaattgccaggtttgatttttagtgaagcttggagtccatactttgagcagaccaagtgaagggaagaacagaaagaaactcaggagtagagtaatatcacttctcacttacaccactttcaggcacatccaaagagttcctagatacttggaaaatgtctgaaaatttttaagtaaaatactaaacttttcagtgtttagctcaactttttgttcatttggaagtttctctccatccgaggacttaagccagttttggatttgtaagccctgagtacaatacacttcctggaggcatcctcactgctgttgaagcaaaggatatgcatggggtggaaggacggcttcgaacctgggactcatatgccttgagaacaaatagattgttacagccttgggctgctgcgtaatcacggttcctcgaggctcttcctgagcacatgcccaagcatctgcctctggagagactgactccaaatgcaggtgcttccattggagctaggtcggaggctgctttatatgacgaactccagaaatggatgccagaatacggaggccaaacgttctgagtcctggtaaggacagtcgctctgggggtcctcattttactgcagttcctgcacgccagtgaaagagaggagatagaccctggaaggcagagctgcagatgctcatcatcaggtcaattctggagctacagttttgtttctgactggatagggatgcaccagtgactgtcacatcaagcagtccttttattctctctcctttagtatcgattttaaagggcattaggcactatggttccagagtttcttggggaaaacttgcagattcttattaattggttctgcaatacttaaataaattattttacaattataagttttcagattataacatttgtattaatttttactgattttccaagatacttcttagatttactatttacgtagctttatgtacattctctgtaaaaatagacctctaaatatgaggctttacatgaaatttgtacacacatacacactaatgttagctccttaaattgctgcactaaggtgctggttagtagagatggacggagcctctcgcgttttgctctcagatgtgttaaaggcgcacgtgtacctgctctcagcggcagtgcggcctccccatctgctgggtgcccatggccctccctgcagcctcagtgatgacctcgtctgccagggacacaggttttcatcatttacaggctcttatgtgctagttttgttggtagcacgttatttaatgcataaaggcagaattcttacaagtttttttttttaatgtgaacatagatgcagcaccgactttttaaacttgaaaaaactggtataatgttaacttttaaaaataacatttggacacactagtaattgatttttgtttacagattgttttgtttacaaattgttagtctttgtttctatgagatacttttagtgtgactttttaaatgtcttagaaattaaaagttgtacaaaaagtgatttca

SEQ ID NO: 364070 - DNA, 4759 bp, Homo sapiens
cccgcccccgactgcgcggcgcccgccctagcggagtcagagctgctcgtctgaggctgctgaggcgacggccggtgtcgtggtcgcggtacctgttccaacacggctcgcgggcccgtgccggctccggtccccggcgcggctgtccgagcccctgcggcgggcggacgatggtgtggcggagcacgcggacgcgggcggcgcggcggcgggcatgaaggaggatggaagggcaggacgaggtgtcggcgcgggagcagcacttccacagccaagtgcgggagtccacgatatgtttccttctttttgccattctctacgttgtttcctacttcatcatcacaagatacaagagaaaatcagatgaacaagaagatgaagatgccatcgtcaacaggatttcgtttgtggaatcttgcttcccttttttccaacctttgtttatttgtattgatgccctttgcctttttctttctggaatcagaaggctttgctggcctgaaaaagggaatccgagcccgcattttagagactttggtcatgcttcttcttcttgcgttactcattcttgggatagtgtgggtagcttcagcactcattgacaacgatgccgcaagcatggaatctttatatgatctctgggagttctatctaccctatttatattcctgtatatcattgatgggatgtttgttacttctcttgtgtacaccagttggcctttctcgtatgttcacagtgatgggtcagttgctagtgaagccaacaattcttgaagacctggatgaacaaatttatatcattaccttagaggaagaagcactccagagacgactaaatgggctgtcttcatcggtggaatacaacataatggagttggaacaagaacttgaaaatgtaaagactcttaagacaaaattagagaggcgaaaaaaggcttcagcatgggaaagaaatttggtgtatcccgctgttatggttctccttcttattgagacatccatctcggtcctcttggtggcttgtaatattctttgcctattggttgatgaaacagcaatgccaaaaggaacaagggggcctggaataggaaatgcctctctttctacgtttggttttgtgggagctgcgcttgaaatcattttgattttctatcttatggtgtcctctgttgtcggcttctatagccttcgattttttggaaactttactcccaagaaagatgacacaactatgacaaagatcattggaaattgtgtgtccatcttggttttgagctctgctctgcctgtgatgtcgagaacactgggaatcactagatttgatctacttggcgactttggaaggtttaattggctgggaaatttctatattgtattatcctacaatttgctttttgctattgtgacaacattgtgtctggtccgaaaattcacctctgcagttcgagaagaacttttcaaggccctagggcttcataaacttcacttaccaaatacttcaagggattcagaaacagccaagccttctgtaaatgggcatcagaaagcactgtgagacgcacagacggcgtcttctgccaccaagagacccgagaactccagattcacgacattcctgtcccatgtagaagcatttccattcaaccgtggcccctcttcagaacctagacctatcagtgccatttttttttcataatctacgaagaacttggctatggctgatcttttttaaatttaactttctgatggaccctgtagtttccagttaagtgcagattccttacagacatatagaacagcgcattcttctgtagacatttgctcatgttggtaaatacaatcacccatatgaaaaaattgttttcacctgatatgaaaatgttagaaaaggcaaactccgggacttctaaagatttacttaaatcccattatgtactttattcagaatgtagaagctgacttgaaaggcatccttggtactaagtgaagcttattcagaaaatgcatttttcaaatgcaatggcaactgcttgtagatatcatttttgcagtgtatgttggagctgtaatggttgcaattatgtttcttatttccttaaaagcaaaaagcgtagtttctgatttatgttatagaatgatactgattagactttgagccaaggggaaaatactaaattcttttaaacctggagccttagagagccacaggaatatcttctgttgtacagtctaataagctgtggtaggaagtatcatgtaatcacagtttaatgacagtttatgtatatatataattcagtattccctctgataacatagttgccagtgtttaatacacttgtaacttggatttttaccttataggctatatgtatactcagttttttaaagcatttttttcagagatcacttaattccccatgcttctgcaatgcatataaaaactataaatgccgagtggtagaaactcctctttcttcatagtcctcaggctttggttacatttgcatatgccatttgaagcctccagcttttaccagtttaacatccaaagttcacagcatcagcattcatggtgtaagaacagttttgcagtataacacgatctgataatcattcagttattaaattgtaaataattattgggatggtttcttggctttaagtccactgaataaaaactatgaaattgcactctgtgtcaaccatccactaggatagaataccgaaatctgtgcatgcaaaaataggagatgggcccatttgcacacaattcgtagttatgcagtctgctatataaatatgttcacatgcactgtgtgtatgaaaatagatggtctgtgttcagacaaaagtaaaacatttttttcaaattgttacatttaaaggttttctgggagaaatttatgaaacgcaggctgtgtctatttgacatcagaaatttccactttaaaccaaaataataagaaactttaatctgtatatttacaacctttgttgagtacacttcccccttatttatacgtctgcatttccttccgagcttcacatctttctaaaatgcagcttggttttaaaataaaagaacattcattttgtgattctaaacaagcttcagtaaataccaccagtatagtactggtgaatttctcagcataaaatcgacatacctaaaaagttaataaaattcagctcttttccaatttcattgttatgcctattgaagtattaattgccaggtttgatttttagtgaagcttggagtccatactttgagcagaccaagtgaagggaagaacagaaagaaactcaggagtagagtaatatcacttctcacttacaccactttcaggcacatccaaagagttcctagatacttggaaaatgtctgaaaatttttaagtaaaatactaaacttttcagtgtttagctcaactttttgttcatttggaagtttctctccatccgaggacttaagccagttttggatttgtaagccctgagtacaatacacttcctggaggcatcctcactgctgttgaagcaaaggatatgcatggggtggaaggacggcttcgaacctgggactcatatgccttgagaacaaatagattgttacagccttgggctgctgcgtaatcacggttcctcgaggctcttcctgagcacatgcccaagcatctgcctctggagagactgactccaaatgcaggtgcttccattggagctaggtcggaggctgctttatatgacgaactccagaaatggatgccagaatacggaggccaaacgttctgagtcctggtaaggacagtcgctctgggggtcctcattttactgcagttcctgcacgccagtgaaagagaggagatagaccctggaaggcagagctgcagatgctcatcatcaggtcaattctggagctacagttttgtttctgactggatagggatgcaccagtgactgtcacatcaagcagtccttttattctctctcctttagtatcgattttaaagggcattaggcactatggttccagagtttcttggggaaaacttgcagattcttattaattggttctgcaatacttaaataaattattttacaattataagttttcagattataacatttgtattaatttttactgattttccaagatacttcttagatttactatttacgtagctttatgtacattctctgtaaaaatagacctctaaatatgaggctttacatgaaatttgtacacacatacacactaatgttagctccttaaattgctgcactaaggtgctggttagtagagatggacggagcctctcgcgttttgctctcagatgtgttaaaggcgcacgtgtacctgctctcagcggcagtgcggcctccccatctgctgggtgcccatggccctccctgcagcctcagtgatgacctcgtctgccagggacacaggttttcatcatttacaggctcttatgtgctagttttgttggtagcacgttatttaatgcataaaggcagaattcttacaagtttttttttttaatgtgaacatagatgcagcaccgactttttaaacttgaaaaaactggtataatgttaacttttaaaaataacatttggacacactagtaattgatttttgtttacagattgttttgtttacaaattgttagtctttgtttctatgagatacttttagtgtgactttttaaatgtcttagaaattaaaagttgtacaaaaagtgatttca

SEQ ID NO: 364071 - DNA, 3933 bp, Homo sapiens
cagatgacgatcatcatgactaagtatagcgtcggtcaggtcaagctagctaccagcaagtacttgataatgtaaagactcttaagacaaaattagagaggcgaaaaaaggcttcagcatgggaaagaaatttggtgtatcccgctgttatggttctccttcttattgagacatccatctcggtcctcttggtggcttgtaatattctttgcctattggttgatgaaacagcaatgccaaaaggaacaagggggcctggaataggaaatgcctctctttctacgtttggttttgtgggagctgcgcttgaaatcattttgattttctatcttatggtgtcctctgttgtcggcttctatagccttcgattttttggaaactttactcccaagaaagatgacacaactatgacaaagatcattggaaattgtgtgtccatcttggttttgagctctgctctgcctgtgatgtcgagaacactgggaatcactagatttgatctacttggcgactttggaaggtttaattggctgggaaatttctatattgtattatcctacaatttgctttttgctattgtgacaacattgtgtctggtccgaaaattcacctctgcagttcgagaagaacttttcaaggccctagggcttcataaacttcacttaccaaatacttcaagggattcagaaacagccaagccttctgtaaatgggcatcagaaagcactgtgagacgcacagacggcgtcttctgccaccaagagacccgagaactccagattcacgacattcctgtcccatgtagaagcatttccattcaaccgtggcccctcttcagaacctagacctatcagtgccatttttttttcataatctacgaagaacttggctatggctgatcttttttaaatttaactttctgatggaccctgtagtttccagttaagtgcagattccttacagacatatagaacagcgcattcttctgtagacatttgctcatgttggtaaatacaatcacccatatgaaaaaattgttttcacctgatatgaaaatgttagaaaaggcaaactccgggacttctaaagatttacttaaatcccattatgtactttattcagaatgtagaagctgacttgaaaggcatccttggtactaagtgaagcttattcagaaaatgcatttttcaaatgcaatggcaactgcttgtagatatcatttttgcagtgtatgttggagctgtaatggttgcaattatgtttcttatttccttaaaagcaaaaagcgtagtttctgatttatgttatagaatgatactgattagactttgagccaaggggaaaatactaaattcttttaaacctggagccttagagagccacaggaatatcttctgttgtacagtctaataagctgtggtaggaagtatcatgtaatcacagtttaatgacagtttatgtatatatataattcagtattccctctgataacatagttgccagtgtttaatacacttgtaacttggatttttaccttataggctatatgtatactcagttttttaaagcatttttttcagagatcacttaattccccatgcttctgcaatgcatataaaaactataaatgccgagtggtagaaactcctctttcttcatagtcctcaggctttggttacatttgcatatgccatttgaagcctccagcttttaccagtttaacatccaaagttcacagcatcagcattcatggtgtaagaacagttttgcagtataacacgatctgataatcattcagttattaaattgtaaataattattgggatggtttcttggctttaagtccactgaataaaaactatgaaattgcactctgtgtcaaccatccactaggatagaataccgaaatctgtgcatgcaaaaataggagatgggcccatttgcacacaattcgtagttatgcagtctgctatataaatatgttcacatgcactgtgtgtatgaaaatagatggtctgtgttcagacaaaagtaaaacatttttttcaaattgttacatttaaaggttttctgggagaaatttatgaaacgcaggctgtgtctatttgacatcagaaatttccactttaaaccaaaataataagaaactttaatctgtatatttacaacctttgttgagtacacttcccccttatttatacgtctgcatttccttccgagcttcacatctttctaaaatgcagcttggttttaaaataaaagaacattcattttgtgattctaaacaagcttcagtaaataccaccagtatagtactggtgaatttctcagcataaaatcgacatacctaaaaagttaataaaattcagctcttttccaatttcattgttatgcctattgaagtattaattgccaggtttgatttttagtgaagcttggagtccatactttgagcagaccaagtgaagggaagaacagaaagaaactcaggagtagagtaatatcacttctcacttacaccactttcaggcacatccaaagagttcctagatacttggaaaatgtctgaaaatttttaagtaaaatactaaacttttcagtgtttagctcaactttttgttcatttggaagtttctctccatccgaggacttaagccagttttggatttgtaagccctgagtacaatacacttcctggaggcatcctcactgctgttgaagcaaaggatatgcatggggtggaaggacggcttcgaacctgggactcatatgccttgagaacaaatagattgttacagccttgggctgctgcgtaatcacggttcctcgaggctcttcctgagcacatgcccaagcatctgcctctggagagactgactccaaatgcaggtgcttccattggagctaggtcggaggctgctttatatgacgaactccagaaatggatgccagaatacggaggccaaacgttctgagtcctggtaaggacagtcgctctgggggtcctcattttactgcagttcctgcacgccagtgaaagagaggagatagaccctggaaggcagagctgcagatgctcatcatcaggtcaattctggagctacagttttgtttctgactggatagggatgcaccagtgactgtcacatcaagcagtccttttattctctctcctttagtatcgattttaaagggcattaggcactatggttccagagtttcttggggaaaacttgcagattcttattaattggttctgcaatacttaaataaattattttacaattataagttttcagattataacatttgtattaatttttactgattttccaagatacttcttagatttactatttacgtagctttatgtacattctctgtaaaaatagacctctaaatatgaggctttacatgaaatttgtacacacatacacactaatgttagctccttaaattgctgcactaaggtgctggttagtagagatggacggagcctctcgcgttttgctctcagatgtgttaaaggcgcacgtgtacctgctctcagcggcagtgcggcctccccatctgctgggtgcccatggccctccctgcagcctcagtgatgacctcgtctgccagggacacaggttttcatcatttacaggctcttatgtgctagttttgttggtagcacgttatttaatgcataaaggcagaattcttacaagtttttttttttaatgtgaacatagatgcagcaccgactttttaaacttgaaaaaactggtataatgttaacttttaaaaataacatttggacacactagtaattgatttttgtttacagattgttttgtttacaaattgttagtctttgtttctatgagatacttttagtgtgactttttaaatgtcttagaaattaaaagttgtacaaaaagtgatttca

SEQ ID NO: 364072 - DNA, 4131 bp, Homo sapiens
cccgcccccgactgcgcggcgcccgccctagcggagtcagagctgctcgtctgaggctgctgaggcgacggccggtgtcgtggtcgcggtacctgttccaacacggctcgcgggcccgtgccggctccggtccccggcgcggctgtccgagcccctgcggcgggcggacgatggtgtggcggagcacgcggacgcgggcggcgcggcggcgggcatgaaggaggatggaagggcaggacgaggtgtcggcgcgggagcagcacttccacagccaagtgcgggagtccacgatatgtttccttctttttgccattctctacgttgtttcctacttcatcatcacaagatacaagagaaaatcagatgaacaagaagatgaagatgccatcgtcaacaggatttcgttgtttttgagcacgttcactctcgcagtgtcagctggggctgttttgcttttacccttctcaatcatcagcaatgaaatcctgctttcttttcctcagaactactatattcagtggctaaatggctccctgattcatggtttgtggaatcttgcttcccttttttccaacctttgtttatttgtattgatgccctttgcctttttctttctggaatcagaaggctttgctggcctgaaaaagggaatccgagcccgcattttagagactttggtcatgcttcttcttcttgcgttactcattcttgggatagtgtgggtagcttcagcactcattgacaacgatgccgcaagcatggaatctttatatgatctctgggagttctatctaccctatttatattcctgtatatcattgatgggatgtttgttacttctctggcttcataaacttcacttaccaaatacttcaagggattcagaaacagccaagccttctgtaaatgggcatcagaaagcactgtgagacgcacagacggcgtcttctgccaccaagagacccgagaactccagattcacgacattcctgtcccatgtagaagcatttccattcaaccgtggcccctcttcagaacctagacctatcagtgccatttttttttcataatctacgaagaacttggctatggctgatcttttttaaatttaactttctgatggaccctgtagtttccagttaagtgcagattccttacagacatatagaacagcgcattcttctgtagacatttgctcatgttggtaaatacaatcacccatatgaaaaaattgttttcacctgatatgaaaatgttagaaaaggcaaactccgggacttctaaagatttacttaaatcccattatgtactttattcagaatgtagaagctgacttgaaaggcatccttggtactaagtgaagcttattcagaaaatgcatttttcaaatgcaatggcaactgcttgtagatatcatttttgcagtgtatgttggagctgtaatggttgcaattatgtttcttatttccttaaaagcaaaaagcgtagtttctgatttatgttatagaatgatactgattagactttgagccaaggggaaaatactaaattcttttaaacctggagccttagagagccacaggaatatcttctgttgtacagtctaataagctgtggtaggaagtatcatgtaatcacagtttaatgacagtttatgtatatatataattcagtattccctctgataacatagttgccagtgtttaatacacttgtaacttggatttttaccttataggctatatgtatactcagttttttaaagcatttttttcagagatcacttaattccccatgcttctgcaatgcatataaaaactataaatgccgagtggtagaaactcctctttcttcatagtcctcaggctttggttacatttgcatatgccatttgaagcctccagcttttaccagtttaacatccaaagttcacagcatcagcattcatggtgtaagaacagttttgcagtataacacgatctgataatcattcagttattaaattgtaaataattattgggatggtttcttggctttaagtccactgaataaaaactatgaaattgcactctgtgtcaaccatccactaggatagaataccgaaatctgtgcatgcaaaaataggagatgggcccatttgcacacaattcgtagttatgcagtctgctatataaatatgttcacatgcactgtgtgtatgaaaatagatggtctgtgttcagacaaaagtaaaacatttttttcaaattgttacatttaaaggttttctgggagaaatttatgaaacgcaggctgtgtctatttgacatcagaaatttccactttaaaccaaaataataagaaactttaatctgtatatttacaacctttgttgagtacacttcccccttatttatacgtctgcatttccttccgagcttcacatctttctaaaatgcagcttggttttaaaataaaagaacattcattttgtgattctaaacaagcttcagtaaataccaccagtatagtactggtgaatttctcagcataaaatcgacatacctaaaaagttaataaaattcagctcttttccaatttcattgttatgcctattgaagtattaattgccaggtttgatttttagtgaagcttggagtccatactttgagcagaccaagtgaagggaagaacagaaagaaactcaggagtagagtaatatcacttctcacttacaccactttcaggcacatccaaagagttcctagatacttggaaaatgtctgaaaatttttaagtaaaatactaaacttttcagtgtttagctcaactttttgttcatttggaagtttctctccatccgaggacttaagccagttttggatttgtaagccctgagtacaatacacttcctggaggcatcctcactgctgttgaagcaaaggatatgcatggggtggaaggacggcttcgaacctgggactcatatgccttgagaacaaatagattgttacagccttgggctgctgcgtaatcacggttcctcgaggctcttcctgagcacatgcccaagcatctgcctctggagagactgactccaaatgcaggtgcttccattggagctaggtcggaggctgctttatatgacgaactccagaaatggatgccagaatacggaggccaaacgttctgagtcctggtaaggacagtcgctctgggggtcctcattttactgcagttcctgcacgccagtgaaagagaggagatagaccctggaaggcagagctgcagatgctcatcatcaggtcaattctggagctacagttttgtttctgactggatagggatgcaccagtgactgtcacatcaagcagtccttttattctctctcctttagtatcgattttaaagggcattaggcactatggttccagagtttcttggggaaaacttgcagattcttattaattggttctgcaatacttaaataaattattttacaattataagttttcagattataacatttgtattaatttttactgattttccaagatacttcttagatttactatttacgtagctttatgtacattctctgtaaaaatagacctctaaatatgaggctttacatgaaatttgtacacacatacacactaatgttagctccttaaattgctgcactaaggtgctggttagtagagatggacggagcctctcgcgttttgctctcagatgtgttaaaggcgcacgtgtacctgctctcagcggcagtgcggcctccccatctgctgggtgcccatggccctccctgcagcctcagtgatgacctcgtctgccagggacacaggttttcatcatttacaggctcttatgtgctagttttgttggtagcacgttatttaatgcataaaggcagaattcttacaagtttttttttttaatgtgaacatagatgcagcaccgactttttaaacttgaaaaaactggtataatgttaacttttaaaaataacatttggacacactagtaattgatttttgtttacagattgttttgtttacaaattgttagtctttgtttctatgagatacttttagtgtgactttttaaatgtcttagaaattaaaagttgtacaaaaagtgatttca

SEQ ID NO: 364073 - DNA, 3211 bp, Homo sapiens
cccgcccccgactgcgcggcgcccgccctagcggagtcagagctgctcgtctgaggctgctgaggcgacggccggtgtcgtggtcgcggtacctgttccaacacggctcgcgggcccgtgccggctccggtccccggcgcggctgtccgagcccctgcggcgggcggacgatggtgtggcggagcacgcggacgcgggcggcgcggcggcgggcatgaaggaggatggaagggcaggacgaggtgtcggcgcgggagcagcacttccacagccaagtgcgggagtccacgatatgtttccttctttttgccattctctacgttgtttcctacttcatcatcacaagatacaagagaaaatcagatgaacaagaagatgaagatgccatcgtcaacaggatttcgttgtttttgagcacgttcactctcgcagtgtcagctggggctgttttgcttttacccttctcaatcatcagcaatgaaatcctgctttcttttcctcagaactactatattcagtggctaaatggctccctgattcatggtttgtggaatcttgcttcccttttttccaacctttgtttatttgtattgatgccctttgcctttttctttctggaatcagaaggctttgctggcctgaaaaagggaatccgagcccgcattttagagactttggtcatgcttcttcttcttgcgttactcattcttgggatagtgtgggtagcttcagcactcattgacaacgatgccgcaagcatggaatctttatatgatctctgggagttctatctaccctatttatattcctgtatatcattgatgggatgtttgttacttctcttgtgtacaccagttggcctttctcgtatgttcacagtgatgggtcagttgctagtgaagccaacaattcttgaagacctggatgaacaaatttatatcattaccttagaggaagaagcactccagagacgactaaatgggctgtcttcatcggtggaatacaacataatggagttggaacaagaacttgaaaatgtaaagactcttaagacaaaattagagaggcgaaaaaaggcttcagcatgggaaagaaatttggtgtatcccgctgttatggttctccttcttattgagacatccatctcggtcctcttggtggcttgtaatattctttgcctattggttgatgaaacagcaatgccaaaaggaacaagggggcctggaataggaaatgcctctctttctacgtttggttttgtgggagctgcgcttgaaatcattttgattttctatcttatggtgtcctctgttgtcggcttctatagccttcgattttttggaaactttactcccaagaaagatgacacaactatgacaaagatcattggaaattgtgtgtccatcttggttttgagctctgctctgcctgtgatgtcgagaacactgggaatcactagatttgatctacttggcgactttggaaggtttaattggctgggaaatttctatattgtattatcctacaatttgctttttgctattgtgacaacattgtgtctggtccgaaaattcacctctgcagttcgagaagaacttttcaaggccctagggcttcataaacttcacttaccaaatacttcaagggattcagaaacagccaagccttctgtaaatgggcatcagaaagcactgtgagacgcacagacggcgtcttctgccaccaagagacccgagaactccagattcacgacattcctgtcccatgtagaagcatttccattcaaccgtggcccctcttcagaacctagacctatcagtgccatttttttttcataatctacgaagaacttggctatggctgatcttttttaaatttaactttctgatggaccctgtagtttccagttaagtgcagattccttacagacatatagaacagcgcattcttctgtagacatttgctcatgttggtaaatacaatcacccatatgaaaaaattgttttcacctgatatgaaaatgttagaaaaggcaaactccgggacttctaaagatttacttaaatcccattatgtactttattcagaatgtagaagctgacttgaaaggcatccttggtactaagtgaagcttattcagaaaatgcatttttcaaatgcaatggcaactgcttgtagatatcatttttgcagtgtatgttggagctgtaatggttgcaattatgtttcttatttccttaaaagcaaaaagcgtagtttctgatttatgttatagaatgatactgattagactttgagccaaggggaaaatactaaattcttttaaacctggagccttagagagccacaggaatatcttctgttgtacagtctaataagctgtggtaggaagtatcatgtaatcacagtttaatgacagtttatgtatatatataattcagtattccctctgataacatagttgccagtgtttaatacacttgtaacttggatttttaccttataggctatatgtatactcagttttttaaagcatttttttcagagatcacttaattccccatgcttctgcaatgcatataaaaactataaatgccgagtggtagaaactcctctttcttcatagacgtttggttttgtgggagctgcgcttgaaaccattttgattttctatcttatggtgtcctctgttgttggtttctatagccttcgattttttggaaactttactcccaagaaagatgacacaactatgacaaagatcattggaaattgtgtgtccatcttggttttgagctctgctctgcctgtgatgtcgagaacactggggcttcataaacttcacttaccaaatacttcaagggattcagaaacagcctcagtgatgacctcgtctgccagggacacaggttttcatcatttacaggctcttatgtgctagttttgttggtagcacgttatttaatgcataaaggcagaattcttacaagtttttttttttaatgtgaacatagatgcagcaccgactttttaaacttgaaaaaactggtataatgttaacttttaaaaataacatttggacacactagtaattgatttttgtttacagattgttttgtttacaaattgttagtctttgtttctatgagatacttttagtgtgactttttaaatgtcttagaaattaaaagttgtacaaaaagtgatttca

SEQ ID NO: 364074 - DNA, 2658 bp, Homo sapiens
  misc_feature (3)..(3): n is a, c, g, or t
acntgataagtatatctaaactatatcatactatatgtgtgtgattcatcttgtgtttgtggttgctggtatctttgtactacagctgtatttcagtagagggactggtcggtagaccgttttctccagctaagcagggaatgttgtgcgtgtattgcaggcgagagttcagtaccagtgtatgccggttagtaagtatgagagccgtgttccttgctggtgacatgtgccagtgcttaatacgctggtaactgtgagttctcctatagcatcctgatctcaagttgtcgaccatttttttcagagatcacttaattccccatgcttctgcaatgcatataaaaactataaatgccgagtggtagaaactcctctttcttcatagtcctcaggctttggttacatttgcatatgccatttgaagcctccagcttttaccagtttaacatccaaagttcacagcatcagcattcatggtgtaagaacagttttgcagtataacacgatctgataatcattcagttattaaattgtaaataattattgggatggtttcttggctttaagtccactgaataaaaactatgaaattgcactctgtgtcaaccatccactaggatagaataccgaaatctgtgcatgcaaaaataggagatgggcccatttgcacacaattcgtagttatgcagtctgctatataaatatgttcacatgcactgtgtgtatgaaaatagatggtctgtgttcagacaaaagtaaaacatttttttcaaattgttacatttaaaggttttctgggagaaatttatgaaacgcaggctgtgtctatttgacatcagaaatttccactttaaaccaaaataataagaaactttaatctgtatatttacaacctttgttgagtacacttcccccttatttatacgtctgcatttccttccgagcttcacatctttctaaaatgcagcttggttttaaaataaaagaacattcattttgtgattctaaacaagcttcagtaaataccaccagtatagtactggtgaatttctcagcataaaatcgacatacctaaaaagttaataaaattcagctcttttccaatttcattgttatgcctattgaagtattaattgccaggtttgatttttagtgaagcttggagtccatactttgagcagaccaagtgaagggaagaacagaaagaaactcaggagtagagtaatatcacttctcacttacaccactttcaggcacatccaaagagttcctagatacttggaaaatgtctgaaaatttttaagtaaaatactaaacttttcagtgtttagctcaactttttgttcatttggaagtttctctccatccgaggacttaagccagttttggatttgtaagccctgagtacaatacacttcctggaggcatcctcactgctgttgaagcaaaggatatgcatggggtggaaggacggcttcgaacctgggactcatatgccttgagaacaaatagattgttacagccttgggctgctgcgtaatcacggttcctcgaggctcttcctgagcacatgcccaagcatctgcctctggagagactgactccaaatgcaggtgcttccattggagctaggtcggaggctgctttatatgacgaactccagaaatggatgccagaatacggaggccaaacgttctgagtcctggtaaggacagtcgctctgggggtcctcattttactgcagttcctgcacgccagtgaaagagaggagatagaccctggaaggcagagctgcagatgctcatcatcaggtcaattctggagctacagttttgtttctgactggatagggatgcaccagtgactgtcacatcaagcagtccttttattctctctcctttagtatcgattttaaagggcattaggcactatggttccagagtttcttggggaaaacttgcagattcttattaattggttctgcaatacttaaataaattattttacaattataagttttcagattataacatttgtattaatttttactgattttccaagatacttcttagatttactatttacgtagctttatgtacattctctgtaaaaatagacctctaaatatgaggctttacatgaaatttgtacacacatacacactaatgttagctccttaaattgctgcactaaggtgctggttagtagagatggacggagcctctcgcgttttgctctcagatgtgttaaaggcgcacgtgtacctgctctcagcggcagtgcggcctccccatctgctgggtgcccatggccctccctgcagcctcagtgatgacctcgtctgccagggacacaggttttcatcatttacaggctcttatgtgctagttttgttggtagcacgttatttaatgcataaaggcagaattcttacaagtttttttttttaatgtgaacatagatgcagcaccgactttttaaacttgaaaaaactggtataatgttaacttttaaaaataacatttggacacactagtaattgatttttgtttacagattgttttgtttacaaattgttagtctttgtttctatgagatacttttagtgtgactttttaaatgtcttagaaattaaaagttgtacaaaaagtgatttca

SEQ ID NO: 364075 - DNA, 800 bp, Homo sapiens
tctctggatccatgaccatccttttccttttatagatgtactgttccatctggaagtcaagattggtgccacctaagtgggttcctgctgcaaggaacttaaggacatcctcctccttcatttgcaggacatcaagggctccggacattgtgaaaatttccctttaagttacgacgggaatccagaacaacgccgtatggacccctcttcttagatttactatttacgtagctttatgtacattctctgtaaaaatagacctctaaatatgaggctttacatgaaatttgtacacacatacacactaatgttagctccttaaattgctgcactaaggtgctggttagtagagatggacggagcctctcgcgttttgctctcagatgtgttaaaggcgcacgtgtacctgctctcagcggcagtgcggcctccccatctgctgggtgcccatggccctccctgcagcctcagtgatgacctcgtctgccagggacacaggttttcatcatttacaggctcttatgtgctagttttgttggtagcacgttatttaatgcataaaggcagaattcttacaagtttttttttttaatgtgaacatagatgcagcaccgactttttaaacttgaaaaaactggtataatgttaacttttaaaaataacatttggacacactagtaattgatttttgtttacagattgttttgtttacaaattgttagtctttgtttctatgagatacttttagtgtgactttttaaatgtcttagaaattaaaagttgtacaaaaagtgatttca

SEQ ID NO: 364076 - DNA, 1220 bp, Homo sapiens
aggactagagtgatgtagaagaatctgttgtgtctgagtgtgaggaggtggagagtcacgtgtgggctatgggtctgagaactgaagttttaacagttactaaaactgttttgtggctgttgtaatgtcttctcctttcctttcctttgaaaagctgttactgaatgaacgatgccgcttacaaacactgacacttcagaaccaagcatatttgatactgctgtagctatttatattgattctgcaacttctctttaacagcatcttgaagtcatccacagttgttctatatggactccacagtagagtcagagaactaagtgacaagtggagcatcgtcctcctcctgctcacttcctcctcgccacctctctggcctggctatccttcagtctgaagagtgattcactttttcttttctttttagtctttactgtggaatctcatcaaagacttggaagcaagggtggtgagaggggcctggggcgtggtgtggagggtcgagttctttgtcgtcccacagtcacccccaggaccaccttgcgaagccgaaaatacacatctgcattttaccgacaaggaacgccgctcagaaagctgcagacatttgcctggggtcacgcttacagtgggcagatgaactggatgtaaatacaggctgccctggaccattcctcagaactcatgggattttcgcgaccctcatcctcagtgaagttagatgaccattcctgcctttcatcccaccgattttcctaagtatctgttgcctgcaactaacactagttcctgtgtcagtaaagtactgcacttggttgcaaagaatagagatggactctgccaacataggcacggaaggtttacggggtggatggcatggctcacagatgtgatgagaaagccccggaagaagtgttgggcacagccttaggcacaacctttcctgggctcttcccatcactgaatgatccatgtatctccgggactctccttctagatccaaagtttagggcggcggaatcggactgctctggcctttgacacgtgcctgtgctttgcctgtcaacgctatggggagagagatgtcagcttacagaaaattgaggttctgtgattcagtttccctctgctctcttagaataaaagtgcttactcattgtttaaagcattctccaaattagtctgcaaattctttgatagtatacatccttaaaaaaaaa

SEQ ID NO: 364077 - DNA, 375 bp, Homo sapiens
tagtagagacagggtttcatcatgttggccaggctggtctcaaactcctgacctcagatgatccacccgccttggcctcccaaggtgctggggttacaggtgtgagccaccatgcccagcctatgttttattaaaactttaatgagtaaaatgtccagcattttaactttttagtagtttaaatccttttttcctataaatatcacagatatatcttctagtatttaaaaaagatatgcaaaaaagtaaatgatctgttaacttcgttttgtttcagatatgtttccttctttttgccattctctacgttgtttcctacttcatcatcacaagatacaagagaaaatcaggcaagtggaaacatgtcaattaaaa

SEQ ID NO: 364078 - DNA, 4899 bp, Homo sapiens
cccgcccccgactgcgcggcgcccgccctagcggagtcagagctgctcgtctgaggctgctgaggcgacggccggtgtcgtggtcgcggtacctgttccaacacggctcgcgggcccgtgccggctccggtccccggcgcggctgtccgagcccctgcggcgggcggacgatggtgtggcggagcacgcggacgcgggcggcgcggcggcgggcatgaaggaggatggaagggcaggacgaggtgtcggcgcgggagcagcacttccacagccaagtgcgggagtccacgatatgtttccttctttttgccattctctacgttgtttcctacttcatcatcacaagatacaagagaaaatcagatgaacaagaagatgaagatgccatcgtcaacaggatttcgttgtttttgagcacgttcactctcgcagtgtcagctggggctgttttgcttttacccttctcaatcatcagcaatgaaatcctgctttcttttcctcagaactactatattcagtggctaaatggctccctgattcatggtttgtggaatcttgcttcccttttttccaacctttgtttatttgtattgatgccctttgcctttttctttctggaatcagaaggctttgctggcctgaaaaagggaatccgagcccgcattttagagactttggtcatgcttcttcttcttgcgttactcattcttgggatagtgtgggtagcttcagcactcattgacaacgatgccgcaagcatggaatctttatatgatctctgggagttctatctaccctatttatattcctgtatatcattgatgggatgtttgttacttctcttgtgtacaccagttggcctttctcgtatgttcacagtgatgggtcagttgctagtgaagccaacaattcttgaagacctggatgaacaaatttatatcattaccttagaggaagaagcactccagagacgactaaatgggctgtcttcatcggtggaatacaacataatggagttggaacaagaacttgaaaatgtaaagactcttaagacaaaattagagaggcgaaaaaaggcttcagcatgggaaagaaatttggtgtatcccgctgttatggttctccttcttattgagacatccatctcggtcctcttggtggcttgtaatattctttgcctattggttgatgaaacagcaatgccaaaaggaacaagggggcctggaataggaaatgcctctctttctacgtttggttttgtgggagctgcgcttgaaatcattttgattttctatcttatggtgtcctctgttgtcggcttctatagccttcgattttttggaaactttactcccaagaaagatgacacaactatgacaaagatcattggaaattgtgtgtccatcttggttttgagctctgctctgcctgtgatgtcgagaacactgggaatcactagatttgatctacttggcgactttggaaggtttaattggctgggaaatttctatattgtattatcctacaatttgctttttgctattgtgacaacattgtgtctggtccgaaaattcacctctgcagttcgagaagaacttttcaaggccctagggcttcataaacttcacttaccaaatacttcaagggattcagaaacagccaagccttctgtaaatgggcatcagaaagcactgtgagacgcacagacggcgtcttctgccaccaagagacccgagaactccagattcacgacattcctgtcccatgtagaagcatttccattcaaccgtggcccctcttcagaacctagacctatcagtgccatttttttttcataatctacgaagaacttggctatggctgatcttttttaaatttaactttctgatggaccctgtagtttccagttaagtgcagattccttacagacatatagaacagcgcattcttctgtagacatttgctcatgttggtaaatacaatcacccatatgaaaaaattgttttcacctgatatgaaaatgttagaaaaggcaaactccgggacttctaaagatttacttaaatcccattatgtactttattcagaatgtagaagctgacttgaaaggcatccttggtactaagtgaagcttattcagaaaatgcatttttcaaatgcaatggcaactgcttgtagatatcatttttgcagtgtatgttggagctgtaatggttgcaattatgtttcttatttccttaaaagcaaaaagcgtagtttctgatttatgttatagaatgatactgattagactttgagccaaggggaaaatactaaattcttttaaacctggagccttagagagccacaggaatatcttctgttgtacagtctaataagctgtggtaggaagtatcatgtaatcacagtttaatgacagtttatgtatatatataattcagtattccctctgataacatagttgccagtgtttaatacacttgtaacttggatttttaccttataggctatatgtatactcagttttttaaagcatttttttcagagatcacttaattccccatgcttctgcaatgcatataaaaactataaatgccgagtggtagaaactcctctttcttcatagtcctcaggctttggttacatttgcatatgccatttgaagcctccagcttttaccagtttaacatccaaagttcacagcatcagcattcatggtgtaagaacagttttgcagtataacacgatctgataatcattcagttattaaattgtaaataattattgggatggtttcttggctttaagtccactgaataaaaactatgaaattgcactctgtgtcaaccatccactaggatagaataccgaaatctgtgcatgcaaaaataggagatgggcccatttgcacacaattcgtagttatgcagtctgctatataaatatgttcacatgcactgtgtgtatgaaaatagatggtctgtgttcagacaaaagtaaaacatttttttcaaattgttacatttaaaggttttctgggagaaatttatgaaacgcaggctgtgtctatttgacatcagaaatttccactttaaaccaaaataataagaaactttaatctgtatatttacaacctttgttgagtacacttcccccttatttatacgtctgcatttccttccgagcttcacatctttctaaaatgcagcttggttttaaaataaaagaacattcattttgtgattctaaacaagcttcagtaaataccaccagtatagtactggtgaatttctcagcataaaatcgacatacctaaaaagttaataaaattcagctcttttccaatttcattgttatgcctattgaagtattaattgccaggtttgatttttagtgaagcttggagtccatactttgagcagaccaagtgaagggaagaacagaaagaaactcaggagtagagtaatatcacttctcacttacaccactttcaggcacatccaaagagttcctagatacttggaaaatgtctgaaaatttttaagtaaaatactaaacttttcagtgtttagctcaactttttgttcatttggaagtttctctccatccgaggacttaagccagttttggatttgtaagccctgagtacaatacacttcctggaggcatcctcactgctgttgaagcaaaggatatgcatggggtggaaggacggcttcgaacctgggactcatatgccttgagaacaaatagattgttacagccttgggctgctgcgtaatcacggttcctcgaggctcttcctgagcacatgcccaagcatctgcctctggagagactgactccaaatgcaggtgcttccattggagctaggtcggaggctgctttatatgacgaactccagaaatggatgccagaatacggaggccaaacgttctgagtcctggtaaggacagtcgctctgggggtcctcattttactgcagttcctgcacgccagtgaaagagaggagatagaccctggaaggcagagctgcagatgctcatcatcaggtcaattctggagctacagttttgtttctgactggatagggatgcaccagtgactgtcacatcaagcagtccttttattctctctcctttagtatcgattttaaagggcattaggcactatggttccagagtttcttggggaaaacttgcagattcttattaattggttctgcaatacttaaataaattattttacaattataagttttcagattataacatttgtattaatttttactgattttccaagatacttcttagatttactatttacgtagctttatgtacattctctgtaaaaatagacctctaaatatgaggctttacatgaaatttgtacacacatacacactaatgttagctccttaaattgctgcactaaggtgctggttagtagagatggacggagcctctcgcgttttgctctcagatgtgttaaaggcgcacgtgtacctgctctcagcggcagtgcggcctccccatctgctgggtgcccatggccctccctgcagcctcagtgatgacctcgtctgccagggacacaggttttcatcatttacaggctcttatgtgctagttttgttggtagcacgttatttaatgcataaaggcagaattcttacaagtttttttttttaatgtgaacatagatgcagcaccgactttttaaacttgaaaaaactggtataatgttaacttttaaaaataacatttggacacactagtaattgatttttgtttacagattgttttgtttacaaattgttagtctttgtttctatgagatacttttagtgtgactttttaaatgtcttagaaattaaaagttgtacaaaaagtgatttca

SEQ ID NO: 364079 - DNA, 884 bp, Homo sapiens
cccgcccccgactgcgcggcgcccgccctagcggagtcagagctgctcgtctgaggctgctgaggcgacggccggtgtcgtggtcgcggtacctgttccaacacggctcgcgggcccgtgccggctccggtccccggcgcggctgtccgagcccctgcggcgggcggacgatggtgtggcggagcacgcggacgcgggcggcgcggcggcgggcatgaaggaggatggaagggcaggacgaggtgtcggcgcgggagcagcacttccacagccaagtgcgggagtccacgatatgtttccttctttttgccattctctacgttgtttcctacttcatcatcacaagatacaagagaaaatcagatgaacaagaagatgaagatgccatcgtcaacaggatttcgttgtttttgagcacgttcactctcgcagtgtcagctggggctgttttgcttttacccttctcaatcatcagcaatgaaatcctgctttcttttcctcagaactactatattcagtggctaaatggctccctgattcatgtagagactggtttcaccgtgttagccaggatggtctcgatctcctgaccttgtgatccgcccgcctcagcctcccaaagtgctgggattacaggcgtgagccaccgtgcccggctgcatgtgtgtattatatatagcatatgcagtttatacctttaaaacctttaatattatattgtgttttccataccttttatgttcttcaaaaccatttttagtggtgtaacctgagccatgtatttagcaatatattaagctagtggttttcaaaggctatttcgtcattttaaagggtggaaccatttatccctccagtgacttgctacctgcatttttttcaga

SEQ ID NO: 364080 - DNA, 6139 bp, Homo sapiens
cccgcccccgactgcgcggcgcccgccctagcggagtcagagctgctcgtctgaggctgctgaggcgacggccggtgtcgtggtcgcggtacctgttccaacacggctcgcgggcccgtgccggctccggtccccggcgcggctgtccgagcccctgcggcgggcggacgatggtgtggcggagcacgcggacgcgggcggcgcggcggcgggcatgaaggaggatggaagggcaggacgaggtgtcggcgcgggagcagcacttccacagccaagtgcgggagtccacgatatgtttccttctttttgccattctctacgttgtttcctacttcatcatcacaagatacaagagaaaatcagatgaacaagaagatgaagatgccatcgtcaacaggatttcgttgtttttgagcacgttcactctcgcagtgtcagctggggctgttttgcttttacccttctcaatcatcagcaatgaaatcctgctttcttttcctcagaactactatattcagtggctaaatggctccctgattcatggtttgtggaatcttgcttcccttttttccaacctttgtttatttgtattgatgccctttgcctttttctttctggaatcagaaggctttgctggcctgaaaaagggaatccgagcccgcattttagagactttggtcatgcttcttcttcttgcgttactcattcttgggatagtgtgggtagcttcagcactcattgacaacgatgccgcaagcatggaatctttatatgatctctgggagttctatctaccctatttatattcctgtatatcattgatgggatgtttgttacttctcttgtgtacaccagttggcctttctcgtatgttcacagtgatgggtcagttgctagtgaagccaacaattcttgaagacctggatgaacaaatttatatcattaccttagaggaagaagcactccagagacgactaaatgggctgtcttcatcggtggaatacaacataatggagttggaacaagaacttgaaaatgtaaagactcttaagacaaaattagagaggcgaaaaaaggcttcagcatgggaaagaaatttggtgtatcccgctgttatggttctccttcttattgagacatccatctcggtcctcttggtggcttgtaatattctttgcctattggttgatgaaacagcaatgccaaaaggaacaagggggcctggaataggaaatgcctctctttctacgtttggttttgtgggagctgcgcttgaaatcattttgattttctatcttatggtgtcctctgttgtcggcttctatagccttcgattttttggaaactttactcccaagaaagatgacacaactatgacaaagatcattggaaattgtgtgtccatcttggttttgagctctgctctgcctgtgatgtcgagaacactgggaatcactagatttgatctacttggcgactttggaaggtttaattggctgggaaatttctatattgtattatcctacaatttgctttttgctattgtgacaacattgtgtctggtccgaaaattcacctctgcagttcgagaagaacttttcaaggccctagggcttcataaacttcacttaccaaatacttcaagggattcagaaacagccaagccttctgtaaatgggcatcagaaagcactgtgagacgcacagacggcgtcttctgccaccaagagacccgagaactccagattcacgacattcctgtcccatgtagaagcatttccattcaaccgtggcccctcttcagaacctagacctatcagtgccatttttttttcataatctacgaagaacttggctatggctgatcttttttaaatttaactttctgatggaccctgtagtttccagttaagtgcagattccttacagacatatagaacagcgcattcttctgtagacatttgctcatgttggtaaatacaatcacccatatgaaaaaattgttttcacctgatatgaaaatgttagaaaaggcaaactccgggacttctaaagatttacttaaatcccattatgtactttattcagaatgtagaagctgacttgaaaggcatccttggtactaagtgaagcttattcagaaaatgcatttttcaaatgcaatggcaactgcttgtagatatcatttttgcagtgtatgttggagctgtaatggttgcaattatgtttcttatttccttaaaagcaaaaagcgtagtttctgatttatgttatagaatgatactgattagactttgagccaaggggaaaatactaaattcttttaaacctggagccttagagagccacaggaatatcttctgttgtacagtctaataagctgtggtaggaagtatcatgtaatcacagtttaatgacagtttatgtatatatataattcagtattccctctgataacatagttgccagtgtttaatacacttgtaacttggatttttaccttataggctatatgtatactcagttttttaaagcatttttttcagagatcacttaattccccatgcttctgcaatgcatataaaaactataaatgccgagtggtagaaactcctctttcttcatagtcctcaggctttggttacatttgcatatgccatttgaagcctccagcttttaccagtttaacatccaaagttcacagcatcagcattcatggtgtaagaacagttttgcagtataacacgatctgataatcattcagttattaaattgtaaataattattgggatggtttcttggctttaagtccactgaataaaaactatgaaattgcactctgtgtcaaccatccactaggatagaataccgaaatctgtgcatgcaaaaataggagatgggcccatttgcacacaattcgtagttatgcagtctgctatataaatatgttcacatgcactgtgtgtatgaaaatagatggtctgtgttcagacaaaagtaaaacatttttttcaaattgttacatttaaaggttttctgggagaaatttatgaaacgcaggctgtgtctatttgacatcagaaatttccactttaaaccaaaataataagaaactttaatctgtatatttacaacctttgttgagtacacttcccccttatttatacgtctgcatttccttccgagcttcacatctttctaaaatgcagcttggttttaaaataaaagaacattcattttgtgattctaaacaagcttcagtaaataccaccagtatagtactggtgaatttctcagcataaaatcgacatacctaaaaagttaataaaattcagctcttttccaatttcattgttatgcctattgaagtattaattgccaggtttgatttttagtgaagcttggagtccatactttgagcagaccaagtgaagggaagaacagaaagaaactcaggagtagagtaatatcacttctcacttacaccactttcaggcacatccaaagagttcctagatacttggaaaatgtctgaaaatttttaagtaaaatactaaacttttcagtgtttagctcaactttttgttcatttggaagtttctctccatccgaggacttaagccagttttggatttgtaagccctgagtacaatacacttcctggaggcatcctcactgctgttgaagcaaaggatatgcatggggtggaaggacggcttcgaacctgggactcatatgccttgagaacaaatagattgttacagccttgggctgctgcgtaatcacggttcctcgaggctcttcctgagcacatgcccaagcatctgcctctggagagactgactccaaatgcaggtgcttccattggagctaggtcggaggctgctttatatgacgaactccagaaatggatgccagaatacggaggccaaacgttctgagtcctggtaaggacagtcgctctgggggtcctcattttactgcagttcctgcacgccagtgaaagagaggagatagaccctggaaggcagagctgcagatgctcatcatcaggtcaattctggagctacagttttgtttctgactggatagggatgcaccagtgactgtcacatcaagcagtccttttattctctctcctttagtatcgattttaaagggcattaggcactatggttccagagtttcttggggaaaacttgcagattcttattaattggttctgcaatacttaaataaattattttacaattataagttttcagattataacatttgtattaatttttactgattttccaagatacttcttagatttactatttacgtagctttatgtacattctctgtaaaaatagacctctaaatatgaggctttacatgaaatttgtacacacatacacactaatgttagctccttaaattgctgcactaaggtgctggttagtagagatggacggagcctctcgcgttttgctctcagatgtgttaaaggcgcacgtgtacctgctctcagcggcagtgcggcctccccatctgctgggtgcccatggccctccctgcagcctcagtgatgacctcgtctgccagggacacaggttttcatcatttacaggctcttatgtgctagttttgttggtagcacgttatttaatgcataaaggcagaattcttacaagtttttttttttaatgtgaacatagatgcagcaccgactttttaaacttgaaaaaactggtataatgttaacttttaaaaataacatttggacacactagtaattgatttttgtttacagattgttttgtttacaaattgttagtctttgtttctatgagatacttttagtgtgactttttaaatgtcttagaaattaaaagttgtacaaaaagtgatttcatatttggtttataagcatttatatgtggggtttatttgttcttttgttttttccatcttaaatattatcatggctaaaacttaagggtatttatagtttaattccatttcagttttatagagggcagtaattattctgatgaatgttgaattaagaaatggatattttctttctctgttgtgcagttattggtagatcaatttcttataacccacaatgtagcatcaataattgatagcatgtattttatttaattacttgaattatttagacttgatttctctaattttttccataaaaggactgaacagcacctacttgtggtctggacagcttaacccagagttcctggaagaataaatgctgttagcatctggttaatttactggcagacagaagcctacttacagtggctttcaactttttgaccacatctttactgtggaatctcatcaaagacttggaagcaagggtggtgagaggggcctggggcgtggtgtggagggtcgagttctttgtcgtcccacagtcacccccaggaccaccttgcgaagccgaaaatacacatctgcattttaccgacaaggaacgccgctcagaaagctgcagacatttgcctggggtcacgcttacagtgggcagatgaactggatgtaaatacaggagcggcagagaggacaggcatggaaaggaggcctgtctcccacggagaactcctctagtgccagcagacacgcatggtggaacacatgtgagcaggacaggagggccatctctctggaacgcctgcctgcacccacgcgctgaccgccagcagcggagagaggggccaggcagatggagcactcgtgggtctcccggcgcagagcctgcggcacacaggacaggaagaggccacgcggctccctgcaggaagcgtgccctgcagcaggcgcgaaccacccgagcggcctccacatgcacctagacaggcacgccggctgggtgctcacacctgggcccttgcacctgtgtctgcccagaggggctggtcagcacaccctttacaatgaaggctcacaaagtacacaactccaagtgccagtccatgaaagcagttcgcatagacttttcatgcagttgagtctaatttatattttactatccacttaccctatgtaaccaaatatcatttttacacttattaacaattcatacttttttcttccttaagaggaattaaagcatttcctcaatgaga

SEQ ID NO: 364081 - DNA, 5947 bp, Homo sapiens
cccgcccccgactgcgcggcgcccgccctagcggagtcagagctgctcgtctgaggctgctgaggcgacggccggtgtcgtggtcgcggtacctgttccaacacggctcgcgggcccgtgccggctccggtccccggcgcggctgtccgagcccctgcggcgggcggacgatggtgtggcggagcacgcggacgcgggcggcgcggcggcgggcatgaaggaggatggaagggcaggacgaggtgtcggcgcgggagcagcacttccacagccaagtgcgggagtccacgatatgtttccttctttttgccattctctacgttgtttcctacttcatcatcacaagatacaagagaaaatcagatgaacaagaagatgaagatgccatcgtcaacaggatttcgttgtttttgagcacgttcactctcgcagtgtcagctggggctgttttgcttttacccttctcaatcatcagcaatgaaatcctgctttcttttcctcagaactactatattcagtggctaaatggctccctgattcatggtttgtggaatcttgcttcccttttttccaacctttgtttatttgtattgatgccctttgcctttttctttctggaatcagaaggctttgctggcctgaaaaagggaatccgagcccgcattttagagactttggtcatgcttcttcttcttgcgttactcattcttgggatagtgtgggtagcttcagcactcattgacaacgatgccgcaagcatggaatctttatatgatctctgggagttctatctaccctatttatattcctgtatatcattgatgggatgtttgttacttctcttgtgtacaccagttggcctttctcgtatgttcacagtgatgggtcagttgctagtgaagccaacaattcttgaagacctggatgaacaaatttatatcattaccttagaggaagaagcactccagagacgactaaatgggctgtcttcatcggtggaatacaacataatggagttggaacaagaacttgaaaatgtaaagactcttaagacaaaattagagaggcgaaaaaaggcttcagcatgggaaagaaatttggtgtatcccgctgttatggttctccttcttattgagacatccatctcggtcctcttggtggcttgtaatattctttgcctattggttgatgaaacagcaatgccaaaaggaacaagggggcctggaataggaaatgcctctctttctacgtttggttttgtgggagctgcgcttgaaatcattttgattttctatcttatggtgtcctctgttgtcggcttctatagccttcgattttttggaaactttactcccaagaaagatgacacaactatgacaaagatcattggaaattgtgtgtccatcttggttttgagctctgctctgcctgtgatgtcgagaacactgggaatcactagatttgatctacttggcgactttggaaggtttaattggctgggaaatttctatattgtattatcctacaatttgctttttgctattgtgacaacattgtgtctggtccgaaaattcacctctgcagttcgagaagaacttttcaaggccctagggcttcataaacttcacttaccaaatacttcaagggattcagaaacagccaagccttctgtaaatgggcatcagaaagcactgtgagacgcacagacggcgtcttctgccaccaagagacccgagaactccagattcacgacattcctgtcccatgtagaagcatttccattcaaccgtggcccctcttcagaacctagacctatcagtgccatttttttttcataatctacgaagaacttggctatggctgatcttttttaaatttaactttctgatggaccctgtagtttccagttaagtgcagattccttacagacatatagaacagcgcattcttctgtagacatttgctcatgttggtaaatacaatcacccatatgaaaaaattgttttcacctgatatgaaaatgttagaaaaggcaaactccgggacttctaaagatttacttaaatcccattatgtactttattcagaatgtagaagctgacttgaaaggcatccttggtactaagtgaagcttattcagaaaatgcatttttcaaatgcaatggcaactgcttgtagatatcatttttgcagtgtatgttggagctgtaatggttgcaattatgtttcttatttccttaaaagcaaaaagcgtagtttctgatttatgttatagaatgatactgattagactttgagccaaggggaaaatactaaattcttttaaacctggagccttagagagccacaggaatatcttctgttgtacagtctaataagctgtggtaggaagtatcatgtaatcacagtttaatgacagtttatgtatatatataattcagtattccctctgataacatagttgccagtgtttaatacacttgtaacttggatttttaccttataggctatatgtatactcagttttttaaagcatttttttcagagatcacttaattccccatgcttctgcaatgcatataaaaactataaatgccgagtggtagaaactcctctttcttcatagtcctcaggctttggttacatttgcatatgccatttgaagcctccagcttttaccagtttaacatccaaagttcacagcatcagcattcatggtgtaagaacagttttgcagtataacacgatctgataatcattcagttattaaattgtaaataattattgggatggtttcttggctttaagtccactgaataaaaactatgaaattgcactctgtgtcaaccatccactaggatagaataccgaaatctgtgcatgcaaaaataggagatgggcccatttgcacacaattcgtagttatgcagtctgctatataaatatgttcacatgcactgtgtgtatgaaaatagatggtctgtgttcagacaaaagtaaaacatttttttcaaattgttacatttaaaggttttctgggagaaatttatgaaacgcaggctgtgtctatttgacatcagaaatttccactttaaaccaaaataataagaaactttaatctgtatatttacaacctttgttgagtacacttcccccttatttatacgtctgcatttccttccgagcttcacatctttctaaaatgcagcttggttttaaaataaaagaacattcattttgtgattctaaacaagcttcagtaaataccaccagtatagtactggtgaatttctcagcataaaatcgacatacctaaaaagttaataaaattcagctcttttccaatttcattgttatgcctattgaagtattaattgccaggtttgatttttagtgaagcttggagtccatactttgagcagaccaagtgaagggaagaacagaaagaaactcaggagtagagtaatatcacttctcacttacaccactttcaggcacatccaaagagttcctagatacttggaaaatgtctgaaaatttttaagtaaaatactaaacttttcagtgtttagctcaactttttgttcatttggaagtttctctccatccgaggacttaagccagttttggatttgtaagccctgagtacaatacacttcctggaggcatcctcactgctgttgaagcaaaggatatgcatggggtggaaggacggcttcgaacctgggactcatatgccttgagaacaaatagattgttacagccttgggctgctgcgtaatcacggttcctcgaggctcttcctgagcacatgcccaagcatctgcctctggagagactgactccaaatgcaggtgcttccattggagctaggtcggaggctgctttatatgacgaactccagaaatggatgccagaatacggaggccaaacgttctgagtcctggtaaggacagtcgctctgggggtcctcattttactgcagttcctgcacgccagtgaaagagaggagatagaccctggaaggcagagctgcagatgctcatcatcaggtcaattctggagctacagttttgtttctgactggatagggatgcaccagtgactgtcacatcaagcagtccttttattctctctcctttagtatcgattttaaagggcattaggcactatggttccagagtttcttggggaaaacttgcagattcttattaattggttctgcaatacttaaataaattattttacaattataagttttcagattataacatttgtattaatttttactgattttccaagatacttcttagatttactatttacgtagctttatgtacattctctgtaaaaatagacctctaaatatgaggctttacatgaaatttgtacacacatacacactaatgttagctccttaaattgctgcactaaggtgctggttagtagagatggacggagcctctcgcgttttgctctcagatgtgttaaaggcgcacgtgtacctgctctcagcggcagtgcggcctccccatctgctgggtgcccatggccctccctgcagcctcagtgatgacctcgtctgccagggacacaggttttcatcatttacaggctcttatgtgctagttttgttggtagcacgttatttaatgcataaaggcagaattcttacaagtttttttttttaatgtgaacatagatgcagcaccgactttttaaacttgaaaaaactggtataatgttaacttttaaaaataacatttggacacactagtaattgatttttgtttacagattgttttgtttacaaattgttagtctttgtttctatgagatacttttagtgtgactttttaaatgtcttagaaattaaaagttgtacaaaaagtgatttcatatttggtttataagcatttatatgtggggtttatttgttcttttgttttttccatcttaaatattatcatggctaaaacttaagggtatttatagtttaattccatttcagttttatagagggcagtaattattctgatgaatgttgaattaagaaatggatattttctttctctgttgtgcagttattggtagatcaatttcttataacccacaatgtagcatcaataattgatagcatgtattttatttaattacttgaattatttagacttgatttctctaattttttccataaaaggactgaacagcacctacttgtggtctggacagcttaacccagagttcctggaagaataaatgctgttagcatctggttaatttactggcagacagaagcctacttacagtggctttcaactttttgaccacatctttactgtggaatctcatcaaagacttggaagcaagggtggtgagaggggcctggggcgtggtgtggagggtcgagttctttgtcgtcccacagtcacccccaggaccaccttgcgaagccgaaaatacacatctgcattttaccgacaaggaacgccgctcagaaagctgcagacatttgcctggggtcacgcttacagtgggcagatgaactggatgtaaatacaggagcggcagagaggacaggcatggaaaggaggcctgtctcccacggagaactcctctagtgccagcagacacgcatggtggaacacatgtgagcaggacaggagggccatctctctggaacgcctgcctgcacccacgcgctgaccgccagcagcggagagaggggccaggcagatggagcactcgtgggtctcccggcgcagagcctgcggcacacaggacaggaagaggccacgcgggttagtttcatcacagcagaaagttacttaaactgaaatgcgaaccatgtgccccgagacatgggtcttcgaaacatgcggaagtttcattctgtgttaaaatcacatgcattttatttatatatatacatatatatatacacaca

SEQ ID NO: 364082 - DNA, 3350 bp, Homo sapiens
cccgcccccgactgcgcggcgcccgccctagcggagtcagagctgctcgtctgaggctgctgaggcgacggccggtgtcgtggtcgcggtacctgttccaacacggctcgcgggcccgtgccggctccggtccccggcgcggctgtccgagcccctgcggcgggcggacgatggtgtggcggagcacgcggacgcgggcggcgcggcggcgggcatgaaggaggatggaagggcaggacgaggtgtcggcgcgggagcagcacttccacagccaagtgcgggagtccacgatatgtttccttctttttgccattctctacgttgtttcctacttcatcatcacaagatacaagagaaaatcagatgaacaagaagatgaagatgccatcgtcaacaggatttcgttgtttttgagcacgttcactctcgcagtgtcagctggggctgttttgcttttacccttctcaatcatcagcaatgaaatcctgctttcttttcctcagaactactatattcagtggctaaatggctccctgattcatggtttgtggaatcttgcttcccttttttccaacctttgtttatttgtattgatgccctttgcctttttctttctggaatcagaaggctttgctggcctgaaaaagggaatccgagcccgcattttagagactttggtcatgcttcttcttcttgcgttactcattcttgggatagtgtgggtagcttcagcactcattgacaacgatgccgcaagcatggaatctttatatgatctctgggagttctatctaccctatttatattcctgtatatcattgatgggatgtttgttacttctcttgtgtacaccagttggcctttctcgtatgttcacagtgatgggtcagttgctagtgaagccaacaattcttgaagacctggatgaacaaatttatatcattaccttagaggaagaagcactccagagacgactaaatgggctgtcttcatcggtggaatacaacataatggagttggaacaagaacttgaaaatgtaaagactcttaagacaaaattagagaggcgaaaaaaggcttcagcatgggaaagaaatttggtgtatcccgctgttatggttctccttcttattgagacatccatctcggtcctcttggtggcttgtaatattctttgcctattggttgatgaaacagcaatgccaaaaggaacaagggggcctggaataggaaatgcctctctttctacgtttggttttgtgggagctgcgcttgaaatcattttgattttctatcttatggtgtcctctgttgtcggcttctatagccttcgattttttggaaactttactcccaagaaagatgacacaactatgacaaagatcattggaaattgtgtgtccatcttggttttgagctctgctctgcctgtgatgtcgagaacactgggaatcactagatttgatctacttggcgactttggaaggtttaattggctgggaaatttctatattgtattatcctacaatttgctttttgctattgtgacaacattgtgtctggtccgaaaattcacctctgcagttcgagaagaacttttcaaggccctagggcttcataaacttcacttaccaaatacttcaagggattcagaaacagccaagccttctgtaaatgggcatcagaaagcactgtgagacgcacagacggcgtcttctgccaccaagagacccgagaactccagattcacgacattcctgtcccatgtagaagcatttccattcaaccgtggcccctcttcagaacctagacctatcagtgccatttttttttcataatctacgaagaacttggctatggctgatcttttttaaatttaactttctgatggaccctgtagtttccagttaagtgcagattccttacagacatatagaacagcgcattcttctgtagacatttgctcatgttggtaaatacaatcacccatatgaaaaaattgttttcacctgatatgaaaatgttagaaaaggcaaactccgggacttctaaagatttacttaaatcccattatgtactttattcagaatgtagaagctgacttgaaaggcatccttggtactaagtgaagcttattcagaaaatgcatttttcaaatgcaatggcaactgcttgtagatatcatttttgcagtgtatgttggagctgtaatggttgcaattatgtttcttatttccttaaaagcaaaaagcgtagtttctgatttatgttatagaatgatactgattagactttgagccaaggggaaaatactaaattcttttaaacctggagccttagagagccacaggaatatcttctgttgtacagtctaataagctgtggtaggaagtatcatgtaatcacagtttaatgacagtttatgtatatatataattcagtattccctctgataacatagttgccagtgtttaatacacttgtaacttggatttttaccttataggctatatgtatactcagttttttaaagcatttttttcagagatcacttaattccccatgcttctgcaatgcatataaaaactataaatgccgagtggtagaaactcctctttcttcatagtcctcaggctttggttacatttgcatatgccatttgaagcctccagcttttaccagtttaacatccaaagttcacagcatcagcattcatggtgtaagaacagttttgcagtataacacgatctgataatcattcagttattaaattgtaaataattattgggatggtttcttggctttaagtccactgaataaaaactatgaaattgcactctgtgtcaaccatccactaggatagaataccgaaatctgtgcatgcaaaaataggagatgggcccatttgcacacaattcgtagttatgcagtctgctatataaatatgttcacatgcactgtgtgtatgaaaatagatggtctgtgttcagacaaaagtaaaacatttttttcaaattgttacatttaaaggttttctgggagaaatttatgaaacgcaggctgtgtctatttgacatcagaaatttccactttaaaccaaaataataagaaactttaatctgtatatttacaacctttgttgagtacacttcccccttatttatacgtctgcatttccttccgagcttcacatctttctaaaatgcagcttggttttaaaataaaagaacattcattttgtgattctaaacaagcttcagtaaataccaccagtatagtactggtgaatttctcagcataaaatcgacatacctaaaaagttaataaaattcagctcttttccaatttca

SEQ ID NO: 364083 - DNA, 5017 bp, Homo sapiens
cccgcccccgactgcgcggcgcccgccctagcggagtcagagctgctcgtctgaggctgctgaggcgacggccggtgtcgtggtcgcggtacctgttccaacacggctcgcgggcccgtgccggctccggtccccggcgcggctgtccgagcccctgcggcgggcggacgatggtgtggcggagcacgcggacgcgggcggcgcggcggcgggcatgaaggaggatggaagggcaggacgaggtgtcggcgcgggagcagcacttccacagccaagtgcgggagtccacgatatgtttccttctttttgccattctctacgttgtttcctacttcatcatcacaagatacaagagaaaatcaggatctccttctgtcccctaggccggagagcagtggggcaatcatggctgactgtagcctcgacctcctgggctcaagtgattctccaacctcagcctcctgagtatcctgcactacagatgaacaagaagatgaagatgccatcgtcaacaggatttcgttgtttttgagcacgttcactctcgcagtgtcagctggggctgttttgcttttacccttctcaatcatcagcaatgaaatcctgctttcttttcctcagaactactatattcagtggctaaatggctccctgattcatggtttgtggaatcttgcttcccttttttccaacctttgtttatttgtattgatgccctttgcctttttctttctggaatcagaaggctttgctggcctgaaaaagggaatccgagcccgcattttagagactttggtcatgcttcttcttcttgcgttactcattcttgggatagtgtgggtagcttcagcactcattgacaacgatgccgcaagcatggaatctttatatgatctctgggagttctatctaccctatttatattcctgtatatcattgatgggatgtttgttacttctcttgtgtacaccagttggcctttctcgtatgttcacagtgatgggtcagttgctagtgaagccaacaattcttgaagacctggatgaacaaatttatatcattaccttagaggaagaagcactccagagacgactaaatgggctgtcttcatcggtggaatacaacataatggagttggaacaagaacttgaaaatgtaaagactcttaagacaaaattagagaggcgaaaaaaggcttcagcatgggaaagaaatttggtgtatcccgctgttatggttctccttcttattgagacatccatctcggtcctcttggtggcttgtaatattctttgcctattggttgatgaaacagcaatgccaaaaggaacaagggggcctggaataggaaatgcctctctttctacgtttggttttgtgggagctgcgcttgaaatcattttgattttctatcttatggtgtcctctgttgtcggcttctatagccttcgattttttggaaactttactcccaagaaagatgacacaactatgacaaagatcattggaaattgtgtgtccatcttggttttgagctctgctctgcctgtgatgtcgagaacactgggaatcactagatttgatctacttggcgactttggaaggtttaattggctgggaaatttctatattgtattatcctacaatttgctttttgctattgtgacaacattgtgtctggtccgaaaattcacctctgcagttcgagaagaacttttcaaggccctagggcttcataaacttcacttaccaaatacttcaagggattcagaaacagccaagccttctgtaaatgggcatcagaaagcactgtgagacgcacagacggcgtcttctgccaccaagagacccgagaactccagattcacgacattcctgtcccatgtagaagcatttccattcaaccgtggcccctcttcagaacctagacctatcagtgccatttttttttcataatctacgaagaacttggctatggctgatcttttttaaatttaactttctgatggaccctgtagtttccagttaagtgcagattccttacagacatatagaacagcgcattcttctgtagacatttgctcatgttggtaaatacaatcacccatatgaaaaaattgttttcacctgatatgaaaatgttagaaaaggcaaactccgggacttctaaagatttacttaaatcccattatgtactttattcagaatgtagaagctgacttgaaaggcatccttggtactaagtgaagcttattcagaaaatgcatttttcaaatgcaatggcaactgcttgtagatatcatttttgcagtgtatgttggagctgtaatggttgcaattatgtttcttatttccttaaaagcaaaaagcgtagtttctgatttatgttatagaatgatactgattagactttgagccaaggggaaaatactaaattcttttaaacctggagccttagagagccacaggaatatcttctgttgtacagtctaataagctgtggtaggaagtatcatgtaatcacagtttaatgacagtttatgtatatatataattcagtattccctctgataacatagttgccagtgtttaatacacttgtaacttggatttttaccttataggctatatgtatactcagttttttaaagcatttttttcagagatcacttaattccccatgcttctgcaatgcatataaaaactataaatgccgagtggtagaaactcctctttcttcatagtcctcaggctttggttacatttgcatatgccatttgaagcctccagcttttaccagtttaacatccaaagttcacagcatcagcattcatggtgtaagaacagttttgcagtataacacgatctgataatcattcagttattaaattgtaaataattattgggatggtttcttggctttaagtccactgaataaaaactatgaaattgcactctgtgtcaaccatccactaggatagaataccgaaatctgtgcatgcaaaaataggagatgggcccatttgcacacaattcgtagttatgcagtctgctatataaatatgttcacatgcactgtgtgtatgaaaatagatggtctgtgttcagacaaaagtaaaacatttttttcaaattgttacatttaaaggttttctgggagaaatttatgaaacgcaggctgtgtctatttgacatcagaaatttccactttaaaccaaaataataagaaactttaatctgtatatttacaacctttgttgagtacacttcccccttatttatacgtctgcatttccttccgagcttcacatctttctaaaatgcagcttggttttaaaataaaagaacattcattttgtgattctaaacaagcttcagtaaataccaccagtatagtactggtgaatttctcagcataaaatcgacatacctaaaaagttaataaaattcagctcttttccaatttcattgttatgcctattgaagtattaattgccaggtttgatttttagtgaagcttggagtccatactttgagcagaccaagtgaagggaagaacagaaagaaactcaggagtagagtaatatcacttctcacttacaccactttcaggcacatccaaagagttcctagatacttggaaaatgtctgaaaatttttaagtaaaatactaaacttttcagtgtttagctcaactttttgttcatttggaagtttctctccatccgaggacttaagccagttttggatttgtaagccctgagtacaatacacttcctggaggcatcctcactgctgttgaagcaaaggatatgcatggggtggaaggacggcttcgaacctgggactcatatgccttgagaacaaatagattgttacagccttgggctgctgcgtaatcacggttcctcgaggctcttcctgagcacatgcccaagcatctgcctctggagagactgactccaaatgcaggtgcttccattggagctaggtcggaggctgctttatatgacgaactccagaaatggatgccagaatacggaggccaaacgttctgagtcctggtaaggacagtcgctctgggggtcctcattttactgcagttcctgcacgccagtgaaagagaggagatagaccctggaaggcagagctgcagatgctcatcatcaggtcaattctggagctacagttttgtttctgactggatagggatgcaccagtgactgtcacatcaagcagtccttttattctctctcctttagtatcgattttaaagggcattaggcactatggttccagagtttcttggggaaaacttgcagattcttattaattggttctgcaatacttaaataaattattttacaattataagttttcagattataacatttgtattaatttttactgattttccaagatacttcttagatttactatttacgtagctttatgtacattctctgtaaaaatagacctctaaatatgaggctttacatgaaatttgtacacacatacacactaatgttagctccttaaattgctgcactaaggtgctggttagtagagatggacggagcctctcgcgttttgctctcagatgtgttaaaggcgcacgtgtacctgctctcagcggcagtgcggcctccccatctgctgggtgcccatggccctccctgcagcctcagtgatgacctcgtctgccagggacacaggttttcatcatttacaggctcttatgtgctagttttgttggtagcacgttatttaatgcataaaggcagaattcttacaagtttttttttttaatgtgaacatagatgcagcaccgactttttaaacttgaaaaaactggtataatgttaacttttaaaaataacatttggacacactagtaattgatttttgtttacagattgttttgtttacaaattgttagtctttgtttctatgagatacttttagtgtgactttttaaatgtcttagaaattaaaagttgtacaaaaagtgatttca

SEQ ID NO: 364084 - DNA, 4817 bp, Homo sapiens
cccgcccccgactgcgcggcgcccgccctagcggagtcagagctgctcgtctgaggctgctgaggcgacggccggtgtcgtggtcgcggtacctgttccaacacggctcgcgggcccgtgccggctccggtccccggcgcggctgtccgagcccctgcggcgggcggacgatggtgtggcggagcacgcggacgcgggcggcgcggcggcgggcatgaaggaggatggaagggcaggacgaggtgtcggcgcgggagcagcacttccacagccaagtgcgggagtccacgatatgtttccttctttttgccattctctacgttgtttcctacttcatcatcacaagatacaagagaaaatcagatgaacaagaagatgaagatgccatcgtcaacaggatttcgttgtttttgagcacgttcactctcgcagtgtcagctggggctgttttgcttttacccttctcaatcatcagcaatgaaatcctgctttcttttcctcagaactactatattcagtggctaaatggctccctgattcatggtttgtggaatcttgcttcccttttttccaacctttgtttatttgtattgatgccctttgcctttttctttctggaatcagaaggctttgctggcctgaaaaagggaatccgagcccgcattttagagactttggtcatgcttcttcttcttgcgttactcattcttgggatagtgtgggtagcttcagcactcattgacaacgatgccgcaagcatggaatctttatatgatctctgggagttctatctaccctatttatattcctgtatatcattgatgggatgtttgttacttctcttgtgtacaccagttggcctttctcgtatgttcacagtgatgggtcagttgctagtgaagccaacaattcttgaagacctggatgaacaaatttatatcattaccttagaggaagaagcactccagagacgactaaatgggctgtcttcatcggtggaatacaacataatggagttggaacaagaacttgaaaatgtaaagactcttaagacaaaattagagaggcgaaaaaaggcttcagcatgggaaagaaatttggtgtatcccgctgttatggttctccttcttattgagacatccatctcggtcctcttggtggcttgtaatattctttgcctattggttgatgaaacagcaatgccaaaaggaacaagggggcctggaataggaaatgcctctctttctacgtttggttttgtgggagctgcgcttgaaatcattttgattttctatcttatggtgtcctctgttgtcggcttctatagccttcgattttttggaaactttactcccaagaaagatgacacaactatgacaaagatcattggaaattgtgtgtccatcttggttttgagctctgctctgcctgtgatgtcgagaacactgggaatcactagatttgatctacttggcgactttggaaggtttaattggctgggaaatttctatattgtattatcctacaatttgctttttgctattgtgacaacattgtgtctggtccgaaaattcacctctgcagttcgagaagaacttttcaaggccctagggcttcataaacttcacttaccaaatacttcaagagacccgagaactccagattcacgacattcctgtcccatgtagaagcatttccattcaaccgtggcccctcttcagaacctagacctatcagtgccatttttttttcataatctacgaagaacttggctatggctgatcttttttaaatttaactttctgatggaccctgtagtttccagttaagtgcagattccttacagacatatagaacagcgcattcttctgtagacatttgctcatgttggtaaatacaatcacccatatgaaaaaattgttttcacctgatatgaaaatgttagaaaaggcaaactccgggacttctaaagatttacttaaatcccattatgtactttattcagaatgtagaagctgacttgaaaggcatccttggtactaagtgaagcttattcagaaaatgcatttttcaaatgcaatggcaactgcttgtagatatcatttttgcagtgtatgttggagctgtaatggttgcaattatgtttcttatttccttaaaagcaaaaagcgtagtttctgatttatgttatagaatgatactgattagactttgagccaaggggaaaatactaaattcttttaaacctggagccttagagagccacaggaatatcttctgttgtacagtctaataagctgtggtaggaagtatcatgtaatcacagtttaatgacagtttatgtatatatataattcagtattccctctgataacatagttgccagtgtttaatacacttgtaacttggatttttaccttataggctatatgtatactcagttttttaaagcatttttttcagagatcacttaattccccatgcttctgcaatgcatataaaaactataaatgccgagtggtagaaactcctctttcttcatagtcctcaggctttggttacatttgcatatgccatttgaagcctccagcttttaccagtttaacatccaaagttcacagcatcagcattcatggtgtaagaacagttttgcagtataacacgatctgataatcattcagttattaaattgtaaataattattgggatggtttcttggctttaagtccactgaataaaaactatgaaattgcactctgtgtcaaccatccactaggatagaataccgaaatctgtgcatgcaaaaataggagatgggcccatttgcacacaattcgtagttatgcagtctgctatataaatatgttcacatgcactgtgtgtatgaaaatagatggtctgtgttcagacaaaagtaaaacatttttttcaaattgttacatttaaaggttttctgggagaaatttatgaaacgcaggctgtgtctatttgacatcagaaatttccactttaaaccaaaataataagaaactttaatctgtatatttacaacctttgttgagtacacttcccccttatttatacgtctgcatttccttccgagcttcacatctttctaaaatgcagcttggttttaaaataaaagaacattcattttgtgattctaaacaagcttcagtaaataccaccagtatagtactggtgaatttctcagcataaaatcgacatacctaaaaagttaataaaattcagctcttttccaatttcattgttatgcctattgaagtattaattgccaggtttgatttttagtgaagcttggagtccatactttgagcagaccaagtgaagggaagaacagaaagaaactcaggagtagagtaatatcacttctcacttacaccactttcaggcacatccaaagagttcctagatacttggaaaatgtctgaaaatttttaagtaaaatactaaacttttcagtgtttagctcaactttttgttcatttggaagtttctctccatccgaggacttaagccagttttggatttgtaagccctgagtacaatacacttcctggaggcatcctcactgctgttgaagcaaaggatatgcatggggtggaaggacggcttcgaacctgggactcatatgccttgagaacaaatagattgttacagccttgggctgctgcgtaatcacggttcctcgaggctcttcctgagcacatgcccaagcatctgcctctggagagactgactccaaatgcaggtgcttccattggagctaggtcggaggctgctttatatgacgaactccagaaatggatgccagaatacggaggccaaacgttctgagtcctggtaaggacagtcgctctgggggtcctcattttactgcagttcctgcacgccagtgaaagagaggagatagaccctggaaggcagagctgcagatgctcatcatcaggtcaattctggagctacagttttgtttctgactggatagggatgcaccagtgactgtcacatcaagcagtccttttattctctctcctttagtatcgattttaaagggcattaggcactatggttccagagtttcttggggaaaacttgcagattcttattaattggttctgcaatacttaaataaattattttacaattataagttttcagattataacatttgtattaatttttactgattttccaagatacttcttagatttactatttacgtagctttatgtacattctctgtaaaaatagacctctaaatatgaggctttacatgaaatttgtacacacatacacactaatgttagctccttaaattgctgcactaaggtgctggttagtagagatggacggagcctctcgcgttttgctctcagatgtgttaaaggcgcacgtgtacctgctctcagcggcagtgcggcctccccatctgctgggtgcccatggccctccctgcagcctcagtgatgacctcgtctgccagggacacaggttttcatcatttacaggctcttatgtgctagttttgttggtagcacgttatttaatgcataaaggcagaattcttacaagtttttttttttaatgtgaacatagatgcagcaccgactttttaaacttgaaaaaactggtataatgttaacttttaaaaataacatttggacacactagtaattgatttttgtttacagattgttttgtttacaaattgttagtctttgtttctatgagatacttttagtgtgactttttaaatgtcttagaaattaaaagttgtacaaaaagtgatttca

SEQ ID NO: 364085 - DNA, 4871 bp, Homo sapiens
cccgcccccgactgcgcggcgcccgccctagcggagtcagagctgctcgtctgaggctgctgaggcgacggccggtgtcgtggtcgcggtacctgttccaacacggctcgcgggcccgtgccggctccggtccccggcgcggctgtccgagcccctgcggcgggcggacgatggtgtggcggagcacgcggacgcgggcggcgcggcggcgggcatgaaggaggatggaagggcaggacgaggtgtcggcgcgggagcagcacttccacagccaagtgcgggagtccacgatatgtttccttctttttgccattctctacgttgtttcctacttcatcatcacaagatacaagagaaaatcagatgaacaagaagatgaagatgccatcgtcaacaggatttcgttgtttttgagcacgttcactctcgcagtgtcagctggggctgttttgcttttacccttctcaatcatcagcaatgaaatcctgctttcttttcctcagaactactatattcagtggctaaatggctccctgattcatggtttgtggaatcttgcttcccttttttccaacctttgtttatttgtattgatgccctttgcctttttctttctggaatcagaaggctttgctggcctgaaaaagggaatccgagcccgcattttagagactttggtcatgcttcttcttcttgcgttactcattcttgggatagtgtgggtagcttcagcactcattgacaacgatgccgcaagcatggaatctttatatgatctctgggagttctatctaccctatttatattcctgtatatcattgatgggatgtttgttacttctcttgtgtacaccagttggcctttctcgtatgttcacagtgatgggtcagttgctagtgaagccaacaattcttgaagacctggatgaacaaatttatatcattaccttagaggaagaagcactccagagacgactaaatgggctgtcttcatcggtggaatacaacataatggagttggaacaagaacttgaaaatgtaaagactcttaagacaaaattagagaggcgaaaaaaggcttcagcatgggaaagaaatttggtgtatcccgctgttatggttctccttcttattgagacatccatctcggtcctcttggtggcttgtaatattctttgcctattggttgatgaaacagcaatgccaaaaggaacaagggggcctggaataggaaatgcctctctttctacgtttggttttgtgggagctgcgcttgaaatcattttgattttctatcttatggtgtcctctgttgtcggcttctatagccttcgattttttggaaactttactcccaagaaagatgacacaactatgacaaagatcattggaaattgtgtgtccatcttggttttgagctctgctctgcctgtgatgtcgagaacactgggaatcactagatttgatctacttggcgactttggaaggtttaattggctgggaaatttctatattgtattatcctacaatttgctttttgctattgtgacaacattgtgtctggtccgaaaattcacctctgcagttcgagaagaacttttcaaggccctagggcttcataaacttcacttaccaaatacttcaagggattcagaaacagccaagccttctgtaaatgggcatcagaaagcactgtgagacgcacagacggcgtcttctgccaccaagagacccgagaactccagattcacgacattcctgtcccatgtagaagcatttccattcaaccgtggcccctcttcagaacctagacctatcagtgccatttttttttcataatctacgaagaacttggctatggctgatcttttttaaatttaactttctgatggaccctgtagtttccagttaagtgcagattccttacagacatatagaacagcgcattcttctgtagacatttgctcatgttggtaaatacaatcacccatatgaaaaaattgttttcacctgatatgaaaatgttagaaaaggcaaactccgggacttctaaagatttacttaaatcccattatgtactttattcagaatgtagaagctgacttgaaaggcatccttggtactaagtgaagcttattcagaaaatgcatttttcaaatgcaatggcaactgcttgtagatatcatttttgcagtgtatgttggagctgtaatggttgcaattatgtttcttatttccttaaaagcaaaaagcgtagtttctgatttatgttatagaatgatactgattagactttgagccaaggggaaaatactaaattcttttaaacctggagccttagagagccacaggaatatcttctgttgtacagtctaataagctgtggtaggaagtatcatgtaatcacagtttaatgacagtttatgtatatatataattcagtattccctctgataacatagttgccagtgtttaatacacttgtaacttggatttttaccttataggctatatgtatactcagttttttaaagcatttttttcagagatcacttaattccccatgcttctgcaatgcatataaaaactataaatgccgagtggtagaaactcctctttcttcatagtcctcaggctttggttacatttgcatatgccatttgaagcctccagcttttaccagtttaacatccaaagttcacagcatcagcattcatggtgtaagaacagttttgcagtataacacgatctgataatcattcagttattaaattgtaaataattattgggatggtttcttggctttaagtccactgaataaaaactatgaaattgcactctgtgtcaaccatccactaggatagaataccgaaatctgtgcatgcaaaaataggagatgggcccatttgcacacaattcgtagttatgcagtctgctatataaatatgttcacatgcactgtgtgtatgaaaatagatggtctgtgttcagacaaaagtaaaacatttttttcaaattgttacatttaaaggttttctgggagaaatttatgaaacgcaggctgtgtctatttgacatcagaaatttccactttaaaccaaaataataagaaactttaatctgtatatttacaacctttgttgagtacacttcccccttatttatacgtctgcatttccttccgagcttcacatctttctaaaatgcagcttggttttaaaataaaagaacattcattttgtgattctaaacaagcttcagtaaataccaccagtatagtactggtgaatttctcagcataaaatcgacatacctaaaaagttaataaaattcagctcttttccaatttcattgttatgcctattgaagtattaattgccaggtttgatttttagtgaagcttggagtccatactttgagcagaccaagtgaagggaagaacagaaagaaactcaggagtagagtaatatcacttctcacttacaccactttcaggcacatccaaagagttcctagatacttggaaaatgtctgaaaatttttaagtaaaatactaaacttttcagtgtttagctcaactttttgttcatttggaagtttctctccatccgaggacttaagccagttttggatttgtaagccctgagtacaatacacttcctggaggcatcctcactgctgttgaagcaaaggatatgcatggggtggaaggacggcttcgaacctgggactcatatgccttgagaacaaatagattgttacagccttgggctgctgcgtaatcacggttcctcgaggctcttcctgagcacatgcccaagcatctgcctctggagagactgactccaaatgcaggtgcttccattggagctaggtcggaggctgctttatatgacgaactccagaaatggatgccagaatacggaggccaaacgttctgagtcctggactgaacagcacctacttgtggtctggacagcttaacccagagttcctggaagaataaatgctgttagcatctggttaatttactggcagacagaagcctacttacagtggctttcaactttttgaccacatctttactgtggaatctcatcaaagacttggaagcaagggtggtgagaggggcctggggcgtggtgtggagggtcgagttctttgtcgtcccacagtcacccccaggaccaccttgcgaagccgaaaatacacatctgcattttaccgacaaggaacgccgctcagaaagctgcagacatttgcctggggtcacgcttacagtgggcagatgaactggatgtaaatacaggctgccctggaccattcctcagaactcatgggattttcgcgaccctcatcctcagtgaagttagatgaccattcctgcctttcatcccaccgattttcctaagtatctgttgcctgcaactaacactagttcctgtgtcagtaaagtactgcacttggttgcaaagaatagagatggactctgccaacataggcacggaaggtttacggggtggatggcatggctcacagatgtgatgagaaagccccggaagaagtgttgggcacagccttaggcacaacctttcctgggctcttcccatcactgaatgatccatgtatctccgggactctccttctagatccaaagtttagggcggcggaatcggactgctctggcctttgacacgtgcctgtgctttgcctgtcaacgctatggggagagagatgtcagcttacagaaaattgaggttctgtgattcagtttccctctgctctcttagaataaaagtgcttactcattgtttaaagcattctccaaattagtctgcaaattctttgatagtatacatccttaaaaaaaaa

SEQ ID NO: 364086 - DNA, 2836 bp, Homo sapiens
cccgcccccgactgcgcggcgcccgccctagcggagtcagagctgctcgtctgaggctgctgaggcgacggccggtgtcgtggtcgcggtacctgttccaacacggctcgcgggcccgtgccggctccggtccccggcgcggctgtccgagcccctgcggcgggcggacgatggtgtggcggagcacgcggacgcgggcggcgcggcggcgggcatgaaggaggatggaagggcaggacgaggtgtcggcgcgggagcagcacttccacagccaagtgcgggagtccacgatatgtttccttctttttgccattctctacgttgtttcctacttcatcatcacaagatacaagagaaaatcagatgaacaagaagatgaagatgccatcgtcaacaggatttcgttgtttttgagcacgttcactctcgcagtgtcagctggggctgttttgcttttacccttctcaatcatcagcaatgaaatcctgctttcttttcctcagaactactatattcagtggctaaatggctccctgattcatggtttgtggaatcttgcttcccttttttccaacctttgtttatttgtattgatgccctttgcctttttctttctggaatcagaaggctttgctggcctgaaaaagggaatccgagcccgcattttagagactttggtcatgcttcttcttcttgcgttactcattcttgggatagtgtgggtagcttcagcactcattgacaacgatgccgcaagcatggaatctttatatgatctctgggagttctatctaccctatttatattcctgtatatcattgatgggatgtttgttacttctcttgtgtacaccagttggcctttctcgtatgttcacagtgatgggtcagttgctagtgaagccaacaattcttgaagacctggatgaacaaatttatatcattaccttagaggaagaagcactccagagacgactaaatgggctgtcttcatcggtggaatacaacataatggagttggaacaagaacttgaaaatgtaaagactcttaagacaaaattagagaggcgaaaaaaggcttcagcatgggaaagaaatttggtgtatcccgctgttatggttctccttcttattgagacatccatctcggtcctcttggtggcttgtaatattctttgcctattggttgatgaaacagcaatgccaaaaggaacaagggggcctggaataggaaatgcctctctttctacgtttggttttgtgggagctgcgcttgaaatcattttgattttctatcttatggtgtcctctgttgtcggcttctatagccttcgattttttggaaactttactcccaagaaagatgacacaactatgacaaagatcattggaaattgtgtgtccatcttggttttgagctctgctctgcctgtgatgtcgagaacactgggaatcactagatttgatctacttggcgactttggaaggtttaattggctgggaaatttctatattgtattatcctacaatttgctttttgctattgtgacaacattgtgtctggtccgaaaattcacctctgcagttcgagaagaacttttcaaggccctagggcttcataaacttcacttaccaaatacttcaagggattcagaaacagccaagccttctgtaaatgggcatcagaaagcactgtgagacgcacagacggcgtcttctgccaccaagagacccgagaactccagattcacgacattcctgtcccatgtagaagcatttccattcaaccgtggcccctcttcagaacctagacctatcagtgccatttttttttcataatctacgaagaacttggctatggctgatcttttttaaatttaactttctgatggaccctgtagtttccagttaagtgcagattccttacagacatatagaacagcgcattcttctgtagacatttgctcatgttggtaaatacaatcacccatatgaaaaaattgttttcacctgatatgaaaatgttagaaaaggcaaactccgggacttctaaagatttacttaaatcccattatgtactttattcagaatgtagaagctgacttgaaaggcatccttggtactaagtgaagcttattcagaaaatgcatttttcaaatgcaatggcaactgcttgtagatatcatttttgcagtgtatgttggagctgtaatggttgcaattatgtttcttatttccttaaaagcaaaaagcgtagtttctgatttatgttatagaatgatactgattagactttgagccaaggggaaaatactaaattcttttaaacctggagccttagagagccacaggaatatcttctgttgtacagtctaataagctgtggtaggaagtatcatgtaatcacagtttaatgacagtttatgtatatatataattcagtattccctctgataacatagttgccagtgtttaatacacttgtaacttggatttttaccttataggctatatgtatactcagttttttaaagcatttttttcagagatcacttaattccccatgcttctgcaatgcatataaaaactataaatgccgagtggtagaaactcctctttcttcatagtcctcaggctttggttacatttgcatatgccatttgaagcctccagcttttaccagtttaacatccaaagttcacagcatcagcattcatggtgtaagaacagttttgcagtataacacgatctgataatcattcagttattaaattgtaaataattattgggatggtttcttggctttaagtccactgaataaaaactatgaaattgca

SEQ ID NO: 364087 - DNA, 607 bp, Homo sapiens
aagggtcacctgtgcccagcggctcacactctgccagcctgcccctcccacatgctaagccgtgctgccctctgcctggacagaggttccagggaacggcacggttcctccatttgggttcagggtgcatctcctcagacatttccaccttatttcaaacatctcacccctcacttcactctctctccccttcctctctttgcatttttcttcctggcacttattcttgaaaattgtaacaaaatattttattatttgtctctccccagctccctgcaggaagcgtgccctgcagcaggcgcgaaccacccgagcggcctccacatgcacctagacaggcacgccggctgggtgctcacacctgggcccttgcacctgtgtctgcccagaggggctggtcagcacaccctttacaatgaaggctcacaaagtacacaactccaagtgccagtccatgaaagcagttcgcatagacttttcatgcagttgagtctaatttatattttactatccacttaccctatgtaaccaaatatcatttttacacttattaacaattcatacttttttcttccttaagaggaattaaagcatttcctcaatgaga

SEQ ID NO: 364088 - DNA, 475 bp, Homo sapiens
atgtttagaacaaaagatcatacaaattactggagatggaatatgctgaaacccacagaggtaatgggtaagaaaggaaaggtgggcacagcttagtacttagctgtctaagacatggcaggtgagggaaagaaaggcagacaggaatagctcctgatttccagcttggatggccatgtggtaataataaccagaatagagtaaaaagaggaggagtgctaaggtgctaaggagcaaggagtgagcccatacatttatgtttaatttgagcttttcacggtctgtccaggtgaaaacattcaataaggcaaactcacttgccagagctctttggaacagatctatttgagcaatatggatttgagaatggtaacaagaaatttaaaatactgttcagaggagcagaattctacttctgggtagatggagtagacttactttttcctcttcctcccactaagtagaactaaaaacc

SEQ ID NO: 364089 - DNA, 2332 bp, Homo sapiens
  misc_feature (2329)..(2329): n is a, c, g, or t
  misc_feature (2332)..(2332): n is a, c, g, or t
ggggggcgggtgtgggtggggtgcggggtggacggtggtgccgcgtgggggggccgtcagtcgtgagccggtgctggcatccttcttctcttctctccctccgcctgcggtctcgcgctcgtcgcacgctgtatttcttcctctcccgcccgctcgctttctcggtgttggcgtccggcggtcccggcgctcattctcagctgccactctgctaggcgtcgtcgccgctcgtgcttgagtctccccgcgcccccacctcctcgccccgcctctctgctgcgtgcgcgcgcgcgcggctgttgctcggtcccgccgtccgcccgtggtcgctccgcgcgggtgccggcgcgcgcgtagtgcggggggtgggggcgcagggggggcggggagtcgggggtgggcgtggtggcgcggcgtggtgtgtcggtgtggcgtgtgtggcctcctggtgggtgttttgttgctgtagagtgctgcttctgtgttgggcgttgtgtgcgctgtgtggagtgtgcgagggtgcctgtttggctgccctctctgtgttgtgttgtgttgtctgcagtgtgcagttgggttgtcggcgttggggggtggtcgcgcgtggtcggtttgtcgctcgctgtcaggcgggtgtcgttgccctatgtgtctggcgtgtgccgcttggtggtcgtgtgcttgtgtgtttttttttcctctgttgtacgctttctctttttgtctgcttgttttgggtcctttttctcttctgtagtctgtggtggtgtgttctcttttccctctttgggtggtgtttgttgtggcgcgcccccgcgcgcgggtgtgtttttggtgtgtcgcgctcttgtgtgcgcgttgttttcctgtctctgttttttgttttgtttttcttttgttgttttttttttttttgttgttttgttttttttttttttttttttttttaactaataacttcaatttttaataatggaaacaattttgccattctagaaactattttaggggagaaaaatcttccctacaaaaataaacttaaacccatcaaaattataaatattataactttttacttctgccatttaaaatgctctcctgcaataccaccccttcatttaacatccttcctgtaccatcacatattgaagagaaaacagtattacagcaaagcttagatagtttaacataatgatttgtacaatgattcttaaaaaatctttggccttagtggccttttttcttcacttacacattaaaaatgctgctgcagtaaccagtgtttgggaaaggacatcagtcttcaagaaccataaactgacagaatttcaatacagtaggtttccaaattgcaatttgtagtgcacatgacagtaagcgaggttttgggtaaatatagatgaggatgcctattcagacaatctacttcaagtaaaaaaaaaaaaaaaaaaaaaattcacagatacccatcagctactactttaggttctaacagtgtcttaatctgagaaacaaatgcttcacaaaatataagtttactgggatgaataattaaaaaaccaggtggtaataacaatatactcaaatccaggccatagtctgaataataaaaccagtacaaaaaatcacgaaggcattccctgaacaataaaggtaaagtgttggatgacaatgtcactaaaacctcatcaatgtacaaaagagaagttacatgcaaaattaaacaagatgtgccatacatattttatagctaattctatttttttcaactttccttaaatgcttaggaagatatgattgtctcagtaaattgtgtggcacagcataacaacttaagtctgcctccaacaagatgggtattctccaaaaagtcagaagagccaccaagagacgaacagaaatgcaataaaaggcacagttcacttgggcaaagaactgaagcaccttggaatttcaaaaagaatccattaggtgtcaccaaagtgttaacaattccttgggaatttataaacaaaaaatatctagactaaaaatagaatataaggcccctctggaaccactgcacacctttccctctgttctcagattaaactgctgcataaaatgaggttatttagcctgtttttaaggaaggcttctattgcacatgcatctctttggttggtaataacatgtacttttgttaaaatatttccataatgaagccctgttgtgtggttagctgggtgtggactttcctccctttcttgggggccctcctactcacagtcaagttgccctttagaactaaagatctggtaggattgggtctttattcaatagccctgtnccn

SEQ ID NO: 364090 - DNA, 1670 bp, Homo sapiens
ggggggcgggtgtgggtggggtgcggggtggacggtggtgccgcgtgggggggccgtcagtcgtgagccggtgctggcatccttcttctcttctctccctccgcctgcggtctcgcgctcgtcgcacgctgtatttcttcctctcccgcccgctcgctttctcggtgttggcgtccggcggtcccggcgctcattctcagctgccactctgctaggcgtcgtcgccgctcgtgcttgagtctccccgcgcccccacctcctcgccccgcctctctgctgcgtgcgcgcgcgcgcggctgttgctcggtcccgccgtccgcccgtggtcgctccgcgcgggtgccggcgcgcgcgtagtgcggggggtgggggcgcagggggggcggggagtcgggggtgggcgtggtggcgcggcgtggtgtgtcggtgtggcgtgtgtggcctcctggtgggtgttttgttgctgtagagtgctgcttctgtgttgggcgttgtgtgcgctgtgtggagtgtgcgagggtgcctgtttggctgccctctctgtgttgtgttgtgttgtctgcagtgtgcagttgggttgtcggcgttggggggtggtcgcgcgtggtcggtttgtcgctcgctgtcaggcgggtgtcgttgccctatgtgtctggcgtgtgccgcttggtggtcgtgtgcttgtgtgtttttttttcctctgttgtacgctttctctttttgtctgcttgttttgggtcctttttctcttctgtagtctgtggtggtgtgttctcttttccctctttgggtggtgtttgttgtggcgcgcccccgcgcgcgggtgtgtttttggtgtgtcgcgctcttgtgtgcgcgttgttttcctgtctctgttttttgttttgtttttcttttgttgttttttttttttttgttgttttgttttttttttttttttttttttttaactaataacttcaatttttaataatggaaacaattttgccattctagaaactattttaggggagaaaaatcttccctacaaaaataaacttaaacccatcaaaattataaatattataactttttacttctgccatttaaaatgctctcctgcaataccaccccttcatttaacatccttcctgtaccatcacatattgaagagaaaacagtattacagcaaagcttagatagtttaacataatgatttgtacaatgattcttaaaaaatctttggccttagtggccttttttcttcacttacacattaaaaatgctgctgcagtaaccagtgtttgggaaaggacatcagtcttcaagaaccataaactgacagaatttcaatacagtaggtttccaaattgcaatttgtagtgcacatgacagtaagcgaggttttgggtaaatatagatgaggatgcctattcagacaatctacttcaagtaaaaaaaaaaaaaaaaaaaaaattcacagatacccatcagctactactttaggttctaacagtgtcttaatctgagaaacaaatgcttcacaaaatataagtttactgggatgaataattaaaaaaccaggtggtaataacaatatactcaaatccaggccatagtctgaataataaaaccagtacaaaaaatcacgaaggcctgatggtagcagactgcggggatcctctaggtca

SEQ ID NO: 364091 - DNA, 372 bp, Homo sapiens
aaatcacaaatgtccttttcagttaatatgcatatatgcatgtgtgtgtgtgtgtgtgtgtgtgtgtgtgtgtgtgtgtatcattcttcttcatgaagaaaaatgttggggaatgctcttctagttgtgttactgaactgaacttgggtctgcccatcaggttcaccaaagccaaacagttacatcaagatttgcagtgagagaaagtgagacacttttttcagggtgccaagcaaggagaattgggcagctcatgctaaagacccaacctcctctatggcttatatataagggtttttaaaggtagggaaacagaggttacgttacatgcaaagacatacatcaacacatgaagtatatacattgatttgg

SEQ ID NO: 364092 - DNA, 869 bp, Homo sapiens
cacgttgaaaaggcaggggaggaagtgagcagggccgggcgtggtctgcaggctagatctagtgctttatctactgggcggctgagctagagactgccggtgccttcatgggcaggactaggccgaaaactccccagattgtcattcttcagggatggcagccctaaacacagcatggcaactcatctactcactcatgaaagattaaaaaatggaaaccaacgtatttcatcttatgctctgcgtcacttctgctcggactcataaatccacgtctctttgctttggccacttcaactcatatccaagccttcctttaattcatgatttattgctggaagatgatgtcaggtcataggatgatatatataatcagtgagcaggcagaatgaggagacagttgaaagttctctacaacagaagccaagaaggaagccgtctatcttgtggcgatcatgtataagctggcctcctgctgtttgcttttcataggattcttaaatcctctcttatctcttcctctccttgactccagggaaatatcctttcaactctcagcacctcatgaagacgcgcgcttaactccggaggagctagaaagagcttcccttctacagatactgccagagatgctgggtgcagaaagaggggatattctcaggaaagcagactcaagtaccaacatttttaacccaagaggaaatttgagaaagtttcaggatttctctggacaagatcctaacattttactgagtcatcttttggccagaatctggaaaccatacaagaaacagagaagaaagctgaggcaagatttaagattgtggaagaaagagcctggcttacgaatttttaaaaactatgtgtgt

SEQ ID NO: 364093 - DNA, 308 bp, Homo sapiens
cacgttgaaaaggcaggggaggaagtgagcagggccgggcgtggtctgcaggctagatctagtgctttatctactgggcggctgagctagagactgccggtgccttcatgggcaggactaggccgaaaactccccaggtaggacagagtcccatatctctcacgtctcttggtgggagggagttccgaggcaacctcctggagggtgggagttccgtagcaggcatgcatgctttggtttgtaaatcgactattagctcttgaggagagtcttggagcacagagttagaggaacttgccctctataaa

SEQ ID NO: 364094 - DNA, 890 bp, Homo sapiens
  misc_feature (790)..(791): n is a, c, g, or t
  misc_feature (797)..(797): n is a, c, g, or t
cacgttgaaaaggcaggggaggaagtgagcagggccgggcgtggtctgcaggctagatctagtgctttatctactgggcggctgagctagagactgccggtgccttcatgggcaggactaggccgaaaactccccagattgtcattcttcagggatggcagccctaaacacagcatggcaactcatctactcactcatgaaagattaaaaaatggaaaccaacgtatttcatcttatgctctgcgtcacttctgctcggactcataaatccacgtctctttgctttggccacttcaactcatatccaagccttcctttaattcatgatttattgctggaaatatcctttcaactctcagcacctcatgaagacgcgcgcttaactccggaggagctagaaagagcttcccttctacagatactgccagagatgctgggtgcagaaagaggggatattctcaggaaagcagactcaagtaccaacatttttaacccaagaggaaatttgagaaagtttcaggatttctctggacaagatcctaacattttactgagtcatcttttggccagaatctggaaaccatacaagaaacgtgagactcctgattgcttctggaaatactgtgtctgaagtgaaataagcatctgttagtcagctcagaaacacccatcttagaatatgaaaaataacacaatgcttgatttgaaaacagtgtggagaaaaactaggcaaactacaccctgttcattgttacctggaaaataaatcctctatgttttgacaaaaaanntaatanatatatattatataatttaattttatatttatatatattttttaatttatatatattttaatttattaataatttaatttaagggtttatttc

SEQ ID NO: 364095 - DNA, 1089 bp, Homo sapiens
  misc_feature (989)..(990): n is a, c, g, or t
  misc_feature (996)..(996): n is a, c, g, or t
cacgttgaaaaggcaggggaggaagtgagcagggccgggcgtggtctgcaggctagatctagtgctttatctactgggcggctgagctagagactgccggtgccttcatgggcaggactaggccgaaaactccccagattgtcattcttcagggatggcagccctaaacacagcatggcaactcatctactcactcatgaaagattaaaaaatggaaaccaacgtatttcatcttatgctctgcgtcacttctgctcggactcataaatccacgtctctttgctttggccacttcaactcatatccaagccttcctttaattcatgatttattgctggaagatgatgtcaggtcataggatgatatatataatcagtgagcaggcagaatgaggagacagttgaaagttctctacaacagaagccaagaaggaagccgtctatcttgtggcgatcatgtataagctggcctcctgctgtttgcttttcataggattcttaaatcctctcttatctcttcctctccttgactccagggaaatatcctttcaactctcagcacctcatgaagacgcgcgcttaactccggaggagctagaaagagcttcccttctacagatactgccagagatgctgggtgcagaaagaggggatattctcaggaaagcagactcaagtaccaacatttttaacccaagaggaaatttgagaaagtttcaggatttctctggacaagatcctaacattttactgagtcatcttttggccagaatctggaaaccatacaagaaacgtgagactcctgattgcttctggaaatactgtgtctgaagtgaaataagcatctgttagtcagctcagaaacacccatcttagaatatgaaaaataacacaatgcttgatttgaaaacagtgtggagaaaaactaggcaaactacaccctgttcattgttacctggaaaataaatcctctatgttttgacaaaaaanntaatanatatatattatataatttaattttatatttatatatattttttaatttatatatattttaatttattaataatttaatttaagggtttatttc

SEQ ID NO: 364096 - DNA, 456 bp, Homo sapiens
gtccgtctcccaggaggccaccagtggccccaaagatgcccatcgaaatctccccaaggaggctcttcaaaatcctcttaccaaaaagtaagcacttcttcaccttttgggtttgctgtagtaaaaattgcccagggatgacaaagggaagggctttatacagtctagaaggatttctcttactaagagcagctgtgcatgttgaatattacatttccctgtttgctaaaggctggggctgtgctagccaatacaagcctgctggccgcatgtggctactggctgctgggaatgcagctggtccaaagggagaggtgctggaagtaaaatgcacactggctcttgaagacttggtacaggcaaaagaaggtaaaaacagcgaattaatactttttatggtgttttaaatatacgtttttttaaatacttgtaacattaaatataaattataatttt

SEQ ID NO: 364097 - DNA, 6756 bp, Homo sapiens
cggcggcggacgcggcgggctcggccacaggtaacccgcaggagccgagagcgctgcctggcgcgcgggcggctggaggcacggcgctgggcggcgccgaggccctggggccgccggagccagcgggagccagtccccgtcttcgcccctcgccccccaccgtgtcgccggccttggtccctgcggcgcggacgtccggcgcgggagagaaaggtcccgaagatggcatattcataaagacatcttctgatgattgtgaacatctttacctctgggtgccaggccgggccagtgacttcgtgttgagctgaaggaacttgtctaccgcttccctgaaaacctttctttcctaattcatgagccagcaagatgcggtcgctgcactttcagagcgccttctcgtagctgcgtacaaaggccaaacagagaatgtggttcagctcatcaacaagggcgccagggtagcggttaccaagcatggccggactcccctgcatcttgctgccaataagggccatcttcctgtggtccagatcttgctgaaggctggctgcgaccttgatgtccaggatgatggggaccagaccgccttgcaccgggccacagtggtggggaacacggagatcatcgcggcgctcatccacgaagggtgtgccctggacagacaagacaaggatgggaatacagccttgcatgaagcatcctggcatggtttcagccagtcagccaagctgctcgttaaagcaggagccaacgtgcttgccaagaacaaggcggggaacacagctctgcacctggcctgccagaacagccactcccagagcacgcgcgtcctcctgctggccgggtcccgcgctgacctcaaaaataatgcaggagacacctgtttgcacgttgctgcgcgctataatcacttgtccatcattaggctcctcctcactgctttctgttctgtccatgaaaagaaccaggctggagacacagcacttcacgttgctgctgccctaaatcacaagaaggtggccaaaatcttactggaagccggagcagatacgaccattgttaacaatgcaggccagactccgctggagactgcccgctaccacaataacccggaagttgctcttctccttactaaagctccccagggcagtgtctcagcaggagacacccccagcagtgaacaggctgtggccagaaaagaagaagccagagaagagttcctgtcagcctccccagaacccagagcaaaggatgacaggaggagaaagtcaaggcccaaggtgtcagcgttttctgaccccaccccaccagccgaccaacagcctggacaccagaagaacctgcatgctcataatcaccctaaaaagaggaacaggcatcggtgttcatccccacccccaccccatgagttcagggcgtatcagctctacacattgtaccggggcaaggatgggaaagtgatgcaggcaccaataaatggttgtcgatgtgaacctctaatcaacaagctggagaatcagttggaggctactgtggaggagataaaagcagagctgggatcggttcaggacaaaatgaatacaaagctggggcagatggagaataagacccagcaccaaatgcgtgttttggacaagctgatggttgagcgactttctgcagagaggacggagtgcctgaaccgcctgcaacagcactcagacacagagaagcatgagggggagaaacgacagatatccttggtggatgaattaaaaacctggtgcatgttaaagattcagaatctggagcagaagctttctggagattctagggcctgcagagctaaatccacaccatctacttgtgagtcctctacaggtgtggaccaattagtggtgactgcaggtccagcagcagcttccgacagctcccctccagtggttaggcccaaagagaaggccctcaactccactgctacccagagactccagcaggagctgtcgtcttctgactgtacaggctcccgactgagaaacgtcaaggtccagacagccttgctacccatgaatgaggcagccagatctgatcagcaggctgggccctgcgtcaacagaggcactcaaactaagaagtctgggaagagtgggccaacaaggcatcgtgcccagcaacccgcagccagcagcacctgtgggcagccgccaccagccacaggcagcgagcagactggccctcacattcgggacacctcccaagctctggagcttacccagtatttttttgaggctgtttctacccagatggaaaagtggtatgaaaggaagattgaagaagcacgaagccaagccaatcagaaagcccagcaagataaggctacattgaaggaacacattaaaagtttagaagaggaacttgccaaactaaggactagggtgcagaaggaaaattagcaccaataaagaggaaatatgaaaggattcttgaagatttccagttttgcaactgcataatagctatgcccaaggagtcaactattgtatatattgcagatttgcctttttaaaaaaatcactaattctacaatgtgccagatacatgtttcctatgcccaggaagttatgaagacttcaacaattaaactgaaaccaggggaagcttgcttagttttgggtttcattataaactcttagcctcagtccaggttaatctgaagtttgaaagctcagattaagcaagccatgccaagaaactggacgatgtgtaagcctagactctaaaattcaagatgtgtgaaataatataagtcaaaagcaagaaaaacgtaatcccgtctgaactcaagtagtcattcatataaatttgaacacacctgctgtgcctagacaagtgtctttctgtaagagctgtaactctgagatgtgctaaataaaccctctttctcaaattcgtaattctccaactgttgacattttaatcacatgaaaagttatcagatttttgaggagaaatattttcatgatgtcacaagatccaatatatcttatgataaaatttattgaaaagtcagtttatttaaataatgaataattggctaacagctctggaaacaatgagatcaaatgagaaagattcaaattgtttgttattttctgtattttcagtcaaaaaatcagttatatagtgattttaaagcagattaatggaaaaaaattcatgtaacaattacctgaaaatttataacctattcctaatcaaacccaattatatcagaatacctttctgaatttgagatttttgctctacattttataatgaataaggctattttttgaaagtatttcattttgaattctgtcattaacctcaaaagctttctactgctttgcggtgaaggcaaaatattcgataactcaacttaggccccactgttccccaacttcatggaggccagaagactttactttgttccataatgaaatataaacacagaacaaagttgtaaaagtagcatggatatgttgaaactttggacaagcttcttgtcctttggaatatgggatttatattcatctcctcaatatcccatgtatgcacagaaacttcagttctatttctatagacacaggaacctagtgactattgaacgtaattgtaataaaatgctgctcattgagccaaagagaagaaatgatttattaacatggggacaccaagaaaaacaaagtatgcttttattccctttgtcaagctcagttttagggttttttcttttttttatagtgacaatccatagatatagacattcctaaaagaaaaataaataattcagtagatatatgtcactgttacctgaatatggaatgaatttgatgttttttattttgttgagacagggtcttgctctgtcacccagactggagtgcagtggcatgatcacacctcactgcagccttggcctctcaggctcgtgatcctcctgcctcaacctcgcaagtagcttgggactacaggcgtgtgccaccagtcctggctaattttttgtagatataaggtctcatgatattgcccaggctgaatttgatgttatttcaagttgattttcatgtgtttgggagcttgtcttgttctcaactactacgcaggtagacagtcttcccccagagactcattagattgcaatatagaggcactttctcatttccctattgttcctaatacagaattgtagagctggagagtaccttcagttttctaaatctattctcaaacaggatatcactaacctctttagaatcattcctcagtatacatcaatttattgagaactgcctaatactcaagaaattaaatcctgagttcagtaggctgtgttccaagcaggaattattttcacttaccaaaatatctcctattacctcaaggtatccttgttgaggaatgctgaaaactaaattttaagtatcaagtctagaccatagagtgctttggtgggagtattttgattacctcctacccatcagaagcaggcagctaatattgtgaactgagtatttttgtcaaaagtcacagggaagagactacagaagaatgagaagggtcaaaaggacctagtgtggcttactacatggatcttgtctcttggaggtctgtcgtagaagaagaaacaaatagaggtgatgaagacacagaacaggctcagtcagcatcctcacccagagatggcaacatctattaagaccaatgcaataccttttcatcttcagcaaatgttgtttcatctgtttttgatccttggcattgtcaaaaacttaactgcaggtccagtgtatatttttccttatttttcccttttagctatctgctaaagtgagtaaatgccacaactgtacttttccaaagaaaaagaactattgacaacttatagcctgtcatgcaggtcatgtttcaaatcaaggctgaaattttcaacagctgtgggaaaaactaaaacacagaaatactgtacagtattagtgtttttttaaagaaattgttagtgcattattgagtatactaaatatctgtgattaaataaattagttctaacttttgattttgggagcccaaaataaagggagtgttgttttcatggttatgccttgtttgtggagtcaagtgttgatatacttgaggcatgttatgtgtcttctaattaatatttttatcaccttgaatttgtgtctcttccaagcattaaagatactatggatcttaaattccttattaaaaaaatgcaagtgtgaatactttgtttagcttacattttaatttattgtggttgaccacattttatggctcctgagtgccttcacccagctacactttaccttgtatctataaaagtgtaatttagagtaaatacattggctgtaaagtcgagatcaggtgctctccaccaaaagcaaaacaaaactgctgaaatgtggcaaggtttctcagtgcaagcttaaatgtttaaactgttgaccatttggaaaatactggacaaaggggaaggacaaaacatcatttgcaatagttaaaggttatgcaaggcaaggcaacattatactttttgactaagttattaaaagttaaatgcatttcttctttgaagtgtggattataaaagccaatcaaagacaaaaccagtttgaaaaaccttttgtattctacaataccttttatgagtaagagtaaaacatacatttcttatttgtaattttatttaaggagaaatactctttccctttgatacgactataatattataaacagcaaggaatatgttctgctttctgcaattttagaaagtcattccattctgggtgacagaatgaggtaagactgtctctttaaaaaaaaaaacaactcacacctgtaatcctagcactctggccaccgaggcaggtggattgcttgagcccaggagttcgagactagcctggcaacaaagtgagattccccctcctctctctgaaaagtaaaaaaaattagccggtcatggtggcacatgcctgtggtcccagctaaatgaaaatctgaagcaggtggatctcttgagcccaggagctcaaggttgcagtgagccatgttcgcgccaccacactccagcttgtgcaacagagaccctgtctcaaaaaaaagtcatctgtgtgtttcttgcaggcacatctatggcaatgcttgtaccatgaatttaaaacttctaacttgatggcacttttttattttttttgagacaagagtctcactctttcgcccaggctgtagtgcagtagtgtgttctcggctcactgcagcctctgcctcccgggttcaatatgaggcagccctcctgagtagctggaattacaggcacgtgccaccaggttaggctagctagtggcctagctagtctcgaaatcctgacctaaagtgatccacccacctcagcctcccaaagtgtgtggattacttgtgtaagccacagtgcccggccttacctgctttaaaaaaacaaaaaaacttaggttttcttggagtctgtgctagttgaatcttgcaaatgcaaaccacatacgctctttaatgaaaacctttgcatgcacaccactgttaggaagagcatcattaaatcactgacttctacacccataaaaggatgattttgagtttcaagattttagatttactagagatagcatgtatctatcaatcatgtcacacaaaaaatatttccaaagtgttctctgttcagaaacgtcacaaatg

SEQ ID NO: 364098 - DNA, 6861 bp, Homo sapiens
cggcggcggacgcggcgggctcggccacaggtaacccgcaggagccgagagcgctgcctggcgcgcgggcggctggaggcacggcgctgggcggcgccgaggccctggggccgccggagccagcgggagccagtccccgtcttcgcccctcgccccccaccgtgtcgccggccttggtccctgcggcgcggacgtccggcgcgggagagaaaggtcccgaagatggcatattcataaagacatcttctgatgattgtgaacatctttacctctgggtgccaggccgggccagtgacttcgtgttgagctgaaggaacttgtctaccgcttccctgaaaacctttctttcctaattcatgagccagcaagatgcggtcgctgcactttcagagcgccttctcgtagctgcgtacaaaggccaaacagagaatgtggttcagctcatcaacaagggcgccagggtagcggttaccaagcatggccggactcccctgcatcttgctgccaataagggccatcttcctgtggtccagatcttgctgaaggctggctgcgaccttgatgtccaggatgatggggaccagaccgccttgcaccgggccacagtggtggggaacacggagatcatcgcggcgctcatccacgaagggtgtgccctggacagacaagacaaggatgggaatacagccttgcatgaagcatcctggcatggtttcagccagtcagccaagctgctcgttaaagcaggagccaacgtgcttgccaagaacaaggcggggaacacagctctgcacctggcctgccagaacagccactcccagagcacgcgcgtcctcctgctggccgggtcccgcgctgacctcaaaaataatgcaggagacacctgtttgcacgttgctgcgcgctataatcacttgtccatcattaggctcctcctcactgctttctgttctgtccatgaaaagaaccaggctggagacacagcacttcacgttgctgctgccctaaatcacaagaaggtggccaaaatcttactggaagccggagcagatacgaccattgttaacaatgcaggccagactccgctggagactgcccgctaccacaataacccggaagttgctcttctccttactaaagctccccaggtcttgcgcttcagtcgtgggcgaagcctgaggaaaaagagagagaggctcaaggaagagaggagagcccagtctgtgccaagagatgaggtggcccaaagcaagggcagtgtctcagcaggagacacccccagcagtgaacaggctgtggccagaaaagaagaagccagagaagagttcctgtcagcctccccagaacccagagcaaaggatgacaggaggagaaagtcaaggcccaaggtgtcagcgttttctgaccccaccccaccagccgaccaacagcctggacaccagaagaacctgcatgctcataatcaccctaaaaagaggaacaggcatcggtgttcatccccacccccaccccatgagttcagggcgtatcagctctacacattgtaccggggcaaggatgggaaagtgatgcaggcaccaataaatggttgtcgatgtgaacctctaatcaacaagctggagaatcagttggaggctactgtggaggagataaaagcagagctgggatcggttcaggacaaaatgaatacaaagctggggcagatggagaataagacccagcaccaaatgcgtgttttggacaagctgatggttgagcgactttctgcagagaggacggagtgcctgaaccgcctgcaacagcactcagacacagagaagcatgagggggagaaacgacagatatccttggtggatgaattaaaaacctggtgcatgttaaagattcagaatctggagcagaagctttctggagattctagggcctgcagagctaaatccacaccatctacttgtgagtcctctacaggtgtggaccaattagtggtgactgcaggtccagcagcagcttccgacagctcccctccagtggttaggcccaaagagaaggccctcaactccactgctacccagagactccagcaggagctgtcgtcttctgactgtacaggctcccgactgagaaacgtcaaggtccagacagccttgctacccatgaatgaggcagccagatctgatcagcaggctgggccctgcgtcaacagaggcactcaaactaagaagtctgggaagagtgggccaacaaggcatcgtgcccagcaacccgcagccagcagcacctgtgggcagccgccaccagccacaggcagcgagcagactggccctcacattcgggacacctcccaagctctggagcttacccagtatttttttgaggctgtttctacccagatggaaaagtggtatgaaaggaagattgaagaagcacgaagccaagccaatcagaaagcccagcaagataaggctacattgaaggaacacattaaaagtttagaagaggaacttgccaaactaaggactagggtgcagaaggaaaattagcaccaataaagaggaaatatgaaaggattcttgaagatttccagttttgcaactgcataatagctatgcccaaggagtcaactattgtatatattgcagatttgcctttttaaaaaaatcactaattctacaatgtgccagatacatgtttcctatgcccaggaagttatgaagacttcaacaattaaactgaaaccaggggaagcttgcttagttttgggtttcattataaactcttagcctcagtccaggttaatctgaagtttgaaagctcagattaagcaagccatgccaagaaactggacgatgtgtaagcctagactctaaaattcaagatgtgtgaaataatataagtcaaaagcaagaaaaacgtaatcccgtctgaactcaagtagtcattcatataaatttgaacacacctgctgtgcctagacaagtgtctttctgtaagagctgtaactctgagatgtgctaaataaaccctctttctcaaattcgtaattctccaactgttgacattttaatcacatgaaaagttatcagatttttgaggagaaatattttcatgatgtcacaagatccaatatatcttatgataaaatttattgaaaagtcagtttatttaaataatgaataattggctaacagctctggaaacaatgagatcaaatgagaaagattcaaattgtttgttattttctgtattttcagtcaaaaaatcagttatatagtgattttaaagcagattaatggaaaaaaattcatgtaacaattacctgaaaatttataacctattcctaatcaaacccaattatatcagaatacctttctgaatttgagatttttgctctacattttataatgaataaggctattttttgaaagtatttcattttgaattctgtcattaacctcaaaagctttctactgctttgcggtgaaggcaaaatattcgataactcaacttaggccccactgttccccaacttcatggaggccagaagactttactttgttccataatgaaatataaacacagaacaaagttgtaaaagtagcatggatatgttgaaactttggacaagcttcttgtcctttggaatatgggatttatattcatctcctcaatatcccatgtatgcacagaaacttcagttctatttctatagacacaggaacctagtgactattgaacgtaattgtaataaaatgctgctcattgagccaaagagaagaaatgatttattaacatggggacaccaagaaaaacaaagtatgcttttattccctttgtcaagctcagttttagggttttttcttttttttatagtgacaatccatagatatagacattcctaaaagaaaaataaataattcagtagatatatgtcactgttacctgaatatggaatgaatttgatgttttttattttgttgagacagggtcttgctctgtcacccagactggagtgcagtggcatgatcacacctcactgcagccttggcctctcaggctcgtgatcctcctgcctcaacctcgcaagtagcttgggactacaggcgtgtgccaccagtcctggctaattttttgtagatataaggtctcatgatattgcccaggctgaatttgatgttatttcaagttgattttcatgtgtttgggagcttgtcttgttctcaactactacgcaggtagacagtcttcccccagagactcattagattgcaatatagaggcactttctcatttccctattgttcctaatacagaattgtagagctggagagtaccttcagttttctaaatctattctcaaacaggatatcactaacctctttagaatcattcctcagtatacatcaatttattgagaactgcctaatactcaagaaattaaatcctgagttcagtaggctgtgttccaagcaggaattattttcacttaccaaaatatctcctattacctcaaggtatccttgttgaggaatgctgaaaactaaattttaagtatcaagtctagaccatagagtgctttggtgggagtattttgattacctcctacccatcagaagcaggcagctaatattgtgaactgagtatttttgtcaaaagtcacagggaagagactacagaagaatgagaagggtcaaaaggacctagtgtggcttactacatggatcttgtctcttggaggtctgtcgtagaagaagaaacaaatagaggtgatgaagacacagaacaggctcagtcagcatcctcacccagagatggcaacatctattaagaccaatgcaataccttttcatcttcagcaaatgttgtttcatctgtttttgatccttggcattgtcaaaaacttaactgcaggtccagtgtatatttttccttatttttcccttttagctatctgctaaagtgagtaaatgccacaactgtacttttccaaagaaaaagaactattgacaacttatagcctgtcatgcaggtcatgtttcaaatcaaggctgaaattttcaacagctgtgggaaaaactaaaacacagaaatactgtacagtattagtgtttttttaaagaaattgttagtgcattattgagtatactaaatatctgtgattaaataaattagttctaacttttgattttgggagcccaaaataaagggagtgttgttttcatggttatgccttgtttgtggagtcaagtgttgatatacttgaggcatgttatgtgtcttctaattaatatttttatcaccttgaatttgtgtctcttccaagcattaaagatactatggatcttaaattccttattaaaaaaatgcaagtgtgaatactttgtttagcttacattttaatttattgtggttgaccacattttatggctcctgagtgccttcacccagctacactttaccttgtatctataaaagtgtaatttagagtaaatacattggctgtaaagtcgagatcaggtgctctccaccaaaagcaaaacaaaactgctgaaatgtggcaaggtttctcagtgcaagcttaaatgtttaaactgttgaccatttggaaaatactggacaaaggggaaggacaaaacatcatttgcaatagttaaaggttatgcaaggcaaggcaacattatactttttgactaagttattaaaagttaaatgcatttcttctttgaagtgtggattataaaagccaatcaaagacaaaaccagtttgaaaaaccttttgtattctacaataccttttatgagtaagagtaaaacatacatttcttatttgtaattttatttaaggagaaatactctttccctttgatacgactataatattataaacagcaaggaatatgttctgctttctgcaattttagaaagtcattccattctgggtgacagaatgaggtaagactgtctctttaaaaaaaaaaacaactcacacctgtaatcctagcactctggccaccgaggcaggtggattgcttgagcccaggagttcgagactagcctggcaacaaagtgagattccccctcctctctctgaaaagtaaaaaaaattagccggtcatggtggcacatgcctgtggtcccagctaaatgaaaatctgaagcaggtggatctcttgagcccaggagctcaaggttgcagtgagccatgttcgcgccaccacactccagcttgtgcaacagagaccctgtctcaaaaaaaagtcatctgtgtgtttcttgcaggcacatctatggcaatgcttgtaccatgaatttaaaacttctaacttgatggcacttttttattttttttgagacaagagtctcactctttcgcccaggctgtagtgcagtagtgtgttctcggctcactgcagcctctgcctcccgggttcaatatgaggcagccctcctgagtagctggaattacaggcacgtgccaccaggttaggctagctagtggcctagctagtctcgaaatcctgacctaaagtgatccacccacctcagcctcccaaagtgtgtggattacttgtgtaagccacagtgcccggccttacctgctttaaaaaaacaaaaaaacttaggttttcttggagtctgtgctagttgaatcttgcaaatgcaaaccacatacgctctttaatgaaaacctttgcatgcacaccactgttaggaagagcatcattaaatcactgacttctacacccataaaaggatgattttgagtttcaagattttagatttactagagatagcatgtatctatcaatcatgtcacacaaaaaatatttccaaagtgttctctgttcagaaacgtcacaaatg

SEQ ID NO: 364099 - DNA, 6823 bp, Homo sapiens
agcggacttgttactacggaacttggtgtccatgagtccgatctgtacacgcgaataaggccgattagactacacatctgtccgaactgtctgacacctctagtcaaccatgaaagcatggcctccaacacagaggtgcagtatccacctggtccatggagggaacgcatgcatggtcccgaagatggcatattcataaagacatcttctgatgattgtgaacatctttacctctgggtgccaggccgggccagtgacttcgtgttgagctgaaggaacttgtctaccgcttccctgaaaacctttctttcctaattcatgagccagcaagatgcggtcgctgcactttcagagcgccttctcgtagctgcgtacaaaggccaaacagagaatgtggttcagctcatcaacaagggcgccagggtagcggttaccaagcatggccggactcccctgcatcttgctgccaataagggccatcttcctgtggtccagatcttgctgaaggctggctgcgaccttgatgtccaggatgatggggaccagaccgccttgcaccgggccacagtggtggggaacacggagatcatcgcggcgctcatccacgaagggtgtgccctggacagacaagacaaggatgggaatacagccttgcatgaagcatcctggcatggtttcagccagtcagccaagctgctcgttaaagcaggagccaacgtgcttgccaagaacaaggcggggaacacagctctgcacctggcctgccagaacagccactcccagagcacgcgcgtcctcctgctggccgggtcccgcgctgacctcaaaaataatgcaggagacacctgtttgcacgttgctgcgcgctataatcacttgtccatcattaggctcctcctcactgctttctgttctgtccatgaaaagaaccaggctggagacacagcacttcacgttgctgctgccctaaatcacaagaaggtggccaaaatcttactggaagccggagcagatacgaccattgttaacaatgcaggccagactccgctggagactgcccgctaccacaataacccggaagttgctcttctccttactaaagctccccaggtcttgcgcttcagtcgtgggcgaagcctgaggaaaaagagagagaggctcaaggaagagaggagagcccagtctgtgccaagagatgaggtggcccaaagcaagggcagtgtctcagcaggagacacccccagcagtgaacaggctgtggccagaaaagaagaagccagagaagagttcctgtcagcctccccagaacccagagcaaaggatgacaggaggagaaagtcaaggcccaaggtgtcagcgttttctgaccccaccccaccagccgaccaacagcctggacaccagaagaacctgcatgctcataatcaccctaaaaagaggaacaggcatcggtgttcatccccacccccaccccatgagttcagggcgtatcagctctacacattgtaccggggcaaggatgggaaagtgatgcaggcaccaataaatggttgtcgatgtgaacctctaatcaacaagctggagaatcagttggaggctactgtggaggagataaaagcagagctgggatcggttcaggacaaaatgaatacaaagctggggcagatggagaataagacccagcaccaaatgcgtgttttggacaagctgatggttgagcgactttctgcagagaggacggagtgcctgaaccgcctgcaacagcactcagacacagagaagcatgagggggagaaacgacagatatccttggtggatgaattaaaaacctggtgcatgttaaagattcagaatctggagcagaagctttctggagattctagggcctgcagagctaaatccacaccatctacttgtgagtcctctacaggtgtggaccaattagtggtgactgcaggtccagcagcagcttccgacagctcccctccagtggttaggcccaaagagaaggccctcaactccactgctacccagagactccagcaggagctgtcgtcttctgactgtacaggctcccgactgagaaacgtcaaggtccagacagccttgctacccatgaatgaggcagccagatctgatcagcaggctgggccctgcgtcaacagaggcactcaaactaagaagtctgggaagagtgggccaacaaggcatcgtgcccagcaacccgcagccagcagcacctgtgggcagccgccaccagccacaggcagcgagcagactggccctcacattcgggacacctcccaagctctggagcttacccagtatttttttgaggctgtttctacccagatggaaaagtggtatgaaaggaagattgaagaagcacgaagccaagccaatcagaaagcccagcaagataaggctacattgaaggaacacattaaaagtttagaagaggaacttgccaaactaaggactagggtgcagaaggaaaattagcaccaataaagaggaaatatgaaaggattcttgaagatttccagttttgcaactgcataatagctatgcccaaggagtcaactattgtatatattgcagatttgcctttttaaaaaaatcactaattctacaatgtgccagatacatgtttcctatgcccaggaagttatgaagacttcaacaattaaactgaaaccaggggaagcttgcttagttttgggtttcattataaactcttagcctcagtccaggttaatctgaagtttgaaagctcagattaagcaagccatgccaagaaactggacgatgtgtaagcctagactctaaaattcaagatgtgtgaaataatataagtcaaaagcaagaaaaacgtaatcccgtctgaactcaagtagtcattcatataaatttgaacacacctgctgtgcctagacaagtgtctttctgtaagagctgtaactctgagatgtgctaaataaaccctctttctcaaattcgtaattctccaactgttgacattttaatcacatgaaaagttatcagatttttgaggagaaatattttcatgatgtcacaagatccaatatatcttatgataaaatttattgaaaagtcagtttatttaaataatgaataattggctaacagctctggaaacaatgagatcaaatgagaaagattcaaattgtttgttattttctgtattttcagtcaaaaaatcagttatatagtgattttaaagcagattaatggaaaaaaattcatgtaacaattacctgaaaatttataacctattcctaatcaaacccaattatatcagaatacctttctgaatttgagatttttgctctacattttataatgaataaggctattttttgaaagtatttcattttgaattctgtcattaacctcaaaagctttctactgctttgcggtgaaggcaaaatattcgataactcaacttaggccccactgttccccaacttcatggaggccagaagactttactttgttccataatgaaatataaacacagaacaaagttgtaaaagtagcatggatatgttgaaactttggacaagcttcttgtcctttggaatatgggatttatattcatctcctcaatatcccatgtatgcacagaaacttcagttctatttctatagacacaggaacctagtgactattgaacgtaattgtaataaaatgctgctcattgagccaaagagaagaaatgatttattaacatggggacaccaagaaaaacaaagtatgcttttattccctttgtcaagctcagttttagggttttttcttttttttatagtgacaatccatagatatagacattcctaaaagaaaaataaataattcagtagatatatgtcactgttacctgaatatggaatgaatttgatgttttttattttgttgagacagggtcttgctctgtcacccagactggagtgcagtggcatgatcacacctcactgcagccttggcctctcaggctcgtgatcctcctgcctcaacctcgcaagtagcttgggactacaggcgtgtgccaccagtcctggctaattttttgtagatataaggtctcatgatattgcccaggctgaatttgatgttatttcaagttgattttcatgtgtttgggagcttgtcttgttctcaactactacgcaggtagacagtcttcccccagagactcattagattgcaatatagaggcactttctcatttccctattgttcctaatacagaattgtagagctggagagtaccttcagttttctaaatctattctcaaacaggatatcactaacctctttagaatcattcctcagtatacatcaatttattgagaactgcctaatactcaagaaattaaatcctgagttcagtaggctgtgttccaagcaggaattattttcacttaccaaaatatctcctattacctcaaggtatccttgttgaggaatgctgaaaactaaattttaagtatcaagtctagaccatagagtgctttggtgggagtattttgattacctcctacccatcagaagcaggcagctaatattgtgaactgagtatttttgtcaaaagtcacagggaagagactacagaagaatgagaagggtcaaaaggacctagtgtggcttactacatggatcttgtctcttggaggtctgtcgtagaagaagaaacaaatagaggtgatgaagacacagaacaggctcagtcagcatcctcacccagagatggcaacatctattaagaccaatgcaataccttttcatcttcagcaaatgttgtttcatctgtttttgatccttggcattgtcaaaaacttaactgcaggtccagtgtatatttttccttatttttcccttttagctatctgctaaagtgagtaaatgccacaactgtacttttccaaagaaaaagaactattgacaacttatagcctgtcatgcaggtcatgtttcaaatcaaggctgaaattttcaacagctgtgggaaaaactaaaacacagaaatactgtacagtattagtgtttttttaaagaaattgttagtgcattattgagtatactaaatatctgtgattaaataaattagttctaacttttgattttgggagcccaaaataaagggagtgttgttttcatggttatgccttgtttgtggagtcaagtgttgatatacttgaggcatgttatgtgtcttctaattaatatttttatcaccttgaatttgtgtctcttccaagcattaaagatactatggatcttaaattccttattaaaaaaatgcaagtgtgaatactttgtttagcttacattttaatttattgtggttgaccacattttatggctcctgagtgccttcacccagctacactttaccttgtatctataaaagtgtaatttagagtaaatacattggctgtaaagtcgagatcaggtgctctccaccaaaagcaaaacaaaactgctgaaatgtggcaaggtttctcagtgcaagcttaaatgtttaaactgttgaccatttggaaaatactggacaaaggggaaggacaaaacatcatttgcaatagttaaaggttatgcaaggcaaggcaacattatactttttgactaagttattaaaagttaaatgcatttcttctttgaagtgtggattataaaagccaatcaaagacaaaaccagtttgaaaaaccttttgtattctacaataccttttatgagtaagagtaaaacatacatttcttatttgtaattttatttaaggagaaatactctttccctttgatacgactataatattataaacagcaaggaatatgttctgctttctgcaattttagaaagtcattccattctgggtgacagaatgaggtaagactgtctctttaaaaaaaaaaacaactcacacctgtaatcctagcactctggccaccgaggcaggtggattgcttgagcccaggagttcgagactagcctggcaacaaagtgagattccccctcctctctctgaaaagtaaaaaaaattagccggtcatggtggcacatgcctgtggtcccagctaaatgaaaatctgaagcaggtggatctcttgagcccaggagctcaaggttgcagtgagccatgttcgcgccaccacactccagcttgtgcaacagagaccctgtctcaaaaaaaagtcatctgtgtgtttcttgcaggcacatctatggcaatgcttgtaccatgaatttaaaacttctaacttgatggcacttttttattttttttgagacaagagtctcactctttcgcccaggctgtagtgcagtagtgtgttctcggctcactgcagcctctgcctcccgggttcaatatgaggcagccctcctgagtagctggaattacaggcacgtgccaccaggttaggctagctagtggcctagctagtctcgaaatcctgacctaaagtgatccacccacctcagcctcccaaagtgtgtggattacttgtgtaagccacagtgcccggccttacctgctttaaaaaaacaaaaaaacttaggttttcttggagtctgtgctagttgaatcttgcaaatgcaaaccacatacgctctttaatgaaaacctttgcatgcacaccactgttaggaagagcatcattaaatcactgacttctacacccataaaaggatgattttgagtttcaagattttagatttactagagatagcatgtatctatcaatcatgtcacacaaaaaatatttccaaagtgttctctgttcagaaacgtcacaaatg

SEQ ID NO: 364100 - DNA, 6814 bp, Homo sapiens
agctttaactgtaagtagcgagcttggtttccatgagtcacatgtgtccacagaataggcccaactagacaacagatctgtgggaatgtttggctctccatgaaccacaaagactcctccaacacagaggtgcagtacccacctgggccaaggagggaagatgcaggtcccgaagatggcatattcataaagacatcttctgatgattgtgaacatctttacctctgggtgccaggccgggccagtgacttcgtgttgagctgaaggaacttgtctaccgcttccctgaaaacctttctttcctaattcatgagccagcaagatgcggtcgctgcactttcagagcgccttctcgtagctgcgtacaaaggccaaacagagaatgtggttcagctcatcaacaagggcgccagggtagcggttaccaagcatggccggactcccctgcatcttgctgccaataagggccatcttcctgtggtccagatcttgctgaaggctggctgcgaccttgatgtccaggatgatggggaccagaccgccttgcaccgggccacagtggtggggaacacggagatcatcgcggcgctcatccacgaagggtgtgccctggacagacaagacaaggatgggaatacagccttgcatgaagcatcctggcatggtttcagccagtcagccaagctgctcgttaaagcaggagccaacgtgcttgccaagaacaaggcggggaacacagctctgcacctggcctgccagaacagccactcccagagcacgcgcgtcctcctgctggccgggtcccgcgctgacctcaaaaataatgcaggagacacctgtttgcacgttgctgcgcgctataatcacttgtccatcattaggctcctcctcactgctttctgttctgtccatgaaaagaaccaggctggagacacagcacttcacgttgctgctgccctaaatcacaagaaggtggccaaaatcttactggaagccggagcagatacgaccattgttaacaatgcaggccagactccgctggagactgcccgctaccacaataacccggaagttgctcttctccttactaaagctccccaggtcttgcgcttcagtcgtgggcgaagcctgaggaaaaagagagagaggctcaaggaagagaggagagcccagtctgtgccaagagatgaggtggcccaaagcaagggcagtgtctcagcaggagacacccccagcagtgaacaggctgtggccagaaaagaagaagccagagaagagttcctgtcagcctccccagaacccagagcaaaggatgacaggaggagaaagtcaaggcccaaggtgtcagcgttttctgaccccaccccaccagccgaccaacagcctggacaccagaagaacctgcatgctcataatcaccctaaaaagaggaacaggcatcggtgttcatccccacccccaccccatgagttcagggcgtatcagctctacacattgtaccggggcaaggatgggaaagtgatgcaggcaccaataaatggttgtcgatgtgaacctctaatcaacaagctggagaatcagttggaggctactgtggaggagataaaagcagagctgggatcggttcaggacaaaatgaatacaaagctggggcagatggagaataagacccagcaccaaatgcgtgttttggacaagctgatggttgagcgactttctgcagagaggacggagtgcctgaaccgcctgcaacagcactcagacacagagaagcatgagggggagaaacgacagatatccttggtggatgaattaaaaacctggtgcatgttaaagattcagaatctggagcagaagctttctggagattctagggcctgcagagctaaatccacaccatctacttgtgagtcctctacaggtgtggaccaattagtggtgactgcaggtccagcagcagcttccgacagctcccctccagtggttaggcccaaagagaaggccctcaactccactgctacccagagactccagcaggagctgtcgtcttctgactgtacaggctcccgactgagaaacgtcaaggtccagacagccttgctacccatgaatgaggcagccagatctgatcagcaggctgggccctgcgtcaacagaggcactcaaactaagaagtctgggaagagtgggccaacaaggcatcgtgcccagcaacccgcagccagcagcacctgtgggcagccgccaccagccacaggcagcgagcagactggccctcacattcgggacacctcccaagctctggagcttacccagtatttttttgaggctgtttctacccagatggaaaagtggtatgaaaggaagattgaagaagcacgaagccaagccaatcagaaagcccagcaagataaggctacattgaaggaacacattaaaagtttagaagaggaacttgccaaactaaggactagggtgcagaaggaaaattagcaccaataaagaggaaatatgaaaggattcttgaagatttccagttttgcaactgcataatagctatgcccaaggagtcaactattgtatatattgcagatttgcctttttaaaaaaatcactaattctacaatgtgccagatacatgtttcctatgcccaggaagttatgaagacttcaacaattaaactgaaaccaggggaagcttgcttagttttgggtttcattataaactcttagcctcagtccaggttaatctgaagtttgaaagctcagattaagcaagccatgccaagaaactggacgatgtgtaagcctagactctaaaattcaagatgtgtgaaataatataagtcaaaagcaagaaaaacgtaatcccgtctgaactcaagtagtcattcatataaatttgaacacacctgctgtgcctagacaagtgtctttctgtaagagctgtaactctgagatgtgctaaataaaccctctttctcaaattcgtaattctccaactgttgacattttaatcacatgaaaagttatcagatttttgaggagaaatattttcatgatgtcacaagatccaatatatcttatgataaaatttattgaaaagtcagtttatttaaataatgaataattggctaacagctctggaaacaatgagatcaaatgagaaagattcaaattgtttgttattttctgtattttcagtcaaaaaatcagttatatagtgattttaaagcagattaatggaaaaaaattcatgtaacaattacctgaaaatttataacctattcctaatcaaacccaattatatcagaatacctttctgaatttgagatttttgctctacattttataatgaataaggctattttttgaaagtatttcattttgaattctgtcattaacctcaaaagctttctactgctttgcggtgaaggcaaaatattcgataactcaacttaggccccactgttccccaacttcatggaggccagaagactttactttgttccataatgaaatataaacacagaacaaagttgtaaaagtagcatggatatgttgaaactttggacaagcttcttgtcctttggaatatgggatttatattcatctcctcaatatcccatgtatgcacagaaacttcagttctatttctatagacacaggaacctagtgactattgaacgtaattgtaataaaatgctgctcattgagccaaagagaagaaatgatttattaacatggggacaccaagaaaaacaaagtatgcttttattccctttgtcaagctcagttttagggttttttcttttttttatagtgacaatccatagatatagacattcctaaaagaaaaataaataattcagtagatatatgtcactgttacctgaatatggaatgaatttgatgttttttattttgttgagacagggtcttgctctgtcacccagactggagtgcagtggcatgatcacacctcactgcagccttggcctctcaggctcgtgatcctcctgcctcaacctcgcaagtagcttgggactacaggcgtgtgccaccagtcctggctaattttttgtagatataaggtctcatgatattgcccaggctgaatttgatgttatttcaagttgattttcatgtgtttgggagcttgtcttgttctcaactactacgcaggtagacagtcttcccccagagactcattagattgcaatatagaggcactttctcatttccctattgttcctaatacagaattgtagagctggagagtaccttcagttttctaaatctattctcaaacaggatatcactaacctctttagaatcattcctcagtatacatcaatttattgagaactgcctaatactcaagaaattaaatcctgagttcagtaggctgtgttccaagcaggaattattttcacttaccaaaatatctcctattacctcaaggtatccttgttgaggaatgctgaaaactaaattttaagtatcaagtctagaccatagagtgctttggtgggagtattttgattacctcctacccatcagaagcaggcagctaatattgtgaactgagtatttttgtcaaaagtcacagggaagagactacagaagaatgagaagggtcaaaaggacctagtgtggcttactacatggatcttgtctcttggaggtctgtcgtagaagaagaaacaaatagaggtgatgaagacacagaacaggctcagtcagcatcctcacccagagatggcaacatctattaagaccaatgcaataccttttcatcttcagcaaatgttgtttcatctgtttttgatccttggcattgtcaaaaacttaactgcaggtccagtgtatatttttccttatttttcccttttagctatctgctaaagtgagtaaatgccacaactgtacttttccaaagaaaaagaactattgacaacttatagcctgtcatgcaggtcatgtttcaaatcaaggctgaaattttcaacagctgtgggaaaaactaaaacacagaaatactgtacagtattagtgtttttttaaagaaattgttagtgcattattgagtatactaaatatctgtgattaaataaattagttctaacttttgattttgggagcccaaaataaagggagtgttgttttcatggttatgccttgtttgtggagtcaagtgttgatatacttgaggcatgttatgtgtcttctaattaatatttttatcaccttgaatttgtgtctcttccaagcattaaagatactatggatcttaaattccttattaaaaaaatgcaagtgtgaatactttgtttagcttacattttaatttattgtggttgaccacattttatggctcctgagtgccttcacccagctacactttaccttgtatctataaaagtgtaatttagagtaaatacattggctgtaaagtcgagatcaggtgctctccaccaaaagcaaaacaaaactgctgaaatgtggcaaggtttctcagtgcaagcttaaatgtttaaactgttgaccatttggaaaatactggacaaaggggaaggacaaaacatcatttgcaatagttaaaggttatgcaaggcaaggcaacattatactttttgactaagttattaaaagttaaatgcatttcttctttgaagtgtggattataaaagccaatcaaagacaaaaccagtttgaaaaaccttttgtattctacaataccttttatgagtaagagtaaaacatacatttcttatttgtaattttatttaaggagaaatactctttccctttgatacgactataatattataaacagcaaggaatatgttctgctttctgcaattttagaaagtcattccattctgggtgacagaatgaggtaagactgtctctttaaaaaaaaaaacaactcacacctgtaatcctagcactctggccaccgaggcaggtggattgcttgagcccaggagttcgagactagcctggcaacaaagtgagattccccctcctctctctgaaaagtaaaaaaaattagccggtcatggtggcacatgcctgtggtcccagctaaatgaaaatctgaagcaggtggatctcttgagcccaggagctcaaggttgcagtgagccatgttcgcgccaccacactccagcttgtgcaacagagaccctgtctcaaaaaaaagtcatctgtgtgtttcttgcaggcacatctatggcaatgcttgtaccatgaatttaaaacttctaacttgatggcacttttttattttttttgagacaagagtctcactctttcgcccaggctgtagtgcagtagtgtgttctcggctcactgcagcctctgcctcccgggttcaatatgaggcagccctcctgagtagctggaattacaggcacgtgccaccaggttaggctagctagtggcctagctagtctcgaaatcctgacctaaagtgatccacccacctcagcctcccaaagtgtgtggattacttgtgtaagccacagtgcccggccttacctgctttaaaaaaacaaaaaaacttaggttttcttggagtctgtgctagttgaatcttgcaaatgcaaaccacatacgctctttaatgaaaacctttgcatgcacaccactgttaggaagagcatcattaaatcactgacttctacacccataaaaggatgattttgagtttcaagattttagatttactagagatagcatgtatctatcaatcatgtcacacaaaaaatatttccaaagtgttctctgttcagaaacgtcacaaatg

SEQ ID NO: 364101 - DNA, 6625 bp, Homo sapiens
agcggacttgttactacggaacttggtgtccatgagtccgatctgtacacgcgaataaggccgattagactacacatctgtccgaactgtctgacacctctagtcaaccatgaaagcatggcctccaacacagaggtgcagtatccacctggtccatggagggaacgcatgcatggtcccgaagatggcatattcataaagacatcttctgatgattgtgaacatctttacctctgggtgccaggccgggccagtgacttcgtgttgagctgaaggaacttgtctaccgcttccctgaaaacctttctttcctaattcatgagccagcaagatgcggtcgctgcactttcagagcgccttctcgtagctgcgtacaaaggccaaacagagaatgtggttcagctcatcaacaagggcgccagggtagcggttaccaagcatggccggactcccctgcatcttgctgccaataagggccatcttcctgtggtccagatcttgctgaaggctggctgcgaccttgatgtccaggatgatggggaccagaccgccttgcaccgggccacagtggtggggaacacggagatcatcgcggcgctcatccacgaagggtgtgccctggacagacaagacaaggatgggaatacagccttgcatgaagcatcctggcatggtttcagccagtcagccaagctgctcgttaaagcaggagccaacgtgcttgccaagaacaaggctggagacacagcacttcacgttgctgctgccctaaatcacaagaaggtggccaaaatcttactggaagccggagcagatacgaccattgttaacaatgcaggccagactccgctggagactgcccgctaccacaataacccggaagttgctcttctccttactaaagctccccaggtcttgcgcttcagtcgtgggcgaagcctgaggaaaaagagagagaggctcaaggaagagaggagagcccagtctgtgccaagagatgaggtggcccaaagcaagggcagtgtctcagcaggagacacccccagcagtgaacaggctgtggccagaaaagaagaagccagagaagagttcctgtcagcctccccagaacccagagcaaaggatgacaggaggagaaagtcaaggcccaaggtgtcagcgttttctgaccccaccccaccagccgaccaacagcctggacaccagaagaacctgcatgctcataatcaccctaaaaagaggaacaggcatcggtgttcatccccacccccaccccatgagttcagggcgtatcagctctacacattgtaccggggcaaggatgggaaagtgatgcaggcaccaataaatggttgtcgatgtgaacctctaatcaacaagctggagaatcagttggaggctactgtggaggagataaaagcagagctgggatcggttcaggacaaaatgaatacaaagctggggcagatggagaataagacccagcaccaaatgcgtgttttggacaagctgatggttgagcgactttctgcagagaggacggagtgcctgaaccgcctgcaacagcactcagacacagagaagcatgagggggagaaacgacagatatccttggtggatgaattaaaaacctggtgcatgttaaagattcagaatctggagcagaagctttctggagattctagggcctgcagagctaaatccacaccatctacttgtgagtcctctacaggtgtggaccaattagtggtgactgcaggtccagcagcagcttccgacagctcccctccagtggttaggcccaaagagaaggccctcaactccactgctacccagagactccagcaggagctgtcgtcttctgactgtacaggctcccgactgagaaacgtcaaggtccagacagccttgctacccatgaatgaggcagccagatctgatcagcaggctgggccctgcgtcaacagaggcactcaaactaagaagtctgggaagagtgggccaacaaggcatcgtgcccagcaacccgcagccagcagcacctgtgggcagccgccaccagccacaggcagcgagcagactggccctcacattcgggacacctcccaagctctggagcttacccagtatttttttgaggctgtttctacccagatggaaaagtggtatgaaaggaagattgaagaagcacgaagccaagccaatcagaaagcccagcaagataaggctacattgaaggaacacattaaaagtttagaagaggaacttgccaaactaaggactagggtgcagaaggaaaattagcaccaataaagaggaaatatgaaaggattcttgaagatttccagttttgcaactgcataatagctatgcccaaggagtcaactattgtatatattgcagatttgcctttttaaaaaaatcactaattctacaatgtgccagatacatgtttcctatgcccaggaagttatgaagacttcaacaattaaactgaaaccaggggaagcttgcttagttttgggtttcattataaactcttagcctcagtccaggttaatctgaagtttgaaagctcagattaagcaagccatgccaagaaactggacgatgtgtaagcctagactctaaaattcaagatgtgtgaaataatataagtcaaaagcaagaaaaacgtaatcccgtctgaactcaagtagtcattcatataaatttgaacacacctgctgtgcctagacaagtgtctttctgtaagagctgtaactctgagatgtgctaaataaaccctctttctcaaattcgtaattctccaactgttgacattttaatcacatgaaaagttatcagatttttgaggagaaatattttcatgatgtcacaagatccaatatatcttatgataaaatttattgaaaagtcagtttatttaaataatgaataattggctaacagctctggaaacaatgagatcaaatgagaaagattcaaattgtttgttattttctgtattttcagtcaaaaaatcagttatatagtgattttaaagcagattaatggaaaaaaattcatgtaacaattacctgaaaatttataacctattcctaatcaaacccaattatatcagaatacctttctgaatttgagatttttgctctacattttataatgaataaggctattttttgaaagtatttcattttgaattctgtcattaacctcaaaagctttctactgctttgcggtgaaggcaaaatattcgataactcaacttaggccccactgttccccaacttcatggaggccagaagactttactttgttccataatgaaatataaacacagaacaaagttgtaaaagtagcatggatatgttgaaactttggacaagcttcttgtcctttggaatatgggatttatattcatctcctcaatatcccatgtatgcacagaaacttcagttctatttctatagacacaggaacctagtgactattgaacgtaattgtaataaaatgctgctcattgagccaaagagaagaaatgatttattaacatggggacaccaagaaaaacaaagtatgcttttattccctttgtcaagctcagttttagggttttttcttttttttatagtgacaatccatagatatagacattcctaaaagaaaaataaataattcagtagatatatgtcactgttacctgaatatggaatgaatttgatgttttttattttgttgagacagggtcttgctctgtcacccagactggagtgcagtggcatgatcacacctcactgcagccttggcctctcaggctcgtgatcctcctgcctcaacctcgcaagtagcttgggactacaggcgtgtgccaccagtcctggctaattttttgtagatataaggtctcatgatattgcccaggctgaatttgatgttatttcaagttgattttcatgtgtttgggagcttgtcttgttctcaactactacgcaggtagacagtcttcccccagagactcattagattgcaatatagaggcactttctcatttccctattgttcctaatacagaattgtagagctggagagtaccttcagttttctaaatctattctcaaacaggatatcactaacctctttagaatcattcctcagtatacatcaatttattgagaactgcctaatactcaagaaattaaatcctgagttcagtaggctgtgttccaagcaggaattattttcacttaccaaaatatctcctattacctcaaggtatccttgttgaggaatgctgaaaactaaattttaagtatcaagtctagaccatagagtgctttggtgggagtattttgattacctcctacccatcagaagcaggcagctaatattgtgaactgagtatttttgtcaaaagtcacagggaagagactacagaagaatgagaagggtcaaaaggacctagtgtggcttactacatggatcttgtctcttggaggtctgtcgtagaagaagaaacaaatagaggtgatgaagacacagaacaggctcagtcagcatcctcacccagagatggcaacatctattaagaccaatgcaataccttttcatcttcagcaaatgttgtttcatctgtttttgatccttggcattgtcaaaaacttaactgcaggtccagtgtatatttttccttatttttcccttttagctatctgctaaagtgagtaaatgccacaactgtacttttccaaagaaaaagaactattgacaacttatagcctgtcatgcaggtcatgtttcaaatcaaggctgaaattttcaacagctgtgggaaaaactaaaacacagaaatactgtacagtattagtgtttttttaaagaaattgttagtgcattattgagtatactaaatatctgtgattaaataaattagttctaacttttgattttgggagcccaaaataaagggagtgttgttttcatggttatgccttgtttgtggagtcaagtgttgatatacttgaggcatgttatgtgtcttctaattaatatttttatcaccttgaatttgtgtctcttccaagcattaaagatactatggatcttaaattccttattaaaaaaatgcaagtgtgaatactttgtttagcttacattttaatttattgtggttgaccacattttatggctcctgagtgccttcacccagctacactttaccttgtatctataaaagtgtaatttagagtaaatacattggctgtaaagtcgagatcaggtgctctccaccaaaagcaaaacaaaactgctgaaatgtggcaaggtttctcagtgcaagcttaaatgtttaaactgttgaccatttggaaaatactggacaaaggggaaggacaaaacatcatttgcaatagttaaaggttatgcaaggcaaggcaacattatactttttgactaagttattaaaagttaaatgcatttcttctttgaagtgtggattataaaagccaatcaaagacaaaaccagtttgaaaaaccttttgtattctacaataccttttatgagtaagagtaaaacatacatttcttatttgtaattttatttaaggagaaatactctttccctttgatacgactataatattataaacagcaaggaatatgttctgctttctgcaattttagaaagtcattccattctgggtgacagaatgaggtaagactgtctctttaaaaaaaaaaacaactcacacctgtaatcctagcactctggccaccgaggcaggtggattgcttgagcccaggagttcgagactagcctggcaacaaagtgagattccccctcctctctctgaaaagtaaaaaaaattagccggtcatggtggcacatgcctgtggtcccagctaaatgaaaatctgaagcaggtggatctcttgagcccaggagctcaaggttgcagtgagccatgttcgcgccaccacactccagcttgtgcaacagagaccctgtctcaaaaaaaagtcatctgtgtgtttcttgcaggcacatctatggcaatgcttgtaccatgaatttaaaacttctaacttgatggcacttttttattttttttgagacaagagtctcactctttcgcccaggctgtagtgcagtagtgtgttctcggctcactgcagcctctgcctcccgggttcaatatgaggcagccctcctgagtagctggaattacaggcacgtgccaccaggttaggctagctagtggcctagctagtctcgaaatcctgacctaaagtgatccacccacctcagcctcccaaagtgtgtggattacttgtgtaagccacagtgcccggccttacctgctttaaaaaaacaaaaaaacttaggttttcttggagtctgtgctagttgaatcttgcaaatgcaaaccacatacgctctttaatgaaaacctttgcatgcacaccactgttaggaagagcatcattaaatcactgacttctacacccataaaaggatgattttgagtttcaagattttagatttactagagatagcatgtatctatcaatcatgtcacacaaaaaatatttccaaagtgttctctgttcagaaacgtcacaaatg

SEQ ID NO: 364102 - DNA, 2076 bp, Homo sapiens
agcggacttgttactacggaacttggtgtccatgagtccgatctgtacacgcgaataaggccgattagactacacatctgtccgaactgtctgacacctctagtcaaccatgaaagcatggcctccaacacagaggtgcagtatccacctggtccatggagggaacgcatgcatggtcccgaagatggcatattcataaagacatcttctgatgattgtgaacatctttacctctgggtgccaggccgggccagtgacttcgtgttgagctgaaggaacttgtctaccgcttccctgaaaacctttctttcctaattcatgagccagcaagatgcggtcgctgcactttcagagcgccttctcgtagctgcgtacaaaggccaaacagagaatgtggttcagctcatcaacaagggcgccagggtagcggttaccaagcatggccggactcccctgcatcttgctgccaataagggccatcttcctgtggtccagatcttgctgaaggctggctgcgaccttgatgtccaggatgatggggaccagaccgccttgcaccgggccacagtggtggggaacacggagatcatcgcggcgctcatccacgaagggtgtgccctggacagacaagacaaggatgggaatacagccttgcatgaagcatcctggcatggtttcagccagtcagccaagctgctcgttaaagcaggagccaacgtgcttgccaagaacaaggctggagacacagcacttcacgttgctgctgccctaaatcacaagaaggtggccaaaatcttactggaagccggagcagatacgaccattgttaacaatgcaggccagactccgctggagactgcccgctaccacaataacccggaagttgctcttctccttactaaagctccccaggtcttgcgcttcagtcgtgggcgaagcctgaggaaaaagagagagaggctcaaggaagagaggagagcccagtctgtgccaagagatgaggtggcccaaagcaagggcagtgtctcagcaggagacacccccagcagtgaacaggctgtggccagaaaagaagaagccagagaagagttcctgtcagcctccccagaacccagagcaaaggatgacaggaggagaaagtcaaggcccaaggtgtcagcgttttctgaccccaccccaccagccgaccaacagcctggacaccagaagaacctgcatgctcataatcaccctaaaaagaggaacaggcatcggtgttcatccccacccccaccccatgagttcagggcgtatcagctctacacattgtaccggggcaaggatgggaaagtgatgcaggcaccaataaatggttgtcgatgtgaacctctaatcaacaagctggagaatcagttggaggctactgtggaggagataaaagcagagctgggatcggttcaggacaaaatgaatacaaagctggggcagatggagaataagacccagcaccaaatgcgtgttttggacaagctgatggttgagcgactttctgcagagaggacggagtgcctgaaccgcctgcaacagcactcagacacagagaagcatgagggggagaaacgacagatatccttggtggatgaattaaaaacctggtgcatgttaaagattcagaatctggagcagaagctttctggagattctagggcctgcagagctaaatccacaccatctacttgtgagtcctctacaggtgtggaccaattagtggtgactgcaggtccagcagcagcttccgacagctcccctccagtggttaggcccaaagagaaggccctcaactccactgctacccagagactccagcaggagctgtcgtcttctgactgtacaggctcccgactgagaaacgtcaaggtccagacagccttgctacccatgaatgaggcagccagatctgatcagcaggctgggccctgcgtcaacagaggcactgtttggactttgagcactgtttggactctgggcactgtttggactctgagcactgtttggactctgggcactgtttggactctgagcactgtttggactctg

SEQ ID NO: 364103 - DNA, 2089 bp, Homo sapiens
agcggacttgttactacggaacttggtgtccatgagtccgatctgtacacgcgaataaggccgattagactacacatctgtccgaactgtctgacacctctagtcaaccatgaaagcatggcctccaacacagaggtgcagtatccacctggtccatggagggaacgcatgcatggtcccgaagatggcatattcataaagacatcttctgatgattgtgaacatctttacctctgggtgccaggccgggccagtgacttcgtgttgagctgaaggaacttgtctaccgcttccctgaaaacctttctttcctaattcatgagccagcaagatgcggtcgctgcactttcagagcgccttctcgtagctgcgtacaaaggccaaacagagaatgtggttcagctcatcaacaagggcgccagggtagcggttaccaagcatggccggactcccctgcatcttgctgccaataagggccatcttcctgtggtccagatcttgctgaaggctggctgcgaccttgatgtccaggatgatggggaccagaccgccttgcaccgggccacagtggtggggaacacggagatcatcgcggcgctcatccacgaagggtgtgccctggacagacaagacaaggatgggaatacagccttgcatgaagcatcctggcatggtttcagccagtcagccaagctgctcgttaaagcaggagccaacgtgcttgccaagaacaaggctggagacacagcacttcacgttgctgctgccctaaatcacaagaaggtggccaaaatcttactggaagccggagcagatacgaccattgttaacaatgcaggccagactccgctggagactgcccgctaccacaataacccggaagttgctcttctccttactaaagctccccaggtcttgcgcttcagtcgtgggcgaagcctgaggaaaaagagagagaggctcaaggaagagaggagagcccagtctgtgccaagagatgaggtggcccaaagcaagggcagtgtctcagcaggagacacccccagcagtgaacaggctgtggccagaaaagaagaagccagagaagagttcctgtcagcctccccagaacccagagcaaaggatgacaggaggagaaagtcaaggcccaaggtgtcagcgttttctgaccccaccccaccagccgaccaacagcctggacaccagaagaacctgcatgctcataatcaccctaaaaagaggaacaggcatcggtgttcatccccacccccaccccatgagttcagggcgtatcagctctacacattgtaccggggcaaggatgggaaagtgatgcaggcaccaataaatggttgtcgatgtgaacctctaatcaacaagctggagaatcagttggaggctactgtggaggagataaaagcagagctgggatcggttcaggacaaaatgaatacaaagctggggcagatggagaataagacccagcaccaaatgcgtgttttggacaagctgatggttgagcgactttctgcagagaggacggagtgcctgaaccgcctgcaacagcactcagacacagagaagcatgagggggagaaacgacagatatccttggtggatgaattaaaaacctggtgcatgttaaagattcagaatctggagcagaagctttctggagattctagggcctgcagagctaaatccacaccatctacttgtgagtcctctacaggtaacccacacacagagagcccttttgtccaaaaggaacacgaccagcagctcttgtactctcctgcactgaaaggcagtacgtatgctagggctgtgggaaacactggatggtaaagtgcactctgtaggggcaaggactgtattttgctcgtaaccatatactcagttgctatgtaataataaagcactcatttatgtgctcaaacttatttgaataaaggaattaaagaattgttgactggtgataacattgccttgagtacagtgttgatagtatcagagtggaccccaaagatgagaggtgatgaagatccatcggtctcctcagcagggctcttcctcccttgccttttgt

SEQ ID NO: 364104 - DNA, 1798 bp, Homo sapiens
cggcggcggacgcggcgggctcggccacaggtaacccgcaggagccgagagcgctgcctggcgcgcgggcggctggaggcacggcgctgggcggcgccgaggccctggggccgccggagccagcgggagccagtccccgtcttcgcccctcgccccccaccgtgtcgccggccttggtccctgcggcgcggacgtccggcgcgggagagaaaggtcccgaagatggcatattcataaagacatcttctgatgattgtgaacatctttacctctgggtgccaggccgggccagtgacttcgtgttgagctgaaggaacttgtctaccgcttccctgaaaacctttctttcctaattcatgagccagcaagatgcggtcgctgcactttcagagcgccttctcgtagctgcgtacaaaggccaaacagagaatgtggttcagctcatcaacaagggcgccagggtagcggttaccaagcatggccggactcccctgcatcttgctgccaataagggccatcttcctgtggtccagatcttgctgaaggctggctgcgaccttgatgtccaggatgatggggaccagaccgccttgcaccgggccacagtggtggggaacacggagatcatcgcggcgctcatccacgaagggtgtgccctggacagacaagacaaggatgggaatacagccttgcatgaagcatcctggcatggtttcagccagtcagccaagctgctcgttaaagcaggagccaacgtgcttgccaagaacaaggcggggaacacagctctgcacctggcctgccagaacagccactcccagagcacgcgcgtcctcctgctggccgggtcccgcgctgacctcaaaaataatgcaggagacacctgtttgcacgttgctgcgcgctataatcacttgtccatcattaggctcctcctcactgctttctgttctgtccatgaaaagaaccaggctggagacacagcacttcacgttgctgctgccctaaatcacaagaaggtggccaaaatcttactggaagccggagcagatacgaccattgttaacaatgcaggccagactccgctggagactgcccgctaccacaataacccggaagttgctcttctccttactaaagctccccaggtaggatttactgccctttccatggtactgattatgcgggactacaaagttgttgggactcctggttgcaatctactgaagcctcttcaaactaacttaaatatggaatgtaaccaggcagtagaggtataggcatgcatgggggcccaggatgacgggagtcaaaggcatcaagtccagctcttcgtgttcatgcctgggccgcctcatcttctccctgtggctggatctttgtcacggccagctgcctaggtcatagtttcccagctactcagccaaggaagaagttccagtttaagacatcgcaggacagggccatgattgcagagtttaggccaaatgcccatccctgaagaagtgggacagggactttaagaagagaagtggcattccccagagaaaggcaggagggaggggacgattctgggcagatagtcgcctgccggagatagttaagtacagtctagttttctttcctcttttactgactaatggtattttgaccatcatttaattttttttaaaatggtggctgatactttagttgaggttgacattatctaagtaacaataaagaaatgtcataataatttataagctatttataattctagccccctgaaacaactgtttttgtttcatccacaaaa

SEQ ID NO: 364105 - DNA, 6704 bp, Homo sapiens
cggcggcggacgcggcgggctcggccacaggtaacccgcaggagccgaggccctggggccgccggagccagcgggagccagtccccgtcttcgcccctcgccccccaccgtgtcgccggccttggtccctgcggcgcggacgtccggcgcgggagagaaaggtcccgaagatggcatattcataaagacatcttctgatgattgtgaacatctttacctctgggtgccaggccgggccagtgacttcgtgttgagctgaaggaacttgtctaccgcttccctgaaaacctttctttcctaattcatgagccagcaagatgcggtcgctgcactttcagagcgccttctcgtagctgcgtacaaaggccaaacagagaatgtggttcagctcatcaacaagggcgccagggtagcggttaccaagcatggccggactcccctgcatcttgctgccaataagggccatcttcctgtggtccagatcttgctgaaggctggctgcgaccttgatgtccaggatgatggggaccagaccgccttgcaccgggccacagtggtggggaacacggagatcatcgcggcgctcatccacgaagggtgtgccctggacagacaagacaaggatgggaatacagccttgcatgaagcatcctggcatggtttcagccagtcagccaagctgctcgttaaagcaggagccaacgtgcttgccaagaacaaggcggggaacacagctctgcacctggcctgccagaacagccactcccagagcacgcgcgtcctcctgctggccgggtcccgcgctgacctcaaaaataatgcaggagacacctgtttgcacgttgctgcgcgctataatcacttgtccatcattaggctcctcctcactgctttctgttctgtccatgaaaagaaccaggctggagacacagcacttcacgttgctgctgccctaaatcacaagaaggtggccaaaatcttactggaagccggagcagatacgaccattgttaacaatgcaggccagactccgctggagactgcccgctaccacaataacccggaagttgctcttctccttactaaagctccccagggcagtgtctcagcaggagacacccccagcagtgaacaggctgtggccagaaaagaagaagccagagaagagttcctgtcagcctccccagaacccagagcaaaggatgacaggaggagaaagtcaaggcccaaggtgtcagcgttttctgaccccaccccaccagccgaccaacagcctggacaccagaagaacctgcatgctcataatcaccctaaaaagaggaacaggcatcggtgttcatccccacccccaccccatgagttcagggcgtatcagctctacacattgtaccggggcaaggatgggaaagtgatgcaggcaccaataaatggttgtcgatgtgaacctctaatcaacaagctggagaatcagttggaggctactgtggaggagataaaagcagagctgggatcggttcaggacaaaatgaatacaaagctggggcagatggagaataagacccagcaccaaatgcgtgttttggacaagctgatggttgagcgactttctgcagagaggacggagtgcctgaaccgcctgcaacagcactcagacacagagaagcatgagggggagaaacgacagatatccttggtggatgaattaaaaacctggtgcatgttaaagattcagaatctggagcagaagctttctggagattctagggcctgcagagctaaatccacaccatctacttgtgagtcctctacaggtgtggaccaattagtggtgactgcaggtccagcagcagcttccgacagctcccctccagtggttaggcccaaagagaaggccctcaactccactgctacccagagactccagcaggagctgtcgtcttctgactgtacaggctcccgactgagaaacgtcaaggtccagacagccttgctacccatgaatgaggcagccagatctgatcagcaggctgggccctgcgtcaacagaggcactcaaactaagaagtctgggaagagtgggccaacaaggcatcgtgcccagcaacccgcagccagcagcacctgtgggcagccgccaccagccacaggcagcgagcagactggccctcacattcgggacacctcccaagctctggagcttacccagtatttttttgaggctgtttctacccagatggaaaagtggtatgaaaggaagattgaagaagcacgaagccaagccaatcagaaagcccagcaagataaggctacattgaaggaacacattaaaagtttagaagaggaacttgccaaactaaggactagggtgcagaaggaaaattagcaccaataaagaggaaatatgaaaggattcttgaagatttccagttttgcaactgcataatagctatgcccaaggagtcaactattgtatatattgcagatttgcctttttaaaaaaatcactaattctacaatgtgccagatacatgtttcctatgcccaggaagttatgaagacttcaacaattaaactgaaaccaggggaagcttgcttagttttgggtttcattataaactcttagcctcagtccaggttaatctgaagtttgaaagctcagattaagcaagccatgccaagaaactggacgatgtgtaagcctagactctaaaattcaagatgtgtgaaataatataagtcaaaagcaagaaaaacgtaatcccgtctgaactcaagtagtcattcatataaatttgaacacacctgctgtgcctagacaagtgtctttctgtaagagctgtaactctgagatgtgctaaataaaccctctttctcaaattcgtaattctccaactgttgacattttaatcacatgaaaagttatcagatttttgaggagaaatattttcatgatgtcacaagatccaatatatcttatgataaaatttattgaaaagtcagtttatttaaataatgaataattggctaacagctctggaaacaatgagatcaaatgagaaagattcaaattgtttgttattttctgtattttcagtcaaaaaatcagttatatagtgattttaaagcagattaatggaaaaaaattcatgtaacaattacctgaaaatttataacctattcctaatcaaacccaattatatcagaatacctttctgaatttgagatttttgctctacattttataatgaataaggctattttttgaaagtatttcattttgaattctgtcattaacctcaaaagctttctactgctttgcggtgaaggcaaaatattcgataactcaacttaggccccactgttccccaacttcatggaggccagaagactttactttgttccataatgaaatataaacacagaacaaagttgtaaaagtagcatggatatgttgaaactttggacaagcttcttgtcctttggaatatgggatttatattcatctcctcaatatcccatgtatgcacagaaacttcagttctatttctatagacacaggaacctagtgactattgaacgtaattgtaataaaatgctgctcattgagccaaagagaagaaatgatttattaacatggggacaccaagaaaaacaaagtatgcttttattccctttgtcaagctcagttttagggttttttcttttttttatagtgacaatccatagatatagacattcctaaaagaaaaataaataattcagtagatatatgtcactgttacctgaatatggaatgaatttgatgttttttattttgttgagacagggtcttgctctgtcacccagactggagtgcagtggcatgatcacacctcactgcagccttggcctctcaggctcgtgatcctcctgcctcaacctcgcaagtagcttgggactacaggcgtgtgccaccagtcctggctaattttttgtagatataaggtctcatgatattgcccaggctgaatttgatgttatttcaagttgattttcatgtgtttgggagcttgtcttgttctcaactactacgcaggtagacagtcttcccccagagactcattagattgcaatatagaggcactttctcatttccctattgttcctaatacagaattgtagagctggagagtaccttcagttttctaaatctattctcaaacaggatatcactaacctctttagaatcattcctcagtatacatcaatttattgagaactgcctaatactcaagaaattaaatcctgagttcagtaggctgtgttccaagcaggaattattttcacttaccaaaatatctcctattacctcaaggtatccttgttgaggaatgctgaaaactaaattttaagtatcaagtctagaccatagagtgctttggtgggagtattttgattacctcctacccatcagaagcaggcagctaatattgtgaactgagtatttttgtcaaaagtcacagggaagagactacagaagaatgagaagggtcaaaaggacctagtgtggcttactacatggatcttgtctcttggaggtctgtcgtagaagaagaaacaaatagaggtgatgaagacacagaacaggctcagtcagcatcctcacccagagatggcaacatctattaagaccaatgcaataccttttcatcttcagcaaatgttgtttcatctgtttttgatccttggcattgtcaaaaacttaactgcaggtccagtgtatatttttccttatttttcccttttagctatctgctaaagtgagtaaatgccacaactgtacttttccaaagaaaaagaactattgacaacttatagcctgtcatgcaggtcatgtttcaaatcaaggctgaaattttcaacagctgtgggaaaaactaaaacacagaaatactgtacagtattagtgtttttttaaagaaattgttagtgcattattgagtatactaaatatctgtgattaaataaattagttctaacttttgattttgggagcccaaaataaagggagtgttgttttcatggttatgccttgtttgtggagtcaagtgttgatatacttgaggcatgttatgtgtcttctaattaatatttttatcaccttgaatttgtgtctcttccaagcattaaagatactatggatcttaaattccttattaaaaaaatgcaagtgtgaatactttgtttagcttacattttaatttattgtggttgaccacattttatggctcctgagtgccttcacccagctacactttaccttgtatctataaaagtgtaatttagagtaaatacattggctgtaaagtcgagatcaggtgctctccaccaaaagcaaaacaaaactgctgaaatgtggcaaggtttctcagtgcaagcttaaatgtttaaactgttgaccatttggaaaatactggacaaaggggaaggacaaaacatcatttgcaatagttaaaggttatgcaaggcaaggcaacattatactttttgactaagttattaaaagttaaatgcatttcttctttgaagtgtggattataaaagccaatcaaagacaaaaccagtttgaaaaaccttttgtattctacaataccttttatgagtaagagtaaaacatacatttcttatttgtaattttatttaaggagaaatactctttccctttgatacgactataatattataaacagcaaggaatatgttctgctttctgcaattttagaaagtcattccattctgggtgacagaatgaggtaagactgtctctttaaaaaaaaaaacaactcacacctgtaatcctagcactctggccaccgaggcaggtggattgcttgagcccaggagttcgagactagcctggcaacaaagtgagattccccctcctctctctgaaaagtaaaaaaaattagccggtcatggtggcacatgcctgtggtcccagctaaatgaaaatctgaagcaggtggatctcttgagcccaggagctcaaggttgcagtgagccatgttcgcgccaccacactccagcttgtgcaacagagaccctgtctcaaaaaaaagtcatctgtgtgtttcttgcaggcacatctatggcaatgcttgtaccatgaatttaaaacttctaacttgatggcacttttttattttttttgagacaagagtctcactctttcgcccaggctgtagtgcagtagtgtgttctcggctcactgcagcctctgcctcccgggttcaatatgaggcagccctcctgagtagctggaattacaggcacgtgccaccaggttaggctagctagtggcctagctagtctcgaaatcctgacctaaagtgatccacccacctcagcctcccaaagtgtgtggattacttgtgtaagccacagtgcccggccttacctgctttaaaaaaacaaaaaaacttaggttttcttggagtctgtgctagttgaatcttgcaaatgcaaaccacatacgctctttaatgaaaacctttgcatgcacaccactgttaggaagagcatcattaaatcactgacttctacacccataaaaggatgattttgagtttcaagattttagatttactagagatagcatgtatctatcaatcatgtcacacaaaaaatatttccaaagtgttctctgttcagaaacgtcacaaatg

SEQ ID NO: 364106 - DNA, 6472 bp, Homo sapiens
agcggacttgttactacggaacttggtgtccatgagtccgatctgtacacgcgaataaggccgattagactacacatctgtccgaactgtctgacacctctagtcaaccatgaaagcatggcctccaacacagaggtgcagtatccacctggtccatggagggaacgcatgcatggtcccgaagatggcatattcataaagacatcttctgatgattgtgaacatctttacctctgggtgccaggccgggccagtgacttcgtgttgagctgaaggaacttgtctaccgcttccctgaaaacctttctttcctaattcatgagccagcaagatgcggtcgctgcactttcagagcgccttctcgtagctgcgtacaaaggccaaacagagaatgtggttcagctcatcaacaagggcgccagggtagcggttaccaagcatggccggactcccctgcatcttgctgccaataagggccatcttcctgtggtccagatcttgctgaaggctggctgcgaccttgatgtccaggatgatggggaccagaccgccttgcaccgggccacagtggtggggaacacggagatcatcgcggcgctcatccacgaagggtgtgccctggacagacaagacaaggatgggaatacagccttgcatgaagcatcctggcatggtttcagccagtcagccaagctgctcgttaaagcaggagccaacgtgcttgccaagaacaaggctggagacacagcacttcacgttgctgctgccctaaatcacaagaaggtggccaaaatcttactggaagccggagcagatacgaccattgttaacaatgcaggccagactccgctggagactgcccgctaccacaataacccggaagttgctcttctccttactaaagctccccaggtcttgcgcttcagtcgtgggcgaagcctgaggaaaaagagagagaggctcaaggaagagaggagagcccagtctgtgccaagagatgaggtggcccaaagcaagggcagtgtctcagcaggagacacccccagcagtgaacaggctgtggccagaaaagaagaagccagagaagagttcctgtcagcctccccagaacccagagcaaaggatgacaggaggagaaagtcaaggcccaaggtgtcagcgttttctgaccccaccccaccagccgaccaacagcctggacaccagaagaacctgcatgctcataatcaccctaaaaagaggaacaggcatcggtgttcatccccacccccaccccatgagttcagggcgtatcagctctacacattgtaccggggcaaggatgggaaagtgatgcagatgcgtgttttggacaagctgatggttgagcgactttctgcagagaggacggagtgcctgaaccgcctgcaacagcactcagacacagagaagcatgagggggagaaacgacagatatccttggtggatgaattaaaaacctggtgcatgttaaagattcagaatctggagcagaagctttctggagattctagggcctgcagagctaaatccacaccatctacttgtgagtcctctacaggtgtggaccaattagtggtgactgcaggtccagcagcagcttccgacagctcccctccagtggttaggcccaaagagaaggccctcaactccactgctacccagagactccagcaggagctgtcgtcttctgactgtacaggctcccgactgagaaacgtcaaggtccagacagccttgctacccatgaatgaggcagccagatctgatcagcaggctgggccctgcgtcaacagaggcactcaaactaagaagtctgggaagagtgggccaacaaggcatcgtgcccagcaacccgcagccagcagcacctgtgggcagccgccaccagccacaggcagcgagcagactggccctcacattcgggacacctcccaagctctggagcttacccagtatttttttgaggctgtttctacccagatggaaaagtggtatgaaaggaagattgaagaagcacgaagccaagccaatcagaaagcccagcaagataaggctacattgaaggaacacattaaaagtttagaagaggaacttgccaaactaaggactagggtgcagaaggaaaattagcaccaataaagaggaaatatgaaaggattcttgaagatttccagttttgcaactgcataatagctatgcccaaggagtcaactattgtatatattgcagatttgcctttttaaaaaaatcactaattctacaatgtgccagatacatgtttcctatgcccaggaagttatgaagacttcaacaattaaactgaaaccaggggaagcttgcttagttttgggtttcattataaactcttagcctcagtccaggttaatctgaagtttgaaagctcagattaagcaagccatgccaagaaactggacgatgtgtaagcctagactctaaaattcaagatgtgtgaaataatataagtcaaaagcaagaaaaacgtaatcccgtctgaactcaagtagtcattcatataaatttgaacacacctgctgtgcctagacaagtgtctttctgtaagagctgtaactctgagatgtgctaaataaaccctctttctcaaattcgtaattctccaactgttgacattttaatcacatgaaaagttatcagatttttgaggagaaatattttcatgatgtcacaagatccaatatatcttatgataaaatttattgaaaagtcagtttatttaaataatgaataattggctaacagctctggaaacaatgagatcaaatgagaaagattcaaattgtttgttattttctgtattttcagtcaaaaaatcagttatatagtgattttaaagcagattaatggaaaaaaattcatgtaacaattacctgaaaatttataacctattcctaatcaaacccaattatatcagaatacctttctgaatttgagatttttgctctacattttataatgaataaggctattttttgaaagtatttcattttgaattctgtcattaacctcaaaagctttctactgctttgcggtgaaggcaaaatattcgataactcaacttaggccccactgttccccaacttcatggaggccagaagactttactttgttccataatgaaatataaacacagaacaaagttgtaaaagtagcatggatatgttgaaactttggacaagcttcttgtcctttggaatatgggatttatattcatctcctcaatatcccatgtatgcacagaaacttcagttctatttctatagacacaggaacctagtgactattgaacgtaattgtaataaaatgctgctcattgagccaaagagaagaaatgatttattaacatggggacaccaagaaaaacaaagtatgcttttattccctttgtcaagctcagttttagggttttttcttttttttatagtgacaatccatagatatagacattcctaaaagaaaaataaataattcagtagatatatgtcactgttacctgaatatggaatgaatttgatgttttttattttgttgagacagggtcttgctctgtcacccagactggagtgcagtggcatgatcacacctcactgcagccttggcctctcaggctcgtgatcctcctgcctcaacctcgcaagtagcttgggactacaggcgtgtgccaccagtcctggctaattttttgtagatataaggtctcatgatattgcccaggctgaatttgatgttatttcaagttgattttcatgtgtttgggagcttgtcttgttctcaactactacgcaggtagacagtcttcccccagagactcattagattgcaatatagaggcactttctcatttccctattgttcctaatacagaattgtagagctggagagtaccttcagttttctaaatctattctcaaacaggatatcactaacctctttagaatcattcctcagtatacatcaatttattgagaactgcctaatactcaagaaattaaatcctgagttcagtaggctgtgttccaagcaggaattattttcacttaccaaaatatctcctattacctcaaggtatccttgttgaggaatgctgaaaactaaattttaagtatcaagtctagaccatagagtgctttggtgggagtattttgattacctcctacccatcagaagcaggcagctaatattgtgaactgagtatttttgtcaaaagtcacagggaagagactacagaagaatgagaagggtcaaaaggacctagtgtggcttactacatggatcttgtctcttggaggtctgtcgtagaagaagaaacaaatagaggtgatgaagacacagaacaggctcagtcagcatcctcacccagagatggcaacatctattaagaccaatgcaataccttttcatcttcagcaaatgttgtttcatctgtttttgatccttggcattgtcaaaaacttaactgcaggtccagtgtatatttttccttatttttcccttttagctatctgctaaagtgagtaaatgccacaactgtacttttccaaagaaaaagaactattgacaacttatagcctgtcatgcaggtcatgtttcaaatcaaggctgaaattttcaacagctgtgggaaaaactaaaacacagaaatactgtacagtattagtgtttttttaaagaaattgttagtgcattattgagtatactaaatatctgtgattaaataaattagttctaacttttgattttgggagcccaaaataaagggagtgttgttttcatggttatgccttgtttgtggagtcaagtgttgatatacttgaggcatgttatgtgtcttctaattaatatttttatcaccttgaatttgtgtctcttccaagcattaaagatactatggatcttaaattccttattaaaaaaatgcaagtgtgaatactttgtttagcttacattttaatttattgtggttgaccacattttatggctcctgagtgccttcacccagctacactttaccttgtatctataaaagtgtaatttagagtaaatacattggctgtaaagtcgagatcaggtgctctccaccaaaagcaaaacaaaactgctgaaatgtggcaaggtttctcagtgcaagcttaaatgtttaaactgttgaccatttggaaaatactggacaaaggggaaggacaaaacatcatttgcaatagttaaaggttatgcaaggcaaggcaacattatactttttgactaagttattaaaagttaaatgcatttcttctttgaagtgtggattataaaagccaatcaaagacaaaaccagtttgaaaaaccttttgtattctacaataccttttatgagtaagagtaaaacatacatttcttatttgtaattttatttaaggagaaatactctttccctttgatacgactataatattataaacagcaaggaatatgttctgctttctgcaattttagaaagtcattccattctgggtgacagaatgaggtaagactgtctctttaaaaaaaaaaacaactcacacctgtaatcctagcactctggccaccgaggcaggtggattgcttgagcccaggagttcgagactagcctggcaacaaagtgagattccccctcctctctctgaaaagtaaaaaaaattagccggtcatggtggcacatgcctgtggtcccagctaaatgaaaatctgaagcaggtggatctcttgagcccaggagctcaaggttgcagtgagccatgttcgcgccaccacactccagcttgtgcaacagagaccctgtctcaaaaaaaagtcatctgtgtgtttcttgcaggcacatctatggcaatgcttgtaccatgaatttaaaacttctaacttgatggcacttttttattttttttgagacaagagtctcactctttcgcccaggctgtagtgcagtagtgtgttctcggctcactgcagcctctgcctcccgggttcaatatgaggcagccctcctgagtagctggaattacaggcacgtgccaccaggttaggctagctagtggcctagctagtctcgaaatcctgacctaaagtgatccacccacctcagcctcccaaagtgtgtggattacttgtgtaagccacagtgcccggccttacctgctttaaaaaaacaaaaaaacttaggttttcttggagtctgtgctagttgaatcttgcaaatgcaaaccacatacgctctttaatgaaaacctttgcatgcacaccactgttaggaagagcatcattaaatcactgacttctacacccataaaaggatgattttgagtttcaagattttagatttactagagatagcatgtatctatcaatcatgtcacacaaaaaatatttccaaagtgttctctgttcagaaacgtcacaaatg

SEQ ID NO: 364107 - DNA, 2803 bp, Homo sapiens
agcggacttgttactacggaacttggtgtccatgagtccgatctgtacacgcgaataaggccgattagactacacatctgtccgaactgtctgacacctctagtcaaccatgaaagcatggcctccaacacagaggtgcagtatccacctggtccatggagggaacgcatgcatggtcccgaagatggcatattcataaagacatcttctgatgattgtgaacatctttacctctgggtgccaggccgggccagtgacttcgtgttgagctgaaggaacttgtctaccgcttccctgaaaacctttctttcctaattcatgagccagcaagatgcggtcgctgcactttcagagcgccttctcgtagctgcgtacaaaggccaaacagagaatgtggttcagctcatcaacaagggcgccagggtagcggttaccaagcatggccggactcccctgcatcttgctgccaataagggccatcttcctgtggtccagatcttgctgaaggctggctgcgaccttgatgtccaggatgatggggaccagaccgccttgcaccgggccacagtggtggggaacacggagatcatcgcggcgctcatccacgaagggtgtgccctggacagacaagacaaggatgggaatacagccttgcatgaagcatcctggcatggtttcagccagtcagccaagctgctcgttaaagcaggagccaacgtgcttgccaagaacaaggctggagacacagcacttcacgttgctgctgccctaaatcacaagaaggtggccaaaatcttactggaagccggagcagatacgaccattgttaacaatgcaggccagactccgctggagactgcccgctaccacaataacccggaagttgctcttctccttactaaagctccccaggtcttgcgcttcagtcgtgggcgaagcctgaggaaaaagagagagaggctcaaggaagagaggagagcccagtctgtgccaagagatgaggtggcccaaagcaagggcagtgtctcagcaggagacacccccagcagtgaacaggctgtggccagaaaagaagaagccagagaagagttcctgtcagcctccccagaacccagagcaaaggatgacaggaggagaaagtcaaggcccaaggtgtcagcgttttctgaccccaccccaccagccgaccaacagcctggacaccagaagaacctgcatgctcataatcaccctaaaaagaggaacaggcatcggtgttcatccccacccccaccccatgagttcagggcgtatcagctctacacattgtaccggggcaaggatgggaaagtgatgcaggcaccaataaatggttgtcgatgtgaacctctaatcaacaagctggagaatcagttggaggctactgtggaggagataaaagcagagctgggatcggttcaggacaaaatgaatacaaagctggggcagatggagaataagacccagcaccaaatgcgtgttttggacaagctgatggttgagcgactttctgcagagaggacggagtgcctgaaccgcctgcaacagcactcagacacagagaagcatgagggggagaaacgacagatatccttggtggatgaattaaaaacctggtgcatgttaaagattcagaatctggagcagaagctttctggagattctagggcctgcagagctaaatccacaccatctacttgtgagtcctctacaggtgtggaccaattagtggtgactgcaggtccagcagcagcttccgacagctcccctccagtggttaggcccaaagagaaggccctcaactccactgctacccagagactccagcaggagctgtcgtcttctgactgtacaggctcccgactgagaaacgtcaaggtccagacagccttgctacccatgaatgaggcagccagatctgatcagcaggctgggccctgcgtcaacagaggcactcaaactaagaagtctgggaagagtgggccaacaaggcatcgtgcccagcaacccgcagccagcagcacctgtgggcagccgccaccagccacaggcagcgagcagactggccctcacattcgggacacctcccaagctctggagcttacccagtatttttttgaggctgtttctacccagatggaaaagtggtatgaaaggaagattgaagaagcacgaagccaagccaatcagaaagcccagcaagataaggctacattgaaggaacacattaaaagtttagaagaggaacttgccaaactaaggactagggtgcagaaggaaaattagcaccaataaagaggaaatatgaaaggattcttgaagatttccagttttgcaactgcataatagctatgcccaaggagtcaactattgtatatattgcagatttgcctttttaaaaaaatcactaattctacaatgtgccagatacatgtttcctatgcccaggaagttatgaagacttcaacaattaaactgaaaccaggggaagcttgcttagttttgggtttcattataaactcttagcctcagtccaggttaatctgaagtttgaaagctcagattaagcaagccatgccaagaaactggacgatgtgtaagcctagactctaaaattcaagatgtgtgaaataatataagtcaaaagcaagaaaaacgtaatcccgtctgaactcaagtagtcattcatataaatttgaacacacctgctgtgcctagacaagtgtctttctgtaagagctgtaactctgagatgtgctaaataaaccctctttctcaaattcgt

SEQ ID NO: 364108 - DNA, 1656 bp, Homo sapiens
  misc_feature (1618)..(1618): n is a, c, g, or t
  misc_feature (1624)..(1624): n is a, c, g, or t
agcggacttgttactacggaacttggtgtccatgagtccgatctgtacacgcgaataaggccgattagactacacatctgtccgaactgtctgacacctctagtcaaccatgaaagcatggcctccaacacagaggtgcagtatccacctggtccatggagggaacgcatgcatggtcccgaagatggcatattcataaagacatcttctgatgattgtgaacatctttacctctgggtgccaggccgggccagtgacttcgtgttgagctgaaggaacttgtctaccgcttccctgaaaacctttctttcctaattcatgagccagcaagatgcggtcgctgcactttcagagcgccttctcgtagctgcgtacaaaggccaaacagagaatgtggttcagctcatcaacaagggcgccagggtagcggttaccaagcatggccggactcccctgcatcttgctgccaataagggccatcttcctgtggtccagatcttgctgaaggctggctgcgaccttgatgtccaggatgatggggaccagaccgccttgcaccgggccacagtggtggggaacacggagatcatcgcggcgctcatccacgaagggtgtgccctggacagacaagacaaggatgggaatacagccttgcatgaagcatcctggcatggtttcagccagtcagccaagctgctcgttaaagcaggagccaacgtgcttgccaagaacaaggctggagacacagcacttcacgttgctgctgccctaaatcacaagaaggtggccaaaatcttactggaagccggagcagatacgaccattgttaacaatgcaggccagactccgctggagactgcccgctaccacaataacccggaagttgctcttctccttactaaagctccccaggtcttgcgcttcagtcgtgggcgaagcctgaggaaaaagagagagaggctcaaggaagagaggagagcccagtctgtgccaagagatgaggtggcccaaagcaagggcagtgtctcagcaggagacacccccagcagtgaacaggctgtggccagaaaagaagaagccagagaagagttcctgtcagcctccccagaacccagagcaaaggatgacaggaggagaaagtcaaggcccaaggtgtcagcgttttctgaccccaccccaccagccgaccaacagcctggacaccagaagaacctgcatgctcataatcaccctaaaaagaggaacaggcatcggtgttcatccccacccccaccccatgagttcagggcgtatcagctctacacattgtaccggggcaaggatgggaaagtgatgcaggcaccaataaatggttgtcgatgtgaacctctaatcaacaagctggagaatcagttggaggctactgtggaggagataaaagcagagctgggatcggttcaggacaaaatgaatacaaagctggggcagatggagaataagacccagcaccaaatgcgtgttttggacaagctgatggttgagcgactttctgcagagaggacggagtgcctgaaccgcctgcaacagcactcagacacagagaagcatgagggggagaaacgacagattcttggtgatnatctgngatgtaagatcagattgacctttgttaggctg

SEQ ID NO: 364109 - DNA, 1556 bp, Homo sapiens
  misc_feature (36)..(36): n is a, c, g, or t
  misc_feature (38)..(38): n is a, c, g, or t
gggggggggaaaaaaactataggctagtagaggctngntggataatggcgggcgctgcagaagatgcgcgagctcttttccgggctggggtctgcgcggccctggaggcctggccggccttgcagatcgctgtggagaatggcttcgggggtgtgcacagccaggagaaggccaagtggctggggggtgcagtggaggattacttcatgcgcaatgctgacttggagctagatgaggtggaagacttccttggagagctgttgaccaacgagtttgatacagttgtggaagacgggagtctgccccaggtgagccagcaactgcagaccatgttccaccacttccagaggggtgatggggctgctctgagggagatggcctcctgcatcactcagagaaaatgcaaggtcacagccactgcacttaagacagctagagagactgatgaggatgaagatgatgtggacagtgtggaagagatggaggtcacagctacgaatgatggggctgctacagatggggtctgcccccagcctgaaccctctgatccagacgctcagactattaaggaagaggatatagtggaagatggctggaccattgtccggagaaaaaaatgagtggggatgattggaaatggctttgggcccttatttgctgttctaagagttgtctgtaggggttatttttgaggattgcagacctgtggactggttaccccatctccaccctctcccctgttcctctgtctggctccctccagggcaaggaaaacctagggtccttggtcttgggggtggggggaccttttccagcatattcccctgggcctttagttaacatccgagtgacgaagccgggttccccagtacagtgtcttttgggtgcggtcattgtgaggaaggggatgagtgagtgtgggtgtggctggaggaggagctagatgccggtggacagtgggcaggtggatttggggaggagaggatcagcagcagcagcagtactcagtgatagggggctggctgggtcaggaatggtgagatgaacatgcaagtggaagagagaatagttgaaaatgtgaatgaaagtagctctggagcctctcccttaccccaccccacacacacgcaacagctctgtacccctgcccagaacttggaacctcccaggaatgctgccttccttcagcccagcctccagtcctgggttccctcaggaattcgaagaccttggctaggtggtgagcttggaagagctgggctttgttttctgtctcctctaacctctttccttactccttatcccatcccatttgagttcaggggtgaggcttaagatcttaataaataataccttactgcttaatctgtggcttgacctgtgagtagtagccttagaatcagccttctgggagctcagcttcagagtttacaagggagcagtttctgggcccaccctagcagcctggtactttggacaaccaaacagatgaacgaacggagcacagcagtgctatgaaagttactgtaagcctgaaataaactgtatttttctta

SEQ ID NO: 364110 - DNA, 2803 bp, Homo sapiens
  misc_feature (36)..(36): n is a, c, g, or t
  misc_feature (38)..(38): n is a, c, g, or t
gggggggggaaaaaaactataggctagtagaggctngntggataatggcgggcgctgcagaagatgcgcgagctcttttccgggctggggtctgcgcggccctggaggcctggccggccttgcagatcgctgtggagaatggcttcgggggtgtgcacagccaggagaaggccaagtggctggggggtgcagtggaggattacttcatgcgcaatgctgacttggagctagatgaggtggaagacttccttggagagctgttgaccaacgagtttgatacagttgtggaagacgggagtctgccccaggtgagccagcaactgcagaccatgttccaccacttccagaggggtgatggggctgctctgagggagatggcctcctgcatcactcagagaaaatgcaaggtcacagccactgcacttaagacagctagagagactgatgaggatgaagatgatgtggacagtgtggaagagatggaggtcacagctacgaatgatggggctgctacagatggggtctgcccccagcctgaaccctctgatccagacgctcagactattaaggaagaggatatagtggaagatggctggaccattgtccggagaaaaaaatgagtggggatgattggaaatggctttgggcccttatttgctgttctaagagttgtctgtaggggttatttttgaggattgcagacctgtggactggttaccccatctccaccctctcccctgttcctctgtctggctccctccagggcaaggaaaacctagggtccttggtcttgggggtggggggaccttttccagcatattcccctgggcctttagttaacatccgagtgacgaagccgggttccccagtacagtgtcttttgggtgcggtcattgtgaggaaggggatgagtgagtgtgggtgtggctggaggaggagctagatgccggtggacagtgggcaggtggatttggggaggagaggatcagcagcagcagcagtactcagtgatagggggctggctgggtcaggaatggtgagatgaacatgcaagtggaagagagaatagttgaaaatgtgaatgaaagtagctctggagcctctcccttaccccaccccacacacacgcaacagctctgtacccctgcccagaacttggaacctcccaggaatgctgccttccttcagcccagcctccagtcctgggttccctcaggaattcgaagaccttggctaggtggtgagcttggaagagctgggctttgttttctgtctcctctaacctctttccttactccttatcccatcccatttgagttcaggggtgaggcttaagatcttaataaataataccttactgcttaatctgtggcttgacctgtgagtagtagccttagaatcagccttctgggagctcagcttcagagtttacaagggagcagtttctgggcccaccctagcagcctggtactttggacaaccaaacagatgaacgaacggagcacagcagtgctatgaaagttactgtaagcctgaaataaactgtatttttcttaaaaaaaaaaaacacacaaaaaaacacaaaaaaaaaaaaaaaaaaaaaaaaaaaaaaaaaaaaaaaaaaaaaaaaaaaaaaaaaaaaaaaaaaaaaaaaaaaagagaagcaagagaaaagaaaagagaagaggggtatagaaaaagaaaaaaaaaagaaaagagaagcaaaaaagagggaggaatcaagaaacgaagaaaggaagaacaagaggaagaatagagagagagagagagaaacaaggaagaaaaaaaaaaacacacagagaagaaaagaggaagcagagagagaagcaagacagccgaagagacagaaggcaagaagacggaacaaaaacgacggagagagaaagcacagacagacaaagaagagagggagcaggagagcaagaggaaggacaaaagaagcgacacgaaacgaacagaaaaagagaggaggacacagcagagaagaaagggaagagaggaccggaagaacaaaagggagacggacaagacgagagaagacgggaaacaacgagaggaagaagcaagacaaacgaagagataaacaacgccaaacgaagcacgcaagaacccgaaacacgaaagaaacacgagacgagacagagaagcaagcggaaagagacagagaaacagaaacacgagaaaacgaaagcaagaaaaccacgagaaagacgacaccgagcaaaaagaagaagagcaggaaaaagaactaagaaaagcatacagaagcagcgcgaggaacgaaagcaagagagacgaaagggaaacgagaggaacagagcagacaacacagccgcgaagaggacccgcaacgcaagaaagagaaaaagagacggcaggagcgagaagagagaaggacaagcgcgcacaacagagacacgagagaaagaggaagcaggagcaaacgccaagaacaaagagaggagagaggaacgcgccaaaccgagcaggaagagagcgagagagagggcagaacgaggaggagacggacacggaagaagcgacagggaaggaaggagagagaagaggaagcacaaagcaaggacacaaaaaaaagaagcaacacgaagacaaacacaaagagacaaagacaaaaacacaggaacacgaacaaaaaaggagaaggggaggagacaagcgaaggaatagcaaagagaaaagagagagaaacgagcaaagaagagaaaaagagagaaagcagcgacaagagagcaggacacgcaggcagaaaaagaagagagac

SEQ ID NO: 364111 - DNA, 1364 bp, Homo sapiens
  misc_feature (36)..(36): n is a, c, g, or t
  misc_feature (38)..(38): n is a, c, g, or t
gggggggggaaaaaaactataggctagtagaggctngntggataatggcgggcgctgcagaagatgcgcgagctcttttccgggctggggtctgcgcggccctggaggcctggccggccttgcagatcgctgtggagaatggcttcgggggtgtgcacagccaggagaaggccaagtggctggggggtgcagtggaggattacttcatgcgcaatgctgacttggagctagatgaggtggaagacttccttggagagctgttgaccaacgagtttgatacagttgtggaagacgggagtctgccccaggtgagccagcaactgcagaccatgttccaccacttccagaggggtgatggggctgctctgagggagatggcctcctgcatcactcagagaaaatgcaaggtcacagccactgcacttaagacagctagagagactgatgaggatgaagatgatgtggacagtgtggaagagatggaggtcacagctacgaatgatggggctgctacagatggggtctgcccccagcctgaaccctctgatccagacgctcagactattaaggaagaggatatagtggaagatggctggaccattgtccggagaaaaaaatgagtggggatgattggaaatggctttgggcccttatttgctgttctaagagttgtctgtaggggttatttttgaggattgcagacctgtggactggttaccccatctccaccctctcccctgttcctctgtctggctccctccagggcaaggaaaacctagggtccttggtcttgggggtggggggaccttttccagcatattcccctgggcctttagttaacatccgagtgacgaagccgggttccccagtacagtgtcttttgggtgcggtcattgtgaggaaggggatgagtgagtgtgggtgtggctggaggaggagctagatgccggtggacagtgggcaggtggatttggggaggagaggatcagcagcagcagcagtactcagtgatagggggctggctgggtcaggaatggtgagatgaacatgcaagtggaagagagaatagttgaaaatgtgaatgaaagtagctctggagcctctcccttaccccaccccacacacacgcaacagctctgtacccctgcccagaacttggaacctcccaggaatgctgccttccttcagcccagcctccagtcctgggttccctcaggaattcgaagaccttggctaggtggtgagcttggaagagctgggctttgttttctgtctcctctaacctctttccttactccttatcccatcccatttgagttcaggggtgaggcttaagatcttaataaataataccttactgctta

SEQ ID NO: 364112 - DNA, 2616 bp, Homo sapiens
  misc_feature (36)..(36): n is a, c, g, or t
  misc_feature (38)..(38): n is a, c, g, or t
gggggggggaaaaaaactataggctagtagaggctngntggataatggcgggcgctgcagaagatgcgcgagctcttttccgggctggggtctgcgcggccctggaggcctggccggccttgcagatcgctgtggagaatggcttcgggggtgtgcacagccaggagaaggccaagtggctggggggtgcagtggaggattacttcatgcgcaatgctgacttggagctagatgaggtggaagacttccttggagagctgttgaccaacgagtttgatacagttgtggaagacgggagtctgccccaggtgagccagcaactgcagaccatgttccaccacttccagaggggtgatggggctgctctgagggagatggcctcctgcatcactcagagaaaatgcaaggtcacagccactgcacttaagacagctagagagactgatgaggatgaagatgatgtggacagtgtggaagagatggaggtcacagctacgaatgatggggctgctacagatggggtctgcccccagcctgaaccctctgatccagacgctcagactattaaggaagaggatatagtggaagatggctggaccattgtccggagaaaaaaatgagtggggatgattggaaatggctttgggcccttatttgctgttctaagagttgtctgtaggggttatttttgaggattgcagacctgtggactggttaccccatctccaccctctcccctgttcctctgtctggctccctccagggcaaggaaaacctagggtccttggtcttgggggtggggggaccttttccagcatattcccctgggcctttagttaacatccgagtgacgaagccgggttccccagtacagtgtcttttgggtgcggtcattgtgaggaaggggatgagtgagtgtgggtgtggctggaggaggagctagatgccggtggacagtgggcaggtggatttggggaggagaggatcagcagcagcagcagtactcactccagtcctgggttccctcaggaattcgaagaccttggctaggtggtgagcttggaagagctgggctttgttttctgtctcctctaacctctttccttactccttatcccatcccatttgagttcaggggtgaggcttaagatcttaataaataataccttactgcttaatctgtggcttgacctgtgagtagtagccttagaatcagccttctgggagctcagcttcagagtttacaagggagcagtttctgggcccaccctagcagcctggtactttggacaaccaaacagatgaacgaacggagcacagcagtgctatgaaagttactgtaagcctgaaataaactgtatttttcttaaaaaaaaaaaacacacaaaaaaacacaaaaaaaaaaaaaaaaaaaaaaaaaaaaaaaaaaaaaaaaaaaaaaaaaaaaaaaaaaaaaaaaaaaaaaaaaaaagagaagcaagagaaaagaaaagagaagaggggtatagaaaaagaaaaaaaaaagaaaagagaagcaaaaaagagggaggaatcaagaaacgaagaaaggaagaacaagaggaagaatagagagagagagagagaaacaaggaagaaaaaaaaaaacacacagagaagaaaagaggaagcagagagagaagcaagacagccgaagagacagaaggcaagaagacggaacaaaaacgacggagagagaaagcacagacagacaaagaagagagggagcaggagagcaagaggaaggacaaaagaagcgacacgaaacgaacagaaaaagagaggaggacacagcagagaagaaagggaagagaggaccggaagaacaaaagggagacggacaagacgagagaagacgggaaacaacgagaggaagaagcaagacaaacgaagagataaacaacgccaaacgaagcacgcaagaacccgaaacacgaaagaaacacgagacgagacagagaagcaagcggaaagagacagagaaacagaaacacgagaaaacgaaagcaagaaaaccacgagaaagacgacaccgagcaaaaagaagaagagcaggaaaaagaactaagaaaagcatacagaagcagcgcgaggaacgaaagcaagagagacgaaagggaaacgagaggaacagagcagacaacacagccgcgaagaggacccgcaacgcaagaaagagaaaaagagacggcaggagcgagaagagagaaggacaagcgcgcacaacagagacacgagagaaagaggaagcaggagcaaacgccaagaacaaagagaggagagaggaacgcgccaaaccgagcaggaagagagcgagagagagggcagaacgaggaggagacggacacggaagaagcgacagggaaggaaggagagagaagaggaagcacaaagcaaggacacaaaaaaaagaagcaacacgaagacaaacacaaagagacaaagacaaaaacacaggaacacgaacaaaaaaggagaaggggaggagacaagcgaaggaatagcaaagagaaaagagagagaaacgagcaaagaagagaaaaagagagaaagcagcgacaagagagcaggacacgcaggcagaaaaagaagagagac

SEQ ID NO: 364113 - DNA, 1062 bp, Homo sapiens
  misc_feature (36)..(36): n is a, c, g, or t
  misc_feature (38)..(38): n is a, c, g, or t
gggggggggaaaaaaactataggctagtagaggctngntggataatggcgggcgctgcagaagatgcgcgagctcttttccgggctggggtctgcgcggccctggaggcctggccggccttgcagatcgctgtggagaatggcttcgggggtgtgcacagccaggagaaggccaagtggctggggggtgcagtggaggattacttcatgcgcaatgctgacttggagctagatgaggtggaagacttccttggagagctgttgaccaacgagtttgatacagttgtggaagacgggagtctgccccaggtgagccagcaactgcagaccatgttccaccacttccagaggggtgatggggctgctctgagggagatggcctcctgcatcactcagagaaaatgcaaggtcacagccactgcacttaagacagctagagagactgatgaggatgaagatgatgtggacagtgtggaagagatggaggtcacagctacgaatgatggggctgctacagatggggtctgcccccagcctgaaccctctgatccagacgctcagactattaaggaagaggatatagtggaagatggctggaccattgtccggagaaaaaaatgagtggggatgattggaaatggctttgggcccttatttgctgttctaagagttgtctgtaggggttatttttgaggattgcagacctgtggactggttaccccatctccaccctctcccctgttcctctgtctggctccctccagggcaaggaaaacctagggtccttggtcttgggggtggggggaccttttccagcatattcccctgggcctttagttaacatccgagtgacgaagccgggttccccagtacagtgtcttttgggtgcggtcattgtgaggaaggggatgagtgagtgtgggtgtggctggaggaggagctagatgccggtggacagtgggcaggtggatttggggaggagaggatcagcagcagcagcagtactcaagggactgcttcagttgtcgacgcggccgcgaatttagtagtagtaggcggccgc

SEQ ID NO: 364114 - DNA, 998 bp, Homo sapiens
  misc_feature (36)..(36): n is a, c, g, or t
  misc_feature (38)..(38): n is a, c, g, or t
gggggggggaaaaaaactataggctagtagaggctngntggataatggcgggcgctgcagaagatgcgcgagctcttttccgggctggggtctgcgcggccctggaggcctggccggccttgcagatcgctgtggagaatggcttcgggggtgtgcacagccaggagaaggccaagtggctggggggtgcagtggaggattacttcatgcgcaatgctgacttggagctagatgaggtggaagacttccttggagagctgttgaccaacgagtttgatacagttgtggaagacgggagtctgccccaggtgagccagcaactgcagaccatgttccaccacttccagaggggtgatggggctgctctgagggagatggcctcctgcatcactcagagaaaatgcaaggtcacagccactgcacttaagacagctagagagactgatgaggatgaagatgatgtggacagtgtggaagagatggaggtcacagctacgaatgatggggctgctacagatggggtctgcccccagcctgaaccctctgatccagacgctcagactattaaggaagaggatatagtggaagatggctggaccattgtccggagaaaaaaatgagtggggatgattggaaatggctttgggcccttatttgctgttctaagagttgtctgtaggggttatttttgaggattgcagacctgtggactggttaccccatctccaccctctcccctgttcctctgtctggctccctccagggcaaggaaaacctagggtccttggtcttgggggtggggggaccttttccagcatattcccctgggcctttagttaacatccgagtgacgaagccgggttccccagtacagtgtcttttgggtgcggtcattgtgaggaaggggatgagtgagtgtgggtgtggctggaggaggagcgagtcagctaaatacttcgccgcgcgtgggaatagctattattattggaaccgtgtag

SEQ ID NO: 364115 - DNA, 1465 bp, Homo sapiens
  misc_feature (36)..(36): n is a, c, g, or t
  misc_feature (38)..(38): n is a, c, g, or t
gggggggggaaaaaaactataggctagtagaggctngntggataatggcgggcgctgcagaagatgcgcgagctcttttccgggctggggtctgcgcggccctggaggcctggccggccttgcagctgacttggagctagatgaggtggaagacttccttggagagctgttgaccaacgagtttgatacagttgtggaagacgggagtctgccccaggtgagccagcaactgcagaccatgttccaccacttccagaggggtgatggggctgctctgagggagatggcctcctgcatcactcagagaaaatgcaaggtcacagccactgcacttaagacagctagagagactgatgaggatgaagatgatgtggacagtgtggaagagatggaggtcacagctacgaatgatggggctgctacagatggggtctgcccccagcctgaaccctctgatccagacgctcagactattaaggaagaggatatagtggaagatggctggaccattgtccggagaaaaaaatgagtggggatgattggaaatggctttgggcccttatttgctgttctaagagttgtctgtaggggttatttttgaggattgcagacctgtggactggttaccccatctccaccctctcccctgttcctctgtctggctccctccagggcaaggaaaacctagggtccttggtcttgggggtggggggaccttttccagcatattcccctgggcctttagttaacatccgagtgacgaagccgggttccccagtacagtgtcttttgggtgcggtcattgtgaggaaggggatgagtgagtgtgggtgtggctggaggaggagctagatgccggtggacagtgggcaggtggatttggggaggagaggatcagcagcagcagcagtactcagtgatagggggctggctgggtcaggaatggtgagatgaacatgcaagtggaagagagaatagttgaaaatgtgaatgaaagtagctctggagcctctcccttaccccaccccacacacacgcaacagctctgtacccctgcccagaacttggaacctcccaggaatgctgccttccttcagcccagcctccagtcctgggttccctcaggaattcgaagaccttggctaggtggtgagcttggaagagctgggctttgttttctgtctcctctaacctctttccttactccttatcccatcccatttgagttcaggggtgaggcttaagatcttaataaataataccttactgcttaatctgtggcttgacctgtgagtagtagccttagaatcagccttctgggagctcagcttcagagtttacaagggagcagtttctgggcccaccctagcagcctggtactttggacaaccaaacagatgaacgaacggagcacagcagtgctatgaaagttactgtaagcctgaaataaactgtatttttctta

SEQ ID NO: 364116 - DNA, 1263 bp, Homo sapiens
gtacacatccggacactcttagaacagcaaatagggcccaaagccatttccaatcatccccactcattttcttctccggccttgcagatcgctgtggagaatggcttcgggggtgtcacagccactgcacttaagacagctagagagactgatgaggatgaagatgatgtggacagtgtggaagagatggaggtcacagctacgaatgatggggctgctacagatggggtctgcccccagcctgaaccctctgatccagacgctcagactattaaggaagaggatatagtggaagatggctggaccattgtccggagaaaaaaatgagtggggatgattggaaatggctttgggcccttatttgctgttctaagagttgtctgtaggggttatttttgaggattgcagacctgtggactggttaccccatctccaccctctcccctgttcctctgtctggctccctccagggcaaggaaaacctagggtccttggtcttgggggtggggggaccttttccagcatattcccctgggcctttagttaacatccgagtgacgaagccgggttccccagtacagtgtcttttgggtgcggtcattgtgaggaaggggatgagtgagtgtgggtgtggctggaggaggagctagatgccggtggacagtgggcaggtggatttggggaggagaggatcagcagcagcagcagtactcagtgatagggggctggctgggtcaggaatggtgagatgaacatgcaagtggaagagagaatagttgaaaatgtgaatgaaagtagctctggagcctctcccttaccccaccccacacacacgcaacagctctgtacccctgcccagaacttggaacctcccaggaatgctgccttccttcagcccagcctccagtcctgggttccctcaggaattcgaagaccttggctaggtggtgagcttggaagagctgggctttgttttctgtctcctctaacctctttccttactccttatcccatcccatttgagttcaggggtgaggcttaagatcttaataaataataccttactgcttaatctgtggcttgacctgtgagtagtagccttagaatcagccttctgggagctcagcttcagagtttacaagggagcagtttctgggcccaccctagcagcctggtactttggacaaccaaacagatgaacgaacggagcacagcagtgctatgaaagttactgtaagcctgaaataaactgtatttttctta

SEQ ID NO: 364117 - DNA, 560 bp, Homo sapiens
aggccttggtaggatggaagagattggaaatgaggtattaatatttagtggttctttaaaaaattatgttaaaacctggaatgcagaacactttagcagataaaaggcaggatggaagagattggaaatgaggtatttttagtggttcttaaaaaattgttaaaacctggaatgcagaacactttagcagataaaaggctcactgtgcctttacccacccagttgcagatccaccaagtagatattgaagagcagtgggcaggggtgatgaagttggctggtctttgacccaagggccctgtccttttctacttagctgacttggagctagatgaggtggaagacttccttggagagctgttgaccaacgagtttgatacagttgtggaagacgggagtctgccccaggtgagcttatcacgggcacaactgcagtctccctacctgtagtctttcttctccccagctgtctgttttgggccaagactcttgactatgactctgttgcctagaggaaaaagtgtagcctttccaaaccctgccttttctttatttctata

SEQ ID NO: 364118 - DNA, 1542 bp, Homo sapiens
ccgggacgtcacgtggactggggccggataatggcgggcgctgcagaagatgcgcgagctcttttccgggctggggtctgcgcggccctggaggcctggccggccttgcagatcgctgtggagaatggcttcgggggtgtgcacagccaggagaaggccaagtggctggggggtgcagtggaggattacttcatgcgcaatgctgacttggagctagatgaggtggaagacttccttggagagctgttgaccaacgagtttgatacagttgtggaagacgggagtctgccccaggtgagccagcaactgcagaccatgttccaccacttccagaggggtgatggggctgctctgagggagatggcctcctgcatcactcagagaaaatgcaaggtcacagccactgcacttaagacagctagagagactgatgaggatgaagatgatgtggacagtgtggaagagatggaggtcacagctacgaatgatggggctgctacagatggggtctgcccccagcctgaaccctctgatccagacgctcagactattaaggaagaggatatagtggaagatggctggaccattgtccggagaaaaaaatgagtggggatgattggaaatggctttgggcccttatttgctgttctaagagttgtctgtaggggttatttttgaggattgcagacctgtggactggttaccccatctccaccctctcccctgttcctctgtctggctccctccagggcaaggaaaacctagggtccttggtcttgggggtggggggaccttttccagcatattcccctgggcctttagttaacatccgagtgacgaagccgggttccccagtacagtgtcttttgggtgcggtcattgtgaggaaggggatgagtgagtgtgggtgtggctggaggaggagctagatgccggtggacagtgggcaggtggatttggggaggagaggatcagcagcagcagcagtactcagtgatagggggctggctgggtcaggaatggtgagatgaacatgcaagtggaagagagaatagttgaaaatgtgaatgaaagtagctctggagcctctcccttaccccaccccacacacacgcaacagctctgtacccctgcccagaacttggaacctcccaggaatgctgccttccttcagcccagcctccagtcctgggttccctcaggaattcgaagaccttggctaggtggtgagcttggaagagctgggctttgttttctgtctcctctaacctctttccttactccttatcccatcccatttgagttcaggggtgaggcttaagatcttaataaataataccttactgcttaatctgtggcttgacctgtgagtagtagccttagaatcagccttctgggagctcagcttcagagtttacaagggagcagtttctgggcccaccctagcagcctggtactttggacaaccaaacagatgaacgaacggagcacagcagtgctatgaaagttactgtaagcctgaaataaactgtatttttctta

SEQ ID NO: 364119 - DNA, 1450 bp, Homo sapiens
  misc_feature (36)..(36): n is a, c, g, or t
  misc_feature (38)..(38): n is a, c, g, or t
gggggggggaaaaaaactataggctagtagaggctngntggataatggcgggcgctgcagaagatgcgcgagctcttttccgggctggggtctgcgcggccctggaggcctggccggccttgcagatcgctgtggagaatggcttcgggggtgtgcacagccaggagaaggccaagtggctggggggtgcagtggaggattacttcatgcgcaatgctgacttggagctagatgaggtggaagacttccttggagagctgttgaccaacgagtttgatacagttgtggaagacgggagtctgccccaggtgagccagcaactgcagaccatgttccaccacttccagaggggtgatggggctgctctgagggagatggcctcctgcatcactcagagaaaatgcaaggtcacagccactgcacttaagacagctagagagactgatgaggatgaagatgatgtggacagtgtggaagagatggaggtcacagctacgaatgatggggctgctacagatggggtctgcccccagcctgaaccctctgatccagacgctcagactattaaggaagaggatatagtggaagatggctggaccattgtccggagaaaaaaatgagtggggatgattggaaatggctttgggcccttatttgctgttctaagagttgtctgtaggggttatttttgaggattgcagacctgtggactggttaccccatctccaccctctcccctgttcctctgtctggctccctccagggcaaggaaaacctagggtccttggtcttgggggtggggggaccttttccagcatattcccctgggcctttagttaacatccgagtgacgaagccgggttccccagtacagtgtcttttgggtgcggtcattgtgaggaaggggatgagtgagtgtgggtgtggctggaggaggagacatgcaagtggaagagagaatagttgaaaatgtgaatgaaagtagctctggagcctctcccttaccccaccccacacacacgcaacagctctgtacccctgcccagaacttggaacctcccaggaatgctgccttccttcagcccagcctccagtcctgggttccctcaggaattcgaagaccttggctaggtggtgagcttggaagagctgggctttgttttctgtctcctctaacctctttccttactccttatcccatcccatttgagttcaggggtgaggcttaagatcttaataaataataccttactgcttaatctgtggcttgacctgtgagtagtagccttagaatcagccttctgggagctcagcttcagagtttacaagggagcagtttctgggcccaccctagcagcctggtactttggacaaccaaacagatgaacgaacggagcacagcagtgctatgaaagttactgtaagcctgaaataaactgtatttttctta

SEQ ID NO: 364120 - DNA, 1280 bp, Homo sapiens
  misc_feature (36)..(36): n is a, c, g, or t
  misc_feature (38)..(38): n is a, c, g, or t
gggggggggaaaaaaactataggctagtagaggctngntggataatggcgggcgctgcagaagatgcgcgagctcttttccgggctggggtctgcgcggccctggaggcctggccggccttgcagatcgctgtggagaatggcttcgggggtgtgcacagccaggagaaggccaagtggctggggggtgcagtggaggattacttcatgcgcaatgctgacttggagctagatgaggtggaagacttccttggagagctgttgaccaacgagtttgatacagttgtggaagacgggagtctgccccaggtgagccagcaactgcagaccatgttccaccacttccagaggggtgatggggctgctctgagggagatggcctcctgcatcactcagagaaaatgcaaggtcacagccactgcacttaagacagctagagagactgatgaggatgaagatgatgtggacagtgtggaagagatggaggtcacagctacgaatgatggggctgctacagatggggtctgcccccagcctgaaccctctgatccagacgctcagactattaaggaagaggatatagtggaagatggctggaccattgtccggagaaaaaaatgagtggggatgattggaaatggctttgggcccttatttgctgttctaagagttgtctgtaggggttatttttgaggattgcagacctgtggactggttaccccatctccaccctctcccctgttcctctgtctggctccctccagggcaaggaaaacctagggtccttggtcttgggggtggggggaccttttccagcatattcccctgggcctttagttaacatccgagtgacgaagccgggttccccagtacagtgtcttttgggtgcggtcattgtgaggaaggggatgagtgagtgtgggtgtggctggaggaggagctagatgccggtggacagtgggcaggtggatttggggaggagaggatcagcagcagcagcagtactcactctggagcctctcccttaccccaccccacacacacgcaacagctctgtacccctgcccagaacttggaacctcccaggaatgctgccttccttcagcccagcctccagtcctgggttccctcaggaattcgaagaccttggctaggtggtgagcttggaagagctgggctttgttttctgtctcctctaacctctttccttactccttatcccatcccatttgagttcaggggtgaggcttaagatcttaataaataataccttactgctta

SEQ ID NO: 364121 - DNA, 1569 bp, Homo sapiens
aacagtatattacacaaggtcgagctcctgttttcaatttcagttaccgggcgggtatgtcgtgtacttcacagggatgcgcgagctcttttccgggctggggtctgcgcggccctggaggcctggccggccttgcagatcgctgtggagaatggcttcgggggtgtgcacagccaggagaaggccaagtggctggggggtgcagtggaggattacttcatgcgcaatgctgacttggagctagatgaggtggaagacttccttggagagctgttgaccaacgagtttgatacagttgtggaagacgggagtctgccccaggtgagccagcaactgcagaccatgttccaccacttccagaggggtgatggggctgctctgagggagatggcctcctgcatcactcagagaaaatgcaaggtcacagccactgcacttaagacagctagagagactgatgaggatgaagatgatgtggacagtgtggaagagatggaggtcacagctacgaatgatggggctgctacagatggggtctgcccccagcctgaaccctctgatccagacgctcagactattaaggaagaggatatagtggaagatggctggaccattgtccggagaaaaaaatgagtggggatgattggaaatggctttgggcccttatttgctgttctaagagttgtctgtaggggttatttttgaggattgcagacctgtggactggttaccccatctccaccctctcccctgttcctctgtctggctccctccagggcaaggaaaacctagggtccttggtcttgggggtggggggaccttttccagcatattcccctgggcctttagttaacatccgagtgacgaagccgggttccccagtacagtgtcttttgggtgcggtcattgtgaggaaggggatgagtgagtgtgggtgtggctggaggaggagctagatgccggtggacagtgggcaggtggatttggggaggagaggatcagcagcagcagcagtactcagtgatagggggctggctgggtcaggaatggtgagatgaacatgcaagtggaagagagaatagttgaaaatgtgaatgaaagtagctctggagcctctcccttaccccaccccacacacacgcaacagctctgtacccctgcccagaacttggaacctcccaggaatgctgccttccttcagcccagcctccagtcctgggttccctcaggaattcgaagaccttggctaggtggtgagcttggaagagctgggctttgttttctgtctcctctaacctctttccttactccttatcccatcccatttgagttcaggggtgaggcttaagatcttaataaataataccttactgcttaatctgtggcttgacctgtgagtagtagccttagaatcagccttctgggagctcagcttcagagtttacaagggagcagtttctgggcccaccctagcagcctggtactttggacaaccaaacagatgaacgaacggagcacagcagtgctatgaaagttactgtaagcctgaaataaactgtatttttctta

SEQ ID NO: 364122 - DNA, 1516 bp, Homo sapiens
ccgggacgtcacgtggactggggccggataatggcgggcgctgcagaagatgcgcgagctcttttccgggctggggtctgcgcggccctggaggcctggccggccttgcagatcgctgtggagaatggcttcgggggtgtgcacagccaggagaaggccaagtggctggggggtgcagtggaggattacttcatgcgcaatgctgacttggagctagatgaggtggaagacttccttggagagctgttgaccaacgagtttgatacagttgtggaagacgggagtctgccccaggtgagccagcaactgcagaccatgttccaccacttccagaggggtgatggggctgctctgagggagatggcctcctgcatcactcagagaaaatgcaaggtcacagccactgcacttaagacagctagagagactgatgaggatgaagatgatgtggacagtgtggaagagatggaggtcacagctacgaatgatggggctgctacagatggggtctgcccccagcctgaaccctctgatccagacgctcagactattaaggaagaggatatagtggaagatggctggaccattgtccggagaaaaaaatgagtggggatgattggaaatggctttgggcccttatttgctgttctaagagttgtctgtaggggttatttttgaggattgcagacctgtggactggttaccccatctccaccctctcccctgttcgaaaacctagggtccttggtcttgggggtggggggaccttttccagcatattcccctgggcctttagttaacatccgagtgacgaagccgggttccccagtacagtgtcttttgggtgcggtcattgtgaggaaggggatgagtgagtgtgggtgtggctggaggaggagctagatgccggtggacagtgggcaggtggatttggggaggagaggatcagcagcagcagcagtactcagtgatagggggctggctgggtcaggaatggtgagatgaacatgcaagtggaagagagaatagttgaaaatgtgaatgaaagtagctctggagcctctcccttaccccaccccacacacacgcaacagctctgtacccctgcccagaacttggaacctcccaggaatgctgccttccttcagcccagcctccagtcctgggttccctcaggaattcgaagaccttggctaggtggtgagcttggaagagctgggctttgttttctgtctcctctaacctctttccttactccttatcccatcccatttgagttcaggggtgaggcttaagatcttaataaataataccttactgcttaatctgtggcttgacctgtgagtagtagccttagaatcagccttctgggagctcagcttcagagtttacaagggagcagtttctgggcccaccctagcagcctggtactttggacaaccaaacagatgaacgaacggagcacagcagtgctatgaaagttactgtaagcctgaaataaactgtatttttctta

SEQ ID NO: 364123 - DNA, 4211 bp, Homo sapiens
ctacccttgagaggggcaagaggggtggtcaagccgccgccgccgcgacggcccccgcggtgcgggttgcgccagcctcctcggagctcgacgcagaaacttgttgcaacaaacaggcgaccgcgggtgcccctagcagccagcggcagagtgggtgggcgggcgagagggaggggaaggctggcggacgccgcagcgaactggtgggcagacccggagtcgccgcgtaagcggggccggctcagtgcggtgcggcaggcgcggctgtgcggcagcggaagtcctttgttgcagcacagtccctggcagagccagagcctctccgcgcagcccagcccgagcgccgagcgccgcgcgccgccgccactgcagctcgcggccccttcgccttcgcccgcctttcccgcggctgatttgccttaaactccctaaaatctccgcagctctggttcctgttgcggccggtctctaattaacagaagatggcaaagcccagccacagcagctatgtccttcagcagctaaacaaccaaagagaatggggttttctctgtgactgctgtattgcaattgatgacatttactttcaagcacacaaggcagttctagctgcctgtagctcctattttagaatgtttttcatgaaccatcagcatagtactgcacaactgaatctcagcaacatgaaaattagtgcagaatgttttgatctcattttgcagtttatgtatttaggaaaaattatgacagctccctccagttttgagcagtttaaagtggcaatgaactacctacagctatacaatgttcctgactgtttagaagacatccaggatgcagattgttctagttcaaaatgttcctcttctgcttccagcaaacagaacagcaaaatgatatttggggtaagaatgtatgaagatactgtggctcgaaatggcaatgaagccaacaggtggtgtgcagagccaagttcaacggtaaatacaccacataatagagaggctgatgaagagtctttacaattaggtaattttcctgagccactatttgatgtatgtaaaaaaagttccgtgtccaaattatctactccaaaagaacgtgtgtcaagacgctttgggcggagttttacctgtgatagctgtggatttggctttagctgtgaaaaattattagatgagcatgtgctaacctgtactaacagacatttataccaaaacacaagatcttaccatagaatagtagatattagagatggaaaagacagtaacatcaaagctgaatttggtgaaaaagattcttccaaaacattttctgcacagacggacaaatacagaggagacacaagccaggctgctgatgattcagcttcaaccactggaagcagaaaaagtagcacagtggagtctgaaatagcaagcgaagagaaaagcagagctgctgagaggaaaaggattattattaagatggagccagaagatattcctacagatgaactgaaagactttaacattattaaagttactgataaagactgtaatgaatccactgacaatgatgaattagaagatgaacctgaagagccattttatagatactatgttgaagaagatgtcagcataaaaaaaagtggtaggaaaactctaaaacctcgaatgtcagtaagtgctgatgaaagaggtggtttagagaatatgaggccccctaacaacagcagtccagtacaagaggatgctgaaaatgcatcttgtgagctgtgtggacttacaataaccgaggaggacctgtcatctcattacttagccaaacacattgaaaatatctgtgcatgtggtaaatgtggacaaatacttgtaaagggtaggcagcttcaggaacatgctcaacgatgtggcgagccccaagatctgaccatgaatgggttaggaaatactgaggagaaaatggacttggaagagaatcctgatgagcagtccgaaataagagatatgtttgttgaaatgctggatgattttagggacaatcattaccagataaacagtatccaaaaaaagcagttatttaaacattctgcctgcccttttcgatgtcctaattgtggccagcgttttgaaactgaaaatctagtggttgaacatatgtctagctgcttagatcaagatatgtttaagagtgccatcatggaagaaaatgaaagagatcacagacgaaagcatttttgtaatctgtgtggaaaaggattttatcagcggtgtcacttaagagaacactatactgttcatactaaggaaaaacagtttgtttgtcaaacatgtggaaagcagtttttaagagagcgtcagttgcgactgcacaatgatatgcacaaaggcatggccagtggtgaaatagggccttctaaacctgtggagaagtgagagatctgaatttggagaggacatggggaagaatcaatcttcaacagataatctttaagtacagacccaggaatatcagatctgaagtggcaccatcttttctgtcttcctgacaaacttccatcaacccaaaaagttccagttgcaaagatccaagaaaactcagtaaagatcactttggaatcactttgttgtaacaaaattgattcatggtgactctaatatttgtgtaaatctgctgaagaaaagtaactagaaaattcatacaacatcagtggttacagctatactaaaataaaactttatatgctaattatcttcaagggtctttctaaaataaaaggggttgttaggctactgcaaatataaagagacataatcacaaatctatttatatagatataaataattctaaacttaaaatcactagaattatagcttaaatattatgaaatgtacttagtcaacttaaaaacttacaccaaaaatctgtagtttagagtgtaagaagtaatgggtacagagaaaaaaaatttaagaccaatattttaacaggataatttggttattactcactatagtaaaacacttgcccttcttccttttccactgtatatgccagtcacaatcttgatcatttatatgaatgaaactcccttttaaacctgttaacttgaaggagaacagaaatggtattacttcaatagtggtagatttccacaaatcagacacattattttcttctgaacttggcaatataacctaataaggcagaataagtttctgttaaaatacttattctcaatatttatgtataaaccatgcttctcagctttcaaatttcaagataaaatttaagtattcagtaaaatgatggttaacatgttttaaaaaatctttaatggagaagttaaatatttggtgagattttagtctggctataaatgctttgtttgatatatatatgtgcacatatatatattacttaaccatatgaattttatttccttattctgaatatacttgtagttttacttctttctgtttatgtacccaattccttatgattattttgtttcttctgcaatatcaagatgttatttattttgagaaatgcttatttttatgactatttattccaatgttttaacaagaagcacagagatttatagtattcttaatagtatgtgcagaagttacatcatttaaaaaacccttgctgtaaagtaggataacttgaatattcattctaataattagactaagtgaaaatctgagaaagagttaattgcaatgtgatagtgggtagaaaggagagaaaaacccactgaagggttcaaatacatgtgaattctactgctttaagagaaataaaacaaataagcctagggaaatattagagtctaaaaaaccctagagttactctcttttgggaacataaggaggtatacagaactgcagacctctaaacataagtaggaaaaagaaaaataaaagaatattaccaataattaaaggtgccagatcaaaatagtaataaatcaacaaataatttttgattgactggtggaattagatttactaaataaaaatggcttaaattttgactgtactaactataaatgtaatgaattataataattataaatggtataaatgcattctacaatgtgattattttctgtattttagtatatagtataaaatggaattattgggttaaagtacttttattacatttcttaatccattgtttttacctaataaaatttcctcctctatattccaaagtta

SEQ ID NO: 364124 - DNA, 733 bp, Homo sapiens
ctacccttgagaggggcaagaggggtggtcaagccgccgccgccgcgacggcccccgcggtgcgggttgcgccagcctcctcggagctcgacgcagaaacttgttgcaacaaacaggcgaccgcgggtgcccctagcagccagcggcagagtgggtgggcgggcgagagggaggggaaggctggcggacgccgcagcgaactggtgggcagacccggagtcgccgcgtaagcggggccggctcagtgcggtgcggcaggcgcggctgtgcggcagcggaagtcctttgttgcagcacagtccctggcagagccagagcctctccgcgcagcccagcccgagcgccgagcgccgcgcgccgccgccactgcagctcgcggccccttcgccttcgcccgcctttcccgcggctgatttgccttaaactccctaaaatctccgcagctctggttcctgttgcggccggtaagtatttgccagttgtggggctatttgcgcaactttggcccaggccggagggcgacgggccgcgggcctggcggagtgcggggccggaggggcgccgatccgtgcggggagccggagcgcggcggacgcgctgcgaggacccggtgacgggcggctgccaggccgcctgcttgttgccggcgcgtcaggtcccgggcgtgcggcctccctgagtcggaggcgaagcccctacggagactagttcccaaattagttaccttcttttc

SEQ ID NO: 364125 - DNA, 3419 bp, Homo sapiens
tgtagagtgggcgctttgcagaatacgtgttgaatgaaatcactgatctaggaaaagtaaaaattcctcaaatgaatacagaatacttgtgctactgctgatgatcaacactttatacagtgcctggtataccaaaggtctctaattaacagaagatggcaaagcccagccacagcagctatgtccttcagcagctaaacaaccaaagagaatggggttttctctgtgactgctgtattgcaattgatgacatttactttcaagcacacaaggcagttctagctgcctgtagctcctattttagaatgtttttcatgaaccatcagcatagtactgcacaactgaatctcagcaacatgaaaattagtgcagaatgttttgatctcattttgcagtttatgtatttaggaaaaattatgacagctccctccagttttgagcagtttaaagtggcaatgaactacctacagctatacaatgttcctgactgtttagaagacatccaggatgcagattgttctagttcaaaatgttcctcttctgcttccagcaaacagaacagcaaaatgatatttggggtaagaatgtatgaagatactgtggctcgaaatggcaatgaagccaacaggtggtgtgcagagccaagttcaacggtaaatacaccacataatagagaggctgatgaagagtctttacaattcattttctgcacagacggacaaatacagaggagacacaagccaggctgctgatgattcagcttcaaccactggaagcagaaaaagtagcacagtggagtctgaaatagcaagcgaagagaaaagcagagctgctgagaggaaaaggattattattaagatggagccagaagatattcctacagatgaactgaaagactttaacattattaaagttactgataaagactgtaatgaatccactgacaatgatgaattagaagatgaacctgaagagccattttatagatactatgttgaagaagatgtcagcataaaaaaaagtggtaggaaaactctaaaacctcgaatgtcagtaagtgctgatgaaagaggtggtttagagaatatgaggccccctaacaacagcagtccagtacaagaggatgctgaaaatgcatcttgtgagctgtgtggacttacaataaccgaggaggacctgtcatctcattacttagccaaacacattgaaaatatctgtgcatgtggtaaatgtggacaaatacttgtaaagggtaggcagcttcaggaacatgctcaacgatgtggcgagccccaagatctgaccatgaatgggttaggaaatactgaggagaaaatggacttggaagagaatcctgatgagcagtccgaaataagagatatgtttgttgaaatgctggatgattttagggacaatcattaccagataaacagtatccaaaaaaagcagttatttaaacattctgcctgcccttttcgatgtcctaattgtggccagcgttttgaaactgaaaatctagtggttgaacatatgtctagctgcttagatcaagatatgtttaagagtgccatcatggaagaaaatgaaagagatcacagacgaaagcatttttgtaatctgtgtggaaaaggattttatcagcggtgtcacttaagagaacactatactgttcatactaaggaaaaacagtttgtttgtcaaacatgtggaaagcagtttttaagagagcgtcagttgcgactgcacaatgatatgcacaaaggcatggccaggtatgtctgttccatttgtgatcaaggaaacttcagaaaacatgaccatgtacggcatatgatttctcatttatctgctggtgagactatatgccaggtctgctttcagatattcccaaataatgaacagttggagcagcacatggatgttcatctgtatacatgtggaatatgtggagcaaaatttaatttgaggaaagatatgagatcacattataatgccaagcatttgaaaagaacctgagtgattttctactgtactaatgtttagatgatagcagataaaacaccaaagcaaaggatatgagctatttaggaattgattatataagatgatttgttagaaacaaatttcaaggcccttttaactttaatatttttgtttaggattttaagtatctacatttaggtattaaatgtttatcatttttgttgtttcttaatagaattatttgtttttagtttttcttagctatgattaaaatttttaaatgtagactacaagtggttgttacccattcaatgactattaaactttagtttttcatcaataaggtgatgacttcactatttctatgtgtttttttttttttaaggttatcctgtgaaattttaaacccagaatcattggccatttctgtttaaattttaaaaattccttaagtaattatttgaaactatcccgtttgcttttagtgagttaactactctttattcccccttattaatgaaattcatattcttaaattgacaagcttattaggcaagttaggtgcactgaatctaacctttaaggttgacatgggctcaaacttggcctaaaaagattgatgaacctgaggaaatttttataaatgaatatttcctataattgataaaatattatcatttaattatcacatttaaaacttatattaagtgtaaattccagtggctttacctcacttgaaaaattagtggggataagccattttgttttgtgatattaaatttaactatgatagttaattaaaaagacatatcttgtattcattaaaaatattttaatttaaaatattctgatttctaaagtgtgttagcttatcaattatttttgtttataaatagactttaatagctctctaagaatatgacctctaaaggaaaagatgattttttacaatacatacttctggaactttgagatttgagaaagcttccatgtatattgataaatctaataaaataaagagatcaattataaacctggttgttctataaaagtagagtgcacaaaaaaatgtcttgtgttttatactgtctaagatttggaggaaatgtggcaaattgcagtttatcgccatattttattatcatttttttctgtaaaagactataaaacttgaggattataaaataatcacagagtatatcaatggaaacagtttatcattttttcagttaaagtagtagtattgttagttgttgctgacacagggtctacataattacatgtgaattaaaacattggcaaaactgacccaccaataaacacatctattgaatagaatgccttttaatgtgaattacttgcaatgtagtacccttttcataatgaaagggattttaattaactcctaattttaaaaatataaatttgtgattctg

SEQ ID NO: 364126 - DNA, 3700 bp, Homo sapiens
tgtagagtgggcgctttgcagaatacgtgttgaatgaaatcactgatctaggaaaagtaaaaattcctcaaatgaatacagaatacttgtgctactgctgatgatcaacactttatacagtgcctggtataccaaaggtctctaattaacagaagatggcaaagcccagccacagcagctatgtccttcagcagctaaacaaccaaagagaatggggttttctctgtgactgctgtattgcaattgatgacatttactttcaagcacacaaggcagttctagctgcctgtagctcctattttagaatgtttttcatgaaccatcagcatagtactgcacaactgaatctcagcaacatgaaaattagtgcagaatgttttgatctcattttgcagtttatgtatttaggaaaaattatgacagctccctccagttttgagcagtttaaagtggcaatgaactacctacagctatacaatgttcctgactgtttagaagacatccaggatgcagattgttctagttcaaaatgttcctcttctgcttccagcaaacagaacagcaaaatgatatttggggtaagaatgtatgaagatactgtggctcgaaatggcaatgaagccaacaggtggtgtgcagagccaagttcaacggtaaatacaccacataatagagaggctgatgaagagtctttacaattaggtaattttcctgagccactatttgatgtatgtaaaaaaagttccgtgtccaaattatctactccaaaagaacgtgtgtcaagacgctttgggcggagttttacctgtgatagctgtggatttggctttagctgtgaaaaattattagatgagcatgtgctaacctgtactaacagacatttataccaaaacacaagatcttaccatagaatagtagatattagagatggaaaagacagtaacatcaaagctgaatttggtgaaaaagattcttccaaaacattttctgcacagacggacaaatacagaggagacacaagccaggctgctgatgattcagcttcaaccactggaagcagaaaaagtagcacagtggagtctgaaatagcaagcgaagagaaaagcagagctgctgagaggaaaaggattattattaagatggagccagaagatattcctacagatgaactgaaagactttaacattattaaagttactgataaagactgtaatgaatccactgacaatgatgaattagaagatgaacctgaagagccattttatagatactatgttgaagaagatgtcagcataaaaaaaagtggtaggaaaactctaaaacctcgaatgtcagtaagtgctgatgaaagaggtggtttagagaatatgaggccccctaacaacagcagtccagtacaagaggatgctgaaaatgcatcttgtgagctgtgtggacttacaataaccgaggaggacctgtcatctcattacttagccaaacacattgaaaatatctgtgcatgtggtaaatgtggacaaatacttgtaaagggtaggcagcttcaggaacatgctcaacgatgtggcgagccccaagatctgaccatgaatgggttaggaaatactgaggagaaaatggacttggaagagaatcctgatgagcagtccgaaataagagatatgtttgttgaaatgctggatgattttagggacaatcattaccagataaacagtatccaaaaaaagcagttatttaaacattctgcctgcccttttcgatgtcctaattgtggccagcgttttgaaactgaaaatctagtggttgaacatatgtctagctgcttagatcaagatatgtttaagagtgccatcatggaagaaaatgaaagagatcacagacgaaagcatttttgtaatctgtgtggaaaaggattttatcagcggtgtcacttaagagaacactatactgttcatactaaggaaaaacagtttgtttgtcaaacatgtggaaagcagtttttaagagagcgtcagttgcgactgcacaatgatatgcacaaaggcatggccaggtatgtctgttccatttgtgatcaaggaaacttcagaaaacatgaccatgtacggcatatgatttctcatttatctgctggtgagactatatgccaggtctgctttcagatattcccaaataatgaacagttggagcagcacatggatgttcatctgtatacatgtggaatatgtggagcaaaatttaatttgaggaaagatatgagatcacattataatgccaagcatttgaaaagaacctgagtgattttctactgtactaatgtttagatgatagcagataaaacaccaaagcaaaggatatgagctatttaggaattgattatataagatgatttgttagaaacaaatttcaaggcccttttaactttaatatttttgtttaggattttaagtatctacatttaggtattaaatgtttatcatttttgttgtttcttaatagaattatttgtttttagtttttcttagctatgattaaaatttttaaatgtagactacaagtggttgttacccattcaatgactattaaactttagtttttcatcaataaggtgatgacttcactatttctatgtgtttttttttttttaaggttatcctgtgaaattttaaacccagaatcattggccatttctgtttaaattttaaaaattccttaagtaattatttgaaactatcccgtttgcttttagtgagttaactactctttattcccccttattaatgaaattcatattcttaaattgacaagcttattaggcaagttaggtgcactgaatctaacctttaaggttgacatgggctcaaacttggcctaaaaagattgatgaacctgaggaaatttttataaatgaatatttcctataattgataaaatattatcatttaattatcacatttaaaacttatattaagtgtaaattccagtggctttacctcacttgaaaaattagtggggataagccattttgttttgtgatattaaatttaactatgatagttaattaaaaagacatatcttgtattcattaaaaatattttaatttaaaatattctgatttctaaagtgtgttagcttatcaattatttttgtttataaatagactttaatagctctctaagaatatgacctctaaaggaaaagatgattttttacaatacatacttctggaactttgagatttgagaaagcttccatgtatattgataaatctaataaaataaagagatcaattataaacctggttgttctataaaagtagagtgcacaaaaaaatgtcttgtgttttatactgtctaagatttggaggaaatgtggcaaattgcagtttatcgccatattttattatcatttttttctgtaaaagactataaaacttgaggattataaaataatcacagagtatatcaatggaaacagtttatcattttttcagttaaagtagtagtattgttagttgttgctgacacagggtctacataattacatgtgaattaaaacattggcaaaactgacccaccaataaacacatctattgaatagaatgccttttaatgtgaattacttgcaatgtagtacccttttcataatgaaagggattttaattaactcctaattttaaaaatataaatttgtgattctg

SEQ ID NO: 364127 - DNA, 3646 bp, Homo sapiens
tgtagagtgggcgctttgcagaatacgtgttgaatgaaatcactgatctaggaaaagtaaaaattcctcaaatgaatacagaatacttgtgctactgctgatgatcaacactttatacagtgcctggtataccaaaggtctctaattaacagaagatggcaaagcccagccacagcagctatgtccttcagcagctaaacaaccaaagagaatggggttttctctgtgactgctgtattgcaattgatgacatttactttcaagcacacaaggcagttctagctgcctgtagctcctattttagaatgtttttcatgaaccatcagcatagtactgcacaactgaatctcagcaacatgaaaattagtgcagaatgttttgatctcattttgcagtttatgtatttaggaaaaattatgacagctccctccagttttgagcagtttaaagtggcaatgaactacctacagctatacaatgttcctgactgtttagaagacatccaggatgcagattgttctagttcaaaatgttcctcttctgcttccagcaaacagaacagcaaaatgatatttggggtaagaatgtatgaagatactgtggctcgaaatggcaatgaagccaacaggtggtgtgcagagccaagttcaacggtaaatacaccacataatagagaggctgatgaagagtctttacaattaggtaattttcctgagccactatttgatgtatgtaaaaaaagttccgtgtccaaattatctactccaaaagaacgtgtgtcaagacgctttgggcggagttttacctgtgatagctgtggatttggctttagctgtgaaaaattattagatgagcatgtgctaacctgtactaacagacatttataccaaaacacaagatcttaccatagaatagtagatattagagatggaaaagacagtaacatcaaagctgaatttggtgaaaaagattcttccaaaacattttctgcacagacggacaaatacagaggagacacaagccaggctgctgatgattcagcttcaaccactggaagcagaaaaagtagcacagtggagtctgaaatagcaagcgaagagaaaagcagagctgctgagaggaaaaggattattattaagatggagccagaagatattcctacagatgaactgaaagactttaacattattaaagttactgataaagactgtaatgaatccactgacaatgatgaattagaagatgaacctgaagagccattttatagatactatgttgaagaagatgtcagcataaaaaaaagtggtaggaaaactctaaaacctcgaatgtcagtaagtgctgatgaaagaggtggtttagagaatatgaggccccctaacaacagcagtccagtacaagaggatgctgaaaatgcatcttgtgagctgtgtggacttacaataaccgaggaggacctgtcatctcattacttagccaaacacattgttcaggaacatgctcaacgatgtggcgagccccaagatctgaccatgaatgggttaggaaatactgaggagaaaatggacttggaagagaatcctgatgagcagtccgaaataagagatatgtttgttgaaatgctggatgattttagggacaatcattaccagataaacagtatccaaaaaaagcagttatttaaacattctgcctgcccttttcgatgtcctaattgtggccagcgttttgaaactgaaaatctagtggttgaacatatgtctagctgcttagatcaagatatgtttaagagtgccatcatggaagaaaatgaaagagatcacagacgaaagcatttttgtaatctgtgtggaaaaggattttatcagcggtgtcacttaagagaacactatactgttcatactaaggaaaaacagtttgtttgtcaaacatgtggaaagcagtttttaagagagcgtcagttgcgactgcacaatgatatgcacaaaggcatggccaggtatgtctgttccatttgtgatcaaggaaacttcagaaaacatgaccatgtacggcatatgatttctcatttatctgctggtgagactatatgccaggtctgctttcagatattcccaaataatgaacagttggagcagcacatggatgttcatctgtatacatgtggaatatgtggagcaaaatttaatttgaggaaagatatgagatcacattataatgccaagcatttgaaaagaacctgagtgattttctactgtactaatgtttagatgatagcagataaaacaccaaagcaaaggatatgagctatttaggaattgattatataagatgatttgttagaaacaaatttcaaggcccttttaactttaatatttttgtttaggattttaagtatctacatttaggtattaaatgtttatcatttttgttgtttcttaatagaattatttgtttttagtttttcttagctatgattaaaatttttaaatgtagactacaagtggttgttacccattcaatgactattaaactttagtttttcatcaataaggtgatgacttcactatttctatgtgtttttttttttttaaggttatcctgtgaaattttaaacccagaatcattggccatttctgtttaaattttaaaaattccttaagtaattatttgaaactatcccgtttgcttttagtgagttaactactctttattcccccttattaatgaaattcatattcttaaattgacaagcttattaggcaagttaggtgcactgaatctaacctttaaggttgacatgggctcaaacttggcctaaaaagattgatgaacctgaggaaatttttataaatgaatatttcctataattgataaaatattatcatttaattatcacatttaaaacttatattaagtgtaaattccagtggctttacctcacttgaaaaattagtggggataagccattttgttttgtgatattaaatttaactatgatagttaattaaaaagacatatcttgtattcattaaaaatattttaatttaaaatattctgatttctaaagtgtgttagcttatcaattatttttgtttataaatagactttaatagctctctaagaatatgacctctaaaggaaaagatgattttttacaatacatacttctggaactttgagatttgagaaagcttccatgtatattgataaatctaataaaataaagagatcaattataaacctggttgttctataaaagtagagtgcacaaaaaaatgtcttgtgttttatactgtctaagatttggaggaaatgtggcaaattgcagtttatcgccatattttattatcatttttttctgtaaaagactataaaacttgaggattataaaataatcacagagtatatcaatggaaacagtttatcattttttcagttaaagtagtagtattgttagttgttgctgacacagggtctacataattacatgtgaattaaaacattggcaaaactgacccaccaataaacacatctattgaatagaatgccttttaatgtgaattacttgcaatgtagtacccttttcataatgaaagggattttaattaactcctaattttaaaaatataaatttgtgattctg

SEQ ID NO: 364128 - DNA, 1070 bp, Homo sapiens
  misc_feature (26)..(26): n is a, c, g, or t
  misc_feature (65)..(65): n is a, c, g, or t
  misc_feature (69)..(69): n is a, c, g, or t
  misc_feature (76)..(76): n is a, c, g, or t
  misc_feature (86)..(86): n is a, c, g, or t
  misc_feature (88)..(88): n is a, c, g, or t
  misc_feature (97)..(97): n is a, c, g, or t
  misc_feature (99)..(99): n is a, c, g, or t
  misc_feature (104)..(104): n is a, c, g, or t
ggaagttcctgaggacccttacccgntagcggagggtgtgaaatcagaacggccattgtattaantctntgaaganagactccggnantggaaacantngtctnttcctacaacgacttgatcatcttccctgacgactgtgagttcaagcgggtgccgcagtgccccagcgggagggtctacgtgctgaagttcaaggcagggtccaagcggcttttcttctggatgcaggaacccaagacagaccaggatgaggagcattgccggaaagtcaacgagtatctgaacaaccccccgatgcctggggcactgggggccagcggaagcagcggccacgaactctctgcgctaggcggtgagggtggcctgcagagcctgctgggaaacatgagccacagccagctcatgcagctcatcggaccagccggcctcggaggactgggtgggctgggggccctgactggacctggcctggccagcttactggggagcagtgggcctccagggagcagctcctcctccagctcccggagccagtcggcagcggtcaccccgtcatccaccacctcttccacccgtgccaccccagccccttctgctccagcagctgcctcagcaactagcccgagccccgcgcccagttccgggaatggagccagcacagcagccagcccgacccagcccatccagctgagcgacctccagagcatcctggccacgatgaacgtaccagccgggccagcaggcggccagcaagtggacctggccagtgtgctgacgccggagataatggctcccatcctcgccaacgcggatgtccaggagcgcctgcttccctacttgccatctggggagtcgctgccgcagaccgcggatgagatccagaataccctgacctcgccccagttccagcaggccctgggcatgttcagcgcagccttggcctcggggcagctgggccccctcatgtgccagttcggtctgcctgcagaggctgtggaggccgccaacaagggcgatgtggaagcgtttgccaaaagccatgcagtgaacacagcacggggggaatc

SEQ ID NO: 364129 - DNA, 256 bp, Homo sapiens
  misc_feature (28)..(28): n is a, c, g, or t
gcggcgcctactactactatacggctgngagaagacgacagaagggcgatgtggaagcgtttgccaaagccatgcagaacaacgccaagcccgagcagaaagagggcgacacgaaggacaagaaggacgaagaggaggacatgagcctggactgagccacgcgccgtcctccgaggaactgggcgcttgcagtgcgttgcacaccctcacctcccacccactgattattaataaagtcttttcttttacctgccaa

SEQ ID NO: 364130 - DNA, 526 bp, Homo sapiens
aaatatcccgtgaagaggaacaccgtgaatcacggagtagcgtcacggtgatgctatccgttcagccagaaaggctactcgattattctactttctgctgtctcgacaggaagtacgcgtctcgtggaagacgacttgatcatcttccctgacgactgtgagttcaagcgggtgccgcagtgccccagcgggagggtctacgtgctgaagttcaaggcagggtccaagcggcttttcttctggatgcaggaacccaagacagaccaggatgaggagcattgccggaaagtcaacgagtatctgaacaaccccccgatgcctggggcactgggggccagcggaagcagcggccacgaactctctgcgctaggcggtgagggtggcctgcagagcctgctgggaaacatgagccacagccagctcatgcagctcatcggaccacgaggaactgggcgcttgcagtgcgttgcacaccctcacctcccacccactgattattaataaagtcttttcttttacctgccaa

SEQ ID NO: 364131 - DNA, 380 bp, Homo sapiens
gcagtgatgctgcggtgttctagaggatcccggcaccattgtgcgctcattcccggaactgggcgcggggctcgggctagttgctgaggcagctgctagggcgatgtggaagcgtttgccaaagccatgcagaacaacgccaagcccgagcagaaagagggcgacacgaaggacaagaaggacgaagaggaggacatgagcctggactgagccacgcgccgtcctccgaggaactgggcgcttgcagtgcgttgcacaccctcacctcccacccactgattattaataaagtcttttcttttacctgccaaaaaaaaaaccagggttccggggcccgaatcggaacccagggccataggtgttcccggggtgactttgtt

SEQ ID NO: 364132 - DNA, 172 bp, Homo sapiens
gcggccgcctactactactactgctcgaattcaagcttctaacgatgtacggggacatgagcctggactgagccacgcgccgtcctccgaggaactgggcgcttgcagtgcgttgcacaccctcacctcccacccactgattattaataaagtcttttcttttacctgccaa

SEQ ID NO: 364133 - DNA, 1374 bp, Homo sapiens
cgactgccgcctttttaccctgtggcctttcccatccaggcgtccagagggttagagccggctgcgcggcttacggggctcaatcggcggcgagagcggcaggcggggcgggccgaacgcgggtttccggcggggcccggcaggcgccgaggaggaagagcgagcccggacggcgcctctcgaacgagtgtgggcgcgaggcaggatgacgacctcaggcgcgctctttccaagcctggtgccaggctctcggggcgcctccaacaagtacttggtggagtttcgggcgggaaagatgtccctgaaggggaccaccgtgactccggataagcggaaagggctggtgtacattcagcagacggacgactcgcttattcacttctgctggaaggacaggacgtccgggaacgtggaagacgacttgatcatcttccctgacgactgtgagttcaagcgggtgccgcagtgccccagcgggagggtctacgtgctgaagttcaaggcagggtccaagcggcttttcttctggatgcaggaacccaagacagaccaggatgaggagcattgccggaaagtcaacgagtatctgaacaaccccccgatgcctggggcactgggggccagcggaagcagcggccacgaactctctgcgctaggcggtgagggtggcctgcagagcctgctgggaaacatgagccacagccagctcatgcagctcatcggaccagccggcctcggaggactgggtgggctgggggccctgactggacctggcctggccagcttactggggagcagtgggcctccagggagcagctcctcctccagctcccggagccagtcggcagcggtcaccccgtcatccaccacctcttccacccgtgccaccccagccccttctgctccagcagctgcctcagcaactagcccgagccccgcgcccagttccgggaatggagccagcacagcagccagcccgacccagcccatccagctgagcgacctccagagcatcctggccacgatgaacgtaccagccgggccagcaggcggccagcaagtggacctggccagtgtgctgacgccggagataatggctcccatcctcgccaacgcggatgtccaggagcgcctgcttccctacttgccatctggggagtcgctgccgcagaccgcggatgagatccagaataccctgacctcgccccagttccagcaggccctgggcatgttcagcgcagccttggcctcggggcagctgggccccctcatgtgccagttcggtctgcctgcagaggctgtggaggccgccaacaagggcgatgtggaagcgtttgccaaaagccatgcagtgaacacagcacggggggaatc

SEQ ID NO: 364134 - DNA, 1903 bp, Homo sapiens
cgactgccgcctttttaccctgtggcctttcccatccaggcgtccagagggttagagccggctgcgcggcttacggggctcaatcggcggcgagagcggcaggcggggcgggccgaacgcgggtttccggcggggcccggcaggcgccgaggaggaagagcgagcccggacggcgcctctcgaacgagtgtgggcgcgaggcaggatgacgacctcaggcgcgctctttccaagcctggtgccaggctctcggggcgcctccaacaagtacttggtggagtttcgggcgggaaagatgtccctgaaggggaccaccgtgactccggataagcggaaagggctggtgtacattcagcagacggacgactcgcttattcacttctgctggaaggacaggacgtccgggaacgtggaagacgacttgatcatcttccctgacgactgtgagttcaagcgggtgccgcagtgccccagcgggagggtctacgtgctgaagttcaaggcagggtccaagcggcttttcttctggatgcaggaacccaagacagaccaggatgaggagcattgccggaaagtcaacgagtatctgaacaaccccccgatgcctggggcactgggggccagcggaagcagcggccacgaactctctgcgctaggcggtgagggtggcctgcagagcctgctgggaaacatgagccacagccagctcatgcagctcatcggaccagccggcctcggaggactgggtgggctgggggccctgactggacctggcctggccagcttactggggagcagtgggcctccagggagcagctcctcctccagctcccggagccagtcggcagcggtcaccccgtcatccaccacctcttccacccgtgccaccccagccccttctgctccagcagctgcctcagcaactagcccgagccccgcgcccagttccgggaatggagccagcacagcagccagcccgacccagcccatccagctgagcgacctccagagcatcctggccacgatgaacgtaccagccgggccagcaggcggccagcaagtggacctggccagtgtgctgacgccggagataatggctcccatcctcgccaacgcggatgtccaggagcgcctgcttccctacttgccatctggggagtcgctgccgcagaccgcggatgagatccagaataccctgacctcgccccagttccagcaggtagagccgggcccagggtgtcctccactgtgtgctccgggagtgggcaggggggaggaggagccctgccccaccttcaccatggccagtgcttcatgtgcctgacccgcagagctggcagctgagcagtgtggctctggggtgcagcccgggttggagctcagccctcgcctggctcttcttgcaggccctgggcatgttcagcgcagccttggcctcggggcagctgggccccctcatgtgccagttcggtctgcctgcagaggctgtggaggccgccaacaagggcgggtaaagtggctgcgcctgcacctccaggccagagccaggggcagggtccattcctgtccccctggatctgcagaagtggggctgagggggtaaaggtcacagcccttctgcccttgatcccatcgctttgatccccagttctgggcaagggttagacaccaccttgtgtctttaacgtgttctagatgtggaagcgtttgccaaagccatgcagaacaacgccaagcccgagcagaaagagggcgacacgaaggacaagaaggacgaagaggaggacatgagcctggactgagccacgcgccgtcctccgaggaactgggcgcttgcagtgcgttgcacaccctcacctcccacccactgattattaataaagtcttttcttttacctgccaa

SEQ ID NO: 364135 - DNA, 1244 bp, Homo sapiens
aaatatcccgtgaagaggaacaccgtgaatcacggagtagcgtcacggtgatgctatccgttcagccagaaaggctactcgattattctactttctgctgtctcgacaggaagtacgcgtctcgtggaagacgacttgatcatcttccctgacgactgtgagttcaagcgggtgccgcagtgccccagcgggagggtctacgtgctgaagttcaaggcagggtccaagcggcttttcttctggatgcaggaacccaagacagaccaggatgaggagcattgccggaaagtcaacgagtatctgaacaaccccccgatgcctggggcactgggggccagcggaagcagcggccacgaactctctgcgctaggcggtgagggtggcctgcagagcctgctgggaaacatgagccacagccagctcatgcagctcatcggaccagccggcctcggaggactgggtgggctgggggccctgactggacctggcctggccagcttactggggagcagtgggcctccagggagcagctcctcctccagctcccggagccagtcggcagcggtcaccccgtcatccaccacctcttccacccgtgccaccccagccccttctgctccagcagctgcctcagcaactagcccgagccccgcgcccagttccgggaatggagccagcacagcagccagcccgacccagcccatccagctgagcgacctccagagcatcctggccacgatgaacgtaccagccgggccagcaggcggccagcaagtggacctggccagtgtgctgacgccggagataatggctcccatcctcgccaacgcggatgtccaggagcgcctgcttccctacttgccatctggggagtcgctgccgcagaccgcggatgagatccagaataccctgacctcgccccagttccagcaggccctgggcatgttcagcgcagccttggcctcggggcagctgggccccctcatgtgccagttcggtctgcctgcagaggctgtggaggccgccaacaagggcgatgtggaagcgtttgccaaagccatgcagaacaacgccaagcccgagcagaaagagggcgacacgaaggacaagaaggacgaagaggaggacatgagcctggactgagccacgcgccgtcctccgaggaactgggcgcttgcagtgcgttgcacaccctcacctcccacccactgattattaataaagtcttttcttttacctgccaa

SEQ ID NO: 364136 - DNA, 1115 bp, Homo sapiens
  misc_feature (17)..(17): n is a, c, g, or t
tttagtaaaatataganaagttttaaaaaaagcaggctgtaccgtccggaattcccggatgcggaggtctacgtgctgaagttcaaggcagggtccaagcggcttttcttctggatgcaggaacccaagacagaccaggatgaggagcattgccggaaagtcaacgagtatctgaacaaccccccgatgcctggggcactgggggccagcggaagcagcggccacgaactctctgcgctaggcggtgagggtggcctgcagagcctgctgggaaacatgagccacagccagctcatgcagctcatcggaccagccggcctcggaggactgggtgggctgggggccctgactggacctggcctggccagcttactggggagcagtgggcctccagggagcagctcctcctccagctcccggagccagtcggcagcggtcaccccgtcatccaccacctcttccacccgtgccaccccagccccttctgctccagcagctgcctcagcaactagcccgagccccgcgcccagttccgggaatggagccagcacagcagccagcccgacccagcccatccagctgagcgacctccagagcatcctggccacgatgaacgtaccagccgggccagcaggcggccagcaagtggacctggccagtgtgctgacgccggagataatggctcccatcctcgccaacgcggatgtccaggagcgcctgcttccctacttgccatctggggagtcgctgccgcagaccgcggatgagatccagaataccctgacctcgccccagttccagcaggccctgggcatgttcagcgcagccttggcctcggggcagctgggccccctcatgtgccagttcggtctgcctgcagaggctgtggaggccgccaacaagggcgatgtggaagcgtttgccaaagccatgcagaacaacgccaagcccgagcagaaagagggcgacacgaaggacaagaaggacgaagaggaggacatgagcctggactgagccacgcgccgtcctccgaggaactgggcgcttgcagtgcgttgcacaccctcacctcccacccactgattattaataaagtcttttcttttacctgccaa

SEQ ID NO: 364137 - DNA, 1519 bp, Homo sapiens
gctcgggcgggtctgccccgcggagcgggtcgccggggtggcgcgtcgaggctggtgccccgcggagacggcgtcaagcctagggccggccccactaggcttggcggggctgccccggcccagcgccgagtgcgggcggtgcgatcgtcgtgagcggggcaaacgcggaaaggcagcccggcgtgtctgagtctgccttaggcagctctgggcgcaggccccctgctcgcaaacaccccagggggcgggagcttgccggaccgcaggcgacagtgaccgccgcgtctcagcgtcctctccgcgctttcaggatgacgacctcaggcgcgctctttccaagcctggtgccaggctctcggggcgcctccaacaagtacttggtggagtttcgggcgggaaagatgtccctgaaggggaccaccgtgactccggataagcggaaagggctggtgtacattcagcagacggacgactcgcttattcacttctgctggaaggacaggacgtccgggaacgtggaagacgaacccaagacagaccaggatgaggagcattgccggaaagtcaacgagtatctgaacaaccccccgatgcctggggcactgggggccagcggaagcagcggccacgaactctctgcgctaggcggtgagggtggcctgcagagcctgctgggaaacatgagccacagccagctcatgcagctcatcggaccagccggcctcggaggactgggtgggctgggggccctgactggacctggcctggccagcttactggggagcagtgggcctccagggagcagctcctcctccagctcccggagccagtcggcagcggtcaccccgtcatccaccacctcttccacccgtgccaccccagccccttctgctccagcagctgcctcagcaactagcccgagccccgcgcccagttccgggaatggagccagcacagcagccagcccgacccagcccatccagctgagcgacctccagagcatcctggccacgatgaacgtaccagccgggccagcaggcggccagcaagtggacctggccagtgtgctgacgccggagataatggctcccatcctcgccaacgcggatgtccaggagcgcctgcttccctacttgccatctggggagtcgctgccgcagaccgcggatgagatccagaataccctgacctcgccccagttccagcaggccctgggcatgttcagcgcagccttggcctcggggcagctgggccccctcatgtgccagttcggtctgcctgcagaggctgtggaggccgccaacaagggcgatgtggaagcgtttgccaaagccatgcagaacaacgccaagcccgagcagaaagagggcgacacgaaggacaagaaggacgaagaggaggacatgagcctggactgagccacgcgccgtcctccgaggaactgggcgcttgcagtgcgttgcacaccctcacctcccacccactgattattaataaagtcttttcttttacctgccaa

SEQ ID NO: 364138 - DNA, 1202 bp, Homo sapiens
cgactgccgcctttttaccctgtggcctttcccatccaggcgtccagagggttagagccggctgcgcggcttacggggctcaatcggcggcgagagcggcaggcggggcgggccgaacgcgggtttccggcggggcccggcaggcgccgaggaggaagagcgagcccggacggcgcctctcgaacgagtgtgggcgcgaggcaggatgacgacctcaggcgcgctctttccaagcctggtgccaggctctcggggcgcctccaacaagtacttggtggagtttcgggcgggaaagatgtccctgaaggggaccaccgtgactccggataagcggaaagggctggtgtacattcagcagacggacgactcgcttattcacttctgctggaaggacaggacgtccgggaacgtggaagacgacttgatcatcttccctgacgactgtgagttcaagcgggtgccgcagtgccccagcgggagggtctacgtgctgaagttcaaggcagggtccaagcggcttttcttctggatgcaggaacccaagacagaccaggatgaggagcattgccggaaagtcaacgagtatctgaacaaccccccgatgcctggggcactgggggccagcggaagcagcggccacgaactctctgcgctaggcggtgagggtggcctgcagagcctgctgggaaacatgagccacagccagctcatgcagctcatcggaccagccggcctcggaggactgggtgggctgggggccctgactggacctggcctggccagcttactggggagcagtgggcctccagggagcagctcctcctccagctcccggagccagtcggcagcggtcaccccgtcatccaccacctcttccacccgtgccaccccagccccttctgctccagcagctgcctcagcaactagcccgagccccgcgcccagttccgggaatggagccagcacagcagccagcccgacccagcccatccagatgtggaagcgtttgccaaagccatgcagaacaacgccaagcccgagcagaaagagggcgacacgaaggacaagaaggacgaagaggaggacatgagcctggactgagccacgcgccgtcctccgaggaactgggcgcttgcagtgcgttgcacaccctcacctcccacccactgattattaataaagtcttttcttttacctgccaa

SEQ ID NO: 364139 - DNA, 1551 bp, Homo sapiens
cgactgccgcctttttaccctgtggcctttcccatccaggcgtccagagggttagagccggctgcgcggcttacggggctcaatcggcggcgagagcggcaggcggggcgggccgaacgcgggtttccggcggggcccggcaggcgccgaggaggaagagcgagcccggacggcgcctctcgaacgagtgtgggcgcgaggcaggatgacgacctcaggcgcgctctttccaagcctggtgccaggctctcggggcgcctccaacaagtacttggtggagtttcgggcgggaaagatgtccctgaaggggaccaccgtgactccggataagcggaaagggctggtgtacattcagcagacggacgactcgcttattcacttctgctggaaggacaggacgtccgggaacgtggaagacgacttgatcatcttccctgacgactgtgagttcaagcgggtgccgcagtgccccagcgggagggtctacgtgctgaagttcaaggcagggtccaagcggcttttcttctggatgcaggaacccaagacagaccaggatgaggagcattgccggaaagtcaacgagtatctgaacaaccccccgatgcctggggcactgggggccagcggaagcagcggccacgaactctctgcgctaggcggtgagggtggcctgcagagcctgctgggaaacatgagccacagccagctcatgcagctcatcggaccagccggcctcggaggactgggtgggctgggggccctgactggacctggcctggccagcttactggggagcagtgggcctccagggagcagctcctcctccagcggtgccctctctcttcgcagctcccggagccagtcggcagcggtcaccccgtcatccaccacctcttccacccgtgccaccccagccccttctgctccagcagctgcctcagcaactagcccgagccccgcgcccagttccgggaatggagccagcacagcagccagcccgacccagcccatccagctgagcgacctccagagcatcctggccacgatgaacgtaccagccgggccagcaggcggccagcaagtggacctggccagtgtgctgacgccggagataatggctcccatcctcgccaacgcggatgtccaggagcgcctgcttccctacttgccatctggggagtcgctgccgcagaccgcggatgagatccagaataccctgacctcgccccagttccagcaggccctgggcatgttcagcgcagccttggcctcggggcagctgggccccctcatgtgccagttcggtctgcctgcagaggctgtggaggccgccaacaagggcgatgtggaagcgtttgccaaagccatgcagaacaacgccaagcccgagcagaaagagggcgacacgaaggacaagaaggacgaagaggaggacatgagcctggactgagccacgcgccgtcctccgaggaactgggcgcttgcagtgcgttgcacaccctcacctcccacccactgattattaataaagtcttttcttttacctgccaa

SEQ ID NO: 364140 - DNA, 2166 bp, Homo sapiens
cgactgccgcctttttaccctgtggcctttcccatccaggcgtccagagggttagagccggctgcgcggcttacggggctcaatcggcggcgagagcggcaggcggggcgggccgaacgcgggtttccggcggggcccggcaggcgccgaggaggaagagcgagcccggacggcgcctctcgaacgagtgtgggcgcgaggcaggatgacgacctcaggcgcgctctttccaagcctggtgccaggctctcggggcgcctccaacaagtacttggtggagtttcgggcgggaaagatgtccctgaaggggaccaccgtgactccggataagcggaaagggctggtgtacattcagcagacggacgactcgcttattcacttctgctggaaggacaggacgtccgggaacgtggaagacgacttgatcatcttccctgacgactgtgagttcaagcgggtgccgcagtgccccagcgggagggtctacgtgctgaagttcaaggcagggtccaagcggcttttcttctggatgcaggaacccaagacagaccaggatgaggagcattgccggaaagtcaacgagtatctgaacaaccccccgatgcctggggcactgggggccagcggaagcagcggccacgaactctctgcgctaggcggtgagggtggcctgcagagcctgctgggaaacatgagccacagccagctcatgcagctcatcggaccagccggcctcggaggactgggtaacgtgcgccacccgggctctcgggcagcttctgctgggaatgctttgaggcccggtctctgtttcctttaaacttctgctggctctgtctgcgtagtgtcggggagcctgtgtgtccgcaagctggttcccctttgggaatgcgcttgtttgcctgtggctagagctgggtaggcgagggcttctgggcccctggtgaggaccccagctgggtacttcagaggagggtggctggccgagcggtggggctggaggactggagggagctggggttcctgcgccctgggtcccctggccccacatggctgcctgcctgctgccagctcatggagtgcagacccgtgtgcttggcccttcagaaatgcttgtccctttgggtgggatctggactgaatcttctaatctaagcacatgaattgtgtaatgggatggaacagaaatgaccttgcttccagaacacagccgcaagtgtccacccgccccatgccgctcctccaggcctgtgggtccccaccgccccgcttcttcctggctttggtgttgggaattcctgctcctctggcctggggaggggccaggctctttctggtgggctagagggcatcctgagctcgcatttccttgcccctcgcaggtgggctgggggccctgactggacctggcctggccagcttactggggagcagtgggcctccagggagcagctcctcctccagctcccggagccagtcggcagcggtcaccccgtcatccaccacctcttccacccgtgccaccccagccccttctgctccagcagctgcctcagcaactagcccgagccccgcgcccagttccgggaatggagccagcacagcagccagcccgacccagcccatccagctgagcgacctccagagcatcctggccacgatgaacgtaccagccgggccagcaggcggccagcaagtggacctggccagtgtgctgacgccggagataatggctcccatcctcgccaacgcggatgtccaggagcgcctgcttccctacttgccatctggggagtcgctgccgcagaccgcggatgagatccagaataccctgacctcgccccagttccagcaggccctgggcatgttcagcgcagccttggcctcggggcagctgggccccctcatgtgccagttcggtctgcctgcagaggctgtggaggccgccaacaagggcgatgtggaagcgtttgccaaagccatgcagaacaacgccaagcccgagcagaaagagggcgacacgaaggacaagaaggacgaagaggaggacatgagcctggactgagccacgcgccgtcctccgaggaactgggcgcttgcagtgcgttgcacaccctcacctcccacccactgattattaataaagtcttttcttttacctgccaa

SEQ ID NO: 364141 - DNA, 1673 bp, Homo sapiens
cgactgccgcctttttaccctgtggcctttcccatccaggcgtccagagggttagagccggctgcgcggcttacggggctcaatcggcggcgagagcggcaggcggggcgggccgaacgcgggtttccggcggggcccggcaggcgccgaggaggaagagcgagcccggacggcgcctctcgaacgagtgtgggcgcgaggcaggatgacgacctcaggcgcgctctttccaagcctggtgccaggctctcggggcgcctccaacaagtacttggtggagtttcgggcgggaaagatgtccctgaaggggaccaccgtgactccggataagcggaaagggctggtgtacattcagcagacggacgactcgcttattcacttctgctggaaggacaggacgtccgggaacgtggaagacgacttgatcatcttccctgacgactgtgagttcaagcgggtgccgcagtgccccagcgggagggtctacgtgctgaagttcaaggcagggtccaagcggcttttcttctggatgcaggaacccaagacagaccaggatgaggagcattgccggaaagtcaacgagtatctgaacaaccccccgatgcctggggcactgggggccagcggaagcagcggccacgaactctctgcgctaggcggtgagggtggcctgcagagcctgctgggaaacatgagccacagccagctcatgcagctcatcggaccagccggcctcggaggactggaaatgcttgtccctttgggtgggatctggactgaatcttctaatctaagcacatgaattgtgtaatgggatggaacagaaatgaccttgcttccagaacacagccgcaagtgtccacccgccccatgccgctcctccaggcctgtgggctgggggccctgactggacctggcctggccagcttactggggagcagtgggcctccagggagcagctcctcctccagctcccggagccagtcggcagcggtcaccccgtcatccaccacctcttccacccgtgccaccccagccccttctgctccagcagctgcctcagcaactagcccgagccccgcgcccagttccgggaatggagccagcacagcagccagcccgacccagcccatccagctgagcgacctccagagcatcctggccacgatgaacgtaccagccgggccagcaggcggccagcaagtggacctggccagtgtgctgacgccggagataatggctcccatcctcgccaacgcggatgtccaggagcgcctgcttccctacttgccatctggggagtcgctgccgcagaccgcggatgagatccagaataccctgacctcgccccagttccagcaggccctgggcatgttcagcgcagccttggcctcggggcagctgggccccctcatgtgccagttcggtctgcctgcagaggctgtggaggccgccaacaagggcgatgtggaagcgtttgccaaagccatgcagaacaacgccaagcccgagcagaaagagggcgacacgaaggacaagaaggacgaagaggaggacatgagcctggactgagccacgcgccgtcctccgaggaactgggcgcttgcagtgcgttgcacaccctcacctcccacccactgattattaataaagtcttttcttttacctgccaa

SEQ ID NO: 364142 - DNA, 2272 bp, Homo sapiens
cgactgccgcctttttaccctgtggcctttcccatccaggcgtccagagggttagagccggctgcgcggcttacggggctcaatcggcggcgagagcggcaggcggggcgggccgaacgcgggtttccggcggggcccggcaggcgccgaggaggaagagcgagcccggacggcgcctctcgaacgagtgtgggcgcgaggcaggatgacgacctcaggcgcgctctttccaagcctggtgccaggctctcggggcgcctccaacaagtacttggtggagtttcgggcgggaaagatgtccctgaaggggaccaccgtgactccggataagcggaaagggctggtgtacattcagcagacggacgactcgcttattcacttctgctggaaggacaggacgtccgggaacgtggaagacgacttgatcatcttccctgacgactgtgagttcaagcgggtgccgcagtgccccagcgggagggtctacgtgctgaagttcaaggcagggtccaagcggcttttcttctggatgcaggaacccaagacagaccaggatgaggagcattgccggaaagtcaacgagtatctgaacaaccccccgatgcctggggcactgggggccagcggaagcagcggccacgaactctctgcgctaggcgggttcaggggcagccgagtgcggtgctcagcagaggcgcaggcagcgcggtggggcccgcgtggatctggctggggcaggcccgcctgagctgcagtgttttccaggtgagggtggcctgcagagcctgctgggaaacatgagccacagccagctcatgcagctcatcggaccagccggcctcggaggactgggtaacgtgcgccacccgggctctcgggcagcttctgctgggaatgctttgaggcccggtctctgtttcctttaaacttctgctggctctgtctgcgtagtgtcggggagcctgtgtgtccgcaagctggttcccctttgggaatgcgcttgtttgcctgtggctagagctgggtaggcgagggcttctgggcccctggtgaggaccccagctgggtacttcagaggagggtggctggccgagcggtggggctggaggactggagggagctggggttcctgcgccctgggtcccctggccccacatggctgcctgcctgctgccagctcatggagtgcagacccgtgtgcttggcccttcagaaatgcttgtccctttgggtgggatctggactgaatcttctaatctaagcacatgaattgtgtaatgggatggaacagaaatgaccttgcttccagaacacagccgcaagtgtccacccgccccatgccgctcctccaggcctgtgggtccccaccgccccgcttcttcctggctttggtgttgggaattcctgctcctctggcctggggaggggccaggctctttctggtgggctagagggcatcctgagctcgcatttccttgcccctcgcaggtgggctgggggccctgactggacctggcctggccagcttactggggagcagtgggcctccagggagcagctcctcctccagctcccggagccagtcggcagcggtcaccccgtcatccaccacctcttccacccgtgccaccccagccccttctgctccagcagctgcctcagcaactagcccgagccccgcgcccagttccgggaatggagccagcacagcagccagcccgacccagcccatccagctgagcgacctccagagcatcctggccacgatgaacgtaccagccgggccagcaggcggccagcaagtggacctggccagtgtgctgacgccggagataatggctcccatcctcgccaacgcggatgtccaggagcgcctgcttccctacttgccatctggggagtcgctgccgcagaccgcggatgagatccagaataccctgacctcgccccagttccagcaggccctgggcatgttcagcgcagccttggcctcggggcagctgggccccctcatgtgccagttcggtctgcctgcagaggctgtggaggccgccaacaagggcgatgtggaagcgtttgccaaagccatgcagaacaacgccaagcccgagcagaaagagggcgacacgaaggacaagaaggacgaagaggaggacatgagcctggactgagccacgcgccgtcctccgaggaactgggcgcttgcagtgcgttgcacaccctcacctcccacccactgattattaataaagtcttttcttttacctgccaa

SEQ ID NO: 364143 - DNA, 1739 bp, Homo sapiens
ggaaatagaagattctaaaagttagagaccctgtgagctccctgggtcactccccactcccaccttcacggggtaggacgggtctgcatcccaccgtcgcctcacttcaagtggtgccccctgtagggttcaggggcagccgagtgcggtgctcagcagaggcgcaggcagcgcggtggggcccgcgtggatctggctggggcaggcccgcctgagctgcagtgttttccaggtgagggtggcctgcagagcctgctgggaaacatgagccacagccagctcatgcagctcatcggaccagccggcctcggaggactgggtaacgtgcgccacccgggctctcgggcagcttctgctgggaatgctttgaggcccggtctctgtttcctttaaacttctgctggctctgtctgcgtagtgtcggggagcctgtgtgtccgcaagctggttcccctttgggaatgcgcttgtttgcctgtggctagagctgggtaggcgagggcttctgggcccctggtgaggaccccagctgggtacttcagaggagggtggctggccgagcggtggggctggaggactggagggagctggggttcctgcgccctgggtcccctggccccacatggctgcctgcctgctgccagctcatggagtgcagacccgtgtgcttggcccttcagaaatgcttgtccctttgggtgggatctggactgaatcttctaatctaagcacatgaattgtgtaatgggatggaacagaaatgaccttgcttccagaacacagccgcaagtgtccacccgccccatgccgctcctccaggcctgtgggtccccaccgccccgcttcttcctggctttggtgttgggaattcctgctcctctggcctggggaggggccaggctctttctggtgggctagagggcatcctgagctcgcatttccttgcccctcgcaggtgggctgggggccctgactggacctggcctggccagcttactggggagcagtgggcctccagggagcagctcctcctccagctcccggagccagtcggcagcggtcaccccgtcatccaccacctcttccacccgtgccaccccagccccttctgctccagcagctgcctcagcaactagcccgagccccgcgcccagttccgggaatggagccagcacagcagccagcccgacccagcccatccagctgagcgacctccagagcatcctggccacgatgaacgtaccagccgggccagcaggcggccagcaagtggacctggccagtgtgctgacgccggagataatggctcccatcctcgccaacgcggatgtccaggagcgcctgcttccctacttgccatctggggagtcgctgccgcagaccgcggatgagatccagaataccctgacctcgccccagttccagcaggccctgggcatgttcagcgcagccttggcctcggggcagctgggccccctcatgtgccagttcggtctgcctgcagaggctgtggaggccgccaacaagggcgatgtggaagcgtttgccaaagccatgcagaacaacgccaagcccgagcagaaagagggcgacacgaaggacaagaaggacgaagaggaggacatgagcctggactgagccacgcgccgtcctccgaggaactgggcgcttgcagtgcgttgcacaccctcacctcccacccactgattattaataaagtcttttcttttacctgccaa

SEQ ID NO: 364144 - DNA, 967 bp, Homo sapiens
cgactgccgcctttttaccctgtggcctttcccatccaggcgtccagagggttagagccggctgcgcggcttacggggctcaatcggcggcgagagcggcaggcggggcgggccgaacgcgggtttccggcggggcccggcaggcgccgaggaggaagagcgagcccggacggcgcctctcgaacgagtgtgggcgcgaggcaggatgacgacctcaggcgcgctctttccaagcctggtgccaggctctcggggcgcctccaacaagtacttggtggagtttcgggcgggaaagatgtccctgaaggggaccaccgtgactccggataagcggaaagggctggtgtacattcagcagacggacgactcgcttattcacttctgctggaaggacaggacgtccgggaacgtggaagacgaacccaagacagaccaggatgaggagcattgccggaaagtcaacgagtatctgaacaaccccccgatgcctggggcactgggggccagcggaagcagcggccacgaactctctgcgctaggcggtgagggtggcctgcagagcctgctgggaaacatgagccacagccagctcatgcagctcatcggaccagccggcctcggaggactgggtgggctgggggccctgactggacctggcctggccagcttactggggagcagtgggcctccagggagcagctcctcctccagctcccggagccagtcggcagcggtcaccccgtcatccaccacctcttccacccgtgccaccccagccccttctgctccagcagctgcctcagcaactagcccgagccccgcgcccagttccgggaatggagccagcacagcagccagcccgacccagcccatccagctgagcgacctccagagcatcctggccacgatgaacgtaccagccgggccagcaggcggccagcaaggtaacgtgtgctgtcgcctggag

SEQ ID NO: 364145 - DNA, 289 bp, Homo sapiens
cgactgccgcctttttaccctgtggcctttcccatccaggcgtccagagggttagagccggctgcgcggcttacggggctcaatcggcggcgagagcggcaggcggggcgggccgaacgcgggtttccggcggggcccggcaggcgccgaggaggaagagcgagcccggacggcgcctctcgaacgagtgtgggcgcgaggcagcgaggaactgggcgcttgcagtgcgttgcacaccctcacctcccacccactgattattaataaagtcttttcttttacctgccaa

SEQ ID NO: 364146 - DNA, 311 bp, Homo sapiens
gcagtgatgctgcggtgttctagaggatcccggcaccattgtgcgctcattcccggaactgggcgcggggctcgggctagttgctgaggcagctgctagggcgatgtggaagcgtttgccaaagccatgcagaacaacgccaagcccgagcagaaagagggcgacacgaaggacaagaaggacgaagaggaggacatgagcctggactgagccacgcgccgtcctccgaggaactgggcgcttgcagtgcgttgcacaccctcacctcccacccactgattattaataaagtcttttcttttacctgccaa

SEQ ID NO: 364147 - DNA, 1530 bp, Homo sapiens
cgactgccgcctttttaccctgtggcctttcccatccaggcgtccagagggttagagccggctgcgcggcttacggggctcaatcggcggcgagagcggcaggcggggcgggccgaacgcgggtttccggcggggcccggcaggcgccgaggaggaagagcgagcccggacggcgcctctcgaacgagtgtgggcgcgaggcaggatgacgacctcaggcgcgctctttccaagcctggtgccaggctctcggggcgcctccaacaagtacttggtggagtttcgggcgggaaagatgtccctgaaggggaccaccgtgactccggataagcggaaagggctggtgtacattcagcagacggacgactcgcttattcacttctgctggaaggacaggacgtccgggaacgtggaagacgacttgatcatcttccctgacgactgtgagttcaagcgggtgccgcagtgccccagcgggagggtctacgtgctgaagttcaaggcagggtccaagcggcttttcttctggatgcaggaacccaagacagaccaggatgaggagcattgccggaaagtcaacgagtatctgaacaaccccccgatgcctggggcactgggggccagcggaagcagcggccacgaactctctgcgctaggcggtgagggtggcctgcagagcctgctgggaaacatgagccacagccagctcatgcagctcatcggaccagccggcctcggaggactgggtgggctgggggccctgactggacctggcctggccagcttactggggagcagtgggcctccagggagcagctcctcctccagctcccggagccagtcggcagcggtcaccccgtcatccaccacctcttccacccgtgccaccccagccccttctgctccagcagctgcctcagcaactagcccgagccccgcgcccagttccgggaatggagccagcacagcagccagcccgacccagcccatccagctgagcgacctccagagcatcctggccacgatgaacgtaccagccgggccagcaggcggccagcaagtggacctggccagtgtgctgacgccggagataatggctcccatcctcgccaacgcggatgtccaggagcgcctgcttccctacttgccatctggggagtcgctgccgcagaccgcggatgagatccagaataccctgacctcgccccagttccagcaggccctgggcatgttcagcgcagccttggcctcggggcagctgggccccctcatgtgccagttcggtctgcctgcagaggctgtggaggccgccaacaagggcgatgtggaagcgtttgccaaagccatgcagaacaacgccaagcccgagcagaaagagggcgacacgaaggacaagaaggacgaagaggaggacatgagcctggactgagccacgcgccgtcctccgaggaactgggcgcttgcagtgcgttgcacaccctcacctcccacccactgattattaataaagtcttttcttttacctgccaa

SEQ ID NO: 364148 - DNA, 1589 bp, Homo sapiens
cgactgccgcctttttaccctgtggcctttcccatccaggcgtccagagggttagagccggctgcgcggcttacggggctcaatcggcggcgagagcggcaggcggggcgggccgaacgcgggtttccggcggggcccggcaggcgccgaggaggaagagcgagcccggacggcgcctctcgaacgagtgtgggcgcgaggcaggatgacgacctcaggcgcgctctttccaagcctggtgccaggctctcggggcgcctccaacaagtacttggtggagtttcgggcgggaaagatgtccctgaaggggaccaccgtgactccggataagcggaaagggctggtgtacattcagcagacggacgactcgcttattcacttctgctggaaggacaggacgtccgggaacgtggaagacgacttgatcatcttccctgacgactgtgagttcaagcgggtgccgcagtgccccagcgggagggtctacgtgctgaagttcaaggcagggtccaagcggcttttcttctggatgcaggaacccaagacagaccaggatgaggagcattgccggaaagtcaacgagtatctgaacaaccccccgatgcctggggcactgggggccagcggaagcagcggccacgaactctctgcgctaggcggtgagggtggcctgcagagcctgctgggaaacatgagccacagccagctcatgcagctcatcggaccagccggcctcggaggactgggtgggctgggggccctgactggacctggcctggccagcttactggggagcagtgggcctccagggagcagctcctcctccagctcccggagccagtcggcagcggtcaccccgtcatccaccacctcttccacccgtgccaccccagccccttctgctccagcagctgcctcagcaactagcccgagccccgcgcccagttccgggaatggagccagcacagcagccagcccgacccagcccatccagctgagcgacctccagagcatcctggccacgatgaacgtaccagccgggccagcaggcggccagcaagtggacctggccagtgtgctgacgccggagataatggctcccatcctcgccaacgcggatgtccaggagcgcctgcttccctacttgccatctggggagtcgctgccgcagaccgcggatgagatccagaataccctgacctcgccccagttccagcaggccctgggcatgttcagcgcagccttggcctcggggcagctgggccccctcatgtgccagttcggtctgcctgcagaggctgtggaggccgccaacaagggcgatgtggaagcgtttgccaaagccatgcagaacaacgccaagcccgagcagaaagagggcgacacgaaggacaagaaggacgaagaggaggacatgagcctggactgagccacgcgccgtcctccgaggaactgggcgcttgcagtgcgttgcacaccctcacctcccacccactgattattaataaagtcttttcttttacctgccaaaaaaaaaaaaatcggggacaaagcggggcggacaaggggatgaaggccctggcaaaagt

SEQ ID NO: 364149 - DNA, 1427 bp, Homo sapiens
cgactgccgcctttttaccctgtggcctttcccatccaggcgtccagagggttagagccggctgcgcggcttacggggctcaatcggcggcgagagcggcaggcggggcgggccgaacgcgggtttccggcggggcccggcaggcgccgaggaggaagagcgagcccggacggcgcctctcgaacgagtgtgggcgcgaggcaggatgacgacctcaggcgcgctctttccaagcctggtgccaggctctcggggcgcctccaacaagtacttggtggagtttcgggcgggaaagatgtccctgaaggggaccaccgtgactccggataagcggaaagggctggtgtacattcagcagacggacgactcgcttattcacttctgctggaaggacaggacgtccgggaacgtggaagacgacttgatcatcttccctgacgactgtgagttcaagcgggtgccgcagtgccccagcgggagggtctacgtgctgaagttcaaggcagggtccaagcggcttttcttctggatgcaggaacccaagacagaccaggatgaggagcattgccggaaagtcaacgagtatctgaacaaccccccgatgcctggggcactgggggccagcggaagcagcggccacgaactctctgcgctaggcggtgagggtggcctgcagagcctgctgggaaacatgagccacagccagctcatgcagctcatcggaccagccggcctcggaggactgggtgggctgggggccctgactggacctggcctggccagcttactggggagcagtgggcctccagggagcagctcctcctccagctcccggagccagtcggcagcggtcaccccgtcatccaccacctcttccacccgtgccaccccagccccttctgctccagcagctgcctcagcaactagcccgagccccgcgcccagttccgggaatggagccagcacagcagccagcccgacccagcccatccagctgagcgacctccagagcatcctggccacgatgaacgtaccagccgggccagcaggcggccagcaagtggacctggccagtgtgctgacgccggagataatggctcccatcctcgccaacgcggatgtccaggagcgcctgcttccctacttgccatctggggagtcgctgccgcagaccgcggatgagatccagaataccctgacctcgccccagttccagcagatgtggaagcgtttgccaaagccatgcagaacaacgccaagcccgagcagaaagagggcgacacgaaggacaagaaggacgaagaggaggacatgagcctggactgagccacgcgccgtcctccgaggaactgggcgcttgcagtgcgttgcacaccctcacctcccacccactgattattaataaagtcttttcttttacctgccaa

SEQ ID NO: 364150 - DNA, 1193 bp, Homo sapiens
ggacgcgtgggtcgacggacgcgtgggtccggacgcgtgggtcgacccacgcgtgcgaggacgtccgggaacgtggaagacgacttgatcatcttccctgacgactgtgagttcaagcgggtgccgcagtgccccagcgggagggtctacgtgctgaagttcaaggcagggtccaagcggcttttcttctggatgcaggaacccaagacagaccaggatgaggagcattgccggaaagtcaacgagtatctgaacaaccccccgatgcctggggcactgggggccagcggaagcagcggccacgaactctctgcgctaggcggtgagggtggcctgcagagcctgctgggaaacatgagccacagccagctcatgcagctcatcggaccagccggcctcggaggactgggtgggctgggggccctgactggacctggcctggccagcttactggggagcagtgggcctccagggagcagctcctcctccagctcccggagccagtcggcagcggtcaccccgtcatccaccacctcttccacccgtgccaccccagccccttctgctccagcagctgcctcagcaactagcccgagccccgcgcccagttccgggaatggagccagcacagcagccagcccgacccagcccatccagctgagcgacctccagagcatcctggccacgatgaacgtaccagccgggccagcaggcggccagcaagtggacctggccagtgtgctgacgccggagataatggctcccatcctcgccaacgcggatgtccaggagcgcctgcttccctacttgccatctggggagtcgctgccgcagaccgcggatgagatccagaataccctgacctcgccccagttccagcaggccctgggcatgttcagcgcagccttggcctcggggcagctgggccccctcatgtgccagttcggtctgcctgcagaggctgtggaggccgccaacaagggcgatgtggaagcgtttgccaaagccatgcagaacaacgccaagcccgagcagaaagagggcgacacgaaggacaagaaggacgaagaggaggacatgagcctggactgagccacgcgccgtcctccgaggaactgggcgcttgcagtgcgttgcacaccctcacctcccacccactgattattaataaagtcttttcttttacctgccaa

SEQ ID NO: 364151 - DNA, 1438 bp, Homo sapiens
cgactgccgcctttttaccctgtggcctttcccatccaggcgtccagagggttagagccggctgcgcggcttacggggctcaatcggcggcgagagcggcaggcggggcgggccgaacgcgggtttccggcggggcccggcaggcgccgaggaggaagagcgagcccggacggcgcctctcgaacgagtgtgggcgcgaggcaggatgacgacctcaggcgcgctctttccaagcctggtgccaggctctcggggcgcctccaacaagtacttggtggagtttcgggcgggaaagatgtccctgaaggggaccaccgtgactccggataagcggaaagggctggtgtacattcagcagacggacgactcgcttattcacttctgctggaaggacaggacgtccgggaacgtggaagacgacttgatcatcttccctgacgactgaacccaagacagaccaggatgaggagcattgccggaaagtcaacgagtatctgaacaaccccccgatgcctggggcactgggggccagcggaagcagcggccacgaactctctgcgctaggcggtgagggtggcctgcagagcctgctgggaaacatgagccacagccagctcatgcagctcatcggaccagccggcctcggaggactgggtgggctgggggccctgactggacctggcctggccagcttactggggagcagtgggcctccagggagcagctcctcctccagctcccggagccagtcggcagcggtcaccccgtcatccaccacctcttccacccgtgccaccccagccccttctgctccagcagctgcctcagcaactagcccgagccccgcgcccagttccgggaatggagccagcacagcagccagcccgacccagcccatccagctgagcgacctccagagcatcctggccacgatgaacgtaccagccgggccagcaggcggccagcaagtggacctggccagtgtgctgacgccggagataatggctcccatcctcgccaacgcggatgtccaggagcgcctgcttccctacttgccatctggggagtcgctgccgcagaccgcggatgagatccagaataccctgacctcgccccagttccagcaggccctgggcatgttcagcgcagccttggcctcggggcagctgggccccctcatgtgccagttcggtctgcctgcagaggctgtggaggccgccaacaagggcgatgtggaagcgtttgccaaagccatgcagaacaacgccaagcccgagcagaaagagggcgacacgaaggacaagaaggacgaagaggaggacatgagcctggactgagccacgcgccgtcctccgaggaactgggcgcttgcagtgcgttgcacaccctcacctcccacccactgattattaataaagtcttttcttttacctgccaa

SEQ ID NO: 364152 - DNA, 1413 bp, Homo sapiens
cgactgccgcctttttaccctgtggcctttcccatccaggcgtccagagggttagagccggctgcgcggcttacggggctcaatcggcggcgagagcggcaggcggggcgggccgaacgcgggtttccggcggggcccggcaggcgccgaggaggaagagcgagcccggacggcgcctctcgaacgagtgtgggcgcgaggcaggatgacgacctcaggcgcgctctttccaagcctggtgccaggctctcggggcgcctccaacaagtacttggtggagtttcgggcgggaaagatgtccctgaaggggaccaccgtgactccggataagcggaaagggctggtgtacattcagcagacggacgactcgcttattcacttctgctggaaggacaggacgtccgggaacgtggaagacgaacccaagacagaccaggatgaggagcattgccggaaagtcaacgagtatctgaacaaccccccgatgcctggggcactgggggccagcggaagcagcggccacgaactctctgcgctaggcggtgagggtggcctgcagagcctgctgggaaacatgagccacagccagctcatgcagctcatcggaccagccggcctcggaggactgggtgggctgggggccctgactggacctggcctggccagcttactggggagcagtgggcctccagggagcagctcctcctccagctcccggagccagtcggcagcggtcaccccgtcatccaccacctcttccacccgtgccaccccagccccttctgctccagcagctgcctcagcaactagcccgagccccgcgcccagttccgggaatggagccagcacagcagccagcccgacccagcccatccagctgagcgacctccagagcatcctggccacgatgaacgtaccagccgggccagcaggcggccagcaagtggacctggccagtgtgctgacgccggagataatggctcccatcctcgccaacgcggatgtccaggagcgcctgcttccctacttgccatctggggagtcgctgccgcagaccgcggatgagatccagaataccctgacctcgccccagttccagcaggccctgggcatgttcagcgcagccttggcctcggggcagctgggccccctcatgtgccagttcggtctgcctgcagaggctgtggaggccgccaacaagggcgatgtggaagcgtttgccaaagccatgcagaacaacgccaagcccgagcagaaagagggcgacacgaaggacaagaaggacgaagaggaggacatgagcctggactgagccacgcgccgtcctccgaggaactgggcgcttgcagtgcgttgcacaccctcacctcccacccactgattattaataaagtcttttcttttacctgccaa

SEQ ID NO: 364153 - DNA, 1636 bp, Homo sapiens
cgactgccgcctttttaccctgtggcctttcccatccaggcgtccagagggttagagccggctgcgcggcttacggggctcaatcggcggcgagagcggcaggcggggcgggccgaacgcgggtttccggcggggcccggcaggcgccgaggaggaagagcgagcccggacggcgcctctcgaacgagtgtgggcgcgaggcaggatgacgacctcaggcgcgctctttccaagcctggtgccaggctctcggggcgcctccaacaagtacttggtggagtttcgggcgggaaagatgtccctgaaggggaccaccgtgactccggataagcggaaagggctggtgtacattcagcagacggacgactcgcttattcacttctgctggaaggacaggacgtccgggaacgtggaagacgacttgatcatcttccctgacgactgtgagttcaagcgggtgccgcagtgccccagcgggagggtctacgtgctgaagttcaaggcagggtccaagcggcttttcttctggatgcaggaacccaagacagaccaggatgaggagcattgccggaaagtcaacgagtatctgaacaaccccccgatgcctggggcactgggggccagcggaagcagcggccacgaactctctgcgctaggcgggttcaggggcagccgagtgcggtgctcagcagaggcgcaggcagcgcggtggggcccgcgtggatctggctggggcaggcccgcctgagctgcagtgttttccaggtgagggtggcctgcagagcctgctgggaaacatgagccacagccagctcatgcagctcatcggaccagccggcctcggaggactgggtgggctgggggccctgactggacctggcctggccagcttactggggagcagtgggcctccagggagcagctcctcctccagctcccggagccagtcggcagcggtcaccccgtcatccaccacctcttccacccgtgccaccccagccccttctgctccagcagctgcctcagcaactagcccgagccccgcgcccagttccgggaatggagccagcacagcagccagcccgacccagcccatccagctgagcgacctccagagcatcctggccacgatgaacgtaccagccgggccagcaggcggccagcaagtggacctggccagtgtgctgacgccggagataatggctcccatcctcgccaacgcggatgtccaggagcgcctgcttccctacttgccatctggggagtcgctgccgcagaccgcggatgagatccagaataccctgacctcgccccagttccagcaggccctgggcatgttcagcgcagccttggcctcggggcagctgggccccctcatgtgccagttcggtctgcctgcagaggctgtggaggccgccaacaagggcgatgtggaagcgtttgccaaagccatgcagaacaacgccaagcccgagcagaaagagggcgacacgaaggacaagaaggacgaagaggaggacatgagcctggactgagccacgcgccgtcctccgaggaactgggcgcttgcagtgcgttgcacaccctcacctcccacccactgattattaataaagtcttttcttttacctgccaa

SEQ ID NO: 364154 - DNA, 1702 bp, Homo sapiens
cgactgccgcctttttaccctgtggcctttcccatccaggcgtccagagggttagagccggctgcgcggcttacggggctcaatcggcggcgagagcggcaggcggggcgggccgaacgcgggtttccggcggggcccggcaggcgccgaggaggaagagcgagcccggacggcgcctctcgaacgagtgtgggcgcgaggcaggatgacgacctcaggcgcgctctttccaagcctggtgccaggctctcggggcgcctccaacaagtacttggtggagtttcgggcgggaaagatgtccctgaaggggaccaccgtgactccggataagcggaaagggctggtgtacattcagcagacggacgactcgcttattcacttctgctggaaggacaggacgtccgggaacgtggaagacgacttgatcatcttccctgacgactgtgagttcaagcgggtgccgcagtgccccagcgggagggtctacgtgctgaagttcaaggcagggtccaagcggcttttcttctggatgcaggaacccaagacagaccaggatgaggagcattgccggaaagtcaacgagtatctgaacaaccccccgatgcctggggcactgggggccagcggaagcagcggccacgaactctctgcgctaggcggtgagggtggcctgcagagcctgctgggaaacatgagccacagccagctcatgcagctcatcggaccagccggcctcggaggactgggtaacgtgcgccacccgggctctcgggcagcttctgctgggaatgctttgaggcccggtctctgtttcctttaaacttctgctggctctgtctgcgtagtgtcggggagcctgtgtgtccgcaagctggttcccctttgggaatgcgcttgtttgcctgtggctagagctgggtgggctgggggccctgactggacctggcctggccagcttactggggagcagtgggcctccagggagcagctcctcctccagctcccggagccagtcggcagcggtcaccccgtcatccaccacctcttccacccgtgccaccccagccccttctgctccagcagctgcctcagcaactagcccgagccccgcgcccagttccgggaatggagccagcacagcagccagcccgacccagcccatccagctgagcgacctccagagcatcctggccacgatgaacgtaccagccgggccagcaggcggccagcaagtggacctggccagtgtgctgacgccggagataatggctcccatcctcgccaacgcggatgtccaggagcgcctgcttccctacttgccatctggggagtcgctgccgcagaccgcggatgagatccagaataccctgacctcgccccagttccagcaggccctgggcatgttcagcgcagccttggcctcggggcagctgggccccctcatgtgccagttcggtctgcctgcagaggctgtggaggccgccaacaagggcgatgtggaagcgtttgccaaagccatgcagaacaacgccaagcccgagcagaaagagggcgacacgaaggacaagaaggacgaagaggaggacatgagcctggactgagccacgcgccgtcctccgaggaactgggcgcttgcagtgcgttgcacaccctcacctcccacccactgattattaataaagtcttttcttttacctgccaa

SEQ ID NO: 364155 - DNA, 1103 bp, Homo sapiens
ggaaatagaagattctaaaagttagagaccctgtgagctccctgggtcactccccactcccaccttcacggggtaggacgggtctgcatcccaccgtcgcctcacttcaagtggtgccccctgtagggttcaggggcagccgagtgcggtgctcagcagaggcgcaggcagcgcggtggggcccgcgtggatctggctggggcaggcccgcctgagctgcagtgttttccaggtgagggtggcctgcagagcctgctgggaaacatgagccacagccagctcatgcagctcatcggaccagccggcctcggaggactgggtgggctgggggccctgactggacctggcctggccagcttactggggagcagtgggcctccagggagcagctcctcctccagctcccggagccagtcggcagcggtcaccccgtcatccaccacctcttccacccgtgccaccccagccccttctgctccagcagctgcctcagcaactagcccgagccccgcgcccagttccgggaatggagccagcacagcagccagcccgacccagcccatccagctgagcgacctccagagcatcctggccacgatgaacgtaccagccgggccagcaggcggccagcaagtggacctggccagtgtgctgacgccggagataatggctcccatcctcgccaacgcggatgtccaggagcgcctgcttccctacttgccatctggggagtcgctgccgcagaccgcggatgagatccagaataccctgacctcgccccagttccagcaggccctgggcatgttcagcgcagccttggcctcggggcagctgggccccctcatgtgccagttcggtctgcctgcagaggctgtggaggccgccaacaagggcgatgtggaagcgtttgccaaagccatgcagaacaacgccaagcccgagcagaaagagggcgacacgaaggacaagaaggacgaagaggaggacatgagcctggactgagccacgcgccgtcctccgaggaactgggcgcttgcagtgcgttgcacaccctcacctcccacccactgattattaataaagtcttttcttttacctgccaa

SEQ ID NO: 364156 - DNA, 1022 bp, Homo sapiens
cgactgccgcctttttaccctgtggcctttcccatccaggcgtccagagggttagagccggctgcgcggcttacggggctcaatcggcggcgagagcggcaggcggggcgggccgaacgcgggtttccggcggggcccggcaggcgccgaggaggaagagcgagcccggacggcgcctctcgaacgagtgtgggcgcgaggcaggatgacgacctcaggcgcgctctttccaagcctggtgccaggctctcggggcgcctccaacaagtacttggtggagtttcgggcgggaaagatgtccctgaaggggaccaccgtgactccggataagcggaaagggctggtgtacattcagcagacggacgactcgcttattcacttctgctggaaggacaggacgtccgggaacgtggaagacgacttgatcatcttccctgacgactgtgagttcaagcgggtgccgcagtgccccagcgggagggtctacgtgctgaagttcaaggcagggtccaagcggcttttcttctggatgcaggaacccaagacagaccaggatgaggagcattgccggaaagtcaacgagtatctgaacaaccccccgatgcctggggcactgggggccagcggaagcagcggccacgaactctctgcgctaggcggtgagggtggcctgcagagcctgctgggaaacatgagccacagccagctcatgcagctcatcggaccagccggcctcggaggactgggtgggctgggggccctgactggacctggcctggccagcttactggggagcagtgggcctccagggagcagctcctcctccagctcccggagccagtcggcagcggtcaccccgtcatccaccacctcttccacccgtgccaccccagccccttctgctccagcagctgcctcagcaactagcccgagcccccgaggaactgggcgcttgcagtgcgttgcacaccctcacctcccacccactgattattaataaagtcttttcttttacctgccaa

SEQ ID NO: 364157 - DNA, 807 bp, Homo sapiens
cgactgccgcctttttaccctgtggcctttcccatccaggcgtccagagggttagagccggctgcgcggcttacggggctcaatcggcggcgagagcggcaggcggggcgggccgaacgcgggtttccggcggggcccggcaggcgccgaggaggaagagcgagcccggacggcgcctctcgaacgagtgtgggcgcgaggcaggatgacgacctcaggcgcgctctttccaagcctggtgccaggctctcggggcgcctccaacaagtacttggtggagtttcgggcgggaaagatgtccctgaaggggaccaccgtgactccggataagcggaaagggctggtgtacattcagcagacggacgactcgcttattcacttctgctggaaggacaggacgtccgggaacgtggaagacgacttgatcatcttccctgacgactgtgagttcaagcgggtgccgcagtgccccagcgggagggtctacgtgctgaagttcaaggcagggtccaagcggcttttcttctggatgcaggaacccaagacagaccaggatgaggagcattgccggaaagtcaacgagtatctgaacaaccccccgatgcctggggcactgggggccagcggaagcagcgccaagcccgagcagaaagagggcgacacgaaggacaagaaggacgaagaggaggacatgagcctggactgagccacgcgccgtcctccgaggaactgggcgcttgcagtgcgttgcacaccctcacctcccacccactgattattaataaagtcttttcttttacctgccaa

SEQ ID NO: 364158 - DNA, 296 bp, Homo sapiens
gatgacgacctcaggcgcgctctttccaagcctggtgccaggctctcggggcgcctccaacaagtacttggtggagtttcgggcgggaaagatgtccctgaaggggaccaccgtgactccggataagcggaaagggctggtgtacattcagcagacggacgactcgcttattcacttctgctggaaggacaggacgtccgggaacgtggaagacgtgagtgtccctgagccgcagcagcaggacaggcgacttctcgggccctcggagtcctcgctttggagttcgcggtgggggc

SEQ ID NO: 364159 - DNA, 375 bp, Homo sapiens
ccatagactggctctggccagtttacagaggctctgtgcttgagtgcctttatatccctgcttcaccttttgacttatgggcctaactgtaatgcatttaaatgcaaagtgaatatggaatgcatgtagcatgcatgtatgctcatcattcatgtgacctcttttatgattattcacagctcttcctataacctgttaaatatgtaatctttagccaacccgtgcaacataaagttcctgccccaacacttcctccttcaaagtgcctgctaacagtctttgctaaaggctaggcttcccagcctgtcagaatggccggccaccttataggctgcaaccttttataaaaaataaagtctcctttcttaatttata

SEQ ID NO: 364160 - DNA, 354 bp, Homo sapiens
tgggcaggaagggggactctgctgcccctggccttgcctgagagatcttggttgatggagctgttgtcatgggaatggagagagcccgaacaggaagagggtacagctttgtgcaggtcacatgcccactgcagccctccagcctctggtccccagagcggactttggaagctgaactgcttttgttgctggaagacttatgttataatttaccctgggtggaccagggtcgtacaaaaggttagtgtgtgtttgcagggtctgtttccaggcagggatgtcaggctgtgtgcttctaggtggggggtggatgtggatggcttctgcatgtagcgagggtgggcctggctctgg

SEQ ID NO: 364161 - DNA, 3294 bp, Homo sapiens
  misc_feature (3282)..(3283): n is a, c, g, or t
  misc_feature (3285)..(3285): n is a, c, g, or t
tgggcaggaagggggactctgctgcccctggccttgcctgagagatcttggttgatggagctgttgtcatgggaatggagagagcccgaacaggaagagggtacagctttgtgcaggtcacatgcccactgcagccctccagcctctggtccccagagcggactttggaagctgaactgcttttgttgctggaagacttatgttataatttaccctgggtggaccagggtcgtacaaaagggcaacgctccccagtccccccacccccgaccccggaatcatgcatcggactacacggatcaaaatcacagagctgaacccccacctcatgtgtgccctctgcggggggtacttcatcgacgccaccactatcgtggagtgcctgcattccttctgcaaaacctgcatcgtgcgctacctggagaccaacaaatactgccccatgtgtgacgtgcaggtccataaaacccggccgctgctgagcatcaggtctgacaaaacacttcaagacattgtctacaaattggtccctgggctttttaaagatgagatgaaacggcggcgggatttctatgcagcgtaccccctgacggaggtccccaacggctccaatgaggaccgcggcgaggtcttggagcaggagaagggggctctgagtgatgatgagattgtcagcctctccatcgaattctacgaaggtgccagggaccgggacgagaagaagggccccctggagaatggggatggggacaaagagaaaacaggggtgcgcttcctgcgatgcccagcagccatgaccgtcatgcatcttgccaagtttctccgcaacaagatggatgtgcccagcaagtacaaggtggaggttctgtacgaggacgagccactgaaggaatactacaccctcatggacatcgcctacatctacccctggcggcggaacgggcctctccccctcaagtaccgtgtccagccagcctgcaagcggctcaccctagccacggtgcccaccccctccgagggcaccaacaccagcggggcgtccgagtgtgagtcagtcagcgacaaggctcccagccctgccaccctgccagccacctcctcctccctgcccagcccagccaccccatcccatggctctcccagttcccatgggcctccagccacccaccctacctcccccactcccccttcgacagccagtggggccaccacagctgccaacgggggtagcttgaactgcctgcagacaccatcctccaccagcagggggcgcaagatgactgtcaacggcgctcccgtgccccccttaacttgaggccagggaccctctcccttcttccagccaagcctctccactccttccactttttctgggcccttttttccacctcttctactttccccagctcttcccaccttgggggtggggggcgggttttataaataaatatatatatatatgtacataggaaaaaccaaatatacatacttattttctatggaccaaccagattaatttaaatgccacaggaaacaaactttatgtgtgtgtgtatgtgtggaaaatggtgttcattttttttggggggggtcttgtgtaatttgctgtttttgggggtgcctggagatgaactggatgggccactggagtctcaataaagctctgcaccatcctcgctgtttcccaaggcaggtggtgtgttgggggccccttcagacccaaagctttaggcatgattccaactggctgcatataggagtcagttagaattgtttctttctctccccgtttctctccccatcttggctgctgtcctgcctctgaccagtggccgccccccacgttgttgaatgtccagaaattgctaagaacagtgccttttacaaatgcagtttatccctggttctgaggagcaagtgcagggtggaggtggcacctgcatcacctcctcctcttgcagtggaaactttgtgcaaagaatagatagttctgcctcttttttttttttttcctgtgtgtgtggcctttgcatcatttatcttgtggaaaagaagattcaggccctgagaggtctcagctcttggaggagggctaaggctttagcattgtgaagcgctgcacccccaccaaccttaccctcaccggggaaccctcactagcaggactggtggtggagtctcacctggggcctagagtggaagtgggggtgggttaacctcacacaagcacagatcccagactttgccagaggcaaacagccttccaattgcccctccacccccagctgaggcccggtcacctggtcaggacagagcaactgcatctaaaagcacaagaagacagaaacctgtaagctctgaccccacccccaccccttgagaggtcagcggaccacctccttagggacagaccctggcaggtcgctgcccaccgagatttcctcaagtgtgcatagatctgagaggagtcgggagtcgagactcgagattccatcatagcgtaggtgtgtggggttgggagccccctgatgggcttgtctgtgtttgcaccttgtcctgtgtctgaggtcctgtgactgtaccctcctttgccctgggacatctgtatctcttggctttgtaataaatgctgcatactttctggagcctgtagttctttggggtggagggaagaagggaagggtgcctctcatctctgggtttagcctggcttggggaccccatacagaatgaatctgaactgccctctcctgtggctggtcaggtgcccccagcccacagagaggttaaaatctggagcaggaggcagcacatgggcctcatagcagtgactgcaggactaccagtctggttgggcaggcttgtttttgccatcttccccatcagcaaacattgaaccagggcccactcccgcctgccccagactggagacttttaggttataaggaataattcttccttcatgagccagcagtgggtaccagagtctcttgggctcagcacctgtttcctttcccacagaagggggtgcctgtcagaggcctggagccaaggccacctgtggctggacagcagcagccccctcagagtggggagcccacttctgccttctgcacgcgctcactcctgtgggtgccatcgcagtacgggggcctctgagtggccttgcaggtacagagtgccaccatgcgggtctcttgggccttgaacttgagtggagataggccagtgcgttggaagaagtgggagccgtcacagaagggctgcttcttgccgctcccnntntgccgaatt

SEQ ID NO: 364162 - DNA, 3314 bp, Homo sapiens
ctctccgcctgcaggctccggagcaggtgaccggatcttcccttggcccttctcccgccggttctcggaccactccctctggaaggaagtctctccgcccttcctcttcctccccgcccccgtcccgctggtgtggctgcaggctcgagctggggtcactcggcggccagtgtgcgcaggtctcctggtcgccggccagagggcgaaagcattcacccgaggcccccagcttcgcggctgccttggctgcgagcaacgagggaagaggaggcaggcgctccaaaactgggcgaagattcctatcctaatttctaactcgagcctcccaccgtcagtgcgcttaatggcgctgctggccggatggataatcgagctctctggagggacagacgcggccgccatccctaataaatcgtgaataacgaatgagggaatcgaccatcctcatgaggcacgggcgtccagtaacgcagtatcgattcgcttccccggcgtcggcctcaccgctactcccggcgtttccaagcctccctcctcgttctctccctcctgccggagccactgcggaccggagccccagcgccaggtggagccggggcgccagtgggagtcgggcccagccgtcttggcgctcgcccgactctcccgcccgcgcgcccagggaggcgcacaggcagcgcgcagcgcagggcgcgagcgaaaaatgcgggaatcagtgccaggcaggagaaaaggcgcgggcccaccttacagcccggcgcctcgtttcctagtccagtgtggccgctcgccttcggccggattattgtgtcccagacccggagccgaaacgggctccccgtcttaacgatttggcgtctccctcgaccaccacctctttgtgcagcagcccccgggcagaccctgttccgagggcaacgctccccagtccccccacccccgaccccggaatcatgcatcggactacacggatcaaaatcacagagctgaacccccacctcatgtgtgccctctgcggggggtacttcatcgacgccaccactatcgtggagtgcctgcattccttctgcaaaacctgcatcgtgcgctacctggagaccaacaaatactgccccatgtgtgacgtgcaggtccataaaacccggccgctgctgagcatcaggtctgacaaaacacttcaagacattgtctacaaattggtccctgggctttttaaagatgagatgaaacggcggcgggatttctatgcagcgtaccccctgacggaggtccccaacggctccaatgaggaccgcggcgaggtcttggagcaggagaagggggctctgagtgatgatgagattgtcagcctctccatcgaattctacgaaggtgccagggaccgggacgagaagaagggccccctggagaatggggatggggacaaagagaaaacaggggtgcgcttcctgcgatgcccagcagccatgaccgtcatgcatcttgccaagtttctccgcaacaagatggatgtgcccagcaagtacaaggtggaggttctgtacgaggacgagccactgaaggaatactacaccctcatggacatcgcctacatctacccctggcggcggaacgggcctctccccctcaagtaccgtgtccagccagcctgcaagcggctcaccctagccacggtgcccaccccctccgagggcaccaacaccagcggggcgtccgagtgtgagtcagtcagcgacaaggctcccagccctgccaccctgccagccacctcctcctccctgcccagcccagccaccccatcccatggctctcccagttcccatgggcctccagccacccaccctacctcccccactcccccttcgacagccagtggggccaccacagctgccaacgggggtagcttgaactgcctgcagacaccatcctccaccagcagggggcgcaagatgactgtcaacggcgctcccgtgccccccttaacttgaggccagggaccctctcccttcttccagccaagcctctccactccttccactttttctgggcccttttttccacctcttctactttccccagctcttcccaccttgggggtggggggcgggttttataaataaatatatatatatatgtacataggaaaaaccaaatatacatacttattttctatggaccaaccagattaatttaaatgccacaggaaacaaactttatgtgtgtgtgtatgtgtggaaaatggtgttcattttttttggggggggtcttgtgtaatttgctgtttttgggggtgcctggagatgaactggatgggccactggagtctcaataaagctctgcaccatcctcgctgtttcccaaggcaggtggtgtgttgggggccccttcagacccaaagctttaggcatgattccaactggctgcatataggagtcagttagaattgtttctttctctccccgtttctctccccatcttggctgctgtcctgcctctgaccagtggccgccccccacgttgttgaatgtccagaaattgctaagaacagtgccttttacaaatgcagtttatccctggttctgaggagcaagtgcagggtggaggtggcacctgcatcacctcctcctcttgcagtggaaactttgtgcaaagaatagatagttctgcctcttttttttttttttcctgtgtgtgtggcctttgcatcatttatcttgtggaaaagaagattcaggccctgagaggtctcagctcttggaggagggctaaggctttagcattgtgaagcgctgcacccccaccaaccttaccctcaccggggaaccctcactagcaggactggtggtggagtctcacctggggcctagagtggaagtgggggtgggttaacctcacacaagcacagatcccagactttgccagaggcaaacagccttccaattgcccctccacccccagctgaggcccggtcacctggtcaggacagagcaactgcatctaaaagcacaagaagacagaaacctgtaagctctgaccccacccccaccccttgagaggtcagcggaccacctccttagggacagaccctggcaggtcgctgcccaccgagatttcctcaagtgtgcatagatctgagaggagtcgggagtcgagactcgagattccatcatagcgtaggtgtgtggggttgggagccccctgatgggcttgtctgtgtttgcaccttgtcctgtgtctgaggtcctgtgactgtaccctcctttgccctgggacatctgtatctcttggctttgtaataaatgctgcatactttc

SEQ ID NO: 364163 - DNA, 2558 bp, Homo sapiens
cccctcccctcccttccctccctccctcccatccccccctccccgagacccaccggaccccgaacccagcgaaacgggctccccgtcttaacgatttggcgtctccctcgaccaccacctctttgtgcagcagcccccgggcagaccctgttccgagggcaacgctccccagtccccccacccccgaccccggaatcatgcatcggactacacggatcaaaatcacagagctgaacccccacctcatgtgtgccctctgcggggggtacttcatcgacgccaccactatcgtggagtgcctgcattccttctgcaaaacctgcatcgtgcgctacctggagaccaacaaatactgccccatgtgtgacgtgcaggtccataaaacccggccgctgctgagcatcaggtctgacaaaacacttcaagacattgtctacaaattggtccctgggctttttaaagatgagatgaaacggcggcgggatttctatgcagcgtaccccctgacggaggtccccaacggctccaatgaggaccgcggcgaggtcttggagcaggagaagggggctctgagtgatgatgagattgtcagcctctccatcgaattctacgaaggtgccagggaccgggacgagaagaagggccccctggagaatggggatggggacaaagagaaaacaggggtgcgcttcctgcgatgcccagcagccatgaccgtcatgcatcttgccaagtttctccgcaacaagatggatgtgcccagcaagtacaaggtggaggttctgtacgaggacgagccactgaaggaatactacaccctcatggacatcgcctacatctacccctggcggcggaacgggcctctccccctcaagtaccgtgtccagccagcctgcaagcggctcaccctagccacggtgcccaccccctccgagggcaccaacaccagcggggcgtccgagtgtgagtcagtcagcgacaaggctcccagccctgccaccctgccagccacctcctcctccctgcccagcccagccaccccatcccatggctctcccagttcccatgggcctccagccacccaccctacctcccccactcccccttcgacagccagtggggccaccacagctgccaacgggggtagcttgaactgcctgcagacaccatcctccaccagcagggggcgcaagatgactgtcaacggcgctcccgtgccccccttaacttgaggccagggaccctctcccttcttccagccaagcctctccactccttccactttttctgggcccttttttccacctcttctactttccccagctcttcccaccttgggggtggggggcgggttttataaataaatatatatatatatgtacataggaaaaaccaaatatacatacttattttctatggaccaaccagattaatttaaatgccacaggaaacaaactttatgtgtgtgtgtatgtgtggaaaatggtgttcattttttttggggggggtcttgtgtaatttgctgtttttgggggtgcctggagatgaactggatgggccactggagtctcaataaagctctgcaccatcctcgctgtttcccaaggcaggtggtgtgttgggggccccttcagacccaaagctttaggcatgattccaactggctgcatataggagtcagttagaattgtttctttctctccccgtttctctccccatcttggctgctgtcctgcctctgaccagtggccgccccccacgttgttgaatgtccagaaattgctaagaacagtgccttttacaaatgcagtttatccctggttctgaggagcaagtgcagggtggaggtggcacctgcatcacctcctcctcttgcagtggaaactttgtgcaaagaatagatagttctgcctcttttttttttttttcctgtgtgtgtggcctttgcatcatttatcttgtggaaaagaagattcaggccctgagaggtctcagctcttggaggagggctaaggctttagcattgtgaagcgctgcacccccaccaaccttaccctcaccggggaaccctcactagcaggactggtggtggagtctcacctggggcctagagtggaagtgggggtgggttaacctcacacaagcacagatcccagactttgccagaggcaaacagccttccaattgcccctccacccccagctgaggcccggtcacctggtcaggacagagcaactgcatctaaaagcacaagaagacagaaacctgtaagctctgaccccacccccaccccttgagaggtcagcggaccacctccttagggacagaccctggcaggtcgctgcccaccgagatttcctcaagtgtgcatagatctgagaggagtcgggagtcgagactcgagattccatcatagcgtaggtgtgtggggttgggagccccctgatgggcttgtctgtgtttgcaccttgtcctgtgtctgaggtcctgtgactgtaccctcctttgccctgggacatctgtatctcttggctttgtaataaatgctgcatactttc

SEQ ID NO: 364164 - DNA, 2435 bp, Homo sapiens
actctgggtttctgattccacttccgtttcccagggcaacgctccccagtccccccacccccgaccccggaatcatgcatcggactacacggatcaaaatcacagagctgaacccccacctcatgtgtgccctctgcggggggtacttcatcgacgccaccactatcgtggagtgcctgcattccttctgcaaaacctgcatcgtgcgctacctggagaccaacaaatactgccccatgtgtgacgtgcaggtccataaaacccggccgctgctgagcatcaggtctgacaaaacacttcaagacattgtctacaaattggtccctgggctttttaaagatgagatgaaacggcggcgggatttctatgcagcgtaccccctgacggaggtccccaacggctccaatgaggaccgcggcgaggtcttggagcaggagaagggggctctgagtgatgatgagattgtcagcctctccatcgaattctacgaaggtgccagggaccgggacgagaagaagggccccctggagaatggggatggggacaaagagaaaacaggggtgcgcttcctgcgatgcccagcagccatgaccgtcatgcatcttgccaagtttctccgcaacaagatggatgtgcccagcaagtacaaggtggaggttctgtacgaggacgagccactgaaggaatactacaccctcatggacatcgcctacatctacccctggcggcggaacgggcctctccccctcaagtaccgtgtccagccagcctgcaagcggctcaccctagccacggtgcccaccccctccgagggcaccaacaccagcggggcgtccgagtgtgagtcagtcagcgacaaggctcccagccctgccaccctgccagccacctcctcctccctgcccagcccagccaccccatcccatggctctcccagttcccatgggcctccagccacccaccctacctcccccactcccccttcgacagccagtggggccaccacagctgccaacgggggtagcttgaactgcctgcagacaccatcctccaccagcagggggcgcaagatgactgtcaacggcgctcccgtgccccccttaacttgaggccagggaccctctcccttcttccagccaagcctctccactccttccactttttctgggcccttttttccacctcttctactttccccagctcttcccaccttgggggtggggggcgggttttataaataaatatatatatatatgtacataggaaaaaccaaatatacatacttattttctatggaccaaccagattaatttaaatgccacaggaaacaaactttatgtgtgtgtgtatgtgtggaaaatggtgttcattttttttggggggggtcttgtgtaatttgctgtttttgggggtgcctggagatgaactggatgggccactggagtctcaataaagctctgcaccatcctcgctgtttcccaaggcaggtggtgtgttgggggccccttcagacccaaagctttaggcatgattccaactggctgcatataggagtcagttagaattgtttctttctctccccgtttctctccccatcttggctgctgtcctgcctctgaccagtggccgccccccacgttgttgaatgtccagaaattgctaagaacagtgccttttacaaatgcagtttatccctggttctgaggagcaagtgcagggtggaggtggcacctgcatcacctcctcctcttgcagtggaaactttgtgcaaagaatagatagttctgcctcttttttttttttttcctgtgtgtgtggcctttgcatcatttatcttgtggaaaagaagattcaggccctgagaggtctcagctcttggaggagggctaaggctttagcattgtgaagcgctgcacccccaccaaccttaccctcaccggggaaccctcactagcaggactggtggtggagtctcacctggggcctagagtggaagtgggggtgggttaacctcacacaagcacagatcccagactttgccagaggcaaacagccttccaattgcccctccacccccagctgaggcccggtcacctggtcaggacagagcaactgcatctaaaagcacaagaagacagaaacctgtaagctctgaccccacccccaccccttgagaggtcagcggaccacctccttagggacagaccctggcaggtcgctgcccaccgagatttcctcaagtgtgcatagatctgagaggagtcgggagtcgagactcgagattccatcatagcgtaggtgtgtggggttgggagccccctgatgggcttgtctgtgtttgcaccttgtcctgtgtctgaggtcctgtgactgtaccctcctttgccctgggacatctgtatctcttggctttgtaataaatgctgcatactttc

SEQ ID NO: 364165 - DNA, 3160 bp, Homo sapiens
ctctccgcctgcaggctccggagcaggtgaccggatcttcccttggcccttctcccgccggttctcggaccactccctctggaaggaagtctctccgcccttcctcttcctccccgcccccgtcccgctggtgtggctgcaggctcgagctggggtcactcggcggccagtgtgcgcaggtctcctggtcgccggccagagggcgaaagcattcacccgaggcccccagcttcgcggctgccttggctgcgagcaacgagggaagaggaggcaggcgctccaaaactgggcgaagattcctatcctaatttctaactcgagcctcccaccgtcagtgcgcttaatggcgctgctggccggatggataatcgagctctctggagggacagacgcggccgccatccctaataaatcgtgaataacgaatgagggaatcgaccatcctcatgaggcacgggcgtccagtaacgcagtatcgattcgcttccccggcgtcggcctcaccgctactcccggcgtttccaagcctccctcctcgttctctccctcctgccggagccactgcggaccggagccccagcgccaggtggagccggggcgccagtgggagtcgggcccagccgtcttggcgctcgcccgactctcccgcccgcgcgcccagggaggcgcacaggcagcgcgcagcgcagggcgcgagcgaaaaatgcgggaatcagtgccaggcaggagaaaaggcgcgggcccaccttacagcccggcgcctcgtttcctagtccagtgtggccgctcgccttcggccggattattgtgtcccagacccggagccgaaacgggctccccgtcttaacgatttggcgtctccctcgaccaccacctctttgtgcagcagcccccgggcagaccctgttccgagggcaacgctccccagtccccccacccccgaccccggaatcatgcatcggactacacggatcaaaatcacagagctgaacccccacctcatgtgtgccctctgcggggggtacttcatcgacgccaccactatcgtggagtgcctgcattccttctgcaaaacctgcatcgtgcgctacctggagaccaacaaatactgccccatgtgtgacgtgcaggtccataaaacccggccgctgctgagcatcaggtctgacaaaacacttcaagacattgtctacaaattggtccctgggctttttaaagatgagatgaaacggcggcgggatttctatgcagcgtaccccctgacggaggtccccaacggctccaatgaggaccgcggcgaggtcttggagcaggagaagggggctctgagtgatgatgagattgtcagcctctccatcgaattctacgaaggtgccagggaccgggacgagaagaagggccccctggagaatggggatggggacaaagagaaaacaggggtgcgcttcctgcgatgcccagcagccatgaccgtcatgcatcttgccaagtttctccgcaacaagatggatgtgcccagcaagtacaaggtggaggttctgtacgaggacgagccactgaaggaatactacaccctcatggacatcgcctacatctacccctggcggcggaacgggcctctccccctcaagtaccgtgtccagccagcctgcaagcggctcaccctagccacggtgcccaccccctccgagggcaccaacaccagcggggcgtccgagttggggccaccacagctgccaacgggggtagcttgaactgcctgcagacaccatcctccaccagcagggggcgcaagatgactgtcaacggcgctcccgtgccccccttaacttgaggccagggaccctctcccttcttccagccaagcctctccactccttccactttttctgggcccttttttccacctcttctactttccccagctcttcccaccttgggggtggggggcgggttttataaataaatatatatatatatgtacataggaaaaaccaaatatacatacttattttctatggaccaaccagattaatttaaatgccacaggaaacaaactttatgtgtgtgtgtatgtgtggaaaatggtgttcattttttttggggggggtcttgtgtaatttgctgtttttgggggtgcctggagatgaactggatgggccactggagtctcaataaagctctgcaccatcctcgctgtttcccaaggcaggtggtgtgttgggggccccttcagacccaaagctttaggcatgattccaactggctgcatataggagtcagttagaattgtttctttctctccccgtttctctccccatcttggctgctgtcctgcctctgaccagtggccgccccccacgttgttgaatgtccagaaattgctaagaacagtgccttttacaaatgcagtttatccctggttctgaggagcaagtgcagggtggaggtggcacctgcatcacctcctcctcttgcagtggaaactttgtgcaaagaatagatagttctgcctcttttttttttttttcctgtgtgtgtggcctttgcatcatttatcttgtggaaaagaagattcaggccctgagaggtctcagctcttggaggagggctaaggctttagcattgtgaagcgctgcacccccaccaaccttaccctcaccggggaaccctcactagcaggactggtggtggagtctcacctggggcctagagtggaagtgggggtgggttaacctcacacaagcacagatcccagactttgccagaggcaaacagccttccaattgcccctccacccccagctgaggcccggtcacctggtcaggacagagcaactgcatctaaaagcacaagaagacagaaacctgtaagctctgaccccacccccaccccttgagaggtcagcggaccacctccttagggacagaccctggcaggtcgctgcccaccgagatttcctcaagtgtgcatagatctgagaggagtcgggagtcgagactcgagattccatcatagcgtaggtgtgtggggttgggagccccctgatgggcttgtctgtgtttgcaccttgtcctgtgtctgaggtcctgtgactgtaccctcctttgccctgggacatctgtatctcttggctttgtaataaatgctgcatactttc

SEQ ID NO: 364166 - DNA, 2948 bp, Homo sapiens
ctctccgcctgcaggctccggagcaggtgaccggatcttcccttggcccttctcccgccggttctcggaccactccctctggaaggaagtctctccgcccttcctcttcctccccgcccccgtcccgctggtgtggctgcaggctcgagctggggtcactcggcggccagtgtgcgcaggtctcctggtcgccggccagagggcgaaagcattcacccgaggcccccagcttcgcggctgccttggctgcgagcaacgagggaagaggaggcaggcgctccaaaactgggcgaagattcctatcctaatttctaactcgagcctcccaccgtcagtgcgcttaatggcgctgctggccggatggataatcgagctctctggagggacagacgcggccgccatccctaataaatcgtgaataacgaatgagggaatcgaccatcctcatgaggcacgggcgtccagtaacgcagtatcgattcgcttccccggcgtcggcctcaccgctactcccggcgtttccaagcctccctcctcgttctctccctcctgccggagccactgcggaccggagccccagcgccaggtggagccggggcgccagtgggagtcgggcccagccgtcttggcgctcgcccgactctcccgcccgcgcgcccagggaggcgcacaggcagcgcgcagcgcagggcgcgagcgaaaaatgcgggaatcagtgccaggcaggagaaaaggcgcgggcccaccttacagcccggcgcctcgtttcctagtccagtgtggccgctcgccttcggccggattattgtgtcccagacccggagccgaaacgggctccccgtcttaacgatttggcgtctccctcgaccaccacctctttgtgcagcagcccccgggcagaccctgttccgagggcaacgctccccagtccccccacccccgaccccggaatcatgcatcggactacacggatcaaaatcacagagctgaacccccacctcatgtgtgccctctgcggggggtacttcatcgacgccaccactatcgtggagtgcctgcattccttctgcaaaacctgcatcgtgcgctacctggagaccaacaaatactgccccatgtgtgacgtgcaggtccataaaacccggccgctgctgagcatcaggtctgacaaaacacttcaagacattgtctacaaattggtccctgggctttttaaagatgagatgaaacggcggcgggatttctatgcagcgtaccccctgacggaggtccccaacggctccaatgaggaccgcggcgaggtcttggagcaggagaagggggctctgagtgatgatgagattgtcagcctctccatcgaattctacgaaggtgccagggaccgggacgagaagaagggccccctggagaatggggatggggacaaagagaaaacaggggtgcgcttcctgcgatgcccagcagccatgaccgtcatgcatcttgccaagtttctccgcaacaagatggatgtgcccagcaagtacaaggtggaggttctgtacgaggacgagccactgaaggaatactacaccctcatggacatcgcctacatctacccctggcggcggaacgggcctctccccctcaagtaccgtgtccagccagcctgcaacctctccactccttccactttttctgggcccttttttccacctcttctactttccccagctcttcccaccttgggggtggggggcgggttttataaataaatatatatatatatgtacataggaaaaaccaaatatacatacttattttctatggaccaaccagattaatttaaatgccacaggaaacaaactttatgtgtgtgtgtatgtgtggaaaatggtgttcattttttttggggggggtcttgtgtaatttgctgtttttgggggtgcctggagatgaactggatgggccactggagtctcaataaagctctgcaccatcctcgctgtttcccaaggcaggtggtgtgttgggggccccttcagacccaaagctttaggcatgattccaactggctgcatataggagtcagttagaattgtttctttctctccccgtttctctccccatcttggctgctgtcctgcctctgaccagtggccgccccccacgttgttgaatgtccagaaattgctaagaacagtgccttttacaaatgcagtttatccctggttctgaggagcaagtgcagggtggaggtggcacctgcatcacctcctcctcttgcagtggaaactttgtgcaaagaatagatagttctgcctcttttttttttttttcctgtgtgtgtggcctttgcatcatttatcttgtggaaaagaagattcaggccctgagaggtctcagctcttggaggagggctaaggctttagcattgtgaagcgctgcacccccaccaaccttaccctcaccggggaaccctcactagcaggactggtggtggagtctcacctggggcctagagtggaagtgggggtgggttaacctcacacaagcacagatcccagactttgccagaggcaaacagccttccaattgcccctccacccccagctgaggcccggtcacctggtcaggacagagcaactgcatctaaaagcacaagaagacagaaacctgtaagctctgaccccacccccaccccttgagaggtcagcggaccacctccttagggacagaccctggcaggtcgctgcccaccgagatttcctcaagtgtgcatagatctgagaggagtcgggagtcgagactcgagattccatcatagcgtaggtgtgtggggttgggagccccctgatgggcttgtctgtgtttgcaccttgtcctgtgtctgaggtcctgtgactgtaccctcctttgccctgggacatctgtatctcttggctttgtaataaatgctgcatactttc

SEQ ID NO: 364167 - DNA, 2176 bp, Homo sapiens
ctctccgcctgcaggctccggagcaggtgaccggatcttcccttggcccttctcccgccggttctcggaccactccctctggaaggaagtctctccgcccttcctcttcctccccgcccccgtcccgctggtgtggctgcaggctcgagctggggtcactcggcggccagtgtgcgcaggtctcctggtcgccggccagagggcgaaagcattcacccgaggcccccagcttcgcggctgccttggctgcgagcaacgagggaagaggaggcaggcgctccaaaactgggcgaagattcctatcctaatttctaactcgagcctcccaccgtcagtgcgcttaatggcgctgctggccggatggataatcgagctctctggagggacagacgcggccgccatccctaataaatcgtgaataacgaatgagggaatcgaccatcctcatgaggcacgggcgtccagtaacgcagtatcgattcgcttccccggcgtcggcctcaccgctactcccggcgtttccaagcctccctcctcgttctctccctcctgccggagccactgcggaccggagccccagcgccaggtggagccggggcgccagtgggagtcgggcccagccgtcttggcgctcgcccgactctcccgcccgcgcgcccagggaggcgcacaggcagcgcgcagcgcagggcgcgagcgaaaaatgcgggaatcagtgccaggcaggagaaaaggcgcgggcccaccttacagcccggcgcctcgtttcctagtccagtgtggccgctcgccttcggccggattattgtgtcccagacccggagccgaaacgggctccccgtcttaacgatttggcgtctccctcgaccaccacctctttgtgcagcagcccccgggcagaccctgttccgagggcaacgctccccagtccccccacccccgaccccggaatcatgcatcggactacacggatcaaaatcacagagctgaacccccacctcatgtgtgccctctgcggggggtacttcatcgacgccaccactatcgtggagtgcctgcattccttctgcaaaacctgcatcgtgcgctacctggagaccaacaaatactgccccatgtgtgacgtgcaggtccataaaacccggccgctgctgagcatcaggtctgacaaaacacttcaagacattgtctacaaattggtccctgggctttttaaagatgagatgaaacggcggcgggatttctatgcagcgtaccccctgacggaggtccccaacggctccaatgaggaccgcggcgaggtcttggagcaggagaagggggctctgagtgatgatgagattgtcagcctctccatcgaattctacgaaggtgccagggaccgggacgagaagaagggccccctggagaatggggatggggacaaagagaaaacaggggtgcgcttcctgcgatgcccagcagccatgaccgtcatgcatcttgccaagtttctccgcaacaagatggatgtgcccagcaagtacaaggtggaggttctgtacgaggacgagccactgaaggaatactacaccctcatggacatcgcctacatctacccctggcggcggaacgggcctctccccctcaagtaccgtgtccagccagcctgcaagcggctcaccctagccacggtgcccaccccctccgagggcaccaacaccagcggggcgtccgagtgtgagtcagtcagcgacaaggctcccagccctgccaccctgccagccacctcctcctccctgcccagcccagccaccccatcccatggctctcccagttcccatgggcctccagccacccaccctacctcccccactcccccttcgacagccagtggggccaccacagctgccaacgggggtagcttgaactgcctgcagacaccatcctccaccagcagggggcgcaagatgactgtcaacggcgctcccgtgccccccttaacttgaggccagggaccctctcccttcttccagccaagcctctccactccttccactttttctgggcccttttttccacctcttctactttccccagctcttcccaccttgggggtggggggcgggttttataaataaatatatatatatatgtacataggaaaaaccaaatatacatacttattttctatgga

SEQ ID NO: 364168 - DNA, 1710 bp, Homo sapiens
ctctccgcctgcaggctccggagcaggtgaccggatcttcccttggcccttctcccgccggttctcggaccactccctctggaaggaagtctctccgcccttcctcttcctccccgcccccgtcccgctggtgtggctgcaggctcgagctggggtcactcggcggccagtgtgcgcaggtctcctggtcgccggccagagggcgaaagcattcacccgaggcccccagcttcgcggctgccttggctgcgagcaacgagggaagaggaggcaggcgctccaaaactgggcgaagattcctatcctaatttctaactcgagcctcccaccgtcagtgcgcttaatggcgctgctggccggatggataatcgagctctctggagggacagacgcggccgccatccctaataaatcgtgaataacgaatgagggaatcgaccatcctcatgaggcacgggcgtccagtaacgcagtatcgattcgcttccccggcgtcggcctcaccgctactcccggcgtttccaagcctccctcctcgttctctccctcctgccggagccactgcggaccggagccccagcgccaggtggagccggggcgccagtgggagtcgggcccagccgtcttggcgctcgcccgactctcccgcccgcgcgcccagggaggcgcacaggcagcgcgcagcgcagggcgcgagcgaaaaatgcgggaatcagtgccaggcaggagaaaaggcgcgggcccaccttacagcccggcgcctcgtttcctagtccagtgtggccgctcgccttcggccggattattgtgtcccagacccggagccgaaacgggctccccgtcttaacgatttggcgtctccctcgaccaccacctctttgtgcagcagcccccgggcagaccctgttccgagggcaacgctccccagtccccccacccccgaccccggaatcatgcatcggactacacggatcaaaatcacagagctgaacccccacctcatgtgtgccctctgcggggggtacttcatcgacgccaccactatcgtggagtgcctgcattccttctgcaaaacctgcatcgtgcgctacctggagaccaacaaatactgccccatgtgtgacgtgcaggtccataaaacccggccgctgctgagcatcaggtctgacaaaacacttcaagacattgtctacaaattggtccctgggctttttaaagatgagatgaaacggcggcgggatttctatgcagcgtaccccctgacggaggtccccaacggctccaatgaggaccgcggcgaggtcttggagcaggagaagggggctctgagtgatgatgagattgtcagcctctccatcgaattctacgaaggtgccagggaccgggacgagaagaagggccccctggagaatggggatggggacaaagagaaaacaggggtgcgcttcctgcgatgcccagcagccatgaccgtcatgcatcttgccaagtttctccgcaacaagatggatgtgcccagcaagtacaaggccgttggattcttgccagaagcttcctggagataattttaactagtaccttattgaagaaaagttgtcctagctaatgaaagaatgcagctcagcatcttgaagacggggcaagccttcctcatctccccacatcccacagtttcttatacccactgaattaaactgaaaaatgaagaac

SEQ ID NO: 364169 - DNA, 483 bp, Homo sapiens
atcagcccagaagttcatttcaaggactcacatctgaaatctcagttctttcttgaaatggctgaaattttatgccctgaagacgcggacaccccttgtttgcactgtgggcttggcagcaggggggtgggactcagaggcatcttgaacacgctggcttttgtcccccactccatcggggagcttgggactcagggctgaccttctgcattgtacatgacactggcctgtctcacacaagatccagcttccctcaacagtgcacaaggacaggtaccacacgtgcagaacacacatcgccacattgggcctcggagcagggacagggtggaggaggagggatatctgagtctgagcagagggcggggaggctggtcctggagttggaagttggctctgactctcctctctctctccacacccccaagtctgcaaaacctgcatcgtgcgctacctggagaccaacaaatactgccccatgtg

SEQ ID NO: 364170 - DNA, 2641 bp, Homo sapiens
tgggcaggaagggggactctgctgcccctggccttgcctgagagatcttggttgatggagctgttgtcatgggaatggagagagcccgaacaggaagagggtacagctttgtgcaggtcacatgcccactgcagccctccagcctctggtccccagagcggactttggaagctgaactgcttttgttgctggaagacttatgttataatttaccctgggtggaccagggtcgtacaaaagggcaacgctccccagtccccccacccccgaccccggaatcatgcatcggactacacggatcaaaatcacagagctgaacccccacctcatgtgtgccctctgcggggggtacttcatcgacgccaccactatcgtggagtgcctgcattccttctgcaaaacctgcatcgtgcgctacctggagaccaacaaatactgccccatgtgtgacgtgcaggtccataaaacccggccgctgctgagcatcaggtctgacaaaacacttcaagacattgtctacaaattggtccctgggctttttaaagatgagatgaaacggcggcgggatttctatgcagcgtaccccctgacggaggtccccaacggctccaatgaggaccgcggcgaggtcttggagcaggagaagggggctctgagtgatgatgagattgtcagcctctccatcgaattctacgaaggtgccagggaccgggacgagaagaagggccccctggagaatggggatggggacaaagagaaaacaggggtgcgcttcctgcgatgcccagcagccatgaccgtcatgcatcttgccaagtttctccgcaacaagatggatgtgcccagcaagtacaaggtggaggttctgtacgaggacgagccactgaaggaatactacaccctcatggacatcgcctacatctacccctggcggcggaacgggcctctccccctcaagtaccgtgtccagccagcctgcaagcggctcaccctagccacggtgcccaccccctccgagggcaccaacaccagcggggcgtccgagtgtgagtcagtcagcgacaaggctcccagccctgccaccctgccagccacctcctcctccctgcccagcccagccaccccatcccatggctctcccagttcccatgggcctccagccacccaccctacctcccccactcccccttcgacagccagtggggccaccacagctgccaacgggggtagcttgaactgcctgcagacaccatcctccaccagcagggggcgcaagatgactgtcaacggcgctcccgtgccccccttaacttgaggccagggaccctctcccttcttccagccaagcctctccactccttccactttttctgggcccttttttccacctcttctactttccccagctcttcccaccttgggggtggggggcgggttttataaataaatatatatatatatgtacataggaaaaaccaaatatacatacttattttctatggaccaaccagattaatttaaatgccacaggaaacaaactttatgtgtgtgtgtatgtgtggaaaatggtgttcattttttttggggggggtcttgtgtaatttgctgtttttgggggtgcctggagatgaactggatgggccactggagtctcaataaagctctgcaccatcctcgctgtttcccaaggcaggtggtgtgttgggggccccttcagacccaaagctttaggcatgattccaactggctgcatataggagtcagttagaattgtttctttctctccccgtttctctccccatcttggctgctgtcctgcctctgaccagtggccgccccccacgttgttgaatgtccagaaattgctaagaacagtgccttttacaaatgcagtttatccctggttctgaggagcaagtgcagggtggaggtggcacctgcatcacctcctcctcttgcagtggaaactttgtgcaaagaatagatagttctgcctcttttttttttttttcctgtgtgtgtggcctttgcatcatttatcttgtggaaaagaagattcaggccctgagaggtctcagctcttggaggagggctaaggctttagcattgtgaagcgctgcacccccaccaaccttaccctcaccggggaaccctcactagcaggactggtggtggagtctcacctggggcctagagtggaagtgggggtgggttaacctcacacaagcacagatcccagactttgccagaggcaaacagccttccaattgcccctccacccccagctgaggcccggtcacctggtcaggacagagcaactgcatctaaaagcacaagaagacagaaacctgtaagctctgaccccacccccaccccttgagaggtcagcggaccacctccttagggacagaccctggcaggtcgctgcccaccgagatttcctcaagtgtgcatagatctgagaggagtcgggagtcgagactcgagattccatcatagcgtaggtgtgtggggttgggagccccctgatgggcttgtctgtgtttgcaccttgtcctgtgtctgaggtcctgtgactgtaccctcctttgccctgggacatctgtatctcttggctttgtaataaatgctgcatactttc

SEQ ID NO: 364171 - DNA, 2699 bp, Homo sapiens
cctgcctttccctctcctggcctgtaaccctctggggattgggatgggggccggccgttcttcgcaagccccgatgggagggggaggctctgagccgatcctgccttcgcaccccccgcgccccgtcagtccctagcccagcttgccccgtccgcctttctttctcccttttttctgtccctttttccctttcctctcttccaagatggccgaaacgggctccccgtcttaacgatttggcgtctccctcgaccaccacctctttgtgcagcagcccccgggcagaccctgttccgagggcaacgctccccagtccccccacccccgaccccggaatcatgcatcggactacacggatcaaaatcacagagctgaacccccacctcatgtgtgccctctgcggggggtacttcatcgacgccaccactatcgtggagtgcctgcattccttctgcaaaacctgcatcgtgcgctacctggagaccaacaaatactgccccatgtgtgacgtgcaggtccataaaacccggccgctgctgagcatcaggtctgacaaaacacttcaagacattgtctacaaattggtccctgggctttttaaagatgagatgaaacggcggcgggatttctatgcagcgtaccccctgacggaggtccccaacggctccaatgaggaccgcggcgaggtcttggagcaggagaagggggctctgagtgatgatgagattgtcagcctctccatcgaattctacgaaggtgccagggaccgggacgagaagaagggccccctggagaatggggatggggacaaagagaaaacaggggtgcgcttcctgcgatgcccagcagccatgaccgtcatgcatcttgccaagtttctccgcaacaagatggatgtgcccagcaagtacaaggtggaggttctgtacgaggacgagccactgaaggaatactacaccctcatggacatcgcctacatctacccctggcggcggaacgggcctctccccctcaagtaccgtgtccagccagcctgcaagcggctcaccctagccacggtgcccaccccctccgagggcaccaacaccagcggggcgtccgagtgtgagtcagtcagcgacaaggctcccagccctgccaccctgccagccacctcctcctccctgcccagcccagccaccccatcccatggctctcccagttcccatgggcctccagccacccaccctacctcccccactcccccttcgacagccagtggggccaccacagctgccaacgggggtagcttgaactgcctgcagacaccatcctccaccagcagggggcgcaagatgactgtcaacggcgctcccgtgccccccttaacttgaggccagggaccctctcccttcttccagccaagcctctccactccttccactttttctgggcccttttttccacctcttctactttccccagctcttcccaccttgggggtggggggcgggttttataaataaatatatatatatatgtacataggaaaaaccaaatatacatacttattttctatggaccaaccagattaatttaaatgccacaggaaacaaactttatgtgtgtgtgtatgtgtggaaaatggtgttcattttttttggggggggtcttgtgtaatttgctgtttttgggggtgcctggagatgaactggatgggccactggagtctcaataaagctctgcaccatcctcgctgtttcccaaggcaggtggtgtgttgggggccccttcagacccaaagctttaggcatgattccaactggctgcatataggagtcagttagaattgtttctttctctccccgtttctctccccatcttggctgctgtcctgcctctgaccagtggccgccccccacgttgttgaatgtccagaaattgctaagaacagtgccttttacaaatgcagtttatccctggttctgaggagcaagtgcagggtggaggtggcacctgcatcacctcctcctcttgcagtggaaactttgtgcaaagaatagatagttctgcctcttttttttttttttcctgtgtgtgtggcctttgcatcatttatcttgtggaaaagaagattcaggccctgagaggtctcagctcttggaggagggctaaggctttagcattgtgaagcgctgcacccccaccaaccttaccctcaccggggaaccctcactagcaggactggtggtggagtctcacctggggcctagagtggaagtgggggtgggttaacctcacacaagcacagatcccagactttgccagaggcaaacagccttccaattgcccctccacccccagctgaggcccggtcacctggtcaggacagagcaactgcatctaaaagcacaagaagacagaaacctgtaagctctgaccccacccccaccccttgagaggtcagcggaccacctccttagggacagaccctggcaggtcgctgcccaccgagatttcctcaagtgtgcatagatctgagaggagtcgggagtcgagactcgagattccatcatagcgtaggtgtgtggggttgggagccccctgatgggcttgtctgtgtttgcaccttgtcctgtgtctgaggtcctgtgactgtaccctcctttgccctgggacatctgtatctcttggctttgtaataaatgctgcatactttc

SEQ ID NO: 364172 - DNA, 2466 bp, Homo sapiens
ctcagcagagcctccctccggaacacccctcccggggccccgcagaaagtttggctctagggaagggcaacgctccccagtccccccacccccgaccccggaatcatgcatcggactacacggatcaaaatcacagagctgaacccccacctcatgtgtgccctctgcggggggtacttcatcgacgccaccactatcgtggagtgcctgcattccttctgcaaaacctgcatcgtgcgctacctggagaccaacaaatactgccccatgtgtgacgtgcaggtccataaaacccggccgctgctgagcatcaggtctgacaaaacacttcaagacattgtctacaaattggtccctgggctttttaaagatgagatgaaacggcggcgggatttctatgcagcgtaccccctgacggaggtccccaacggctccaatgaggaccgcggcgaggtcttggagcaggagaagggggctctgagtgatgatgagattgtcagcctctccatcgaattctacgaaggtgccagggaccgggacgagaagaagggccccctggagaatggggatggggacaaagagaaaacaggggtgcgcttcctgcgatgcccagcagccatgaccgtcatgcatcttgccaagtttctccgcaacaagatggatgtgcccagcaagtacaaggtggaggttctgtacgaggacgagccactgaaggaatactacaccctcatggacatcgcctacatctacccctggcggcggaacgggcctctccccctcaagtaccgtgtccagccagcctgcaagcggctcaccctagccacggtgcccaccccctccgagggcaccaacaccagcggggcgtccgagtgtgagtcagtcagcgacaaggctcccagccctgccaccctgccagccacctcctcctccctgcccagcccagccaccccatcccatggctctcccagttcccatgggcctccagccacccaccctacctcccccactcccccttcgacagccagtggggccaccacagctgccaacgggggtagcttgaactgcctgcagacaccatcctccaccagcagggggcgcaagatgactgtcaacggcgctcccgtgccccccttaacttgaggccagggaccctctcccttcttccagccaagcctctccactccttccactttttctgggcccttttttccacctcttctactttccccagctcttcccaccttgggggtggggggcgggttttataaataaatatatatatatatgtacataggaaaaaccaaatatacatacttattttctatggaccaaccagattaatttaaatgccacaggaaacaaactttatgtgtgtgtgtatgtgtggaaaatggtgttcattttttttggggggggtcttgtgtaatttgctgtttttgggggtgcctggagatgaactggatgggccactggagtctcaataaagctctgcaccatcctcgctgtttcccaaggcaggtggtgtgttgggggccccttcagacccaaagctttaggcatgattccaactggctgcatataggagtcagttagaattgtttctttctctccccgtttctctccccatcttggctgctgtcctgcctctgaccagtggccgccccccacgttgttgaatgtccagaaattgctaagaacagtgccttttacaaatgcagtttatccctggttctgaggagcaagtgcagggtggaggtggcacctgcatcacctcctcctcttgcagtggaaactttgtgcaaagaatagatagttctgcctcttttttttttttttcctgtgtgtgtggcctttgcatcatttatcttgtggaaaagaagattcaggccctgagaggtctcagctcttggaggagggctaaggctttagcattgtgaagcgctgcacccccaccaaccttaccctcaccggggaaccctcactagcaggactggtggtggagtctcacctggggcctagagtggaagtgggggtgggttaacctcacacaagcacagatcccagactttgccagaggcaaacagccttccaattgcccctccacccccagctgaggcccggtcacctggtcaggacagagcaactgcatctaaaagcacaagaagacagaaacctgtaagctctgaccccacccccaccccttgagaggtcagcggaccacctccttagggacagaccctggcaggtcgctgcccaccgagatttcctcaagtgtgcatagatctgagaggagtcgggagtcgagactcgagattccatcatagcgtaggtgtgtggggttgggagccccctgatgggcttgtctgtgtttgcaccttgtcctgtgtctgaggtcctgtgactgtaccctcctttgccctgggacatctgtatctcttggctttgtaataaatgctgcatactttc

SEQ ID NO: 364173 - DNA, 3023 bp, Homo sapiens
tgggcaggaagggggactctgctgcccctggccttgcctgagagatcttggttgatggagctgttgtcatgggaatggagagagcccgaacaggaagagggtacagctttgtgcaggtcacatgcccactgcagccctccagcctctggtccccagagcggactttggaagctgaactgcttttgttgctggaagacttatgttataatttaccctgggtggaccagggtcgtacaaaagggcaacgctccccagtccccccacccccgaccccggaatcatgcatcggactacacggatcaaaatcacagagctgaacccccacctcatgtgtgccctctgcggggggtacttcatcgacgccaccactatcgtggagtgcctgcattccttctgcaaaacctgcatcgtgcgctacctggagaccaacaaatactgccccatgtgtgacgtgcaggtccataaaacccggccgctgctgagcatcaggtctgacaaaacacttcaagacattgtctacaaattggtccctgggctttttaaagatgagatgaaacggcggcgggatttctatgcagcgtaccccctgacggaggtccccaacggctccaatgaggaccgcggcgaggtcttggagcaggagaagggggctctgagtgatgatgagattgtcagcctctccatcgaattctacgaaggtgccagggaccgggacgagaagaagggccccctggagaatggggatggggacaaagagaaaacaggggtgcgcttcctgcgatgcccagcagccatgaccgtcatgcatcttgccaagtttctccgcaacaagatggatgtgcccagcaagtacaaggtggaggttctgtacgaggacgagccactgaaggaatactacaccctcatggacatcgcctacatctacccctggcggcggaacgggcctctccccctcaagtaccgtgtccagccagcctgcaagcggctcaccctagccacggtgcccaccccctccgagggcaccaacaccagcggggcgtccgagtgtgagtcagtcagcgacaaggctcccagccctgccaccctgccagccacctcctcctccctgcccagcccagccaccccatcccatggctctcccagttcccatgggcctccagccacccaccctacctcccccactcccccttcgacagccagtggggccaccacagctgccaacgggggtagcttgaactgcctgcagacaccatcctccaccagcagggggcgcaagatgactgtcaacggcgctcccgtgccccccttaacttgaggccagggaccctctcccttcttccagccaagcctctccactccttccactttttctgggcccttttttccacctcttctactttccccagctcttcccaccttgggggtggggggcgggttttataaataaatatatatatatatgtacataggaaaaaccaaatatacatacttattttctatggaccaaccagattaatttaaatgccacaggaaacaaactttatgtgtgtgtgtatgtgtggaaaatggtgttcattttttttggggggggtcttgtgtaatttgctgtttttgggggtgcctggagatgaactggatgggccactggagtctcaataaagctctgcaccatcctcgctgtttcccaaggcaggtggtgtgttgggggccccttcagacccaaagctttaggcatgattccaactggctgcatataggagtcagttagaattgtttctttctctccccgtttctctccccatcttggctgctgtcctgcctctgaccagtggccgccccccacgttgttgaatgtccagaaattgctaagaacagtgccttttacaaatgcagtttatccctggttctgaggagcaagtgcagggtggaggtggcacctgcatcacctcctcctcttgcagtggaaactttgtgcaaagaatagatagttctgcctcttttttttttttttcctgtgtgtgtggcctttgcatcatttatcttgtggaaaagaagattcaggccctgagaggtctcagctcttggaggagggctaaggctttagcattgtgaagcgctgcacccccaccaaccttaccctcaccggggaaccctcactagcaggactggtggtggagtctcacctggggcctagagtggaagtgggggtgggttaacctcacacaagcacagatcccagactttgccagaggcaaacagccttccaattgcccctccacccccagctgaggcccggtcacctggtcaggacagagcaactgcatctaaaagcacaagaagacagaaacctgtaagctctgaccccacccccaccccttgagaggtcagcggaccacctccttagggacagaccctggcaggtcgctgcccaccgagatttcctcaagtgtgcatagatctgagaggagtcgggagtcgagactcgagattccatcatagcgtaggtgtgtggggttgggagccccctgatgggcttgtctgtgtttgcaccttgtcctgtgtctgaggtcctgtgactgtaccctcctttgccctgggacatctgtatctcttggctttgtaataaatgctgcatactttctggagcctgtagttctttggggtggagggaagaagggaagggtgcctctcatctctgggtttagcctggcttggggaccccatacagaatgaatctgaactgccctctcctgtggctggtcaggtgcccccagcccacagagaggttaaaatctggagcaggaggcagcacatgggcctcatagcagtgactgcaggactaccagtctggttgggcaggcttgtttttgccatcttccccatcagcaaacattgaaccagggcccactcccgcctgccccagactggagacttttaggttataaggaataattcttccttcatgtccccgtacatcgttagaagcttgaattcgagcagtagtagtagtagtaggcggccgc

SEQ ID NO: 364174 - DNA, 3441 bp, Homo sapiens
  misc_feature (3429)..(3430): n is a, c, g, or t
  misc_feature (3432)..(3432): n is a, c, g, or t
ctctccgcctgcaggctccggagcaggtgaccggatcttcccttggcccttctcccgccggttctcggaccactccctctggaaggaagtctctccgcccttcctcttcctccccgcccccgtcccgctggtgtggctgcaggctcgagctggggtcactcggcggccagtgtgcgcaggtctcctggtcgccggccagagggcgaaagcattcacccgaggcccccagcttcgcggctgccttggctgcgagcaacgagggaagaggaggcaggcgctccaaaactgggcgaagattcctatcctaatttctaactcgagcctcccaccgtcagtgcgcttaatggcgctgctggccggatggataatcgagctctctggagggacagacgcggccgccatccctaataaatcgtgaataacgaatgagggaatcgaccatcctcatgaggcacgggcgtccagtaacgcagtatcgattcgcttccccggcgtcggcctcaccgctactcccggcgtttccaagcctccctcctcgttctctccctcctgccggagccactgcggaccggagccccagcgccaggtggagccggggcgccagtgggagtcgggcccagccgtcttggcgctcgcccgactctcccgcccgcgcgcccagggaggcgcacaggcagcgcgcagcgcagggcgcgagcgaaaaatgcgggaatcagtgccaggcaggagaaaaggcgcgggcccaccttacagcccggcgcctcgtttcctagtccagtgtggccgctcgccttcggccggattattgtgtcccagacccggagccgaaacgggctccccgtcttaacgatttggcgtctccctcgaccaccacctctttgtgcagcagcccccgggcagaccctgttccgagggcaacgctccccagtccccccacccccgaccccggaatcatgcatcggactacacggatcaaaatcacagagctgaacccccacctcatgtgtgccctctgcggggggtacttcatcgacgccaccactatcgtggagtgcctgcattccttctgcaaaacctgcatcgtgcgctacctggagaccaacaaatactgccccatgtgtgacgtgcaggtccataaaacccggccgctgctgagcatcaggtctgacaaaacacttcaagacattgtctacaaattggtccctgggctttttaaagatgagatgaaacggcggcgggatttctatgcagcgtaccccctgacggaggtccccaacggctccaatgaggaccgcggcgaggtcttggagcaggagaagggggctctgagtgatgatgagattgtcagcctctccatcgaattctacgaaggtgccagggaccgggacgagaagaagggccccctggagaatggggatggggacaaagagaaaacaggggtgcgcttcctgcgatgcccagcagccatgaccgtcatgcatcttgccaagtttctccgcaacaagatggatgtgcccagcaagtacaaggtggaggttctgtacgaggacgagccactgaaggaatactacaccctcatggacatcgcctacatctacccctggcggcggaacgggcctctccccctcaagtaccgtgtccagccagcctgcaagcggctcaccctagccacggtgcccaccccctccgagggcaccaacaccagcggggcgtccgagtgtgagtcagtcagcgacaaggctcccagccctgccaccctgccagccacctcctcctccctgcccagcccagccaccccatcccatggctctcccagttcccatgggcctccagccacccaccctacctcccccactcccccttcgacagccagtggggccaccacagctgccaacgggggtagcttgaactgcctgcagacaccatcctccaccagcagggggcgcaagatgactgtcaacggcgctcccgtgccccccttaacttgaggccagggaccctctcccttcttccagccaagcctctccactccttccactttttctgggcccttttttccacctcttctactttccccagctcttcccaccttgggggtggggggcgggttttataaataaatatatatatatatgtacataggaaaaaccaaatatacatacttattttctatggaccaaccagattaatttaaatgccacaggaaacaaactttatgtgtgtgtgtatgtgtggaaaatggtgttcattttttttggggggggtcttgtgtaatttgctgtttttgggggtgcctggagatgaactggatgggccactggagtctcaataaagctctgcaccatcctcgctgtttcccaaggcaggtggtgtgttgggggccccttcagacccaaagctttaggcatgattccaactggctgcatataggagtcagttagaattgtttctttctctccccgtttctctccccatcttggctgctgtcctgcctctgaccagtggccgccccccacgttgttgaatgtccagaaattgctaagaacagtgccttttacaaatgcagtttatccctggttctgaggagcaagtgcagggtggaggtggcacctgcatcacctcctcctcttgcagtggaaactttgtgcaaagaatagatagttctgcctcttttttttttttttcctgtgtttgcaccttgtcctgtgtctgaggtcctgtgactgtaccctcctttgccctgggacatctgtatctcttggctttgtaataaatgctgcatactttctggagcctgtagttctttggggtggagggaagaagggaagggtgcctctcatctctgggtttagcctggcttggggaccccatacagaatgaatctgaactgccctctcctgtggctggtcaggtgcccccagcccacagagaggttaaaatctggagcaggaggcagcacatgggcctcatagcagtgactgcaggactaccagtctggttgggcaggcttgtttttgccatcttccccatcagcaaacattgaaccagggcccactcccgcctgccccagactggagacttttaggttataaggaataattcttccttcatgagccagcagtgggtaccagagtctcttgggctcagcacctgtttcctttcccacagaagggggtgcctgtcagaggcctggagccaaggccacctgtggctggacagcagcagccccctcagagtggggagcccacttctgccttctgcacgcgctcactcctgtgggtgccatcgcagtacgggggcctctgagtggccttgcaggtacagagtgccaccatgcgggtctcttgggccttgaacttgagtggagataggccagtgcgttggaagaagtgggagccgtcacagaagggctgcttcttgccgctcccnntntgccgaatt

SEQ ID NO: 364175 - DNA, 2075 bp, Homo sapiens
ctctccgcctgcaggctccggagcaggtgaccggatcttcccttggcccttctcccgccggttctcggaccactccctctggaaggaagtctctccgcccttcctcttcctccccgcccccgtcccgctggtgtggctgcaggctcgagctggggtcactcggcggccagtgtgcgcaggtctcctggtcgccggccagagggcgaaagcattcacccgaggcccccagcttcgcggctgccttggctgcgagcaacgagggaagaggaggcaggcgctccaaaactgggcgaagattcctatcctaatttctaactcgagcctcccaccgtcagtgcgcttaatggcgctgctggccggatggataatcgagctctctggagggacagacgcggccgccatccctaataaatcgtgaataacgaatgagggaatcgaccatcctcatgaggcacgggcgtccagtaacgcagtatcgattcgcttccccggcgtcggcctcaccgctactcccggcgtttccaagcctccctcctcgttctctccctcctgccggagccactgcggaccggagccccagcgccaggtggagccggggcgccagtgggagtcgggcccagccgtcttggcgctcgcccgactctcccgcccgcgcgcccagggaggcgcacaggcagcgcgcagcgcagggcgcgagcgaaaaatgcgggaatcagtgccaggcaggagaaaaggcgcgggcccaccttacagcccggcgcctcgtttcctagtccagtgtggccgctcgccttcggccggattattgtgtcccagacccggagccgaaacgggctccccgtcttaacgatttggcgtctccctcgaccaccacctctttgtgcagcagcccccgggcagaccctgttccgagggcaacgctccccagtccccccacccccgaccccggaatcatgcatcggactacacggatcaaaatcacagagctgaacccccacctcatgtgtgccctctgcggggggtacttcatcgacgccaccactatcgtggagtgcctgcattccttctgcaaaacctgcatcgtgcgctacctggagaccaacaaatactgccccatgtgtgacgtgcaggtccataaaacccggccgctgctgagcatcaggtctgacaaaacacttcaagacattgtctacaaattggtccctgggctttttaaagatgagatgaaacggcggcgggatttctatgcagcgtaccccctgacggaggtccccaacggctccaatgaggaccgcggcgaggtcttggagcaggagaagggggctctgagtgatgatgagattgtcagcctctccatcgaattctacgaaggtgccagggaccgggacgagaagaagggccccctggagaatggggatggggacaaagagaaaacaggggtgcgcttcctgcgatgcccagcagccatgaccgtcatgcatcttgccaagtttctccgcaacaagatggatgtgcccagcaagtacaaggtggaggttctgtacgaggacgagccactgaaggaatactacaccctcatggacatcgcctacatctacccctggcggcggaacgggcctctccccctcaagtaccgtgtccagccagcctgcaagcggctcaccctagccacggtgcccaccccctccgagggcaccaacaccagcggggcgtccgagtctgaggcccggtcacctggtcaggacagagcaactgcatctaaaagcacaagaagacagaaacctgtaagctctgaccccacccccaccccttgagaggtcagcggaccacctccttagggacagaccctggcaggtcgctgcccaccgagatttcctcaagtgtgcatagatctgagaggagtcgggagtcgagactcgagattccatcatagcgtaggtgtgtggggttgggagccccctgatgggcttgtctgtgtttgcaccttgtcctgtgtctgaggtcctgtgactgtaccctcctttgccctgggacatctgtatctcttggctttgtaataaatgctgcatactttc

SEQ ID NO: 364176 - DNA, 576 bp, Homo sapiens
cagtcagtctgcatgagccactgtttctaataagactgtggatagagtgatataatcacctctaaccatatcaaatgttacacgtaagtttcagattttgagacatgagttgataagatttgaagttcaaagaccatgactttagtacttcctgagtaatcaactgaaatatgttttacatatgtgttttccaaattgctgaccattcattataagtgcttctgaatttaaaggaggtacttgatgtataggtaagaaattacctttaaattctggaggtctaccctcaaagtgtatacagaggtttaattggatgtaagacacaggatcacctttagggttctgtttttttgtctatttaataaaacccaaactgtagtatgctttacatgcctttagaatcatataaataaactgctgttaagtaatgttcccagttgttatgtttctgttacaggtgaaaagcaatcacggagttaaaagaagacaagctgaaatgatgcaggctgctcctatgttggaaatttgttcattaaaattctcccaataaagctttacagccttctgcaaagtagt

SEQ ID NO: 364177 - DNA, 463 bp, Homo sapiens
gttttgcaattttcagcctttttgtgctggattttcctcatctttgtggatttatctccctttggtctttgatgttggtgaccttcagatggggtttctgtgtggatgtcctttttgttgatgttgatactactcctttctgtttgttagttttccttctaacagtcaggcccctctgctgcaggtctgctggagtttgttggagttccactccagaccctgtttgcctgggtatcaccagcagaggctgcagaacagcaaagattgctgccttttccttcctctgggaagcttcgtcccagaggggcacctgccagatgccagccggagctcttgtatatgaggtgaaaagcaatcacggagttaaaagaagacaagctgaaatgatgcaggctgctcctatgttggaaatttgttcattaaaattctcccaataaagctttacagccttctgcaaagtagt

SEQ ID NO: 364178 - DNA, 3800 bp, Homo sapiens
atggagaaggaatgtatgaatggatgtgttcagcggacaaaagctgcagttgagttcccacagaagacttccgcattagctgtctgcttctgttttcttcatcatggatttcgcaccacccccattccggcctctccattgattcctcgatcatcccgccccctacaccgcccactcccgggcatccccattggctgcgtgcttctccggctctcaattcgctgtacgtcatccgtgcatggctgcccattggccctctgcaatacttgtcttcatctcaccgcctatgcccccgtgagccgtacccctccgcgctggccttcccattggctgcccgccccttcaggccctgcccccgccggtcccgccgccggtgccgtcggtgccgccgccgccgccgatatggcgcgtacggcccctgtggagcccccgctgcggcattccgcgcccccctcgccggccgcgggtgagccccgcacctcggtcgaggcggcggtggccccgcggagggtgctgttcgccgacgaggccttggggctgccgctggcgcagttgcgccgctaccggccgtggggcgggcccggggcgggcaagatggcggcggcggccgggcaagatggcggcggcggcggcggggccgacgaggacgacgatggcgaggatggggatgaaggggaggaggaagaggaggcttgccccgagccctcaccgctgtgccccgtccccgctggcggggggttttacctggtccccacattttcgctgccgcccgcgccgggccgtctggagcgcttggggcgcgtcatggtggagctggaggcgctgctgccgcctcccggagcggtccccgggggtgccggggtgtgggtgcctgggggccgcccgccggtgctgcgcgggttggtacgcgtgctgaaccgctccttcgagaaggcggtgcacgtgcgggcctcacacgacggctgggcttccttttgcgaccacccagcgcgctacgtcccgcgcagcccgccgtgggcaggagcgggaggaacaggagcaggagatcccatcctggatccggggctcggcctgggtcccggccaggcatccgcctcctcgcccgacgacggcggccgcaccgaccgctttgccttccagctgccctttgctgagggcgcgggcgatggggcgcgcctcgacttcgtggtgcgctatgagacccctgagggcactttctgggccaacaaccacggccgcaactacacagtcctgctccggatcgcacccgctcccacacccactgatgccgaagggctgccccagcagcagcagctgccgcagctggagccacagcccgagtgccagggtcccgtggaggctgaggccaggcagctgaagagctgcatgaagccggtgaggcgcaggcctgccgaggaggaactgaagacgaagaacatggatgataacacctttgccatggcagagcatcctgatgtccaggagtcagtgggtccactggtagcccccacccctctccgtccatggccccagatgacacttcaggtttctgacgttccgatgactggcaaccccgcagaagaaggtgatgtccccagaagcagtccacctgtggcttttacagaggtcctccaggcaccggccatcaggattcccccctcctcccctctctgtggcctgggtggctcccccagagaccaggcctcagggcccgatgcgagcgagggggccaccgggcctttcctggagcccagtcagcagcaggcagaggccacatggggagtatcgagtgagaatggaggggggctggaggctgtgagtgggtcagaggagctgctcggtgaggacaccatcgaccaggagctggagcagctctacctgtctcacctgagccgcctacgggctgctgtggctgcgggtggggcagggggtggtggggagggctccacagatggagggatgtcccccagccatcccctgggcatactgacggaccgcgacctgatcttgaagtggcctggccctgagcgggccctgaacagcgccctggctgaggagatcacgctgcactatgcccggctggggcgtggcgtggagctcatcaaggacaccgaagaccctgatgatgaaggggagggtgaagaggggctctctgtcacaccctccagcccagaaggggacagccccaaggaatcgcctccagaaatcctctccggggcccgttctgtggtagccacgatgggagatgtgtggctccccatgggcagagggctcaggatgtgacggccctgtggttctgggtacagagggtcagttcattggggatcctgagaaagggatgggcaaggacaccagctctttgcacatgaatagggtgatagctggggtgactgagtccctgggggaggccgggacagaagcccagatagaggtcaccagtgagtgggcaggcagcttggatcccatatctggcaaggagccagcctctcccgtccttctgcaggggcaaaatcccaccctcctcagtcccttgggggccgaagtctgtctctctagtgtagccaggcctcatgtgagctcccaggatgaaaaggatgcaggcccaagccttgaacccccaaagaagtctcccaccctagcagtccctgcagaatgtgtgtgtgcactgcctcctcagctccgggggcccttgacccagactctgggggtcctggccgggctagtggtggtccctgtggctctgaacagcggtgtgtccctcctggtgcttgcgctgtgcctctctctggcttggttctcataggctctgcttgtgggatcagcagaggcttaagatgggatacatggcctgtgcagtgaggggacctgggtcctttgcttctgagaatgctcaactgaaagagaggccttctcatccccaagctctccagtcaacacagggctccctgtggtgacaccagtggagatgagggaacgggtagatggtgtgagtgaggggaacttttagagtggaactgggcatgtcctccgcctaccccccgagcctgtatttatttttgtataattctctggatgagggagagtggtcgtgagctggtcttggggcacaattacccagagatatatttattaacagccaacctgtgcaacctgctggagctttatttttaatttaatttatatagagtacctattattatatgccacaatagagctctatgagaaacagtgtcttgcggtgtagtgttctcctgtttgggcatgagtgtgcagggtggtcactttctgtgggaggatcacagtggggagttgggggtgggacgtggtcgcctgctgctgcttcaacatgtctttccttgaagatgtgtgtctcctcgtctcgtggtcctaatccatatggttctttgtcttttccacattctgcctgtgggaccctacaggtgtgtatttggatggtggtggtgggagccagggaggaagagtggcagccacatgagggtttggtgtcagtcacatggttgcagtggtagctgtggtctcctgtggatgtggggacatcagttgtgaatcagccacaaggttttgaggttactgaaaaaacagcctttgacaccagcagggagaccccttagtccctgagataaggaaggcctcagaaaggaaagaggagttaatgtactgcagtacttggtagcacagttgctgtccacagacatcacatttctactaaaaacaggaagcccagaagctttgaaagaaagatatatatttattgcatgcaaataaaaaactgctcaaca

SEQ ID NO: 364179 - DNA, 1824 bp, Homo sapiens
atggagaaggaatgtatgaatggatgtgttcagcggacaaaagctgcagttgagttcccacagaagacttccgcattagctgtctgcttctgttttcttcatcatggatttcgcaccacccccattccggcctctccattgattcctcgatcatcccgccccctacaccgcccactcccgggcatccccattggctgcgtgcttctccggctctcaattcgctgtacgtcatccgtgcatggctgcccattggccctctgcaatacttgtcttcatctcaccgcctatgcccccgtgagccgtacccctccgcgctggccttcccattggctgcccgccccttcaggccctgcccccgccggtcccgccgccggtgccgtcggtgccgccgccgccgccgatatggcgcgtacggcccctgtggagcccccgctgcggcattccgcgcccccctcgccggccgcgggtgagccccgcacctcggtcgaggcggcggtggccccgcggagggtgctgttcgccgacgaggccttggggctgccgctggcgcagttgcgccgctaccggccgtggggcgggcccggggcgggcaagatggcggcggcggccgggcaagatggcggcggcggcggcggggccgacgaggacgacgatggcgaggatggggatgaaggggaggaggaagaggaggcttgccccgagccctcaccgctgtgccccgtccccgctggcggggggttttacctggtccccacattttcgctgccgcccgcgccgggccgtctggagcgcttggggcgcgtcatggtggagctggaggcgctgctgccgcctcccggagcggtccccgggggtgccggggtgtgggtgcctgggggccgcccgccggtgctgcgcgggttggtacgcgtgctgaaccgctccttcgagaaggcggtgcacgtgcgggcctcacacgacggctgggcttccttttgcgaccacccagcgcgctacgtcccgcgcagcccgccgtgggcaggagcgggaggaacaggagcaggagatcccatcctggatccggggctcggcctgggtcccggccaggcatccgcctcctcgcccgacgacggcggccgcaccgaccgctttgccttccagctgccctttgctgagggcgcgggcgatggggcgcgcctcgacttcgtggtgcgctatgagacccctgagggcactttctgggccaacaaccacggccgcaactacacagtcctgctccggatcgcacccgctcccacacccactgatgccgaagggctgccccagcagcagcagctgccgcagctggagccacagcccgagtgccagggtcccgtggaggctgaggccaggcagctgaagagctgcatgaagccggtgaggcgcaggcctgccgaggaggaactgaagacgaagaacatggatgataacacctttgccatggcagagcatcctgatgtccaggagtcagtgggtccactggtagcccccacccctctccgtccatggccccagatgacacttcaggtctgctggagtttgttggagttccactccagaccctgtttgcctgggtatcaccagcagaggctgcagaacagcaaagattgctgccttttccttcctctgggaagcttcgtcccagaggggcacctgccagatgccagccggagctcttgtatatgaggtgaaaagcaatcacggagttaaaagaagacaagctgaaatgatgcaggctgctcctatgttggaaatttgttcattaaaattctcccaataaagctttacagccttctgcaaagtagt

SEQ ID NO: 364180 - DNA, 1664 bp, Homo sapiens
atggagaaggaatgtatgaatggatgtgttcagcggacaaaagctgcagttgagttcccacagaagacttccgcattagctgtctgcttctgttttcttcatcatggatttcgcaccacccccattccggcctctccattgattcctcgatcatcccgccccctacaccgcccactcccgggcatccccattggctgcgtgcttctccggctctcaattcgctgtacgtcatccgtgcatggctgcccattggccctctgcaatacttgtcttcatctcaccgcctatgcccccgtgagccgtacccctccgcgctggccttcccattggctgcccgccccttcaggccctgcccccgccggtcccgccgccggtgccgtcggtgccgccgccgccgccgatatggcgcgtacggcccctgtggagcccccgctgcggcattccgcgcccccctcgccggccgcgggtgagccccgcacctcggtcgaggcggcggtggccccgcggagggtgctgttcgccgacgaggccttggggctgccgctggcgcagttgcgccgctaccggccgtggggcgggcccggggcgggcaagatggcggcggcggccgggcaagatggcggcggcggcggcggggccgacgaggacgacgatggcgaggatggggatgaaggggaggaggaagaggaggcttgccccgagccctcaccgctgtgccccgtccccgctggcggggggttttacctggtccccacattttcgctgccgcccgcgccgggccgtctggagcgcttggggcgcgtcatggtggagctggaggcgctgctgccgcctcccggagcggtccccgggggtgccggggtgtgggtgcctgggggccgcccgccggtgctgcgcgggttggtacgcgtgctgaaccgctccttcgagaaggcggtgcacgtgcgggcctcacacgacggctgggcttccttttgcgaccacccagcgcgctacgtcccgcgcagcccgccgtgggcaggagcgggaggaacaggagcaggagatcccatcctggatccggggctcggcctgggtcccggccaggcatccgcctcctcgcccgacgacggcggccgcaccgaccgctttgccttccagctgccctttgctgagggcgcgggcgatggggcgcgcctcgacttcgtggtgcgctatgagacccctgagggcactttctgggccaacaaccacggccgcaactacacagtcctgctccggatcgcacccgctcccacacccactgatgccgaagggctgccccagcagcagcagctgccgcagctggagccacagcccgagtgccagggtcccgtggaggctgaggccaggcagctgaagagctgcatgaagccggtgaggcgcaggcctgccgaggaggaactgaagacgaagaacatggatgataacacctttgccatggcagagcatcctgatgtccaggagtcagtgggtccactggtagcccccacccctctccgtccatggccccagatgacacttcaggtgaaaagcaatcacggagttaaaagaagacaagctgaaatgatgcaggctgctcctatgttggaaatttgttcattaaaattctcccaataaagctttacagccttctgcaaagtagt

SEQ ID NO: 364181 - DNA, 658 bp, Homo sapiens
acctcaagtggtctccctgcctcggcctcccaaagtgctggaattacaggtgtaagccaccacgcccagccgaaaagatgggttcttctatcttttctctttccatagccaggaatgtatcctaaagaaatgatacaagtgtcgataaaactatgcccaatgctgtttgctggtttgctttgcaacctctaaatgaaagaacttagctgctcagtaggaagggaatggtatgatatgagtattaagcagccatttgaaatgtttgcaaaagtgtataatgatgtttcttactgttaaatggacaaagctagctgtgaaattatgtctgtagaatctaaatgatttcgtagaatatctggaaggaaattttccagaatggtaacagtagttgtctctggctgatgtgtgattgtttttcttgcttctttagactttcctgtattttgcgaattttctataatgaggctgtaggacttttaggatgaggggataaacaaaggcagcagaagagaaaacagcagctgtcaggtgaaggtgggctagcacagaggctcagaaggtgccagtgggtggcagaagtgacctctcagggtattattagatccatgtactctctcctctgccctgcaggcctgccgaggaggaactgaagacgaag

SEQ ID NO: 364182 - DNA, 1704 bp, Homo sapiens
atggagaaggaatgtatgaatggatgtgttcagcggacaaaagctgcagttgagttcccacagaagacttccgcattagctgtctgcttctgttttcttcatcatggatttcgcaccacccccattccggcctctccattgattcctcgatcatcccgccccctacaccgcccactcccgggcatccccattggctgcgtgcttctccggctctcaattcgctgtacgtcatccgtgcatggctgcccattggccctctgcaatacttgtcttcatctcaccgcctatgcccccgtgagccgtacccctccgcgctggccttcccattggctgcccgccccttcaggccctgcccccgccggtcccgccgccggtgccgtcggtgccgccgccgccgccgatatggcgcgtacggcccctgtggagcccccgctgcggcattccgcgcccccctcgccggccgcgggtgagccccgcacctcggtcgaggcggcggtggccccgcggagggtgctgttcgccgacgaggccttggggctgccgctggcgcagttgcgccgctaccggccgtggggcgggcccggggcgggcaagatggcggcggcggccgggcaagatggcggcggcggcggcggggccgacgaggacgacgatggcgaggatggggatgaaggggaggaggaagaggaggcttgccccgagccctcaccgctgtgccccgtccccgctggcggggggttttacctggtccccacattttcgctgccgcccgcgccgggccgtctggagcgcttggggcgcgtcatggtggagctggaggcgctgctgccgcctcccggagcggtccccgggggtgccggggtgtgggtgcctgggggccgcccgccggtgctgcgcgggttggtacgcgtgctgaaccgctccttcgagaaggcggtgcacgtgcgggcctcacacgacggctgggcttccttttgcgaccacccagcgcgctacgtcccgcgcagcccgccgtgggcaggagcgggaggaacaggagcaggagatcccatcctggatccggggctcggcctgggtcccggccaggcatccgcctcctcgcccgacgacggcggccgcaccgaccgctttgccttccagctgccctttgctgagggcgcgggcgatggggcgcgcctcgacttcgtggtgcgctatgagacccctgagggcactttctgggccaacaaccacggccgcaactacacagtcctgctccggatcgcacccgctcccacacccactgatgccgaagggctgccccagcagcagcagctgccgcagctggagccacagcccgagtgccagggtcccgtggaggctgaggccaggcagctgaagagctgcatgaagccggtgaggcgcaggcctgccgaggaggaactgaagacgaagaacatggatgataacacctttgccatggcagagcatcctgatgtccaggagtcagtgggtccactggtagcccccacccctctccgtccatggccccagatgacacttcaggtttctgacgttccgatgactggcaaccccgcagaagaaggtgaaaagcaatcacggagttaaaagaagacaagctgaaatgatgcaggctgctcctatgttggaaatttgttcattaaaattctcccaataaagctttacagccttctgcaaagtagt

SEQ ID NO: 364183 - DNA, 1639 bp, Homo sapiens
atggagaaggaatgtatgaatggatgtgttcagcggacaaaagctgcagttgagttcccacagaagacttccgcattagctgtctgcttctgttttcttcatcatggatttcgcaccacccccattccggcctctccattgattcctcgatcatcccgccccctacaccgcccactcccgggcatccccattggctgcgtgcttctccggctctcaattcgctgtacgtcatccgtgcatggctgcccattggccctctgcaatacttgtcttcatctcaccgcctatgcccccgtgagccgtacccctccgcgctggccttcccattggctgcccgccccttcaggccctgcccccgccggtcccgccgccggtgccgtcggtgccgccgccgccgccgatatggcgcgtacggcccctgtggagcccccgctgcggcattccgcgcccccctcgccggccgcgggtgagccccgcacctcggtcgaggcggcggtggccccgcggagggtgctgttcgccgacgaggccttggggctgccgctggcgcagttgcgccgctaccggccgtggggcgggcccggggcgggcaagatggcggcggcggccgggcaagatggcggcggcggcggcggggccgacgaggacgacgatggcgaggatggggatgaaggggaggaggaagaggaggcttgccccgagccctcaccgctgtgccccgtccccgctggcggggggttttacctggtccccacattttcgctgccgcccgcgccgggccgtctggagcgcttggggcgcgtcatggtggagctggaggcgctgctgccgcctcccggagcggtccccgggggtgccggggtgtgggtgcctgggggccgcccgccggtgctgcgcgggttggtacgcgtgctgaaccgctccttcgagaaggcggtgcacgtgcgggcctcacacgacggctgggcttccttttgcgaccacccagcgcgctacgtcccgcgcagcccgccgtgggcaggagcgggaggaacaggagcaggagatcccatcctggatccggggctcggcctgggtcccggccaggcatccgcctcctcgcccgacgacggcggccgcaccgaccgctttgccttccagctgccctttgctgagggcgcgggcgatggggcgcgcctcgacttcgtggtgcgctatgagacccctgagggcactttctgggccaacaaccacggccgcaactacacagtcctgctccggatcgcacccgctcccacacccactgatgccgaagggctgccccagcagcagcagctgccgcagctggagccacagcccgagtgccagggtcccgtggaggctgaggccaggcagctgaagagctgcatgaagccggtgaggcgcaggcctgccgaggaggaactgaagacgaagaacatggatgataacacctttgccatggcagagcatcctgatgtccaggagtcagtgggtccactggtagcccccacccctctccgtccatggccccagatgacacttcagctgctggagtttgttggagttccactccagagcctcttcacctcatatacaagagctccggctggcatctggcagtgcccctctgggacgaagc

SEQ ID NO: 364184 - DNA, 774 bp, Homo sapiens
gcggccgccgtcgtcgggcgaggaggcggatgcctggccgggacccaggccgagccccggatccaggatgggatctcctgctcctgttcctcccgctcctgcccacggcgggctgcgcgggacgtagcgcgcttcgtggtgcgctatgagacccctgagggcactttctgggccaacaaccacggccgcaactacacagtcctgctccggatcgcacccgctcccacacccactgatgccgaagggctgccccagcagcagcagctgccgcagctggagccacagcccgagtgccagggtcccgtggaggctgaggccaggcagctgaagagctgcatgaagccggtgaggcgcaggcctgccgaggaggaactgaagacgaagaacatggatgataacacctttgccatggcagagcatcctgatgtccaggagtcagtgggtccactggtagcccccacccctctccgtccatggccccagatgacacttcaggtctgctggagtttgttggagttccactccagaccctgtttgcctgggtatcaccagcagaggctgcagaacagcaaagattgctgccttttccttcctctgggaagcttcgtcccagaggggcacctgccagatgccagccggagctcttgtatatgaggtgaaaagcaatcacggagttaaaagaagacaagctgaaatgatgcaggctgctcctatgttggaaatttgttcattaaaattctcccaataaagctttacagccttctgcaaagtagt

SEQ ID NO: 364185 - DNA, 2512 bp, Homo sapiens
tctctggttcaggtagatattcataagttaaagcatgccttagtgtaatgtgcttgtatgaaatgcttctaaagacacccacagttttggactggagtatagtagagatgaagtgagaccatgtggtcatgaggaattgcttcaggatgactgcatgagctagttgataaacttaataaggcactgatttctaatatgcaaaataagattagtatatattcttctagtgaaatcttgtgacctttcttataaatgagataaatttatagataattctacatatttgtatgattttctaaagcacatggcagctgccatctcatttaattctcacatcaaccctatgaggtaagtactattatgatccttatgttatatagggagagagaggcagatacattggcttataaatattcagtaggactttttgtcttgataggaagaagaagaaaggaagtccgtatggatcagcagaggctcagaaaacagactgttggaagcagattaaatatccctttgccagacatcagtcagctgagtttaccatcagctatgataatgagaaggagatgacacaaaagttagatctcatcacaagtgatatggcagattaccagcagcccctcatgattggcaccgggacagtcacgaggaagggctccaccttccggcccatggacacggatgccgaggaggcaggggtgagcaccgatgccggcggccactatgactgcccgcagcgggccggccgccacgagtacgcgctgcccctggcgcccccggagcccgagtacgccacgcccatcgtggagcggcacgtgctgcgcgcccacacgttctctgcgcagagcggctaccgcgtcccagggccccagcccggccacaaacactccctctcctcgggcggcttctcccccgtagcgggtgtgggcgcccaggacggagactatcaaaggccacacagcgcacagcctgcggacaggggctacgaccggcccaaagctgtcagcgccctcgccaccgaaagcggacaccctgactctcagaagcccccaacgcatcccgggacgagtgacagctattctgcccccagagactgcctcacacccctcaaccagacggccatgactgcccttttgtgaacacaatgtgaaagaagcctgctgtggtactgagcgtcgggctgtcacaaggcactggaagaagggagcctgctggtccagagtgtgcgtgtgtatcggtgtgtgtgtacacttgcatgtgtgtgtgtgatccagtaggatcctagagacaacctgtcatactgtttacaaaattgtgcagctggtttcgtgctgacccttagggtgcgtctgttgggttttgttgggctagaaaaatgaaaatttttagatggcgttttcattcctctgactgatattgagctgctttggtgttaaaggtgtaatgtgtacagagttgtatttaacaataataaaagtaacttaagtttgctctatcagattttagttctgcacagaggttaagtgggaaaatgcagctgttgcaaaatgtatataaatagtatgttcatttttttcagtatattatctgatactgtgttagcagcaggtctgcttaaacctagtcttgttgttattgagtcatttcctctcctttgataactagaactgaaagcatttttaacattcttctcctggaagaaatgaattacttgaagcatgaaaagcacaccagggtggttgtttatttagcaattatgactgtagatttaaaaacaagcaaagaaacaacacctcagcagctgcccgtttccttagtctccacttcagagggggatgcgaagaggtcggcccagctccggtgaccatgaaggtggcacaggaattacagtgtgaatggctgtgtcagatgttttcgtacctcagattaaaaatattgctgaggtcagacgccacaattttcatgactttcttcagaagtagcacattttcgtgacttccgctgtcctctgaaaaacaaagttatttggaacatgttcatgcaaaagtgattctgaccaagtctaaatcgagcttttctactgacatgaaactgttggaaactgatctcattttataagaaatgattttcccctcaaggaggcgtctgtaattccagaacagtccagacatcagctgtacctcatgctcagtagtttttatttgagtttcttttgtgagttaactatgggagatttaacctcttttgccaaagagggaagtgtgtgtgtttttttaatagaaaatatggaccaaaaatttttttccctgaagaatgtattataaccctatttgtgtggttattacatcctgtgaaatgtatatatgttaaaataatgggggtgctggaaggtcatggcagactagctgctggttagtgtggaggggaagtggtttactttgtagagtttacatggttttatgcgcacactaattgtaataaactatgccaaaccaaaaaaaaataactc

SEQ ID NO: 364186 - DNA, 2288 bp, Homo sapiens
gacatccctcctctctcaggtaatgattcattggtgtggcgcaagacaagtcaaagcaccagtgtttcaactaagaaagaagatgagacaatcacaaggcccatcccctcggaagaaacatccacaggaataaacattacaacggtggctattccattggtgctccttgttgtcctggtgtttgctggaatggggatctttgcagcctttagaaagaagaagaagaaaggaagtccgtatggatcagcagaggctcagaaaacagactgttggaagcagattaaatatccctttgccagacatcagtcagctgagtttaccatcagctatgataatgagaaggagatgacacaaaagttagatctcatcacaagtgatatggcagattaccagcagcccctcatgattggcaccgggacagtcacgaggaagggctccaccttccggcccatggacacggatgccgaggaggcaggggtgagcaccgatgccggcggccactatgactgcccgcagcgggccggccgccacgagtacgcgctgcccctggcgcccccggagcccgagtacgccacgcccatcgtggagcggcacgtgctgcgcgcccacacgttctctgcgcagagcggctaccgcgtcccagggccccagcccggccacaaacactccctctcctcgggcggcttctcccccgtagcgggtgtgggcgcccaggacggagactatcaaaggccacacagcgcacagcctgcggacaggggctacgaccggcccaaagctgtcagcgccctcgccaccgaaagcggacaccctgactctcagaagcccccaacgcatcccgggacgagtgacagctattctgcccccagagactgcctcacacccctcaaccagacggccatgactgcccttttgtgaacacaatgtgaaagaagcctgctgtggtactgagcgtcgggctgtcacaaggcactggaagaagggagcctgctggtccagagtgtgcgtgtgtatcggtgtgtgtgtacacttgcatgtgtgtgtgtgatccagtaggatcctagagacaacctgtcatactgtttacaaaattgtgcagctggtttcgtgctgacccttagggtgcgtctgttgggttttgttgggctagaaaaatgaaaatttttagatggcgttttcattcctctgactgatattgagctgctttggtgttaaaggtgtaatgtgtacagagttgtatttaacaataataaaagtaacttaagtttgctctatcagattttagttctgcacagaggttaagtgggaaaatgcagctgttgcaaaatgtatataaatagtatgttcatttttttcagtatattatctgatactgtgttagcagcaggtctgcttaaacctagtcttgttgttattgagtcatttcctctcctttgataactagaactgaaagcatttttaacattcttctcctggaagaaatgaattacttgaagcatgaaaagcacaccagggtggttgtttatttagcaattatgactgtagatttaaaaacaagcaaagaaacaacacctcagcagctgcccgtttccttagtctccacttcagagggggatgcgaagaggtcggcccagctccggtgaccatgaaggtggcacaggaattacagtgtgaatggctgtgtcagatgttttcgtacctcagattaaaaatattgctgaggtcagacgccacaattttcatgactttcttcagaagtagcacattttcgtgacttccgctgtcctctgaaaaacaaagttatttggaacatgttcatgcaaaagtgattctgaccaagtctaaatcgagcttttctactgacatgaaactgttggaaactgatctcattttataagaaatgattttcccctcaaggaggcgtctgtaattccagaacagtccagacatcagctgtacctcatgctcagtagtttttatttgagtttcttttgtgagttaactatgggagatttaacctcttttgccaaagagggaagtgtgtgtgtttttttaatagaaaatatggaccaaaaatttttttccctgaagaatgtattataaccctatttgtgtggttattacatcctgtgaaatgtatatatgttaaaataatgggggtgctggaaggtcatggcagactagctgctggttagtgtggaggggaagtggtttactttgtagagtttacatggttttatgcgcacactaattgtaataaactatgccaaaccaaaaaaaaataactc

SEQ ID NO: 364187 - DNA, 613 bp, Homo sapiens
gacatccctcctctctcaggtaatgattcattggtgtggcgcaagacaagtcaaagcaccagtgtttcaactaagaaagaagatgagacaatcacaaggcccatcccctcggaagaaacatccacaggaataaacattacaacggtggctattccattggtgctccttgttgtcctggtgtttgctggaatggggatctttgcagcctttagaaagaagaagaagaaaggaagtccgtatggatcagcagaggctcagaaaacagactgttggaagcagattaaatatccctttgccagacatcagtcagctgagtttaccatcagctatgataatgagaaggagatgacacaaaagttagatctcatcacaagtgatatggcagcttctccagagccagtttcagagccacttcctccctgaagtatgtccccatgccccaggacgtcgtcgtcgcccccatctctgagaagaccctgcgaagcttcctgagcaggcggtgcggttgtgtactgcctgcgggtggcttctgtggctttcacatcagggttttccgcagtgcctgggacacctgagggcacccggggggaaagtcagtcaccacgacctgaag

SEQ ID NO: 364188 - DNA, 2084 bp, Homo sapiens
tctctggttcaggtagatattcataagttaaagcatgccttagtgtaatgtgcttgtatgaaatgcttctaaagacacccacagttttggactggagtatagtagagatgaagtgagaccatgtggtcatgaggaattgcttcaggatgactgcatgagctagttgataaacttaataaggcactgatttctaatatgcaaaataagattagtatatattcttctagtgaaatcttgtgacctttcttataaatgagataaatttatagataattctacatatttgtatgattttctaaagcacatggcagctgccatctcatttaattctcacatcaaccctatgaggtaagtactattatgatccttatgttatatagggagagagaggcagatacattggcttataaatattcagtaggactttttgtcttgataggaagaagaagaaaggaagtccgtatggatcagcagaggctcagaaaacagactgttggaagcagattaaatatccctttgccagacatcagtcagctgagtttaccatcagctatgataatgagaaggagatgacacaaaagttagatctcatcacaagtgatatggcagattaccagcagcccctcatgattggcaccgggacagtcacgaggaagggctccaccttccggcccatggacacggatgccgaggaggcaggggtgagcaccgatgccggcggccactatgactgcccgcagcgggccggccgccacgagtacgcgctgcccctggcgcccccggagcccgagtacgccacgcccatcgtggagcggcacgtgctgcgcgcccacacgttctctgcgcagagcggctaccgcgtcccagggccccagcccggccacaaacactccctctcctcgggcggcttctcccccgtagcgggtgtgggcgcccaggacggagactatcaaaggccacacagcgcacagcctgcggacaggggctacgaccggcccaaagctgtcagcgccctcgccaccgaaagcggacaccctgactctcagaagcccccaacgcatcccgggacgagtgacagctattctgcccccagagactgcctcacacccctcaaccagacggccatgactgcccttttgtgaacacaatgtgaaagaagcctgctgtggtactgagcgtcgggctgtcacaaggcactggaagaagggagcctgctggtccagagtgtgcgtgtgtatcgaactgaaagcatttttaacattcttctcctggaagaaatgaattacttgaagcatgaaaagcacaccagggtggttgtttatttagcaattatgactgtagatttaaaaacaagcaaagaaacaacacctcagcagctgcccgtttccttagtctccacttcagagggggatgcgaagaggtcggcccagctccggtgaccatgaaggtggcacaggaattacagtgtgaatggctgtgtcagatgttttcgtacctcagattaaaaatattgctgaggtcagacgccacaattttcatgactttcttcagaagtagcacattttcgtgacttccgctgtcctctgaaaaacaaagttatttggaacatgttcatgcaaaagtgattctgaccaagtctaaatcgagcttttctactgacatgaaactgttggaaactgatctcattttataagaaatgattttcccctcaaggaggcgtctgtaattccagaacagtccagacatcagctgtacctcatgctcagtagtttttatttgagtttcttttgtgagttaactatgggagatttaacctcttttgccaaagagggaagtgtgtgtgtttttttaatagaaaatatggaccaaaaatttttttccctgaagaatgtattataaccctatttgtgtggttattacatcctgtgaaatgtatatatgttaaaataatgggggtgctggaaggtcatggcagactagctgctggttagtgtggaggggaagtggtttactttgtagagtttacatggttttatgcgcacactaattgtaataaactatgccaaaccaaaaaaaaataactc

SEQ ID NO: 364189 - DNA, 551 bp, Homo sapiens
gacatccctcctctctcaggtaatgattcattggtgtggcgcaagacaagtcaaagcaccagtgtttcaactaagaaagaagatgagacaatcacaaggcccatcccctcggaagaaacatccacaggaataaacattacaacggtggctattccattggtgctccttgttgtcctggtgtttgctggaatggggatctttgcagcctttagaaagaagaagaagaaaggaagtccgtatggatcagcagaggctcagaaaacagactgttggaagcagattaaatatccctttgccagacatcagtcagctgagtttaccatcagctatgataatgagaaggagatgacacaaaagttagatctcatcacaagtgatatggcaggttaactccgttgactgccaaaatagcatccccaacgtgcagccctccgcatctatcagcaggttgccccggatggatctcagagatgaggattggaacaccatgttctttcccaccctaacaacaacaaagggcagtaaattaaagtactctttgtaaggtacag

SEQ ID NO: 364190 - DNA, 917 bp, Homo sapiens
cggggtttcactgtgttaatcaggatggtctcgatctcctgacctcgtgatccgcccgcctcggcctcccaaagtgctgcgattacaggcatgggcatgagccaccgcgcctggccggaaactggcttttaaatggggagaagtgaagcatgaactgtagctcctttcagacttgggaaggcccttctccctgggcactggttgcctcactgggaagatgagagtgccagcctctcaagagctcctttctgttctgatattccaggagcacgtgaattgcctctgcttacgttcaggccctgtcctaaacccagccgtctagcacccagtgatcccatgcctttgggaatcccaggatgctgcccaacgggaaatttgtacattgggtgctatcaatgccacatcacagggaccagccatcacagagcaaagtgacctccacgtctgatgctggggtcatcaggacggacccatcatggctgtctttttgccccaccccctgccgtcagttcttcctttctccgtggctggcttcccgcactagggaacgggttgtaaatggggaacatgacttccttccggagtccttgagcacctcagctaaggaccgcagtgccctgtagagttcctagattacctcactgggaatagcattgtgcgtgtccggaaaagggctccatttggttccagcccactcccctctgcaagtgccgcagcttccctcagagcatactctccagtggatccaagtactctctctcctaaagacaccaccttcctgccagctgtttgcccttaggccagtacacagaattaaagtgggggagatggcagacgctttctgggacctgcccaagatatgtattctctgacactcttatttggtcataaaacaataaatggtgtcaatttcaaac

SEQ ID NO: 364191 - DNA, 2074 bp, Homo sapiens
gaggttccggtgctcgccgccgcccagctcccagccgaggctttctcaaccgcgtcaataaaaggccgccccgacccgcccccgcgccccgcagccctgccggacaccccgggctgcagctgagcgggcgcagacgggccgaggcgggcgccgggcgcgcagggaccgagggaccgagtgctccccatgagcgcacgtgggccgggcggtccgcaagcccggctgagagcgcgccatggggcaggcgggctgcaaggggctctgcctgtcgctgttcgactacaagaccgagaagtatgtcatcgccaagaacaagaaggtgggcctgctgtaccggctgctgcaggcctccatcctggcgtacctggtcgtatgggtgttcctgataaagaagggttaccaagacgtcgacacctccctgcagagtgctgtcatcaccaaagtcaagggcgtggccttcaccaacacctcggatcttgggcagcggatctgggatgtcgccgactacgtcattccagcccagaatgaaggcattcctgatggcgcgtgctccaaggacagcgactgccacgctggggaagcggttacagctggaaacggagtgaagaccggccgctgcctgcggagagagaacttggccaggggcacctgtgagatctttgcctggtgcccgttggagacaagctccaggccggaggagccattcctgaaggaggccgaagacttcaccattttcataaagaaccacatccgtttccccaaattcaacttctccaaaagcaatgtgatggacgtcaaggacagatctttcctgaaatcatgccactttggccccaagaaccactactgccccatcttccgactgggctccgtgatccgctgggccgggagcgacttccaggatatagccctggagggtggcgtgataggaattaatattgaatggaactgtgatcttgataaagctgcctctgagtgccaccctcactattcttttagccgtctggacaataaactttcaaagtctgtctcctccgggtacaacttcagatttgccagatattaccgagacgcagccggggtggagttccgcaccctgatgaaagcctacgggatccgctttgacgtgatggtgaacggcaagggtgctttcttctgcgacctggtactcatctacctcatcaaaaagagagagttttaccgtgacaagaagtacgaggaagtgaggggcctagaagacagttcccaggaggccgaggacgaggcatcggggctggggctatctgagcagctcacatctgggccagggctgctggggatgccggagcagcaggagctgcaggagccacccgaggcgaagcgtggaagcagcagtcagaaggggaacggatctgtgtgcccacagctcctggagccccacaggagcacgtgaattgcctctgcttacgttcaggccctgtcctaaacccagccgtctagcacccagtgatcccatgcctttgggaatcccaggatgctgcccaacgggaaatttgtacattgggtgctatcaatgccacatcacagggaccagccatcacagagcaaagtgacctccacgtctgatgctggggtcatcaggacggacccatcatggctgtctttttgccccaccccctgccgtcagttcttcctttctccgtggctggcttcccgcactagggaacgggttgtaaatggggaacatgacttccttccggagtccttgagcacctcagctaaggaccgcagtgccctgtagagttcctagattacctcactgggaatagcattgtgcgtgtccggaaaagggctccatttggttccagcccactcccctctgcaagtgccgcagcttccctcagagcatactctccagtggatccaagtactctctctcctaaagacaccaccttcctgccagctgtttgcccttaggccagtacacagaattaaagtgggggagatggcagacgctttctgggacctgcccaagatatgtattctctgacactcttatttggtcataaaacaataaatggtgtcaatttcaaac

SEQ ID NO: 364192 - DNA, 850 bp, Homo sapiens
aattagtaagcaatatattcctcatcttgcaaagaaattcaaattatggaaatgctttaaatgagcaactattaaaattatagactaggaaggaactgataaaactggtacttttcattcaagtagtgtaatctaacacaactctggaagtaacttggaaccaaatttttatcctctgctgtaggaacttattaattttctcaaaacaatataaacgcagacattcattgcagtattttttatagtagtgaacatttcaaacttactgcccaacaatagggaaatggttaagtacatcagctcgcttatccctcttccttttttctcctctcccaccaggctgaggactccctctgcttctcccttacaccaggaatgaacctttccttcccactcagaggaggttctgagaggactgaggtgggcaaaccactgaggatcttcagtgggggcagagaaagggctcactgagatggggggcaacgctatggcctcagcttctccttggcgtcgtgtgcatgtgttcctgaagccgaaacggaatttaacaggtctgggtcccagatccatttccatgactggccatgggctatctatgatctgtcaaaaggggacttggattcaagctctcagatccccttccaatctaaaacagattctttttttaaaaaaaatccaaatgtgattacgtcacttcagactaaaaacttccaaaggcttcccccatttgctctgaggatcaaggccagggcaaatgggagctcactgcagcctcaacctcctgggctcaagtgatcttgatcttcccattccagcctcctgagtagctggactacaggcgcatgtcccc

SEQ ID NO: 364193 - DNA, 2212 bp, Homo sapiens
gaggttccggtgctcgccgccgcccagctcccagccgaggctttctcaaccgcgtcaataaaaggccgccccgacccgcccccgcgccccgcagccctgccggacaccccgggctgcagctgagcgggcgcagacgggccgaggcgggcgccgggcgcgcagggaccgagggaccgagtgctccccatgagcgcacgtgggccgggcggtccgcaagcccggctgagagcgcgccatggggcaggcgggctgcaaggggctctgcctgtcgctgttcgactacaagaccgagaagtatgtcatcgccaagaacaagaaggtgggcctgctgtaccggctgctgcaggcctccatcctggcgtacctggtcgtatgggtgttcctgataaagaagggttaccaagacgtcgacacctccctgcagagtgctgtcatcaccaaagtcaagggcgtggccttcaccaacacctcggatcttgggcagcggatctgggatgtcgccgactacgtcattccagcccagggagagaacgtcttttttgtggtcaccaacctgattgtgacccccaaccagcggcagaacgtctgtgctgagaatgaaggcattcctgatggcgcgtgctccaaggacagcgactgccacgctggggaagcggttacagctggaaacggagtgaagaccggccgctgcctgcggagagagaacttggccaggggcacctgtgagatctttgcctggtgcccgttggagacaagctccaggccggaggagccattcctgaaggaggccgaagacttcaccattttcataaagaaccacatccgtttccccaaattcaacttctccaaaagcaatgtgatggacgtcaaggacagatctttcctgaaatcatgccactttggccccaagaaccactactgccccatcttccgactgggctccgtgatccgctgggccgggagcgacttccaggatatagccctggagggtggcgtgataggaattaatattgaatggaactgtgatcttgataaagctgcctctgagtgccaccctcactattcttttagccgtctggacaataaactttcaaagtctgtctcctccgggtacaacttcagatttgccagatattaccgagacgcagccggggtggagttccgcaccctgatgaaagcctacgggatccgctttgacgtgatggtgaacggcaaggcagggaagttcagcatcattcccaccatcatcaacgtgggctctggggtggcgctcatgggtgctggtgctttcttctgcgacctggtactcatctacctcatcaaaaagagagagttttaccgtgacaagaagtacgaggaagtgaggggcctagaagacagttcccaggaggccgaggacgaggcatcggggctggggctatctgagcagctcacatctgggccagggctgctggggatgccggagcagcaggagctgcaggagccacccgaggcgaagcgtggaagcagcagtcagaaggggaacggatctgtgtgcccacagctcctggagccccacaggagcacgtgaattgcctctgcttacgttcaggccctgtcctaaacccagccgtctagcacccagtgatcccatgcctttgggaatcccaggatgctgcccaacgggaaatttgtacattgggtgctatcaatgccacatcacagggaccagccatcacagagcaaagtgacctccacgtctgatgctggggtcatcaggacggacccatcatggctgtctttttgccccaccccctgccgtcagttcttcctttctccgtggctggcttcccgcactagggaacgggttgtaaatggggaacatgacttccttccggagtccttgagcacctcagctaaggaccgcagtgccctgtagagttcctagattacctcactgggaatagcattgtgcgtgtccggaaaagggctccatttggttccagcccactcccctctgcaagtgccgcagcttccctcagagcatactctccagtggatccaagtactctctctcctaaagacaccaccttcctgccagctgtttgcccttaggccagtacacagaattaaagtgggggagatggcagacgctttctgggacctgcccaagatatgtattctctgacactcttatttggtcataaaacaataaatggtgtcaatttcaaac

SEQ ID NO: 364194 - DNA, 1924 bp, Homo sapiens
gaggttccggtgctcgccgccgcccagctcccagccgaggctttctcaaccgcgtcaataaaaggccgccccgacccgcccccgcgccccgcagccctgccggacaccccgggctgcagctgagcgggcgcagacgggccgaggcgggcgccgggcgcgcagggaccgagggaccgagtgctccccatgagcgcacgtgggccgggcggtccgcaagcccggctgagagcgcgccatggggcaggcgggctgcaaggggctctgcctgtcgctgttcgactacaagaccgagaagtatgtcatcgccaagaacaagaaggtgggcctgctgtaccggctgctgcaggcctccatcctggcgtacctggtcgtatgggtgttcctgataaagaagggttaccaagacgtcgacacctccctgcagagtgctgtcatcaccaaagtcaagggcgtggccttcaccaacacctcggatcttgggcagcggatctgggatgtcgccgactacgtcattccagcccagggagagaacgtcttttttgtggtcaccaacctgattgtgacccccaaccagcggcagaacgtctgtgctgagaatgaaggcattcctgatggcgcgtgctccaaggacagcgactgccacgctggggaagcggttacagctggaaacggagtgaagaccggccgctgcctgcggagagagaacttggccaggggcacctgtgagatctttgcctggtgcccgttggagacaagctccaggccggaggagccattcctgaaggaggccgaagacttcaccattttcataaagaaccacatccgtttccccaaattcaacttctccaaccgtctggacaataaactttcaaagtctgtctcctccgggtacaacttcagatttgccagatattaccgagacgcagccggggtggagttccgcaccctgatgaaagcctacgggatccgctttgacgtgatggtgaacggcaagggtgctttcttctgcgacctggtactcatctacctcatcaaaaagagagagttttaccgtgacaagaagtacgaggaagtgaggggcctagaagacagttcccaggaggccgaggacgaggcatcggggctggggctatctgagcagctcacatctgggccagggctgctggggatgccggagcagcaggagctgcaggagccacccgaggcgaagcgtggaagcagcagtcagaaggggaacggatctgtgtgcccacagctcctggagccccacaggagcacgtgaattgcctctgcttacgttcaggccctgtcctaaacccagccgtctagcacccagtgatcccatgcctttgggaatcccaggatgctgcccaacgggaaatttgtacattgggtgctatcaatgccacatcacagggaccagccatcacagagcaaagtgacctccacgtctgatgctggggtcatcaggacggacccatcatggctgtctttttgccccaccccctgccgtcagttcttcctttctccgtggctggcttcccgcactagggaacgggttgtaaatggggaacatgacttccttccggagtccttgagcacctcagctaaggaccgcagtgccctgtagagttcctagattacctcactgggaatagcattgtgcgtgtccggaaaagggctccatttggttccagcccactcccctctgcaagtgccgcagcttccctcagagcatactctccagtggatccaagtactctctctcctaaagacaccaccttcctgccagctgtttgcccttaggccagtacacagaattaaagtgggggagatggcagacgctttctgggacctgcccaagatatgtattctctgacactcttatttggtcataaaacaataaatggtgtcaatttcaaac

SEQ ID NO: 364195 - DNA, 2005 bp, Homo sapiens
gaggttccggtgctcgccgccgcccagctcccagccgaggctttctcaaccgcgtcaataaaaggccgccccgacccgcccccgcgccccgcagccctgccggacaccccgggctgcagctgagcgggcgcagacgggccgaggcgggcgccgggcgcgcagggaccgagggaccgagtgctccccatgagcgcacgtgggccgggcggtccgcaagcccggctgagagcgcgccatggggcaggcgggctgcaaggggctctgcctgtcgctgttcgactacaagaccgagaagtatgtcatcgccaagaacaagaaggtgggcctgctgtaccggctgctgcaggcctccatcctggcgtacctggtcgtatgggtgttcctgataaagaagggttaccaagacgtcgacacctccctgcagagtgctgtcatcaccaaagtcaagggcgtggccttcaccaacacctcggatcttgggcagcggatctgggatgtcgccgactacgtcattccagcccagggagagaacgtcttttttgtggtcaccaacctgattgtgacccccaaccagcggcagaacgtctgtgctgagaatgaaggcattcctgatggcgcgtgctccaaggacagcgactgccacgctggggaagcggttacagctggaaacggagtgaagaccggccgctgcctgcggagagagaacttggccaggggcacctgtgagatctttgcctggtgcccgttggagacaagctccaggccggaggagccattcctgaaggaggccgaagacttcaccattttcataaagaaccacatccgtttccccaaattcaacttctccaaaagcaatgtgatggacgtcaaggacagatctttcctgaaatcatgccactttggccccaagaaccactactgccccatcttccgactgggctccgtgatccgctgggccgggagcgacttccaggatatagccctggagggtggcgtgataggaattaatattgaatggaactgtgatcttgataaagctgcctctgagtgccaccctcactattcttttagccgtctggacaataaactttcaaagtctgtctcctccgggtacaacttcagatttgccagatattaccgagacgcagccggggtggagttccgcaccctgatgaaagcctacgggatccgctttgacgtgatggtgaacggcaagggtgctttcttctgcgacctggtactcatctacctcatcaaaaagagagagttttaccgtgacaagaagtacgaggaagtgaggggcctagaagacagttcccaggaggccgaggacgaggcatcggggctggggctatctgagcagctcacatctgggccagggctgctggggatgccggagcagcaggagctgcaggagccacccgaggcgaagcgtggaagcagcagtcagaaggggaacggatctgtgtgcccacagctcctggagccccacaggctgaggactccctctgcttctcccttacaccaggaatgaacctttccttcccactcagaggaggttctgagaggactgaggtgggcaaaccactgaggatcttcagtgggggcagagaaagggctcactgagatggggggcaacgctatggcctcagcttctccttggcgtcgtgtgcatgtgttcctgaagccgaaacggaatttaacaggtctgggtcccagatccatttccatgactggccatgggctatctatgatctgtcaaaaggggacttggattcaagctctcagatccccttccaatctaaaacagattctttttttaaaaaaaatccaaatgtgattacgtcacttcagactaaaaacttccaaaggcttcccccatttgctctgaggatcaaggccagggcaaatgggagctcactgcagcctcaacctcctgggctcaagtgatcttgatcttcccattccagcctcctgagtagctggactacaggcgcatgtcccc

SEQ ID NO: 364196 - DNA, 2146 bp, Homo sapiens
gaggttccggtgctcgccgccgcccagctcccagccgaggctttctcaaccgcgtcaataaaaggccgccccgacccgcccccgcgccccgcagccctgccggacaccccgggctgcagctgagcgggcgcagacgggccgaggcgggcgccgggcgcgcagggaccgagggaccgagtgctccccatgagcgcacgtgggccgggcggtccgcaagcccggctgagagcgcgccatggggcaggcgggctgcaaggggctctgcctgtcgctgttcgactacaagaccgagaagtatgtcatcgccaagaacaagaaggtgggcctgctgtaccggctgctgcaggcctccatcctggcgtacctggtcgtatgggtgttcctgataaagaagggttaccaagacgtcgacacctccctgcagagtgctgtcatcaccaaagtcaagggcgtggccttcaccaacacctcggatcttgggcagcggatctgggatgtcgccgactacgtcattccagcccagggagagaacgtcttttttgtggtcaccaacctgattgtgacccccaaccagcggcagaacgtctgtgctgagaatgaaggcattcctgatggcgcgtgctccaaggacagcgactgccacgctggggaagcggttacagctggaaacggagtgaagaccggccgctgcctgcggagagagaacttggccaggggcacctgtgagatctttgcctggtgcccgttggagacaagctccaggccggaggagccattcctgaaggaggccgaagacttcaccattttcataaagaaccacatccgtttccccaaattcaacttctccaaaagcaatgtgatggacgtcaaggacagatctttcctgaaatcatgccactttggccccaagaaccactactgccccatcttccgactgggctccgtgatccgctgggccgggagcgacttccaggatatagccctggagggtggcgtgataggaattaatattgaatggaactgtgatcttgataaagctgcctctgagtgccaccctcactattcttttagccgtctggacaataaactttcaaagtctgtctcctccgggtacaacttcagatttgccagatattaccgagacgcagccggggtggagttccgcaccctgatgaaagcctacgggatccgctttgacgtgatggtgaacggcaagggtgctttcttctgcgacctggtactcatctacctcatcaaaaagagagagttttaccgtgacaagaagtacgaggaagtgaggggcctagaagacagttcccaggaggccgaggacgaggcatcggggctggggctatctgagcagctcacatctgggccagggctgctggggatgccggagcagcaggagctgcaggagccacccgaggcgaagcgtggaagcagcagtcagaaggggaacggatctgtgtgcccacagctcctggagccccacaggagcacgtgaattgcctctgcttacgttcaggccctgtcctaaacccagccgtctagcacccagtgatcccatgcctttgggaatcccaggatgctgcccaacgggaaatttgtacattgggtgctatcaatgccacatcacagggaccagccatcacagagcaaagtgacctccacgtctgatgctggggtcatcaggacggacccatcatggctgtctttttgccccaccccctgccgtcagttcttcctttctccgtggctggcttcccgcactagggaacgggttgtaaatggggaacatgacttccttccggagtccttgagcacctcagctaaggaccgcagtgccctgtagagttcctagattacctcactgggaatagcattgtgcgtgtccggaaaagggctccatttggttccagcccactcccctctgcaagtgccgcagcttccctcagagcatactctccagtggatccaagtactctctctcctaaagacaccaccttcctgccagctgtttgcccttaggccagtacacagaattaaagtgggggagatggcagacgctttctgggacctgcccaagatatgtattctctgacactcttatttggtcataaaacaataaatggtgtcaatttcaaac

SEQ ID NO: 364197 - DNA, 1125 bp, Homo sapiens
gaggttccggtgctcgccgccgcccagctcccagccgaggctttctcaaccgcgtcaataaaaggccgccccgacccgcccccgcgccccgcagccctgccggacaccccgggctgcagctgagcgggcgcagacgggccgaggcgggcgccgggcgcgcagggaccgagggaccgagtgctccccatgagcgcacgtgggccgggcggtccgcaagcccggctgagagcgcgccatggggcaggcgggctgcaaggggctctgcctgtcgctgttcgactacaagaccgagaagtatgtcatcgccaagaacaagaaggtgggcctgctgtaccggctgctgcaggcctccatcctggcgtacctggtcgtatgggtgttcctgataaagaagggttaccaagacgtcgacacctccctgcagagtgctgtcatcaccaaagtcaagggcgtggccttcaccaacacctcggatcttgggcagcggatctgggatgtcgccgactacgtcattccagcccagggagagaacgtcttttttgtggtcaccaacctgattgtgacccccaaccagcggcagaacgtctgtgctgagaatgaaggcattcctgatggcgcgtgctccaaggacagcgactgccacgctggggaagcggttacagctggaaacggagtgaagaccggccgctgcctgcggagagagaacttggccaggggcacctgtgagatctttgcctggtgcccgttggagacaagctccaggccggagtgagtggctgcagcctcaggaccctgaggggtttcccagccccgtgcggtgggtcccagcctgagggtggagtcctgcccactctgggagcctcacgctgagggaggagtcaggctgtcccagcgaggcccgacggcctccccagcatgagcaaattaactgtcctgggcagaggctccaggggacccaaggaacaggcctcacactggcccaggcctgggggaggggcacaggggtggggcctcctggacaggctgttctgggttggttttcagggagccattcctgaaggaggccgaagacttcaccattttcataaagaaccacatccgtttccccaaattcaacttctccaa

SEQ ID NO: 364198 - DNA, 2198 bp, Homo sapiens
gaggttccggtgctcgccgccgcccagctcccagccgaggctttctcaaccgcgtcaataaaaggccgccccgacccgcccccgcgccccgcagccctgccggacaccccgggctgcagctgagcgggcgcagacgggccgaggcgggcgccgggcgcgcagggaccgagggaccgagtgctccccatgagcgcacgtgggccgggcggtccgcaagcccggctgagagcgcgccatggggcaggcgggctgcaaggggctctgcctgtcgctgttcgactacaagaccgagaagtatgtcatcgccaagaacaagaaggtgggcctgctgtaccggctgctgcaggcctccatcctggcgtacctggtcgtatgggtgttcctgataaagaagggttaccaagacgtcgacacctccctgcagagtgctgtcatcaccaaagtcaagggcgtggccttcaccaacacctcggatcttgggcagcggatctgggatgtcgccgactacgtcattccagcccagggagagaacgtcttttttgtggtcaccaacctgattgtgacccccaaccagcggcagaacgtctgtgctgagaatgaaggcattcctgatggcgcgtgctccaaggacagcgactgccacgctggggaagcggttacagctggaaacggagtgaagaccggccgctgcctgcggagagagaacttggccaggggcacctgtgagatctttgcctggtgcccgttggagacaagctccaggccggaggagccattcctgaaggaggccgaagacttcaccattttcataaagaaccacatccgtttccccaaattcaacttctccaaaagcaatgtgatggacgtcaaggacagatctttcctgaaatcatgccactttggccccaagaaccactactgccccatcttccgactgggctccgtgatccgctgggccgggagcgacttccaggatatagccctggagggtggcgtgataggaattaatattgaatggaactgtgatcttgataaagctgcctctgagtgccaccctcactattcttttagccgtctggacaataaactttcaaagtctgtctcctccgggtacaacttcagatttgccagatattaccgagacgcagccggggtggagttccgcaccctgatgaaagcctacgggatccgctttgacgtgatggtgaacggcaagggtgctttcttctgcgacctggtactcatctacctcatcaaaaagagagagttttaccgtgacaagaagtacgaggaagtgaggggcctagaagacagttcccaggaggccgaggacgaggcatcggggctggggctatctgagcagctcacatctgggccagggctgctggggatgccggagcagcaggagctgcaggagccacccgaggcgaagcgtggaagcagcagtcagaaggggaacggatctgtgtgcccacagctcctggagccccacaggagcacgtgaattgcctctgcttacgttcaggccctgtcctaaacccagccgtctagcacccagtgatcccatgcctttgggaatcccaggatgctgcccaacgggaaatttgtacattgggtgctatcaatgccacatcacagggaccagccatcacagagcaaagtgacctccacgtctgatgctggggtcatcaggacggacccatcatggctgtctttttgccccaccccctgccgtcagttcttcctttctccgtggctggcttcccgcactagggaacgggttgtaaatggggaacatgacttccttccggagtccttgagcacctcagctaaggaccgcagtgccctgtagagttcctagattacctcactgggaatagcattgtgcgtgtccggaaaagggctccatttggttccagcccactcccctctgcaagtgccgcagcttccctcagagcatactctccagtggatccaagtactctctctcctaaagacaccaccttcctgccagctgtttgcccttaggccagtacacagaattaaagtgggggagatggcagacgctttctgggacctgcccaagatatgtattctctgacactcttatttggtcataaaacaataaatggtgtcaatttcaaacaaaaaaccaaaaaaaataaaaaacggccgaagcaaaaatcccacagggcccc

SEQ ID NO: 364199 - DNA, 1990 bp, Homo sapiens
gaggttccggtgctcgccgccgcccagctcccagccgaggctttctcaaccgcgtcaataaaaggccgccccgacccgcccccgcgccccgcagccctgccggacaccccgggctgcagctgagcgggcgcagacgggccgaggcgggcgccgggcgcgcagggaccgagggaccgagtgctccccatgagcgcacgtgggccgggcggtccgcaagcccggctgagagcgcgccatggggcaggcgggctgcaaggggctctgcctgtcgctgttcgactacaagaccgagaagtatgtcatcgccaagaacaagaaggtgggcctgctgtaccggctgctgcaggcctccatcctggcgtacctggtcgtatgggtgttcctgataaagaagggttaccaagacgtcgacacctccctgcagagtgctgtcatcaccaaagtcaagggcgtggccttcaccaacacctcggatcttgggcagcggatctgggatgtcgccgactacgtcattccagcccagggagagaacgtcttttttgtggtcaccaacctgattgtgacccccaaccagcggcagaacgtctgtgctgagaatgaaggcattcctgatggcgcgtgctccaaggacagcgactgccacgctggggaagcggttacagctggaaacggagtgaagaccggccgctgcctgcggagagagaacttggccaggggcacctgtgagatctttgcctggtgcccgttggagacaagctccaggccggaggagccattcctgaaggaggccgaagacttcaccattttcataaagaaccacatccgtttccccaaattcaacttctccaaccgtctggacaataaactttcaaagtctgtctcctccgggtacaacttcagatttgccagatattaccgagacgcagccggggtggagttccgcaccctgatgaaagcctacgggatccgctttgacgtgatggtgaacggcaaggcagggaagttcagcatcattcccaccatcatcaacgtgggctctggggtggcgctcatgggtgctggtgctttcttctgcgacctggtactcatctacctcatcaaaaagagagagttttaccgtgacaagaagtacgaggaagtgaggggcctagaagacagttcccaggaggccgaggacgaggcatcggggctggggctatctgagcagctcacatctgggccagggctgctggggatgccggagcagcaggagctgcaggagccacccgaggcgaagcgtggaagcagcagtcagaaggggaacggatctgtgtgcccacagctcctggagccccacaggagcacgtgaattgcctctgcttacgttcaggccctgtcctaaacccagccgtctagcacccagtgatcccatgcctttgggaatcccaggatgctgcccaacgggaaatttgtacattgggtgctatcaatgccacatcacagggaccagccatcacagagcaaagtgacctccacgtctgatgctggggtcatcaggacggacccatcatggctgtctttttgccccaccccctgccgtcagttcttcctttctccgtggctggcttcccgcactagggaacgggttgtaaatggggaacatgacttccttccggagtccttgagcacctcagctaaggaccgcagtgccctgtagagttcctagattacctcactgggaatagcattgtgcgtgtccggaaaagggctccatttggttccagcccactcccctctgcaagtgccgcagcttccctcagagcatactctccagtggatccaagtactctctctcctaaagacaccaccttcctgccagctgtttgcccttaggccagtacacagaattaaagtgggggagatggcagacgctttctgggacctgcccaagatatgtattctctgacactcttatttggtcataaaacaataaatggtgtcaatttcaaac

SEQ ID NO: 364200 - DNA, 796 bp, Homo sapiens
acaggcaggccgtggcagcgggcgagggtggccctgcaaagtcacctgcccccagggactcagtgttttcagaactggctgtggcacacaggcaggccgtggcagcgggcgagggtggccctgcaaagtcacctgcccccagggactcagtgttttcagaactggctgtggcacacaggcaggctgtggcagcgctcagaccacgggcagtcagtgagagccagacctggcacctgctgtgcggttctgagtccttggggcaccagccgaaggtgaggcagagggaccccctttggcacatgctggctggagtgtgaagtgcctgtccagagaggcctaccctgtgcggctcccttctccctgaagaacgagggaggcagccctgaggcagggacgacgcagtgttctcagccgctccatggggggactaagcctcctggagggtggtctcgaggggctgacctcgtgcctgagcacctcctcctattgtccagtgccggtgaagggctggcctgggatgctgtccgtctccggaaagctgtgtgtgctgaccctcatctctcttttatcaagggtggcgtgataggaattaatattgaatggaactgtgatcttgataaagctgcctctgagtgccaccctcactattcttttagccgtctggacaataaactttcaaagtctgtctcctccgggtacaacttcaggtaaccgctgccttgtgcccacttgtgacctgaccatgatcagtggcactcactcatctgggtgccagcactattgaggccccttcctg

SEQ ID NO: 364201 - DNA, 1991 bp, Homo sapiens
gagcaatcccttctccctcctcctcctccccccgctactatccgcggcccagagaactgccgcttgccgccattgacacgcacagatagaacccaaagaaaggcaaagagtcctgcccggcaccggcgccgcgtgggccaaacctgcgcccgtggaggggcgcgcagagggcaccgggcgccgggagcaggcggcgcagcaccagcattgtgttagtgccgggaggccactgtgtcagcaagctgagagggaaactgaagcaagatgtcgggccggagtgggaagaagaaaatgtccaagctgtcccgttcagctagggcaggtgtcatctttccagtggggaggctgatgcgttatctgaagaaagggacgttcaagtaccggatcagcgtgggcgcccctgtctacatggcggcagtcattgagtacctggcagcggaaattctagaattggccggcaatgccgcgagggacaacaagaaggcccggatagccccgagacacatcttgctggcagttgccaatgacgaggagctcaaccagctgctaaaaggagtgaccatcgccagtggaggcgtcctgcccagaattcaccccgaactgctggccaaaaagcgagggaccaaaggcaagtcggaaacgatcctctccccacccccagagaaaagaggcaggaaggccacgtcaggcaagaagggggggaagaaatccaaggctgccaaaccacggacgtccaaaaagtccaaaccaaaggacagcgataaagaaggaacttcaaattccacctctgaagatgggccaggggatggattcaccattctgtcttctaagagccttgttctgggacagaagctgtccttaacccagagtgacatcagccatattggctccatgagagtggagggcattgtccacccaaccacagccgaaattgacctcaaagaagatataggtaaagccttggaaaaggctgggggaaaagagttcttggaaacggtaaaggagcttcgcaaatcccaaggccctttggaagtcgccgaagccgccgtcagccaatccagtggactcgcagccaaatttgtcatccactgtcacatccctcagtggggctccgacaaatgtgaagaacagcttgaagagaccatcaaaaactgcctgtcagcggcggaggacaagaagctaaagtccgtcgcgttcccgcctttccccagcggcagaaactgctttcccaaacagactgcggcccaggtgaccctcaaagccatctcagcccactttgatgactcgagcgcgtcctcgctgaagaacgtgtacttcctgctcttcgacagcgagagcatcggcatctacgtgcaggagatggccaagctcgacgccaagtagccgccgcactttccagcagggatcggaggacgacccgagtcccaagagtggggttttgctttttaaaaggagagaggaggggtgatggcaggggagtggagggtggccgggcaggtcctgccggcgcagggagccctctgcccttcacactctcctccaaaagagcctccatctgtaaggaagcaggtctccgcgaggggtttctttccatgtgttttcctcctgttgttttagaacttttttaaaaaaacagacctcgttttagatttatagcattgacttttacacacattcacacaagaaaaaaatcctttcaaaattcttaaatcttctgttcctcctttttccaagggaagagggcaaaaagtggcctgggctctgttggtgtgcgtgttccgtggcggagagaagaaaatgggaaagacatctcactggtgcttttctcttttgttttagtgccccccgcccccatccctataatatctgtaactactcctaaaaaggttttgattcaggcttttttttggtttcattttgtttttttaagaaaaagaaaatgaaaggaaaaaaataaaagatccagtgtctttcttaaaaaaaaaaacttt

SEQ ID NO: 364202 - DNA, 386 bp, Homo sapiens
tagcatggcccctgcgcaaggatgacgcaaattcgtgaagcgttccatattcattgacttttacacacattcacacaagaaaaaaatcctttcaaaattcttaaatcttctgttcctcctttttccaagggaagagggcaaaaagtggcctgggctctgttggtgtgcgtgttccgtggcggagagaagaaaatgggaaagacatctcactggtgcttttctcttttgttttagtgccccccgcccccatccctataatatctgtaactactcctaaaaaggttttgattcaggcttttttttggtttcattttgtttttttaagaaaaagaaaatgaaaggaaaaaaataaaagatccagtgtctttcttaaaaaaaaaaacttt

SEQ ID NO: 364203 - DNA, 1949 bp, Homo sapiens
ccccacacagatatacgctaagtacgagctcgggttaattcagcacaggaccaaagaaaggcaaagagtcctgcccggcaccggcgccgcgtgggccaaacctgcgcccgtggaggggcgcgcagagggcaccgggcgccgggagcaggcggcgcagcaccagcattgtgttagtgccgggaggccactgtgtcagcaagctgagagggaaactgaagcaagatgtcgggccggagtgggaagaagaaaatgtccaagctgtcccgttcagctagggcaggtgtcatctttccagtggggaggctgatgcgttatctgaagaaagggacgttcaagtaccggatcagcgtgggcgcccctgtctacatggcggcagtcattgagtacctggcagcggaaattctagaattggccggcaatgccgcgagggacaacaagaaggcccggatagccccgagacacatcttgctggcagttgccaatgacgaggagctcaaccagctgctaaaaggagtgaccatcgccagtggaggcgtcctgcccagaattcaccccgaactgctggccaaaaagcgagggaccaaaggcaagtcggaaacgatcctctccccacccccagagaaaagaggcaggaaggccacgtcaggcaagaagggggggaagaaatccaaggctgccaaaccacggacgtccaaaaagtccaaaccaaaggacagcgataaagaaggaacttcaaattccacctctgaagatgggccaggggatggattcaccattctgtcttctaagagccttgttctgggacagaagctgtccttaacccagagtgacatcagccatattggctccatgagagtggagggcattgtccacccaaccacagccgaaattgacctcaaagaagatataggtaaagccttggaaaaggctgggggaaaagagttcttggaaacggtaaaggagcttcgcaaatcccaaggccctttggaagtcgccgaagccgccgtcagccaatccagtggactcgcagccaaatttgtcatccactgtcacatccctcagtggggctccgacaaatgtgaagaacagcttgaagagaccatcaaaaactgcctgtcagcggcggaggacaagaagctaaagtccgtcgcgttcccgcctttccccagcggcagaaactgctttcccaaacagactgcggcccaggtgaccctcaaagccatctcagcccactttgatgactcgagcgcgtcctcgctgaagaacgtgtacttcctgctcttcgacagcgagagcatcggcatctacgtgcaggagatggccaagctcgacgccaagtagccgccgcactttccagcagggatcggaggacgacccgagtcccaagagtggggttttgctttttaaaaggagagaggaggggtgatggcaggggagtggagggtggccgggcaggtcctgccggcgcagggagccctctgcccttcacactctcctccaaaagagcctccatctgtaaggaagcaggtctccgcgaggggtttctttccatgtgttttcctcctgttgttttagaacttttttaaaaaaacagacctcgttttagatttatagcattgacttttacacacattcacacaagaaaaaaatcctttcaaaattcttaaatcttctgttcctcctttttccaagggaagagggcaaaaagtggcctgggctctgttggtgtgcgtgttccgtggcggagagaagaaaatgggaaagacatctcactggtgcttttctcttttgttttagtgccccccgcccccatccctataatatctgtaactactcctaaaaaggttttgattcaggcttttttttggtttcattttgtttttttaagaaaaagaaaatgaaaggaaaaaaataaaagatccagtgtctttcttaaaaaaaaaaacttt

SEQ ID NO: 364204 - DNA, 3233 bp, Homo sapiens
  misc_feature (5)..(5): n is a, c, g, or t
  misc_feature (1338)..(1338): n is a, c, g, or t
ttttntttccttatattgctgacttttgctcccctccttcaagaaacagcagaacacatcacctaaccacttcctttcatattcaacttggtggcagccgtgagaagagcttaataaaggcacctcaggctttttctggattggttctcatcttgccttttgatttttaccgacagtccaaaccaaaggacagcgataaagaaggaacttcaaattccacctctgaagatgggccaggggatggattcaccattctgtcttctaagagccttgttctgggacagaaggtaacaaagagaattgccttgtgctatattaaaacaccactgtatttttataacctactgtttacaagcaatgatgcctcctttcctcccctgataatgattttcactgcagtcttgaattattcatttttaaactaaagagctgtggcagtgtcagcattgtgagagtgagaattgttcttttttgctgagaattgttaacgctaacattggtcagacaagggtgagcatggaagctctttctggtcagtagataggatggcattactggttttgctgggaattccccacaccccagttatttctacatctgccaaaaaaaaatccatagctaactttctcagacagcttctgagaggcccatcttacatggttcaatgtaatttatcaaagaaagaaaatagaaatatatgtttcccaaatatccttggtattagaaatgaattatttgccaataattcagtctgcctgccttcctaggctttagaaagtaaacaaacagggctatgcatttgaacagtcttcagcaacacaacagcagcccaaccagacatgcaaataattcattcctacaagtgtaaagtttactgagcagacaatttatctaccaagtcaactggggctgaaataagacacccaaggaaagagtcagttaatcatatctctggtagctgaatgtttccatcttgacaacacagtaagcctccattcaaagaattgggaagagtatgttctaagaagagcatcggtgtggctggttgctaattcgtcactgatgaaagcagggaaacaaagaggtggaatttatgtcccctctctggcctgttcactgttacatgacgattagctttctctcacttagctaaggcaacataaaggtcttgctcacatgggccaacaatagagaatgccctccattccactctactgtgaacacataggatagcaattcccaatggtagccccaagactgtggtctccaaagggcaagggagccagacacccccaggtcagaatcccagagcccattacttctctccagcaaggttantggcttcagagccctgccccacagattttgtgttcttctagggagaatgcaggatgctgaggggagaagagagagcaagccctgggcttccttgcaggagcttctcagaagatgcatcactgaaaactaaggccaccagggttgggaaccaaaggcatgagctgtaagggaaagaaagaaaggagagggggccaggcgcggtggctcacgcctgtaatcccagcactttgggaggcagaggcgggtggatcaagaggtcgggagatcaagatcatcctggctaacacgatgaaactccgtctctactaaaaatacaaaaaattagctgggcatggtggcgggcgcctgtagtcccagctactcaggaggctgaggcaggagaatggcgtgaacctgggaggcagagcttgcagtgagccgagatcacgccactgcactccagcctgggagacagagtgagactccgtctcaaaaaaaaaaaaaaaaagagaggggaggccctgttcctgttccagggaagaagaaatggatttgttgcatgctgccagccccagagtggaaagcaaatccactgagctcaaagagcttattgcaagccaaacacctgggaaactggaggttgtcactctctatgcagcccctatgttgacattgggtatgaataattaaagagaattaatgaatgcaagtaaaatatgagatttttcaacagaattttatcttttccacattcaccaccttttcttcctaatgcagctgtccttaacccagagtgacatcagccatattggctccatgagagtggagggcattgtccacccaaccacagccgaaattgacctcaaagaagatataggtaaagccttggaaaaggctgggggaaaagagttcttggaaacggtaaaggagcttcgcaaatcccaaggccctttggaagtcgccgaagccgccgtcagccaatccagtggactcgcagccaaatttgtcatccactgtcacatccctcagtggggctccgacaaatgtgaagaacagcttgaagagaccatcaaaaactgcctgtcagcggcggaggacaagaagctaaagtccgtcgcgttcccgcctttccccagcggcagaaactgctttcccaaacagactgcggcccaggtgaccctcaaagccatctcagcccactttgatgactcgagcgcgtcctcgctgaagaacgtgtacttcctgctcttcgacagcgagagcatcggcatctacgtgcaggagatggccaagctcgacgccaagtagccgccgcactttccagcagggatcggaggacgacccgagtcccaagagtggggttttgctttttaaaaggagagaggaggggtgatggcaggggagtggagggtggccgggcaggtcctgccggcgcagggagccctctgcccttcacactctcctccaaaagagcctccatctgtaaggaagcaggtctccgcgaggggtttctttccatgtgttttcctcctgttgttttagaacttttttaaaaaaacagacctcgttttagatttatagcattgacttttacacacattcacacaagaaaaaaatcctttcaaaattcttaaatcttctgttcctcctttttccaagggaagagggcaaaaagtggcctgggctctgttggtgtgcgtgttccgtggcggagagaagaaaatgggaaagacatctcactggtgcttttctcttttgttttagtgccccccgcccccatccctataatatctgtaactactcctaaaaaggttttgattcaggcttttttttggtttcattttgtttttttaagaaaaagaaaatgaaaggaaaaaaataaaagatccagtgtctttcttaaaaaaaaaaacttt

SEQ ID NO: 364205 - DNA, 1877 bp, Homo sapiens
ctttcatggtcattctaagacatgcacgtacacggagcagcaaaacatcttagtcgccacaagcacaccttcccagctgagactgctccagcattgtgttagtgccgggaggccactgtgtcagcaagctgagagggaaactgaagcaagatgtcgggccggagtgggaagaagaaaatgtccaagctgtcccgttcagctagggcaggtgtcatctttccagtggggaggctgatgcgttatctgaagaaagggacgttcaagtaccggatcagcgtgggcgcccctgtctacatggcggcagtcattgagtacctggcagcggaaattctagaattggccggcaatgccgcgagggacaacaagaaggcccggatagccccgagacacatcttgctggcagttgccaatgacgaggagctcaaccagctgctaaaaggagtgaccatcgccagtggaggcgtcctgcccagaattcaccccgaactgctggccaaaaagcgagggaccaaaggcaagtcggaaacgatcctctccccacccccagagaaaagaggcaggaaggccacgtcaggcaagaagggggggaagaaatccaaggctgccaaaccacggacgtccaaaaagtccaaaccaaaggacagcgataaagaaggaacttcaaattccacctctgaagatgggccaggggatggattcaccattctgtcttctaagagccttgttctgggacagaagctgtccttaacccagagtgacatcagccatattggctccatgagagtggagggcattgtccacccaaccacagccgaaattgacctcaaagaagatataggtaaagccttggaaaaggctgggggaaaagagttcttggaaacggtaaaggagcttcgcaaatcccaaggccctttggaagtcgccgaagccgccgtcagccaatccagtggactcgcagccaaatttgtcatccactgtcacatccctcagtggggctccgacaaatgtgaagaacagcttgaagagaccatcaaaaactgcctgtcagcggcggaggacaagaagctaaagtccgtcgcgttcccgcctttccccagcggcagaaactgctttcccaaacagactgcggcccaggtgaccctcaaagccatctcagcccactttgatgactcgagcgcgtcctcgctgaagaacgtgtacttcctgctcttcgacagcgagagcatcggcatctacgtgcaggagatggccaagctcgacgccaagtagccgccgcactttccagcagggatcggaggacgacccgagtcccaagagtggggttttgctttttaaaaggagagaggaggggtgatggcaggggagtggagggtggccgggcaggtcctgccggcgcagggagccctctgcccttcacactctcctccaaaagagcctccatctgtaaggaagcaggtctccgcgaggggtttctttccatgtgttttcctcctgttgttttagaacttttttaaaaaaacagacctcgttttagatttatagcattgacttttacacacattcacacaagaaaaaaatcctttcaaaattcttaaatcttctgttcctcctttttccaagggaagagggcaaaaagtggcctgggctctgttggtgtgcgtgttccgtggcggagagaagaaaatgggaaagacatctcactggtgcttttctcttttgttttagtgccccccgcccccatccctataatatctgtaactactcctaaaaaggttttgattcaggcttttttttggtttcattttgtttttttaagaaaaagaaaatgaaaggaaaaaaataaaagatccagtgtctttcttaaaaaaaaaaacttt

SEQ ID NO: 364206 - DNA, 1848 bp, Homo sapiens
tttttttttagagacagggtctcactctgttgcccaggctggggtgcagtggcacaatcatagctcactgcagccttgaactcctggctgggctcaagcgatcctcctgcctcggcctcctgagtagctgggactaacttgagttctcttacgcttcctggatttctttccaggccgagacatagaaatcacaaatgaatgaatgtgatcaaacttgaaggccatttctaaagaaaagctttagctcaggccccattctgtgattgcctgttaatgcctccttgtgatttcagcggaaattctagaattggccggcaatgccgcgagggacaacaagaaggcccggatagccccgagacacatcttgctggcagttgccaatgacgaggagctcaaccagctgctaaaaggagtgaccatcgccagtggaggcgtcctgcccagaattcaccccgaactgctggccaaaaagcgagggaccaaaggcaagtcggaaacgatcctctccccacccccagagaaaagaggcaggaaggccacgtcaggcaagaagggggggaagaaatccaaggctgccaaaccacggacgtccaaaaagtccaaaccaaaggacagcgataaagaaggaacttcaaattccacctctgaagatgggccaggggatggattcaccattctgtcttctaagagccttgttctgggacagaagctgtccttaacccagagtgacatcagccatattggctccatgagagtggagggcattgtccacccaaccacagccgaaattgacctcaaagaagatataggtaaagccttggaaaaggctgggggaaaagagttcttggaaacggtaaaggagcttcgcaaatcccaaggccctttggaagtcgccgaagccgccgtcagccaatccagtggactcgcagccaaatttgtcatccactgtcacatccctcagtggggctccgacaaatgtgaagaacagcttgaagagaccatcaaaaactgcctgtcagcggcggaggacaagaagctaaagtccgtcgcgttcccgcctttccccagcggcagaaactgctttcccaaacagactgcggcccaggtgaccctcaaagccatctcagcccactttgatgactcgagcgcgtcctcgctgaagaacgtgtacttcctgctcttcgacagcgagagcatcggcatctacgtgcaggagatggccaagctcgacgccaagtagccgccgcactttccagcagggatcggaggacgacccgagtcccaagagtggggttttgctttttaaaaggagagaggaggggtgatggcaggggagtggagggtggccgggcaggtcctgccggcgcagggagccctctgcccttcacactctcctccaaaagagcctccatctgtaaggaagcaggtctccgcgaggggtttctttccatgtgttttcctcctgttgttttagaacttttttaaaaaaacagacctcgttttagatttatagcattgacttttacacacattcacacaagaaaaaaatcctttcaaaattcttaaatcttctgttcctcctttttccaagggaagagggcaaaaagtggcctgggctctgttggtgtgcgtgttccgtggcggagagaagaaaatgggaaagacatctcactggtgcttttctcttttgttttagtgccccccgcccccatccctataatatctgtaactactcctaaaaaggttttgattcaggcttttttttggtttcattttgtttttttaagaaaaagaaaatgaaaggaaaaaaataaaagatccagtgtctttcttaaaaaaaaaaacttt

SEQ ID NO: 364207 - DNA, 1740 bp, Homo sapiens
gagcaatcccttctccctcctcctcctccccccgctactatccgcggcccagagaactgccgcttgccgccattgacacgcacagatagaacccaaagaaaggcaaagagtcctgcccggcaccggcgccgcgtgggccaaacctgcgcccgtggaggggcgcgcagagggcaccgggcgccgggagcaggcggcgcagcaccagcattgtgttagtgccgggaggccactgtgtcagcaagctgagagggaaactgaagcaagatgtcgggccggagtgggaagaagaaaatgtccaagctgtcccgttcagctagggcaggtgtcatctttccagtggggaggctgatgcgttatctgaagaaagggacgttcaagtaccggatcagcgtgggcgcccctgtctacatggcggcagtcattgagtacctggcagcggaaattctagaattggccggcaatgccgcgagggacaacaagaaggcccggatagccccgagacacatcttgctggcagttgccaatgacgaggagctcaaccagctgctaaaaggagtgaccatcgccagtggaggcgtcctgcccagaattcaccccgaactgctggccaaaaagcgagggaccaaaggcaagtcggaaacgatcctctccccacccccagagaaaagaggcaggaaggccacgtcaggcaagaagggggggaagaaatccaaggctgccaaaccacggacgtccaaaaagtccaaaccaaaggacagcgataaagaaggaacttcaaattccacctctgaagatgggccaggggatggattcaccattctgtcttctaagagccttgttctgggacagaagctgtccttaacccagagtgacatcagccatattggctccatgagagtggagggcattgtccacccaaccacagccgaaattgacctcaaagaagatataggtaaagccttggaaaaggctgggggaaaagagttcttggaaacggtaaaggagcttcgcaaatcccaaggccctttggaagtcgccgaagccgccgtcagccaatccagtggactcgcagccaaatttgtcatccactgtcacatccctcagtggggctccgacaaatgtgaagaacagcttgaagagaccatcaaaaactgcctgtcagcggcggaggacaagaagctaaagtccgtcgcgttcccgcctttccccagcggcagaaactgctttcccaaacagactgcggcccaggtgaccctcaaagccatctcagcccactttgatgactcgagcgcgtcctcgctgaagaacgtgtacttcctgctcttcgacagcgagagcatcggcatctacgtgcaggagatggccaagctcgacgccaagtagccgccgcactttccagcagggatcggaggacgacccgagtcccaagagtggggttttgctttttaaaaggagagaggaggggtgatggcaggggagtggagggtggccgggcaggtcctttcatctcaagaatctccttgagctacacactctactttaatagatcctacatatgtataaaatcatgtctcatctagtactttctcattcattgtaatccctccatttatttaacaacttttttaatataccataattacatttatatctataatatttacttttacaaacattctcactattaaaacatactttataaattattcaatcatcaatttcatcctttattaaaataaa

SEQ ID NO: 364208 - DNA, 1262 bp, Homo sapiens
tgatgtgtccctttaactaggaaccattgtgaggaggtagcccaacccagggactacttggcagaccatatgaaaatggcgcatcagagcagcattaaacgcttctacccaaagcttgtgctaactgtgcaaagcaatacagcccagctcttgctctcgttaaacatagtccacatcaggagcacaggatgctgcccagccaacgtctctatcactgccttatctccagatctaacaggtacctgatgaggttaggctataacctaggaaaccttaggaaataacccgcggcattttctctcctatgtcccagccgccgtcagccaatccagtggactcgcagccaaatttgtcatccactgtcacatccctcagtggggctccgacaaatgtgaagaacagcttgaagagaccatcaaaaactgcctgtcagcggcggaggacaagaagctaaagtccgtcgcgttcccgcctttccccagcggcagaaactgctttcccaaacagactgcggcccaggtgaccctcaaagccatctcagcccactttgatgactcgagcgcgtcctcgctgaagaacgtgtacttcctgctcttcgacagcgagagcatcggcatctacgtgcaggagatggccaagctcgacgccaagtagccgccgcactttccagcagggatcggaggacgacccgagtcccaagagtggggttttgctttttaaaaggagagaggaggggtgatggcaggggagtggagggtggccgggcaggtcctgccggcgcagggagccctctgcccttcacactctcctccaaaagagcctccatctgtaaggaagcaggtctccgcgaggggtttctttccatgtgttttcctcctgttgttttagaacttttttaaaaaaacagacctcgttttagatttatagcattgacttttacacacattcacacaagaaaaaaatcctttcaaaattcttaaatcttctgttcctcctttttccaagggaagagggcaaaaagtggcctgggctctgttggtgtgcgtgttccgtggcggagagaagaaaatgggaaagacatctcactggtgcttttctcttttgttttagtgccccccgcccccatccctataatatctgtaactactcctaaaaaggttttgattcaggcttttttttggtttcattttgtttttttaagaaaaagaaaatgaaaggaaaaaaataaaagatccagtgtctttcttaaaaaaaaaaacttt

SEQ ID NO: 364209 - DNA, 475 bp, Homo sapiens
aaattttttttttagagacagggtctcactctgttgcccaggctggggtgcagtggcacaatcatagctcactgcagccttgaactcctggctgggctcaagcgatcctcctgcctcggcctcctgagtagctgggactaacttgagttctcttacgcttcctggatttctttccaggccgagacatagaaatcacaaatgaatgaatgtgatcaaacttgaaggccatttctaaagaaaagctttagctcaggccccattctgtgattgcctgttaatgcctccttgtgatttcagcggaaattctagaattggccggcaatgccgcgagggacaacaagaaggcccggatagccccgagacacatcttgctggcagttgccaatgacgaggagctcaaccaggtatgtctgaagccttgagggaagccgtagaatgggtttgccaaacatgctaatgtgtgggcctggctggc

SEQ ID NO: 364210 - DNA, 1981 bp, Homo sapiens
atccttattaaattaatcccctcccccccccccccacccgagagaactgccgcttgccgccattgacacgcacagatagaacccaaagaaaggcaaagagtcctgcccggcaccggcgccgcgtgggccaaacctgcgcccgtggaggggcgcgcagagggcaccgggcgccgggagcaggcggcgcagcaccagcattgtgttagtgccgggaggccactgtgtcagcaagctgagagggaaactgaagcaagatgtcgggccggagtgggaagaagaaaatgtccaagctgtcccgttcagctagggcaggtgtcatctttccagtggggaggctgatgcgttatctgaagaaagggacgttcaagtaccggatcagcgtgggcgcccctgtctacatggcggcagtcattgagtacctggcagcggaaattctagaattggccggcaatgccgcgagggacaacaagaaggcccggatagccccgagacacatcttgctggcagttgccaatgacgaggagctcaaccagctgctaaaaggagtgaccatcgccagtggaggcgtcctgcccagaattcaccccgaactgctggccaaaaagcgagggaccaaaggcaagtcggaaacgatcctctccccacccccagagaaaagaggcaggaaggccacgtcaggcaagaagggggggaagaaatccaaggctgccaaaccacggacgtccaaaaagtccaaaccaaaggacagcgataaagaaggaacttcaaattccacctctgaagatgggccaggggatggattcaccattctgtcttctaagagccttgttctgggacagaagctgtccttaacccagagtgacatcagccatattggctccatgagagtggagggcattgtccacccaaccacagccgaaattgacctcaaagaagatataggtaaagccttggaaaaggctgggggaaaagagttcttggaaacggtaaaggagcttcgcaaatcccaaggccctttggaagtcgccgaagccgccgtcagccaatccagtggactcgcagccaaatttgtcatccactgtcacatccctcagtggggctccgacaaatgtgaagaacagcttgaagagaccatcaaaaactgcctgtcagcggcggaggacaagaagctaaagtccgtcgcgttcccgcctttccccagcggcagaaactgctttcccaaacagactgcggcccaggtgaccctcaaagccatctcagcccactttgatgactcgagcgcgtcctcgctgaagaacgtgtacttcctgctcttcgacagcgagagcatcggcatctacgtgcaggagatggccaagctcgacgccaagtagccgccgcactttccagcagggatcggaggacgacccgagtcccaagagtggggttttgctttttaaaaggagagaggaggggtgatggcaggggagtggagggtggccgggcaggtcctgccggcgcagggagccctctgcccttcacactctcctccaaaagagcctccatctgtaaggaagcaggtctccgcgaggggtttctttccatgtgttttcctcctgttgttttagaacttttttaaaaaaacagacctcgttttagatttatagcattgacttttacacacattcacacaagaaaaaaatcctttcaaaattcttaaatcttctgttcctcctttttccaagggaagagggcaaaaagtggcctgggctctgttggtgtgcgtgttccgtggcggagagaagaaaatgggaaagacatctcactggtgcttttctcttttgttttagtgccccccgcccccatccctataatatctgtaactactcctaaaaaggttttgattcaggcttttttttggtttcattttgtttttttaagaaaaagaaaatgaaaggaaaaaaataaaagatccagtgtctttcttaaaaaaaaaaacttt

SEQ ID NO: 364211 - DNA, 1976 bp, Homo sapiens
aacttattaggaaccatacagaaatggcgacagcaggtcctgacgctcagggtacacgtgagacagtggtgcgatcacacatgcctgccgtacgatgatccgtggtcatgaatagtgcctgtggagtctcgtcgaacaagtgaaggaagacgcccgcgaggattgcgttacgtgcctgagaagagcactcctgagttcgaggttcgtcgtagagctagagtgtacatgtgatcgtatcgatcgatcgaggtccgagagctgagcatcgaatataaaatgtccaagctgtcccgttcagctagggcaggtgtcatctttccagtggggaggctgatgcgttatctgaagaaagggacgttcaagtaccggatcagcgtgggcgcccctgtctacatggcggcagtcattgagtacctggcagcggaaattctagaattggccggcaatgccgcgagggacaacaagaaggcccggatagccccgagacacatcttgctggcagttgccaatgacgaggagctcaaccagctgctaaaaggagtgaccatcgccagtggaggcgtcctgcccagaattcaccccgaactgctggccaaaaagcgagggaccaaaggcaagtcggaaacgatcctctccccacccccagagaaaagaggcaggaaggccacgtcaggcaagaagggggggaagaaatccaaggctgccaaaccacggacgtccaaaaagtccaaaccaaaggacagcgataaagaaggaacttcaaattccacctctgaagatgggccaggggatggattcaccattctgtcttctaagagccttgttctgggacagaagctgtccttaacccagagtgacatcagccatattggctccatgagagtggagggcattgtccacccaaccacagccgaaattgacctcaaagaagatataggtaaagccttggaaaaggctgggggaaaagagttcttggaaacggtaaaggagcttcgcaaatcccaaggccctttggaagtcgccgaagccgccgtcagccaatccagtggactcgcagccaaatttgtcatccactgtcacatccctcagtggggctccgacaaatgtgaagaacagcttgaagagaccatcaaaaactgcctgtcagcggcggaggacaagaagctaaagtccgtcgcgttcccgcctttccccagcggcagaaactgctttcccaaacagactgcggcccaggtgaccctcaaagccatctcagcccactttgatgactcgagcgcgtcctcgctgaagaacgtgtacttcctgctcttcgacagcgagagcatcggcatctacgtgcaggagatggccaagctcgacgccaagtagccgccgcactttccagcagggatcggaggacgacccgagtcccaagagtggggttttgctttttaaaaggagagaggaggggtgatggcaggggagtggagggtggccgggcaggtcctgccggcgcagggagccctctgcccttcacactctcctccaaaagagcctccatctgtaaggaagcaggtctccgcgaggggtttctttccatgtgttttcctcctgttgttttagaacttttttaaaaaaacagacctcgttttagatttatagcattgacttttacacacattcacacaagaaaaaaatcctttcaaaattcttaaatcttctgttcctcctttttccaagggaagagggcaaaaagtggcctgggctctgttggtgtgcgtgttccgtggcggagagaagaaaatgggaaagacatctcactggtgcttttctcttttgttttagtgccccccgcccccatccctataatatctgtaactactcctaaaaaggttttgattcaggcttttttttggtttcattttgtttttttaagaaaaagaaaatgaaaggaaaaaaataaaagatccagtgtctttcttaaaaaaaaaaacttt

SEQ ID NO: 364212 - DNA, 1919 bp, Homo sapiens
gagcaatcccttctccctcctcctcctccccccgctactatccgcggcccagagaactgccgcttgccgccattgacacgcacagatagaacccaaagaaaggcaaagagtcctgcccggcaccggcgccgcgtgggccaaacctgcgcccgtggaggggcgcgcagagggcaccgggcgccgggagcaggcggcgcagcaccagcattgtgttagtgccgggaggccactgtgtcagcaagctgagagggaaactgaagcaagatgtcgggccggagtgggaagaagaaaatgtccaagctgtcccgttcagctagggcaggtgtcatctttccagtggggaggctgatgcgttatctgaagaaagggacgttcaagtaccggatcagcgtgggcgcccctgtctacatggcggcagtcattgagtacctggcagcggaaattctagaattggccggcaatgccgcgagggacaacaagaaggcccggatagccccgagacacatcttgctggcagttgccaatgacgaggagctcaaccagctgctaaaaggagtgaccatcgccagtggaggcgtcctgcccagaattcaccccgaactgctggccaaaaagcgagggaccaaaggcaagtcggaaacgatcctctccccacccccagagaaaagaggcaggaaggccacgtcaggcaagaagggggggaagaaatccaaggctgccaaaccacggacgtccaaaaagtccaaaccaaaggacagcgataaagaaggaacttcaaattccacctctgaagatgggccaggggatggattcaccattctgtcttctaagagccttgttctgggacagaagctgtccttaacccagagtgacatcagccatattggctccatgagagtggagggcattgtccacccaaccacagccgaaattgacctcaaagaagatataggtaaagccttggaaaaggctgggggaaaagagttcttggaaacggtaaaggagcttcgcaaatcccaaggccctttggaagtcgccgaagccgccgtcagccaatccagtggactcgcagccaaatttgtcatccactgtcacatccctcagtggggctccgacaaatgtgaagaacagcttgaagagaccatcaaaaactgcctgtcagcggcggaggacaagaagctaaagtccgtcgcgttcccgcctttccccagcggcagaaactgctttcccaaacagactgcggcccaggtgaccctcaaagccatctcagcccactttgatgactcgagcgcgtcctcgctgaagaacgtgtacttcctgctcttcgacagcgagagcatcggcatctacgtgcaggagatggccaagctcgacgccaagtagccgccgcactttccagcagggatcggaggacgacccgagtcccaagagtggggttttgctttttaaaaggagagaggaggggtgataaaagagcctccatctgtaaggaagcaggtctccgcgaggggtttctttccatgtgttttcctcctgttgttttagaacttttttaaaaaaacagacctcgttttagatttatagcattgacttttacacacattcacacaagaaaaaaatcctttcaaaattcttaaatcttctgttcctcctttttccaagggaagagggcaaaaagtggcctgggctctgttggtgtgcgtgttccgtggcggagagaagaaaatgggaaagacatctcactggtgcttttctcttttgttttagtgccccccgcccccatccctataatatctgtaactactcctaaaaaggttttgattcaggcttttttttggtttcattttgtttttttaagaaaaagaaaatgaaaggaaaaaaataaaagatccagtgtctttcttaaaaaaaaaaacttt

SEQ ID NO: 364213 - DNA, 1540 bp, Homo sapiens
ttctgtatcaaaaaaaaaaaaaaaaaagaactgtatgaaattgggaactagcaggctgtttgctacatgagcgcatgcatttctctcttcagctgctaaaaggagtgaccatcgccagtggaggcgtcctgcccagaattcaccccgaactgctggccaaaaagcgagggaccaaaggcaagtcggaaacgatcctctccccacccccagagaaaagaggcaggaaggccacgtcaggcaagaagggggggaagaaatccaaggctgccaaaccacggacgtccaaaaagtccaaaccaaaggacagcgataaagaaggaacttcaaattccacctctgaagatgggccaggggatggattcaccattctgtcttctaagagccttgttctgggacagaagctgtccttaacccagagtgacatcagccatattggctccatgagagtggagggcattgtccacccaaccacagccgaaattgacctcaaagaagatataggtaaagccttggaaaaggctgggggaaaagagttcttggaaacggtaaaggagcttcgcaaatcccaaggccctttggaagtcgccgaagccgccgtcagccaatccagtggactcgcagccaaatttgtcatccactgtcacatccctcagtggggctccgacaaatgtgaagaacagcttgaagagaccatcaaaaactgcctgtcagcggcggaggacaagaagctaaagtccgtcgcgttcccgcctttccccagcggcagaaactgctttcccaaacagactgcggcccaggtgaccctcaaagccatctcagcccactttgatgactcgagcgcgtcctcgctgaagaacgtgtacttcctgctcttcgacagcgagagcatcggcatctacgtgcaggagatggccaagctcgacgccaagtagccgccgcactttccagcagggatcggaggacgacccgagtcccaagagtggggttttgctttttaaaaggagagaggaggggtgatggcaggggagtggagggtggccgggcaggtcctgccggcgcagggagccctctgcccttcacactctcctccaaaagagcctccatctgtaaggaagcaggtctccgcgaggggtttctttccatgtgttttcctcctgttgttttagaacttttttaaaaaaacagacctcgttttagatttatagcattgacttttacacacattcacacaagaaaaaaatcctttcaaaattcttaaatcttctgttcctcctttttccaagggaagagggcaaaaagtggcctgggctctgttggtgtgcgtgttccgtggcggagagaagaaaatgggaaagacatctcactggtgcttttctcttttgttttagtgccccccgcccccatccctataatatctgtaactactcctaaaaaggttttgattcaggcttttttttggtttcattttgtttttttaagaaaaagaaaatgaaaggaaaaaaataaaagatccagtgtctttcttaaaaaaaaaaacttt

SEQ ID NO: 364214 - DNA, 1380 bp, Homo sapiens
agcggcctgcgagttaccgcccactcgctgcggcgcttctggctccagaccgccctccggatcggaccctgcgaatggttttggctatatcttcatgctgggcttcatcaccaggcctcctcacagattcctgtcccttctgtgtcctggactccggatacctcaactctcagtactttgtgctcagcccaggcccagagccatggctatctcctcttcctcctgcgaactgcccctggtggctgtgtgccaggtaacatcgacgccagacaagcaacagaactttaaaacatgtgctgagctggttcgagaggctgccagactgggtgcctgcctggctttcctgcctgaggcatttgacttcattgcacgggaccctgcagagacgctacacctgtctgaaccactgggtgggaaacttttggaagaatacacccagcttgccagggaatgtggactctggctgtccttgggtggtttccatgagcgtggccaagactgggagcagactcagaaaatctacaattgtcacgtgctgctgaacagcaaaggggcagtagtggccacttacaggaagacacatctgtgtgacgtagagattccagggcaggggcctatgtgtgaaagcaactctaccatgcctgggcccagtcttgagtcacctgtcagcacaccagcaggcaagattggtctagctgtctgctatgacatgcggttccctgaactctctctggcattggctcaagctggagcagagatacttacctatccttcagcttttggatccattacaggcccagcccactgggaggtgttgctgcgggcccgtgctatcgaaacccagtgctatgtagtggcagcagcacagtgtggacgccaccatgagaagagagcaagttatggccacagcatggtggtagacccctggggaacagtggtggcccgctgctctgaggggccaggcctctgccttgcccgaatagacctcaactatctgcgacagttgcgccgacacctgcctgtgttccagcaccgcaggcctgacctctatggcaatctgggtcacccactgtcttaagacttgacttctgtgagtttagacctgcccctcccacccccaccctgccactatgagctagtgctcatgtgacttggaggcaggatccaggcacagctcccctcacttggagaaccttgactctcttgatggaacacagatgggctgcttgggaaagaaactttcacctgagcttcacctgaggtcagactgcagtttcagaaaggtggaattttatatagtcattgtttatttcatggaaactgaagttctgctgagggctgagcagcactggcattgaaaaatataataatcataaagtc

SEQ ID NO: 364215 - DNA, 1011 bp, Homo sapiens
tttaaaaaaaaaaaaaaaaaggcaggggtgtgattggttggaagggtagagaacaaaccccagaacagtgtaagctccagaggtgggtgatgggaacagtccccaaagtgagaagagggaataggtcagggcaatgcttgcagcatcaagttcctcaggagtttctgtcggcccagctcatagtcctcctcgtctacatttaccagcagcttgatggcttcatggcccacagcttgcttgagggagtctgtgatgaagacacctttaagtgcctctaataaagagccattgatgtagtcacgccagaatgcatcgaggtaggtgagctcagagaacttgatgtcacagatgatggagcccaggtcccgggacttgaggatggtgttggcctggttaaagcgctcaaactggcgctcaagtgggtcctgcttgttagagaagacattgccctgcagagcagtctcatgctggcagtattcagcccgaacccgcagtctgatgtcacatgtctgcttctccttgggatctggtgtcactgacttccggcgttttcgctggctcccaagtgtggctctccctcgggctggccgcttgctacacatctgaggacccgaagtggggcaacacaccacaggatagtggggaggcactgttttagagggctggggaggccttggttctggatcactgagggctctgggggtcacatagcgaattgatgtctcctccagatacttgtctacaagatcagggcacaagcccgtctcctcttgagggtgacgtagggcagcaggtcgtggcgagtgatgatgcgcagcagctgcagcaccatgctcttctggccacacctggcttgcccgccgctttaggcccgccatgctgggggctcaggtacgcaatgctttccagaatccctgctcagcagctgcaatccccaccgtactccgcaagaaacttaatttcccaggtctcttctctcggctcaggctcggcgccgccatgttggatccc

SEQ ID NO: 364216 - DNA, 2063 bp, Homo sapiens
agcggcctgcgagttaccgcccactcgctgcggcgcttctggctccagaccgccctccggatcggaccctgcgaatggttttggctatatcttcatgctgggcttcatcaccaggcctcctcacagattcctgtcccttctgtgtcctggactccggatacctcaactctcagtactttgtgctcagcccaggcccagagccatggctatctcctcttcctcctgcgaactgcccctggtggctgtgtgccaggtaacatcgacgccagacaagcaacagaactttaaaacatgtgctgagctggttcgagaggctgccagactgggtgcctgcctggctttcctgcctgaggcatttgacttcattgcacgggaccctgcagagacgctacacctgtctgaaccactgggtgggaaacttttggaagaatacacccagcttgccagggaatgtggactctggctgtccttgggtggtttccatgagcgtggccaagactgggagcagactcagaaaatctacaattgtcacgtgctgctgaacagcaaaggggcagtagtggccacttacaggaagacacatctgtgtgacgtagagattccagggcaggggcctatgtgtgaaagcaactctaccatgcctgggcccagtcttgagtcacctgtcagcacaccagcaggcaagattggtctagctgtctgctatgacatgcggttccctgaactctctctggcattggctcaagctggagcagagatacttacctatccttcagcttttggatccattacaggcccagcccactgggaggtgttgctgcgggcccgtgctatcgaaacccagtgctatgtagtggcagcagcacagtgtggacgccaccatgagaagagagcaagttatggccacagcatggtggtagacccctggggaacagtggtggcccgctgctctgaggggccaggcctctgccttgcccgaatagacctcaactatctgcgacagttgcgccgacacctgcctgtgttccagcaccgcaggcctgacctctatggcaatctgggtcacccactgtcttaagacttgacttctgtgagtttagacctgcccctcccacccccaccctgccactatgagctagtgctcatgtgacttggaggcaggatccaggcacagctcccctcacttggagaaccttgactctcttgatggaacacagatgggctgcttgggaaagaaactttcacctgagcttcacctgaggtcagactgcagtttcagaaaggtggaattttatatagtcattgtttatttcatggaaactgaagttctgctgagggctgagcagcactggcattgaaaaatataataatcataaagtctgtgtctggacatcgcctttgggaactagaaggggagttggtattgtaccagctggactaagctccagttctagacctcctggctcattcaacatgcctccctacctaaataaaagtgcaacactcagtgcatgtcccagccccattctcccaagcatgggagtgggcgtaggagtggaggagggggaaggaaaaaggaattacttcacttacacctatgatgccctttgcccaagccagaagaaagcaaaggggaaaagggctgcagggtacattatttattttcacttgaacatggaaagaaagtgtcacactcccccttcccctttatagggggagtgtattttaatcagcaacctcttctccatccaccctgtgtatgtgtgtacacatataccaccacagttgggaggcatgactaggctgacccagtcttatctgttcctcctttgaagagggtttgacaaatgggaaaaaggaaggagccacatcaggcagaggtttcaagccatggaatggaggaaaggcggcagagaggagcagcaccagaggccaggagagagtggaaagggccacagcttgtttttaaaaaattctataatttggaagagggtggcgattaattttcaaaatacacttcagagtcccactttccacatagctacgctgatcgatacagtcgt

SEQ ID NO: 364217 - DNA, 2239 bp, Homo sapiens
agcggcctgcgagttaccgcccactcgctgcggcgcttctggctccagaccgccctccggatcggaccctgcgaatggttttggctatatcttcatgtaggacctactccctatcccgtcggccgcggtgaatcccacctgcggtgctttaacttgtgtaacagagatgctgcctctgggagaggcggggagggacgggccaactggagcgggcggcgggagggtggagggcggggcgcggcttggggcctgggttcctttgccccttgcccaccagggaggggtgggagacgagagagggtgaactttcccctgcgagattctggtgaaaggggaaatatgcttcgagtcagtaaagctgcgcaagtgcacagtcaaggagagagtcttgggaaaaccaaggatagttcccggagatgacttttggactgcggaaacgtttgtcagaggaaagaggcttcagtttaatgtgagatcattggaagttgaactattcaggcggcgagcagagcccctttctccatcttcccactgtatggtcttgtcccttagcctataatttcttataaagagcgttttgaagactaggtttttactggcagggccctgattcaggctcacagtataaagagagaagtcagagaatcctagaaatttattgcttgaagaaggggttggtgtcctcatatctcaccttcctcaggctgggcttcatcaccaggcctcctcacagattcctgtcccttctgtgtcctggactccggatacctcaactctcagtactttgtgctcagcccaggtaacacgttttgttgtgtcctcagtgcctggcacttagatgctcagtttgttaaatggatagtgggagacacaggagtgtcaactatccacacatttgattggtgagccctactagccctgggtcaacgtgccctgtaagagcatgatcaaaaggaagtccagctttcctgcctctccacttgcaccccttagcattaaatttgcttccctgtgctatgaaatctgagaatcctgcctatgctgttcacaggcccagagccatggctatctcctcttcctcctgcgaactgcccctggtggctgtgtgccaggtaacatcgacgccagacaagcaacagaactttaaaacatgtgctgagctggttcgagaggctgccagactgggtgcctgcctggctttcctgcctgaggcatttgacttcattgcacgggaccctgcagagacgctacacctgtctgaaccactgggtgggaaacttttggaagaatacacccagcttgccagggaatgtggactctggctgtccttgggtggtttccatgagcgtggccaagactgggagcagactcagaaaatctacaattgtcacgtgctgctgaacagcaaaggggcagtagtggccacttacaggaagacacatctgtgtgacgtagagattccagggcaggggcctatgtgtgaaagcaactctaccatgcctgggcccagtcttgagtcacctgtcagcacaccagcaggcaagattggtctagctgtctgctatgacatgcggttccctgaactctctctggcattggctcaagctggagcagagatacttacctatccttcagcttttggatccattacaggcccagcccactgggaggtgttgctgcgggcccgtgctatcgaaacccagtgctatgtagtggcagcagcacagtgtggacgccaccatgagaagagagcaagttatggccacagcatggtggtagacccctggggaacagtggtggcccgctgctctgaggggccaggcctctgccttgcccgaatagacctcaactatctgcgacagttgcgccgacacctgcctgtgttccagcaccgcaggcctgacctctatggcaatctgggtcacccactgtcttaagacttgacttctgtgagtttagacctgcccctcccacccccaccctgccactatgagctagtgctcatgtgacttggaggcaggatccaggcacagctcccctcacttggagaaccttgactctcttgatggaacacagatgggctgcttgggaaagaaactttcacctgagcttcacctgaggtcagactgcagtttcagaaaggtggaattttatatagtcattgtttatttcatggaaactgaagttctgctgagggctgagcagcactggcattgaaaaatataataatcataaagtc

SEQ ID NO: 364218 - DNA, 1754 bp, Homo sapiens
agcggcctgcgagttaccgcccactcgctgcggcgcttctggctccagaccgccctccggatcggaccctgcgaatggttttggctatatcttcatgtaggacctactccctatcccgtcggccgcggtgaatcccacctgcggtgctttaacttgtgtaacagagatgctgcctctgggagaggcggggagggacgggccaactggagcgggcggcgggagggtggagggcggggcgcggcttggggcctgggttcctttgccccttgcccaccagggaggggtgggagacgagagagggtgaactttcccctgcgagattctggtgaaaggggaaatatgcttcgagtcagtaaagctgcgcaagtgcacagtcaaggagagagtcttgggaaaaccaaggatagttcccggagatgacttttggactgcggaaacgtttgtcagaggaaagaggcttcagtttaatggctgggcttcatcaccaggcctcctcacagattcctgtcccttctgtgtcctggactccggatacctcaactctcagtactttgtgctcagcccaggcccagagccatggctatctcctcttcctcctgcgaactgcccctggtggctgtgtgccaggtaacatcgacgccagacaagcaacagaactttaaaacatgtgctgagctggttcgagaggctgccagactgggtgcctgcctggctttcctgcctgaggcatttgacttcattgcacgggaccctgcagagacgctacacctgtctgaaccactgggtgggaaacttttggaagaatacacccagcttgccagggaatgtggactctggctgtccttgggtggtttccatgagcgtggccaagactgggagcagactcagaaaatctacaattgtcacgtgctgctgaacagcaaaggggcagtagtggccacttacaggaagacacatctgtgtgacgtagagattccagggcaggggcctatgtgtgaaagcaactctaccatgcctgggcccagtcttgagtcacctgtcagcacaccagcaggcaagattggtctagctgtctgctatgacatgcggttccctgaactctctctggcattggctcaagctggagcagagatacttacctatccttcagcttttggatccattacaggcccagcccactgggaggtgttgctgcgggcccgtgctatcgaaacccagtgctatgtagtggcagcagcacagtgtggacgccaccatgagaagagagcaagttatggccacagcatggtggtagacccctggggaacagtggtggcccgctgctctgaggggccaggcctctgccttgcccgaatagacctcaactatctgcgacagttgcgccgacacctgcctgtgttccagcaccgcaggcctgacctctatggcaatctgggtcacccactgtcttaagacttgacttctgtgagtttagacctgcccctcccacccccaccctgccactatgagctagtgctcatgtgacttggaggcaggatccaggcacagctcccctcacttggagaaccttgactctcttgatggaacacagatgggctgcttgggaaagaaactttcacctgagcttcacctgaggtcagactgcagtttcagaaaggtggaattttatatagtcattgtttatttcatggaaactgaagttctgctgagggctgagcagcactggcattgaaaaatataataatcataaagtc

SEQ ID NO: 364219 - DNA, 1426 bp, Homo sapiens
agcggcctgcgagttaccgcccactcgctgcggcgcttctggctccagaccgccctccggatcggaccctgcgaatggttttggctatatcttcatgtaggacctactccctatcccgtcggccgcggtgaatcccacctgcgctgggcttcatcaccaggcctcctcacagattcctgtcccttctgtgtcctggactccggatacctcaactctcagtactttgtgctcagcccaggcccagagccatggctatctcctcttcctcctgcgaactgcccctggtggctgtgtgccaggtaacatcgacgccagacaagcaacagaactttaaaacatgtgctgagctggttcgagaggctgccagactgggtgcctgcctggctttcctgcctgaggcatttgacttcattgcacgggaccctgcagagacgctacacctgtctgaaccactgggtgggaaacttttggaagaatacacccagcttgccagggaatgtggactctggctgtccttgggtggtttccatgagcgtggccaagactgggagcagactcagaaaatctacaattgtcacgtgctgctgaacagcaaaggggcagtagtggccacttacaggaagacacatctgtgtgacgtagagattccagggcaggggcctatgtgtgaaagcaactctaccatgcctgggcccagtcttgagtcacctgtcagcacaccagcaggcaagattggtctagctgtctgctatgacatgcggttccctgaactctctctggcattggctcaagctggagcagagatacttacctatccttcagcttttggatccattacaggcccagcccactgggaggtgttgctgcgggcccgtgctatcgaaacccagtgctatgtagtggcagcagcacagtgtggacgccaccatgagaagagagcaagttatggccacagcatggtggtagacccctggggaacagtggtggcccgctgctctgaggggccaggcctctgccttgcccgaatagacctcaactatctgcgacagttgcgccgacacctgcctgtgttccagcaccgcaggcctgacctctatggcaatctgggtcacccactgtcttaagacttgacttctgtgagtttagacctgcccctcccacccccaccctgccactatgagctagtgctcatgtgacttggaggcaggatccaggcacagctcccctcacttggagaaccttgactctcttgatggaacacagatgggctgcttgggaaagaaactttcacctgagcttcacctgaggtcagactgcagtttcagaaaggtggaattttatatagtcattgtttatttcatggaaactgaagttctgctgagggctgagcagcactggcattgaaaaatataataatcataaagtc

SEQ ID NO: 364220 - DNA, 1333 bp, Homo sapiens
agcggcctgcgagttaccgcccactcgctgcggcgcttctggctccagaccgccctccggatcggaccctgcgaatggttttggctatatcttcatgtaggacctactccctatcccgtcggccgcggtgaatcccacctgccaggcccagagccatggctatctcctcttcctcctgcgaactgcccctggtggctgtgtgccaggtaacatcgacgccagacaagcaacagaactttaaaacatgtgctgagctggttcgagaggctgccagactgggtgcctgcctggctttcctgcctgaggcatttgacttcattgcacgggaccctgcagagacgctacacctgtctgaaccactgggtgggaaacttttggaagaatacacccagcttgccagggaatgtggactctggctgtccttgggtggtttccatgagcgtggccaagactgggagcagactcagaaaatctacaattgtcacgtgctgctgaacagcaaaggggcagtagtggccacttacaggaagacacatctgtgtgacgtagagattccagggcaggggcctatgtgtgaaagcaactctaccatgcctgggcccagtcttgagtcacctgtcagcacaccagcaggcaagattggtctagctgtctgctatgacatgcggttccctgaactctctctggcattggctcaagctggagcagagatacttacctatccttcagcttttggatccattacaggcccagcccactgggaggtgttgctgcgggcccgtgctatcgaaacccagtgctatgtagtggcagcagcacagtgtggacgccaccatgagaagagagcaagttatggccacagcatggtggtagacccctggggaacagtggtggcccgctgctctgaggggccaggcctctgccttgcccgaatagacctcaactatctgcgacagttgcgccgacacctgcctgtgttccagcaccgcaggcctgacctctatggcaatctgggtcacccactgtcttaagacttgacttctgtgagtttagacctgcccctcccacccccaccctgccactatgagctagtgctcatgtgacttggaggcaggatccaggcacagctcccctcacttggagaaccttgactctcttgatggaacacagatgggctgcttgggaaagaaactttcacctgagcttcacctgaggtcagactgcagtttcagaaaggtggaattttatatagtcattgtttatttcatggaaactgaagttctgctgagggctgagcagcactggcattgaaaaatataataatcataaagtc

SEQ ID NO: 364221 - DNA, 1853 bp, Homo sapiens
agcggcctgcgagttaccgcccactcgctgcggcgcttctggctccagaccgccctccggatcggaccctgcgaatggttttggctatatcttcatgtaggacctactccctatcccgtcggccgcggtgaatcccacctgcggtgctttaacttgtgtaacagagatgctgcctctgggagaggcggggagggacgggccaactggagcgggcggcgggagggtggagggcggggcgcggcttggggcctgggttcctttgccccttgcccaccagggaggggtgggagacgagagagggtgaactttcccctgcgagattctggtgaaaggggaaatatgcttcgagtcagtaaagctgcgcaagtgcacagtcaaggagagagtcttgggaaaaccaaggatagttcccggagatgacttttggactgcggaaacgtttgtcagaggaaagaggcttcagtttaatgtgagatcattggaagttgaactattcaggcggcgagcagagcccctttctccatcttcccactgtatggtcttgtcccttagcctataatttcttataaagagcgttttgaagactaggtttttactggcagggccctgattcaggctcacagtataaagagagaagtcagagaatcctagaaatttattgcttgaagaaggggttggtgtcctcatatctcaccttcctcaggctgggcttcatcaccaggcctcctcacagattcctgtcccttctgtgtcctggactccggatacctcaactctcagtactttgtgctcagcccaggcccagagccatggctatctcctcttcctcctgcgaactgcccctggtggctgtgtgccaggtaacatcgacgccagacaagcaacagaactttaaaacatgtgctgagctggttcgagaggctgccagactgggtgcctgcctggctttcctgcctgaggcatttgacttcattgcacgggaccctgcagagacgctacacctgtctgaaccactgggtgggaaacttttggaagaatacacccagcttgccagggaatgtggactctggctgtccttgggtggtttccatgagcgtggccaagactgggagcagactcagaaaatctacaattgtcacgtgctgctgaacagcaaagattggtctagctgtctgctatgacatgcggttccctgaactctctctggcattggctcaagctggagcagagatacttacctatccttcagcttttggatccattacaggcccagcccactgggaggtgttgctgcgggcccgtgctatcgaaacccagtgctatgtagtggcagcagcacagtgtggacgccaccatgagaagagagcaagttatggccacagcatggtggtagacccctggggaacagtggtggcccgctgctctgaggggccaggcctctgccttgcccgaatagacctcaactatctgcgacagttgcgccgacacctgcctgtgttccagcaccgcaggcctgacctctatggcaatctgggtcacccactgtcttaagacttgacttctgtgagtttagacctgcccctcccacccccaccctgccactatgagctagtgctcatgtgacttggaggcaggatccaggcacagctcccctcacttggagaaccttgactctcttgatggaacacagatgggctgcttgggaaagaaactttcacctgagcttcacctgaggtcagactgcagtttcagaaaggtggaattttatatagtcattgtttatttcatggaaactgaagttctgctgagggctgagcagcactggcattgaaaaatataataatcataaagtc

SEQ ID NO: 364222 - DNA, 2117 bp, Homo sapiens
agcggcctgcgagttaccgcccactcgctgcggcgcttctggctccagaccgccctccggatcggaccctgcgaatggttttggctatatcttcatgctgggcttcatcaccaggcctcctcacagattcctgtcccttctgtgtcctggactccggatacctcaactctcagtactttgtgctcagcccaggcccagagccatggctatctcctcttcctcctgcgaactgcccctggtggctgtgtgccaggtaacatcgacgccagacaagcaacagaactttaaaacatgtgctgagctggttcgagaggctgccagactgggtgcctgcctggctttcctgcctgaggcatttgacttcattgcacgggaccctgcagagacgctacacctgtctgaaccactgggtgggaaacttttggaagaatacacccagcttgccagggaatgtggactctggctgtccttgggtggtttccatgagcgtggccaagactgggagcagactcagaaaatctacaattgtcacgtgctgctgaacagcaaaggggcagtagtggccacttacaggaagacacatctgtgtgacgtagagattccagggcaggggcctatgtgtgaaagcaactctaccatgcctgggcccagtcttgagtcacctgtcagcacaccagcaggcaagattggtctagctgtctgctatgacatgcggttccctgaactctctctggcattggctcaagctggagcagagatacttacctatccttcagcttttggatccattacaggcccagcccactgggaggtgttgctgcgggcccgtgctatcgaaacccagtgctatgtagtggcagcagcacagtgtggacgccaccatgagaagagagcaagttatggccacagcatggtggtagacccctggggaacagtggtggcccgctgctctgaggggcctgacctctatggcaatctgggtcacccactgtcttaagacttgacttctgtgagtttagacctgcccctcccacccccaccctgccactatgagctagtgctcatgtgacttggaggcaggatccaggcacagctcccctcacttggagaaccttgactctcttgatggaacacagatgggctgcttgggaaagaaactttcacctgagcttcacctgaggtcagactgcagtttcagaaaggtggaattttatatagtcattgtttatttcatggaaactgaagttctgctgagggctgagcagcactggcattgaaaaatataataatcataaagtctgtgtctggacatcgcctttgggaactagaaggggagttggtattgtaccagctggactaagctccagttctagacctcctggctcattcaacatgcctccctacctaaataaaagtgcaacactcagtgcatgtcccagccccattctcccaagcatgggagtgggcgtaggagtggaggagggggaaggaaaaaggaattacttcacttacacctatgatgccctttgcccaagccagaagaaagcaaaggggaaaagggctgcagggtacattatttattttcacttgaacatggaaagaaagtgtcacactcccccttcccctttatagggggagtgtattttaatcagcaacctcttctccatccaccctgtgtatgtgtgtacacatataccaccacagttgggaggcatgactaggctgacccagtcttatctgttcctcctttgaagagggtttgacaaatgggaaaaaggaaggagccacatcaggcagaggtttcaagccatggaatggaggaaaggcggcagagaggagcagcaccagaggccaggagagagtggaaagggccacagcttgtttttaaaaaattctataatttggaagagggtggcgattaattttcaaaatacacttcagagtcccactttccacatagctcccttactcacagccctttggttttttagacaaaatttaagagctctcataaagccagaagtattgataactccttagtgcatccaaaaaaaagtgttcacatcaatcccttacaaagactatgtgctgtagactttgcttcttcctatacattt

SEQ ID NO: 364223 - DNA, 1273 bp, Homo sapiens
agcggcctgcgagttaccgcccactcgctgcggcgcttctggctccagaccgccctccggatcggaccctgcgaatggttttggctatatcttcatgctgggcttcatcaccaggcctcctcacagattcctgtcccttctgtgtcctggactccggatacctcaactctcagtactttgtgctcagcccaggcccagagccatggctatctcctcttcctcctgcgaactgcccctggtggctgtgtgccaggtaacatcgacgccagacaagcaacagaactttaaaacatgtgctgagctggttcgagaggctgccagactgggtgcctgcctggctttcctgcctgaggcatttgacttcattgcacgggaccctgcagagacgctacacctgtctgaaccactgggtgggaaacttttggaagaatacacccagcttgccagggaatgtggactctggctgtccttgggtggtttccatgagcgtggccaagactgggagcagactcagaaaatctacaattgtcacgtgctgctgaacagcaaaggggcagtagtggccacttacaggaagacacatctgtgtgacgtagagattccagggcaggggcctatgtgtgaaagcaactctaccatgcctgggcccagtcttgagtcacctgtcagcacaccagcaggcaagattggtctagctgtctgctatgacatgcggttccctgaactctctctggcattggctcaagctggagcagagatacttacctatccttcagcttttggatccattacaggcccagcccactgggaggtgttgctgcgggcccgtgctatcgaaacccagtgctatgtagtggcagcagcacagtgtggacgccaccatgagaagagagcaagttatggccacagcatggtggtagacccctggggaacagtggtggcccgctgctctgaggggccaggcctctgccttgcccgaatagacctcaactatctgcgacagttgcgccgacacctgccactatgagctagtgctcatgtgacttggaggcaggatccaggcacagctcccctcacttggagaaccttgactctcttgatggaacacagatgggctgcttgggaaagaaactttcacctgagcttcacctgaggtcagactgcagtttcagaaaggtggaattttatatagtcattgtttatttcatggaaactgaagttctgctgagggctgagcagcactggcattgaaaaatataataatcataaagtc

SEQ ID NO: 364224 - DNA, 1241 bp, Homo sapiens
agcggcctgcgagttaccgcccactcgctgcggcgcttctggctccagaccgccctccggatcggaccctgcgaatggttttggctatatcttcatgctgggcttcatcaccaggcctcctcacagattcctgtcccttctgtgtcctggactccggatacctcaactctcagtactttgtgctcagcccaggcccagagccatggctatctcctcttcctcctgcgaactgcccctggtggctgtgtgccaggtaacatcgacgccagacaagcaacagaactttaaaacatgtgctgagctggttcgagaggctgccagactgggtgcctgcctggctttcctgcctgaggcatttgacttcattgcacgggaccctgcagagacgctacacctgtctgaaccactgggtgggaaacttttggaagaatacacccagcttgccagggaatgtggactctggctgtccttgggtggtttccatgagcgtggccaagactgggagcagactcagaaaatctacaattgtcacgtgctgctgaacagcaaaggggcagtagtggccacttacaggaagacacatctgtgtgacgtagagattccagggcaggggcctatgtgtgaaagcaactctaccatgcctgggcccagtcttgagtcacctgtcagcacaccagcaggcaagattggtctagctgtctgctatgacatgcggttccctgaactctctctggcattggctcaagctggagcagagatacttacctatccttcagcttttggatccattacaggcccagcccactgggaggtgttgctgcgggcccgtgctatcgaaacccagtgctatgtagtggcagcagcacagtgtggacgccaccatgagaagagagcaagttatggccacagcatggtggtagacccctggggaacagtggtggcccgctgctctgaggggccaggcctctgccttgcccgaatagatgccactatgagctagtgctcatgtgacttggaggcaggatccaggcacagctcccctcacttggagaaccttgactctcttgatggaacacagatgggctgcttgggaaagaaactttcacctgagcttcacctgaggtcagactgcagtttcagaaaggtggaattttatatagtcattgtttatttcatggaaactgaagttctgctgagggctgagcagcactggcattgaaaaatataataatcataaagtc

SEQ ID NO: 364225 - DNA, 2365 bp, Homo sapiens
agcggcctgcgagttaccgcccactcgctgcggcgcttctggctccagaccgccctccggatcggaccctgcgaatggttttggctatatcttcatgtaggacctactccctatcccgtcggccgcggtgaatcccacctgcggtgctttaacttgtgtaacagagatgctgcctctgggagaggcggggagggacgggccaactggagcgggcggcgggagggtggagggcggggcgcggcttggggcctgggttcctttgccccttgcccaccagggaggggtgggagacgagagagggtgaactttcccctgcgagattctggtgaaaggggaaatatgcttcgagtcagtaaagctgcgcaagtgcacagtcaaggagagagtcttgggaaaaccaaggatagttcccggagatgacttttggactgcggaaacgtttgtcagaggaaagaggcttcagtttaatgtgagatcattggaagttgaactattcaggcggcgagcagagcccctttctccatcttcccactgtatggtcttgtcccttagcctataatttcttataaagagcgttttgaagactaggtttttactggcagggccctgattcaggctcacagtataaagagagaagtcagagaatcctagaaatttattgcttgaagaaggggttggtgtcctcatatctcaccttcctcaggctgggcttcatcaccaggcctcctcacagattcctgtcccttctgtgtcctggactccggatacctcaactctcagtactttgtgctcagcccaggcccagagccatggctatctcctcttcctcctgcgaactgcccctggtggctgtgtgccaggtaacatcgacgccagacaagcaacagaactttaaaacatgtgctgagctggttcgagaggctgccagactgggtgcctgcctggctttcctgcctgaggcatttgacttcattgcacgggaccctgcagagacgctacacctgtctgaaccactgggtgggaaacttttggaagaatacacccagcttgccagggaatgtggactctggctgtccttgggtggtttccatgagcgtggccaagactgggagcagactcagaaaatctacaattgtcacgtgctgctgaacagcaaaggggcagtagtggccacttacaggaagacacatctgtgtgacgtagagattccagggcaggggcctatgtgtgaaagcaactctaccatgcctgggcccagtcttgagtcacctgtcagcacaccagcaggcatgccactatgagctagtgctcatgtgacttggaggcaggatccaggcacagctcccctcacttggagaaccttgactctcttgatggaacacagatgggctgcttgggaaagaaactttcacctgagcttcacctgaggtcagactgcagtttcagaaaggtggaattttatatagtcattgtttatttcatggaaactgaagttctgctgagggctgagcagcactggcattgaaaaatataataatcataaagtctgtgtctggacatcgcctttgggaactagaaggggagttggtattgtaccagctggactaagctccagttctagacctcctggctcattcaacatgcctccctacctaaataaaagtgcaacactcagtgcatgtcccagccccattctcccaagcatgggagtgggcgtaggagtggaggagggggaaggaaaaaggaattacttcacttacacctatgatgccctttgcccaagccagaagaaagcaaaggggaaaagggctgcagggtacattatttattttcacttgaacatggaaagaaagtgtcacactcccccttcccctttatagggggagtgtattttaatcagcaacctcttctccatccaccctgtgtatgtgtgtacacatataccaccacagttgggaggcatgactaggctgacccagtcttatctgttcctcctttgaagagggtttgacaaatgggaaaaaggaaggagccacatcaggcagaggtttcaagccatggaatggaggaaaggcggcagagaggagcagcaccagaggccaggagagagtggaaagggccacagcttgtttttaaaaaattctataatttggaagagggtggcgattaattttcaaaatacacttcagagtcccactttccacatagctcccttactcacagccctttggttttttagacaaaatttaagagctctcataaagccagaagtattgataactccttagtgcatccaaaaaaaagtgttcacatcaatcccttacaaagactatgtgctgtagactttgcttcttcctatacattt

SEQ ID NO: 364226 - DNA, 2314 bp, Homo sapiens
agcggcctgcgagttaccgcccactcgctgcggcgcttctggctccagaccgccctccggatcggaccctgcgaatggttttggctatatcttcatgtaggacctactccctatcccgtcggccgcggtgaatcccacctgcggtgctttaacttgtgtaacagagatgctgcctctgggagaggcggggagggacgggccaactggagcgggcggcgggagggtggagggcggggcgcggcttggggcctgggttcctttgccccttgcccaccagggaggggtgggagacgagagagggtgaactttcccctgcgagattctggtgaaaggggaaatatgcttcgagtcagtaaagctgcgcaagtgcacagtcaaggagagagtcttgggaaaaccaaggatagttcccggagatgacttttggactgcggaaacgtttgtcagaggaaagaggcttcagtttaatgtgagatcattggaagttgaactattcaggcggcgagcagagcccctttctccatcttcccactgtatggtcttgtcccttagcctataatttcttataaagagcgttttgaagactaggtttttactggcagggccctgattcaggctcacagtataaagagagaagtcagagaatcctagaaatttattgcttgaagaaggggttggtgtcctcatatctcaccttcctcaggctgggcttcatcaccaggcctcctcacagattcctgtcccttctgtgtcctggactccggatacctcaactctcagtactttgtgctcagcccaggcccagagccatggctatctcctcttcctcctgcgaactgcccctggtggctgtgtgccaggtaacatcgacgccagacaagcaacagaactttaaaacatgtgctgagctggttcgagaggctgccagactgggtgcctgcctggctttcctgcctgaggcatttgacttcattgcacgggaccctgcagagacgctacacctgtctgaaccactgggtgggaaacttttggaagaatacacccagcttgccagggaatgtggactctggctgtccttgggtggtttccatgagcgtggccaagactgggagcagactcagaaaatctacaattgtcacgtgctgctgaacagcaaccaggcctctgccttgcccgaatagaccactgtcttaagacttgacttctgtgagtttagacctgcccctcccacccccaccctgccactatgagctagtgctcatgtgacttggaggcaggatccaggcacagctcccctcacttggagaaccttgactctcttgatggaacacagatgggctgcttgggaaagaaactttcacctgagcttcacctgaggtcagactgcagtttcagaaaggtggaattttatatagtcattgtttatttcatggaaactgaagttctgctgagggctgagcagcactggcattgaaaaatataataatcataaagtctgtgtctggacatcgcctttgggaactagaaggggagttggtattgtaccagctggactaagctccagttctagacctcctggctcattcaacatgcctccctacctaaataaaagtgcaacactcagtgcatgtcccagccccattctcccaagcatgggagtgggcgtaggagtggaggagggggaaggaaaaaggaattacttcacttacacctatgatgccctttgcccaagccagaagaaagcaaaggggaaaagggctgcagggtacattatttattttcacttgaacatggaaagaaagtgtcacactcccccttcccctttatagggggagtgtattttaatcagcaacctcttctccatccaccctgtgtatgtgtgtacacatataccaccacagttgggaggcatgactaggctgacccagtcttatctgttcctcctttgaagagggtttgacaaatgggaaaaaggaaggagccacatcaggcagaggtttcaagccatggaatggaggaaaggcggcagagaggagcagcaccagaggccaggagagagtggaaagggccacagcttgtttttaaaaaattctataatttggaagagggtggcgattaattttcaaaatacacttcagagtcccactttccacatagctcccttactcacagccctttggttttttagacaaaatttaagagctctcataaagccagaagtattgataactccttagtgcatccaaaaaaaagtgttcacatcaatcccttacaaagactatgtgctgtagactttgcttcttcctatacattt

SEQ ID NO: 364227 - DNA, 2292 bp, Homo sapiens
agcggcctgcgagttaccgcccactcgctgcggcgcttctggctccagaccgccctccggatcggaccctgcgaatggttttggctatatcttcatgtaggacctactccctatcccgtcggccgcggtgaatcccacctgcggtgctttaacttgtgtaacagagatgctgcctctgggagaggcggggagggacgggccaactggagcgggcggcgggagggtggagggcggggcgcggcttggggcctgggttcctttgccccttgcccaccagggaggggtgggagacgagagagggtgaactttcccctgcgagattctggtgaaaggggaaatatgcttcgagtcagtaaagctgcgcaagtgcacagtcaaggagagagtcttgggaaaaccaaggatagttcccggagatgacttttggactgcggaaacgtttgtcagaggaaagaggcttcagtttaatgtgagatcattggaagttgaactattcaggcggcgagcagagcccctttctccatcttcccactgtatggtcttgtcccttagcctataatttcttataaagagcgttttgaagactaggtttttactggcagggccctgattcaggctcacagtataaagagagaagtcagagaatcctagaaatttattgcttgaagaaggggttggtgtcctcatatctcaccttcctcaggctgggcttcatcaccaggcctcctcacagattcctgtcccttctgtgtcctggactccggatacctcaactctcagtactttgtgctcagcccaggtaacacgttttgttgtgtcctcagtgcctggcacttagatgctcagtttgttaaatggatagtgggagacacaggagtgtcaactatccacacatttgattggtgagccctactagccctgggtcaacgtgccctgtaagagcatgatcaaaaggaagtccagctttcctgcctctccacttgcaccccttagcattaaatttgcttccctgtgctatgaaatctgagaatcctgcctatgctgttcacaggcccagagccatggctatctcctcttcctcctgcgaactgcccctggtggctgtgtgccaggtaacatcgacgccagacaagcaacagaactttaaaacatgtgctgagctggttcgagaggctgccagactgggtgcctgcctggctttcctgcctgaggcatttgacttcattgcacgggaccctgcagagacgctacacctgtctgaaccactgggtgggaaacttttggaagaatacacccagcttgccagggaatgtggactctggctgtccttgggtggtttccatgagcgtggccaagactgggagcagtttcagaaaggtggaattttatatagtcattgtttatttcatggaaactgaagttctgctgagggctgagcagcactggcattgaaaaatataataatcataaagtctgtgtctggacatcgcctttgggaactagaaggggagttggtattgtaccagctggactaagctccagttctagacctcctggctcattcaacatgcctccctacctaaataaaagtgcaacactcagtgcatgtcccagccccattctcccaagcatgggagtgggcgtaggagtggaggagggggaaggaaaaaggaattacttcacttacacctatgatgccctttgcccaagccagaagaaagcaaaggggaaaagggctgcagggtacattatttattttcacttgaacatggaaagaaagtgtcacactcccccttcccctttatagggggagtgtattttaatcagcaacctcttctccatccaccctgtgtatgtgtgtacacatataccaccacagttgggaggcatgactaggctgacccagtcttatctgttcctcctttgaagagggtttgacaaatgggaaaaaggaaggagccacatcaggcagaggtttcaagccatggaatggaggaaaggcggcagagaggagcagcaccagaggccaggagagagtggaaagggccacagcttgtttttaaaaaattctataatttggaagagggtggcgattaattttcaaaatacacttcagagtcccactttccacatagctcccttactcacagccctttggttttttagacaaaatttaagagctctcataaagccagaagtattgataactccttagtgcatccaaaaaaaagtgttcacatcaatcccttacaaagactatgtgctgtagactttgcttcttcctatacattt

SEQ ID NO: 364228 - DNA, 1231 bp, Homo sapiens
tctgccctgtcaggtgataaatttctccctcgaggcctctatacttttgctggtggtgtgggccccattgtggtccccccccgcacgatcgagggtgcccttcgcaggctccccccggtgcgcctttttcccctctacacacgttttttaaaccgccgcgccctcgtctcttgttcttttaaattacgcgcctccctcgttaggggccccccctgtgtccacaaaccaacccggggcgcgattgggcccccccgggggaattttttcgccccccccccttttttttttttttttttttttttttttttttttttttttttttttttatatagtcattgtttatttcatggaaactgaagttctgctgagggctgagcagcactggcattgaaaaatataataatcataaagtctgtgtctggacatcgcctttgggaactagaaggggagttggtattgtaccagctggactaagctccagttctagacctcctggctcattcaacatgcctccctacctaaataaaagtgcaacactcagtgcatgtcccagccccattctcccaagcatgggagtgggcgtaggagtggaggagggggaaggaaaaaggaattacttcacttacacctatgatgccctttgcccaagccagaagaaagcaaaggggaaaagggctgcagggtacattatttattttcacttgaacatggaaagaaagtgtcacactcccccttcccctttatagggggagtgtattttaatcagcaacctcttctccatccaccctgtgtatgtgtgtacacatataccaccacagttgggaggcatgactaggctgacccagtcttatctgttcctcctttgaagagggtttgacaaatgggaaaaaggaaggagccacatcaggcagaggtttcaagccatggaatggaggaaaggcggcagagaggagcagcaccagaggccaggagagagtggaaagggccacagcttgtttttaaaaaattctataatttggaagagggtggcgattaattttcaaaatacacttcagagtcccactttccacatagctcccttactcacagccctttggttttttagacaaaatttaagagctctcataaagccagaagtattgataactccttagtgcatccaaaaaaaagtgttcacatcaatcccttacaaagactatgtgctgtagactttgcttcttcctatacattt

SEQ ID NO: 364229 - DNA, 1438 bp, Homo sapiens
  misc_feature (518)..(518): n is a, c, g, or t
ccgcccccgggagaaaaaatatgcttgcaccataattattatcttcctctgtttgcccacaattttttttagtcccgctcgagccataattattccccttttttgtgttgacaccaccgcttaatagaccgccccgtcaaaatttgtaatatatttcccccttgaaggctctttataatatctccctctagtggggaggttttgttccccacccagtattgttgctgctcccccccccgcgacattatgggtttctccttggtccccgaagggctctcctcactggtagacacgcggttttccccgcctctcaccgacacgccttttgttataaaccccggcgcgccgttgcgcgccgttgctttataataatgccgccgcccctattatggggggcccccctgtaaaaaaaaacgcggggagagccgcaaaatctggggcccccccggggagaaattctttgaggcgcgcgccgccccccctctctttttttttttttttttttttttttttttttntttttttttttttttatatagtcattgtttatttcatggaaactgaagttctgctgagggctgagcagcactggcattgaaaaatataataatcataaagtctgtgtctggacatcgcctttgggaactagaaggggagttggtattgtaccagctggactaagctccagttctagacctcctggctcattcaacatgcctccctacctaaataaaagtgcaacactcagtgcatgtcccagccccattctcccaagcatgggagtgggcgtaggagtggaggagggggaaggaaaaaggaattacttcacttacacctatgatgccctttgcccaagccagaagaaagcaaaggggaaaagggctgcagggtacattatttattttcacttgaacatggaaagaaagtgtcacactcccccttcccctttatagggggagtgtattttaatcagcaacctcttctccatccaccctgtgtatgtgtgtacacatataccaccacagttgggaggcatgactaggctgacccagtcttatctgttcctcctttgaagagggtttgacaaatgggaaaaaggaaggagccacatcaggcagaggtttcaagccatggaatggaggaaaggcggcagagaggagcagcaccagaggccaggagagagtggaaagggccacagcttgtttttaaaaaattctataatttggaagagggtggcgattaattttcaaaatacacttcagagtcccactttccacatagctcccttactcacagccctttggttttttagacaaaatttaagagctctcataaagccagaagtattgataactccttagtgcatccaaaaaaaagtgttcacatcaatcccttacaaagactatgtgctgtagactttgcttcttcctatacattt

SEQ ID NO: 364230 - DNA, 981 bp, Homo sapiens
agcggcctgcgagttaccgcccactcgctgcggcgcttctggctccagaccgccctccggatcggaccctgcgaatggttttggctatatcttcatgtaggacctactccctatcccgtcggccgcggtgaatcccacctgcggtgctttaacttgtgtaacagagatgctgcctctgggagaggcggggagggacgggccaactggagcgggcggcgggagggtggagggcggggcgcggcttggggcctgggttcctttgccccttgcccaccagggaggggtgggagacgagagagggtgaactttcccctgcgagattctggtgaaaggggaaatatgcttcgagtcagtaaagctgcgcaagtgcacagtcaaggagagagtcttgggaaaaccaaggatagttcccggagatgacttttggactgcggaaacgtttgtcagaggaaagaggcttcagtttaatgtgagatcattggaagttgaactattcaggcggcgagcagagcccctttctccatcttcccactgtatggtcttgtcccttagcctataatttcttataaagagcgttttgaagactaggtttttactggcagggccctgattcaggctcacagtataaagagagaagtcagagaatcctagaaatttattgcttgaagaaggggttggtgtcctcatatctcaccttcctcaggctgggcttcatcaccaggcctcctcacagattcctgtcccttctgtgtcctggactccggatacctcaactctcagtactttgtgctcagcccaggcccagagccatggctatctcctcctgcttgggaaagaaactttcacctgagcttcacctgaggtcagactgcagtttcagaaaggtggaattttatatagtcattgtttatttcatggaaactgaagttctgctgagggctgagcagcactggcattgaaaaatataataatcataaagtc

SEQ ID NO: 364231 - DNA, 1254 bp, Homo sapiens
  misc_feature (688)..(688): n is a, c, g, or t
cttgctgtcttctgcttctctcccccctgtccgcctcctcccctcccccgtcgttcctctctcttccttccctcgctcctcctctctcctccctccccccggcggctggctttcctctctgtttgctctctctccccctcgctgtttgtttgcggtttctcgttgcctctcccgtgtcctgcttggtgtttgtggtttgtcgtttggtgttctttgttttttgtcttgttttgctggtcgctctgtctggtcgcgtgtgtgtgttgttcggccttttctcgttttgtttcttcgtctttcttgtgtttttttttgttcgtctcctgtgtttcctcctttttatcgtgcgtgccctcgctgcttttactctccgctcctccccttctctgcgtcttcttgttctgttctcgttctccctcccccttcgtgttgttccctcgcggttgtttttttgtttttggtggtcgccccgccctcttgttgtttctctctgctgtttttcttcttgtccccgtttcctccttcgtgttcttcctccttctgtgttcccccgccccccccgggctgtcttccttcctcccctgccgcccgcccccccccccgcgtgttttttttttgttttttttttttttctctttgtcttttttctttttttttttttttttttttttttttttttttttttttnttttttttttttgcagggtacattatttattttcacttgaacatggaaagaaagtgtcacactcccccttcccctttatagggggagtgtattttaatcagcaacctcttctccatccaccctgtgtatgtgtgtacacatataccaccacagttgggaggcatgactaggctgacccagtcttatctgttcctcctttgaagagggtttgacaaatgggaaaaaggaaggagccacatcaggcagaggtttcaagccatggaatggaggaaaggcggcagagaggagcagcaccagaggccaggagagagtggaaagggccacagcttgtttttaaaaaattctataatttggaagagggtggcgattaattttcaaaatacacttcagagtcccactttccacatagctcccttactcacagccctttggttttttagacaaaatttaagagctctcataaagccagaagtattgataactccttagtgcatccaaaaaaaagtgttcacatcaatcccttacaaagactatgtgctgtagactttgcttcttcctatacattt

SEQ ID NO: 364232 - DNA, 853 bp, Homo sapiens
[374 bp omitted]tggacgccaccatgagaagagagcaagttatggccacagcatggtggtagacccctggggaacagtggtggcccgctgctctgaggggccaggcctctgccttgcccgaatagacctcaactatctgcgacagttgcgccgacacctgcctgtgttccagcaccgcaggcctgacctctatggcaatctgggtcacccactgtcttaagacttgacttctgtgagtttagacctgcccctcccacccccaccctgccactatgagctagtgctcatgtgacttggaggcaggatccaggcacagctcccctcacttggagaaccttgactctcttgatggaacacagatgggctgcttgggaaagaaactttcacctgagcttcacctgaggtcagactgcagtttcagaaaggtggaattttatatagtcattgtttatttcatggaaactgaagttctgctgagggctgagcagcac

SEQ ID NO: 364233 - DNA, 2198 bp, Homo sapiens
agcggcctgcgagttaccgcccactcgctgcggcgcttctggctccagaccgccctccggatcggaccctgcgaatggttttggctatatcttcatgctgggcttcatcaccaggcctcctcacagattcctgtcccttctgtgtcctggactccggatacctcaactctcagtactttgtgctcagcccaggcccagagccatggctatctcctcttcctcctgcgaactgcccctggtggctgtgtgccaggtaacatcgacgccagacaagcaacagaactttaaaacatgtgctgagctggttcgagaggctgccagactgggtgcctgcctggctttcctgcctgaggcatttgacttcattgcacgggaccctgcagagacgctacacctgtctgaaccactgggtgggaaacttttggaagaatacacccagcttgccagggaatgtggactctggctgtccttgggtggtttccatgagcgtggccaagactgggagcagactcagaaaatctacaattgtcacgtgctgctgaacagcaaaggggcagtagtggccacttacaggaagacacatctgtgtgacgtagagattccagggcaggggcctatgtgtgaaagcaactctaccatgcctgggcccagtcttgagtcacctgtcagcacaccagcaggcaagattggtctagctgtctgctatgacatgcggttccctgaactctctctggcattggctcaagctggagcagagatacttacctatccttcagcttttggatccattacaggcccagcccactgggaggtgttgctgcgggcccgtgctatcgaaacccagtgctatgtagtggcagcagcacagtgtggacgccaccatgagaagagagcaagttatggccacagcatggtggtagacccctggggaacagtggtggcccgctgctctgaggggccaggcctctgccttgcccgaatagacctcaactatctgcgacagttgcgccgacacctgcctgtgttccagcaccgcaggcctgacctctatggcaatctgggtcacccactgtcttaagacttgacttctgtgagtttagacctgcccctcccacccccaccctgccactatgagctagtgctcatgtgacttggaggcaggatccaggcacagctcccctcacttggagaaccttgactctcttgatggaacacagatgggctgcttgggaaagaaactttcacctgagcttcacctgaggtcagactgcagtttcagaaaggtggaattttatatagtcattgtttatttcatggaaactgaagttctgctgagggctgagcagcactggcattgaaaaatataataatcataaagtctgtgtctggacatcgcctttgggaactagaaggggagttggtattgtaccagctggactaagctccagttctagacctcctggctcattcaacatgcctccctacctaaataaaagtgcaacactcagtgcatgtcccagccccattctcccaagcatgggagtgggcgtaggagtggaggagggggaaggaaaaaggaattacttcacttacacctatgatgccctttgcccaagccagaagaaagcaaaggggaaaagggctgcagggtacattatttattttcacttgaacatggaaagaaagtgtcacactcccccttcccctttatagggggagtgtattttaatcagcaacctcttctccatccaccctgtgtatgtgtgtacacatataccaccacagttgggaggcatgactaggctgacccagtcttatctgttcctcctttgaagagggtttgacaaatgggaaaaaggaaggagccacatcaggcagaggtttcaagccatggaatggaggaaaggcggcagagaggagcagcaccagaggccaggagagagtggaaagggccacagcttgtttttaaaaaattctataatttggaagagggtggcgattaattttcaaaatacacttcagagtcccactttccacatagctcccttactcacagccctttggttttttagacaaaatttaagagctctcataaagccagaagtattgataactccttagtgcatccaaaaaaaagtgttcacatcaatcccttacaaagactatgtgctgtagactttgcttcttcctatacattt

SEQ ID NO: 364234 - DNA, 1987 bp, Homo sapiens
agcggcctgcgagttaccgcccactcgctgcggcgcttctggctccagaccgccctccggatcggaccctgcgaatggttttggctatatcttcatgtaggacctactccctatcccgtcggccgcggtgaatcccacctgcggtgctttaacttgtgtaacagagatgctgcctctgggagaggcggggagggacgggccaactggagcgggcggcgggagggtggagggcggggcgcggcttggggcctgggttcctttgccccttgcccaccagggaggggtgggagacgagagagggtgaactttcccctgcgagattctggtgaaaggggaaatatgcttcgagtcagtaaagctgcgcaagtgcacagtcaaggagagagtcttgggaaaaccaaggatagttcccggagatgacttttggactgcggaaacgtttgtcagaggaaagaggcttcagtttaatgtgagatcattggaagttgaactattcaggcggcgagcagagcccctttctccatcttcccactgtatggtcttgtcccttagcctataatttcttataaagagcgttttgaagactaggtttttactggcagggccctgattcaggctcacagtataaagagagaagtcagagaatcctagaaatttattgcttgaagaaggggttggtgtcctcatatctcaccttcctcaggctgggcttcatcaccaggcctcctcacagattcctgtcccttctgtgtcctggactccggatacctcaactctcagtactttgtgctcagcccaggcccagagccatggctatctcctcttcctcctgcgaactgcccctggtggctgtgtgccaggtaacatcgacgccagacaagcaacagaactttaaaacatgtgctgagctggttcgagaggctgccagactgggtgcctgcctggctttcctgcctgaggcatttgacttcattgcacgggaccctgcagagacgctacacctgtctgaaccactgggtgggaaacttttggaagaatacacccagcttgccagggaatgtggactctggctgtccttgggtggtttccatgagcgtggccaagactgggagcagactcagaaaatctacaattgtcacgtgctgctgaacagcaaaggggcagtagtggccacttacaggaagacacatctgtgtgacgtagagattccagggcaggggcctatgtgtgaaagcaactctaccatgcctgggcccagtcttgagtcacctgtcagcacaccagcaggcaagattggtctagctgtctgctatgacatgcggttccctgaactctctctggcattggctcaagctggagcagagatacttacctatccttcagcttttggatccattacaggcccagcccactgggaggtgttgctgcgggcccgtgctatcgaaacccagtgctatgtagtggcagcagcacagtgtggacgccaccatgagaagagagcaagttatggccacagcatggtggtagacccctggggaacagtggtggcccgctgctctgaggggccaggcctctgccttgcccgaatagacctcaactatctgcgacagttgcgccgacacctgcctgtgttccagcaccgcaggcctgacctctatggcaatctgggtcacccactgtcttaagacttgacttctgtgagtttagacctgcccctcccacccccaccctgccactatgagctagtgctcatgtgacttggaggcaggatccaggcacagctcccctcacttggagaaccttgactctcttgatggaacacagatgggctgcttgggaaagaaactttcacctgagcttcacctgaggtcagactgcagtttcagaaaggtggaattttatatagtcattgtttatttcatggaaactgaagttctgctgagggctgagcagcactggcattgaaaaatataataatcataaagtc

SEQ ID NO: 364235 - DNA, 1287 bp, Homo sapiens
agcggcctgcgagttaccgcccactcgctgcggcgcttctggctccagaccgccctccggatcggaccctgcgaatggttttggctatatcttcatcaggcccagagccatggctatctcctcttcctcctgcgaactgcccctggtggctgtgtgccaggtaacatcgacgccagacaagcaacagaactttaaaacatgtgctgagctggttcgagaggctgccagactgggtgcctgcctggctttcctgcctgaggcatttgacttcattgcacgggaccctgcagagacgctacacctgtctgaaccactgggtgggaaacttttggaagaatacacccagcttgccagggaatgtggactctggctgtccttgggtggtttccatgagcgtggccaagactgggagcagactcagaaaatctacaattgtcacgtgctgctgaacagcaaaggggcagtagtggccacttacaggaagacacatctgtgtgacgtagagattccagggcaggggcctatgtgtgaaagcaactctaccatgcctgggcccagtcttgagtcacctgtcagcacaccagcaggcaagattggtctagctgtctgctatgacatgcggttccctgaactctctctggcattggctcaagctggagcagagatacttacctatccttcagcttttggatccattacaggcccagcccactgggaggtgttgctgcgggcccgtgctatcgaaacccagtgctatgtagtggcagcagcacagtgtggacgccaccatgagaagagagcaagttatggccacagcatggtggtagacccctggggaacagtggtggcccgctgctctgaggggccaggcctctgccttgcccgaatagacctcaactatctgcgacagttgcgccgacacctgcctgtgttccagcaccgcaggcctgacctctatggcaatctgggtcacccactgtcttaagacttgacttctgtgagtttagacctgcccctcccacccccaccctgccactatgagctagtgctcatgtgacttggaggcaggatccaggcacagctcccctcacttggagaaccttgactctcttgatggaacacagatgggctgcttgggaaagaaactttcacctgagcttcacctgaggtcagactgcagtttcagaaaggtggaattttatatagtcattgtttatttcatggaaactgaagttctgctgagggctgagcagcactggcattgaaaaatataataatcataaagtc

SEQ ID NO: 364236 - DNA, 2760 bp, Homo sapiens
agcggcctgcgagttaccgcccactcgctgcggcgcttctggctccagaccgccctccggatcggaccctgcgaatggttttggctatatcttcatgtaggacctactccctatcccgtcggccgcggtgaatcccacctgcggtgctttaacttgtgtaacagagatgctgcctctgggagaggcggggagggacgggccaactggagcgggcggcgggagggtggagggcggggcgcggcttggggcctgggttcctttgccccttgcccaccagggaggggtgggagacgagagagggtgaactttcccctgcgagattctggtgaaaggggaaatatgcttcgagtcagtaaagctgcgcaagtgcacagtcaaggagagagtcttgggaaaaccaaggatagttcccggagatgacttttggactgcggaaacgtttgtcagaggaaagaggcttcagtttaatgtgagatcattggaagttgaactattcaggcggcgagcagagcccctttctccatcttcccactgtatggtcttgtcccttagcctataatttcttataaagagcgttttgaagactaggtttttactggcagggccctgattcaggctcacagtataaagagagaagtcagagaatcctagaaatttattgcttgaagaaggggttggtgtcctcatatctcaccttcctcaggctgggcttcatcaccaggcctcctcacagattcctgtcccttctgtgtcctggactccggatacctcaactctcagtactttgtgctcagcccaggcccagagccatggctatctcctcttcctcctgcgaactgcccctggtggctgtgtgccaggtaacatcgacgccagacaagcaacagaactttaaaacatgtgctgagctggttcgagaggctgccagactgggtgcctgcctggctttcctgcctgaggcatttgacttcattgcacgggaccctgcagagacgctacacctgtctgaaccactgggtgggaaacttttggaagaatacacccagcttgccagggaatgtggactctggctgtccttgggtggtttccatgagcgtggccaagactgggaaggggcagtagtggccacttacaggaagacacatctgtgtgacgtagagattccagggcaggggcctatgtgtgaaagcaactctaccatgcctgggcccagtcttgagtcacctgtcagcacaccagcaggcaagattggtctagctgtctgctatgacatgcggttccctgaactctctctggcattggctcaagctggagcagagatacttacctatccttcagcttttggatccattacaggcccagcccactgggaggtgttgctgcgggcccgtgctatcgaaacccagtgctatgtagtggcagcagcacagtgtggacgccaccatgagaagagagcaagttatggccacagcatggtggtagacccctggggaacagtggtggcccgctgctctgaggggccaggcctctgccttgcccgaatagacctcaactatctgcgacagttgcgccgacacctgcctgtgttccagcaccgcaggcctgacctctatggcaatctgggtcacccactgtcttaagacttgacttctgtgagtttagacctgcccctcccacccccaccctgccactatgagctagtgctcatgtgacttggaggcaggatccaggcacagctcccctcacttggagaaccttgactctcttgatggaacacagatgggctgcttgggaaagaaactttcacctgagcttcacctgaggtcagactgcagtttcagaaaggtggaattttatatagtcattgtttatttcatggaaactgaagttctgctgagggctgagcagcactggcattgaaaaatataataatcataaagtctgtgtctggacatcgcctttgggaactagaaggggagttggtattgtaccagctggactaagctccagttctagacctcctggctcattcaacatgcctccctacctaaataaaagtgcaacactcagtgcatgtcccagccccattctcccaagcatgggagtgggcgtaggagtggaggagggggaaggaaaaaggaattacttcacttacacctatgatgccctttgcccaagccagaagaaagcaaaggggaaaagggctgcagggtacattatttattttcacttgaacatggaaagaaagtgtcacactcccccttcccctttatagggggagtgtattttaatcagcaacctcttctccatccaccctgtgtatgtgtgtacacatataccaccacagttgggaggcatgactaggctgacccagtcttatctgttcctcctttgaagagggtttgacaaatgggaaaaaggaaggagccacatcaggcagaggtttcaagccatggaatggaggaaaggcggcagagaggagcagcaccagaggccaggagagagtggaaagggccacagcttgtttttaaaaaattctataatttggaagagggtggcgattaattttcaaaatacacttcagagtcccactttccacatagctcccttactcacagccctttggttttttagacaaaatttaagagctctcataaagccagaagtattgataactccttagtgcatccaaaaaaaagtgttcacatcaatcccttacaaagactatgtgctgtagactttgcttcttcctatacattt

SEQ ID NO: 364237 - DNA, 2059 bp, Homo sapiens
agcggcctgcgagttaccgcccactcgctgcggcgcttctggctccagaccgccctccggatcggaccctgcgaatggttttggctatatcttcatgctgggcttcatcaccaggcctcctcacagattcctgtcccttctgtgtcctggactccggatacctcaactctcagtactttgtgctcagcccaggcccagagccatggctatctcctcttcctcctgcgaactgcccctggtggctgtgtgccaggtaacatcgacgccagacaagcaacagaactttaaaacatgtgctgagctggttcgagaggctgccagactgggtgcctgcctggctttcctgcctgaggcatttgacttcattgcacgggaccctgcagagacgctacacctgtctgaaccactgggtgggaaacttttggaagaatacacccagcttgccagggaatgtggactctggctgtccttgggtggtttccatgagcgtggccaagactgggagcagactcagaaaatctacaattgtcacgtgctgctgaacagcaaaggggcagtagtggccacttacaggaagacacatctgtgtgacgtagagattccagggcaggggcctatgtgtgaaagcaactctaccatgcctgggcccagtcttgagtcacctgtcagcacaccagcaggcaagattggtctagctgtctgctatgacatgcggttccctgaactctctctggcattggctcaagctggagcagagatacttacctatccttcagcttttggatccattacaggcccagcccactgggaggtgttgctgcgggcccgtgctatcgaaacccagtgctatgtagtggcagcagcacagtgtggacgccaccatgagaagagagcaagttatggccacagcatggtggtagacccctggggaacagtggtggcccgctgctctgaggggccaggcctctgccttgcccgaatagatgccactatgagctagtgctcatgtgacttggaggcaggatccaggcacagctcccctcacttggagaaccttgactctcttgatggaacacagatgggctgcttgggaaagaaactttcacctgagcttcacctgaggtcagactgcagtttcagaaaggtggaattttatatagtcattgtttatttcatggaaactgaagttctgctgagggctgagcagcactggcattgaaaaatataataatcataaagtctgtgtctggacatcgcctttgggaactagaaggggagttggtattgtaccagctggactaagctccagttctagacctcctggctcattcaacatgcctccctacctaaataaaagtgcaacactcagtgcatgtcccagccccattctcccaagcatgggagtgggcgtaggagtggaggagggggaaggaaaaaggaattacttcacttacacctatgatgccctttgcccaagccagaagaaagcaaaggggaaaagggctgcagggtacattatttattttcacttgaacatggaaagaaagtgtcacactcccccttcccctttatagggggagtgtattttaatcagcaacctcttctccatccaccctgtgtatgtgtgtacacatataccaccacagttgggaggcatgactaggctgacccagtcttatctgttcctcctttgaagagggtttgacaaatgggaaaaaggaaggagccacatcaggcagaggtttcaagccatggaatggaggaaaggcggcagagaggagcagcaccagaggccaggagagagtggaaagggccacagcttgtttttaaaaaattctataatttggaagagggtggcgattaattttcaaaatacacttcagagtcccactttccacatagctcccttactcacagccctttggttttttagacaaaatttaagagctctcataaagccagaagtattgataactccttagtgcatccaaaaaaaagtgttcacatcaatcccttacaaagactatgtgctgtagactttgcttcttcctatacattt

SEQ ID NO: 364238 - DNA, 1527 bp, Homo sapiens
agcggcctgcgagttaccgcccactcgctgcggcgcttctggctccagaccgccctccggatcggaccctgcgaatggttttggctatatcttcatgtaggacctactccctatcccgtcggccgcggtgaatcccacctgcggtgctttaacttgtgtaacagagatgctgcctctgggagaggcggggagggacgggccaactggagcgggcggcgggagggtggagggcggggcgcggcttggggcctgggttcctttgccccttgcccaccagggaggggtgggagacgagagagggtgaactttcccctgcgagattctggtgaaaggggaaatatgcttcgagtcagtaaagctgcgcaagtgcacagtcaaggagagagtcttgggaaaaccaaggatagttcccggagatgacttttggactgcggaaacgtttgtcagaggaaagaggcttcagtttaatgcaggcccagagccatggctatctcctcttcctcctgcgaactgcccctggtggctgtgtgccaggtaacatcgacgccagacaagcaacagaactttaaaacatgtgctgagctggttcgagaggctgccagactgggtgcctgcctggctttcctgcctgaggcatttgacttcattgcacgggaccctgcagagacgctacacctgtctgaaccactgggtgggaaacttttggaagaatacacccagcttgccagggaatgtggactctggctgtccttgggtggtttccatgagcgtggccaagactgggagcagactcagaaaatctacaattgtcacgtgctgctgaacagcaaagattggtctagctgtctgctatgacatgcggttccctgaactctctctggcattggctcaagctggagcagagatacttacctatccttcagcttttggatccattacaggcccagcccactgggaggtgttgctgcgggcccgtgctatcgaaacccagtgctatgtagtggcagcagcacagtgtggacgccaccatgagaagagagcaagttatggccacagcatggtggtagacccctggggaacagtggtggcccgctgctctgaggggccaggcctctgccttgcccgaatagacctcaactatctgcgacagttgcgccgacacctgcctgtgttccagcaccgcaggcctgacctctatggcaatctgggtcacccactgtcttaagacttgacttctgtgagtttagacctgcccctcccacccccaccctgccactatgagctagtgctcatgtgacttggaggcaggatccaggcacagctcccctcacttggagaaccttgactctcttgatggaacacagatgggctgcttgggaaagaaactttcacctgagcttcacctgaggtcagactgcagtttcagaaaggtggaattttatatagtcattgtttatttcatggaaactgaagttctgctgagggctgagcagcactggcattgaaaaatataataatcataaagtc

SEQ ID NO: 364239 - DNA, 2460 bp, Homo sapiens
agcggcctgcgagttaccgcccactcgctgcggcgcttctggctccagaccgccctccggatcggaccctgcgaatggttttggctatatcttcatgctgggcttcatcaccaggcctcctcacagattcctgtcccttctgtgtcctggactccggatacctcaactctcagtactttgtgctcagcccaggcccagagccatggctatctcctcttcctcctgcgaactgcccctggtggctgtgtgccaggtaacatcgacgccagacaagcaacagaactttaaaacatgtgctgagctggttcgagaggctgccagactgggtgcctgcctggctttcctgcctgaggcatttgacttcattgcacgggaccctgcagagacgctacacctgtctgaaccactgggtgggaaacttttggaagaatacacccagcttgccagggaatgtggactctggctgtccttgggtggtttccatgagcgtggccaagactgggagcagactcagaaaatctacaattgtcacgtgctgctgaacagcaaaggggcagtagtggccacttacaggaagacacatctgtgtgacgtagagattccagggcaggggcctatgtgtgaaagcaactctaccatgcctgggcccagtcttgagtcacctgtcagcacaccagcaggcaagattggtctagctgtctgctatgacatgcggttccctgaactctctctggcattggctcaagctggagcagagatacttacctatccttcagcttttggatccattacaggcccagcccactgggagcccgtctcctcttgagggtgacgtagggcagcaggtcgtggcgagtgatgatgcgcagcagctgcagcacctggcgaaagttactttcatcacagcggccctggcgctccagtgccaataagaagtcacgtccatttcggatgagtccacgctcgtggtcatcaatgacatcaacaaagaggaaagaaagcacgcgcacatctctgtgtgtcagatgagtgcccacgatgtcaaacatgcggtgcaggctgtacagcccatgttcctgctcaccatgctcttctggccacacctggcttgcccgccgctttaggcccgccatgctgggggctcaggtacgcaatgctttccagaatccctgctcagcagctgcaatccccaccgtactgaaagggcagggaaagaaccgatgagacactcaagggcaggaactagtctcatgcattcccatattcccagttgctaacaatgcctggcacagtatagtgctttatacatgtttattaaatttttgaagtgtttgtttaaaaataaacactggccaggcacaggggctcacacctgtaatcccagcattttgggaggccaaggcaggaggatcacttgagcccaggcgtttaagaccagcctgggcaacatagggagacccgtttctacaaaaaaagaaaaaattagctgggcttggtggtacacgcctgtagtcccagctgcacaggaggctgaggtgggaggaaggcttgaggccaggagttcaagatcagcctggtcaacatagcaagaccccatctctacaaaaaagaaaaaaattagcaaggcatggtggcatgtgcctgtagtccctgctactcaggaggctgaggcaggaggatcacttgagcccaggagttcaaggctgcagtgagccataatcctgcactgtagcctgggtgacagagtgagtcccccatctcggaaaaaaaagaactagtttaaattctgactgtatcactgaaaggctgtgtagctgtgtgaccgtaagcaagtcacttaactccagattctcagtgctgtcatctataaacagggatgaatgaatatacacctcagagttgttaagaatccaatgagaaaatcacgggtaacccttatataaatggttgtgaaacatttcaaagatacaagcatccttggcctttgcagcccagaatcatccctccacatttttcctacaatccaaccacatcaagaaatgataactgctcagaaagtttatcaatatttaccaaaactcatggatttaaaataaacattaagtttctacaataagcattcttgtaattctatgccatttgtactcccttgatcttcaccctatttggcaatatcaactttttttttttgagatggagtctcactttgtcacccaggctggagtgcagtggtgcaatctcggctcactgcaacctccgcctcccaggttcaagcaattctcgtgcctcagcctcccaagtagctgggattacaggcacgcaccaccacgtcttgctaatttttgtatttttagtagagatgggtttttaccatgatggtcaggctggtcttgaactcctgacctcaggtgatccacccacctcggcctcccaaagtgctgggattacaggcgtgagcca

SEQ ID NO: 364240 - DNA, 2933 bp, Homo sapiens
agcggcctgcgagttaccgcccactcgctgcggcgcttctggctccagaccgccctccggatcggaccctgcgaatggttttggctatatcttcatgtaggacctactccctatcccgtcggccgcggtgaatcccacctgcggtgctttaacttgtgtaacagagatgctgcctctgggagaggcggggagggacgggccaactggagcgggcggcgggagggtggagggcggggcgcggcttggggcctgggttcctttgccccttgcccaccagggaggggtgggagacgagagagggtgaactttcccctgcgagattctggtgaaaggggaaatatgcttcgagtcagtaaagctgcgcaagtgcacagtcaaggagagagtcttgggaaaaccaaggatagttcccggagatgacttttggactgcggaaacgtttgtcagaggaaagaggcttcagtttaatgtgagatcattggaagttgaactattcaggcggcgagcagagcccctttctccatcttcccactgtatggtcttgtcccttagcctataatttcttataaagagcgttttgaagactaggtttttactggcagggccctgattcaggctcacagtataaagagagaagtcagagaatcctagaaatttattgcttgaagaaggggttggtgtcctcatatctcaccttcctcaggctgggcttcatcaccaggcctcctcacagattcctgtcccttctgtgtcctggactccggatacctcaactctcagtactttgtgctcagcccaggcccagagccatggctatctcctcttcctcctgcgaactgcccctggtggctgtgtgccaggtaacatcgacgccagacaagcaacagaactttaaaacatgtgctgagctggttcgagaggctgccagactgggtgcctgcctggctttcctgcctgaggcatttgacttcattgcacgggaccctgcagagacgctacacctgtctgaaccactgggtgggaaacttttggaagaatacacccagcttgccagggaatgtggactctggctgtccttgggtggtttccatgagcgtggccaagactgggagcagactcagaaaatctacaattgtcacgtgctgctgaacagcaaagattggtctagctgtctgctatgacatgcggttccctgaactctctctggcattggctcaagctggagcagagatacttacctatccttcagcttttggatccattacaggcccagcccactgggagcccgtctcctcttgagggtgacgtagggcagcaggtcgtggcgagtgatgatgcgcagcagctgcagcacctggcgaaagttactttcatcacagcggccctggcgctccagtgccaataagaagtcacgtccatttcggatgagtccacgctcgtggtcatcaatgacatcaacaaagaggaaagaaagcacgcgcacatctctgtgtgtcagatgagtgcccacgatgtcaaacatgcggtgcaggctgtacagcccatgttcctgctcaccatgctcttctggccacacctggcttgcccgccgctttaggcccgccatgctgggggctcaggtacgcaatgctttccagaatccctgctcagcagctgcaatccccaccgtactgaaagggcagggaaagaaccgatgagacactcaagggcaggaactagtctcatgcattcccatattcccagttgctaacaatgcctggcacagtatagtgctttatacatgtttattaaatttttgaagtgtttgtttaaaaataaacactggccaggcacaggggctcacacctgtaatcccagcattttgggaggccaaggcaggaggatcacttgagcccaggcgtttaagaccagcctgggcaacatagggagacccgtttctacaaaaaaagaaaaaattagctgggcttggtggtacacgcctgtagtcccagctgcacaggaggctgaggtgggaggaaggcttgaggccaggagttcaagatcagcctggtcaacatagcaagaccccatctctacaaaaaagaaaaaaattagcaaggcatggtggcatgtgcctgtagtccctgctactcaggaggctgaggcaggaggatcacttgagcccaggagttcaaggctgcagtgagccataatcctgcactgtagcctgggtgacagagtgagtcccccatctcggaaaaaaaagaactagtttaaattctgactgtatcactgaaaggctgtgtagctgtgtgaccgtaagcaagtcacttaactccagattctcagtgctgtcatctataaacagggatgaatgaatatacacctcagagttgttaagaatccaatgagaaaatcacgggtaacccttatataaatggttgtgaaacatttcaaagatacaagcatccttggcctttgcagcccagaatcatccctccacatttttcctacaatccaaccacatcaagaaatgataactgctcagaaagtttatcaatatttaccaaaactcatggatttaaaataaacattaagtttctacaataagcattcttgtaattctatgccatttgtactcccttgatcttcaccctatttggcaatatcaactttttttttttgagatggagtctcactttgtcacccaggctggagtgcagtggtgcaatctcggctcactgcaacctccgcctcccaggttcaagcaattctcgtgcctcagcctcccaagtagctgggattacaggcacgcaccaccacgtcttgctaatttttgtatttttagtagagatgggtttttaccatgatggtcaggctggtcttgaactcctgacctcaggtgatccacccacctcggcctcccaaagtgctgggattacaggcgtgagcca

SEQ ID NO: 364241 - DNA, 1072 bp, Homo sapiens
agcggcctgcgagttaccgcccactcgctgcggcgcttctggctccagaccgccctccggatcggaccctgcgaatggttttggctatatcttcatgtaggacctactccctatcccgtcggccgcggtgaatcccacctgcggtgctttaacttgtgtaacagagatgctgcctctgggagaggcggggagggacgggccaactggagcgggcggcgggagggtggagggcggggcgcggcttggggcctgggttcctttgccccttgcccaccagggaggggtgggagacgagagagggtgaactttcccctgcgagattctggtgaaaggggaaatatgcttcgagtcagtaaagctgcgcaagtgcacagtcaaggagagagtcttgggaaaaccaaggatagttcccggagatgacttttggactgcggaaacgtttgtcagaggaaagaggcttcagtttaatgtgagatcattggaagttgaactattcaggcggcgagcagagcccctttctccatcttcccactgtatggtcttgtcccttagcctataatttcttataaagagcgttttgaagactaggtttttactggcagggccctgattcaggctcacagtataaagagagaagtcagagaatcctagaaatttattgcttgaagaaggggttggtgtcctcatatctcaccttcctcaggctgggcttcatcaccaggcctcctcacagattcctgtcccttctgtgtcctggactccggatacctcaactctcagtactttgtgctcagcccaggtaacacgttttgttgtgtcctcagtgcctggcacttagatgctcagtttgttaaatggatagtgggagacacaggagtgtcaactatccacacatttgattggtgagccctactagccctgggtcaacgtgccctgtaagagcatgatcaaaaggaagtccagctttcctgcctctccacttgcaccccttagcattaaatttgcttccctgtgctatgaaatctgagaatcctgcctatgctgttcacagggaaggaggctttgccatctt

SEQ ID NO: 364242 - DNA, 1057 bp, Homo sapiens
gggccggcggctgcggcggctggagcaggcgagcggcggcggccgatagcgagtgtcagggccggccggggcggcgcttctcggcctgtcgctggtcggcctcctactgtacctcgtgcctgctgcggctgcgctggcctggctggccgtggggactaccgcggcctggtggggactgagccgcgagccccgaggttcgcgccccttgtcctccttcgttcagaaggcgcgacatcggcgaacactgttcgcttcgcctccggccaagtcgacagccaacggaaacctcctagagccgcggaccctgctcgaaggacctgaccctgccgaactgctcctcatgggcagttacctgggcaagcccgggccgccgcagcccgcccccgctccggagggccaggacctgcggaataggcctggccgccgcccgcccgcccggcgccgcgctccacaccgccctccccgccgacccatcgcgttcaccacttttacccctctctccccactcctcttctccgaccctccgggaggccttccccacgggatcgtgggactttaccagatcggtttgtaataacacctcaaagacgctatccgatccatcaggcccagtattcctgtctgggggtacttcccacagtgtgctggaatggttatcacaagaaggctgtgctgtcccctcgcaactccaggatggtgtgtagcccagtgactctgaggatcgcccctcctgacagaagattttcgcgttctgcgatatgtgagtattatcgttggaagaatactctcccttttcgtgtccactttattcttctccagttgttcctatgacaacatgactacaacgcaaaaaagaaaggacgaatctgcttgtttgaatgagaaataccaaattctagtaaaaccgtttgtttttcactttttgccgttaacgaaaaagtagctttacttgctaaggggaactgttgtgagtgtataaattatactttggcttgttggttagcttctgatttccatttctgatatggcatgggaattaaaatatcttactgctaga

SEQ ID NO: 364243 - DNA, 836 bp, Homo sapiens
  misc_feature (49)..(49): n is a, c, g, or t
gtaattatatattgtaatatcatatatacaaacacacgaatacttttantatgctccaatatacatcacctgccacctgaaggtcaccctagctgagcaggacccagatgaactcaacaaggcctgttccttcagcaagccttccaacagctggttcccagtggaaggcccggctgacatctgtcaatgctgtaacaaaggtgactgtggcactccaagccattccaggaggcagcctcgtgtcgtgagccagtggtccacgtctgcttcccgtaaccgcaggcatgtgacagaagaagcagatgtcaccgtgggggccactgatcttcctggacaggagtggtgaccatgaagtagagcagtgggctttgccttctgacacctcagtggtgctgctgggcgtaggcctggctgtggtggtgtccctgactctgactgctgttatcctggttctcaccaggaggtgttattctgacctctaccctttgcccaaaacctaatacaccaagaaccctttattacaatatctaatcctccttccgcataatatcatattctctgctctttttttatccactcccttcttttatttatcgtaatctccttttacgtatattataataaatcttatttacttacttaataataatcactattatttcctaccgtataatacacatcagaaatctaatattcctcctactcctctctcgctccttttattattacaatataatatataatttaaatacaattcttattccagtatatagtctaaacatgtcataatcaatgatgcaatatcacctttacacgaacactcctaacaaatgacg

SEQ ID NO: 364244 - DNA, 853 bp, Homo sapiens
  misc_feature (853)..(853): n is a, c, g, or t
gctacacagacctactcaaagctcaacaaacttcctatccaccacccaaaccctatatacatcacctgccacctgaaggtcaccctagctgagcaggacccagatgaactcaacaaggcctgttccttcagcaagccttccaacagctggttcccagtggaaggcccggctgacatctgtcaatgctgtaacaaaggtgactgtggcactccaagccattccaggaggcagcctcgtgtcgtgagccagtggtccacgtctgcttcccgtaaccgcaggcatgtgacagaagaagcagatgtcaccgtgggggccactgatcttcctggacaggagtggtgaccatgaaataaaacatccaagagctatacctaccaacacctcacacccccccctagccagcccgcctctcttcacaatcccaaccgacactctttacgccacattagtctgcaatatatgtcaatcccaccaatttacttcctctacgggcaatactaagcctactattaggatggtttacctccatgttcccctacaccccccctatcctctatcccccttcacaacatcacatccctcctatcatttactaacaaactgcaccctcccccctcttatccgccccacaccacttaatataaaaatccattctccacccaccgaccatgcactcgtgtcattcgcccatacgcccccacagaagacggtatacctcccccctatcccacaccatatataattctttacgcacacgtcctaatccctatcatccctgcgcccccctccactactctattctaatagataagtcggtcaccaactcacatgtcaatcaacatacttcacatan

SEQ ID NO: 364245 - DNA, 1467 bp, Homo sapiens
atttatttgttcatttattttttgaaactgagtctcactatttcacccaggaggagtggcggcaactggaccctgatgagaagataacatacggggatgtgatgttggagaactacagccatctagtttccttgggtgaggatagcttgctttctgaatgctctcagttgaatggggttttatgcttgagtttgaagaaataagtgacaacaccacttaattccttgtgggcactagctgcagtgtttatattattcttcattgaaaggttctatctttgataaggtaaaaaatggagcatttctgttatgcagcttatgaggtggcaacatcttgtacttcagagattctgaagccgagcaacttgcccaagtccttcttcttttcccattaacaagatatgatatcaccaagccaaacgtcatcattaagttggagcagggagaggagctgtggataacgggaggtgaatttccatgtcaacatagtccagggatcgtgggactttaccagatcggtttgtaataacacctcaaagacgctatccgatccatcaggcccagtattcctgtctgggggtacttcccacagtgtgctggaatggttatcacaagaaggctgtgctgtcccctcgcaactccaggatggtgtgtagcccagtgactctgaggatcgcccctcctgacagaagattttcgcgttctgcgataccagagcagataatcagctcaacactgtcctcaccatcaagtaatgccccagacccatgtgcaaaggagactgtactgagtgccctcaaagagaagaagaagaaaaggacagtggaggaagaagaccaaatattccttgatggccaggaaaataaaagaagctgtcttgtcgacggtctcactgatgcctcttctgcattcaaagttcctcgacccgggccagatacactccagttcacagtggatgtcttccactttgctaatgactccagaaacatgatatacatcacctgccacctgaaggtcaccctagctgagcaggacccagatgaactcaacaaggcctgttccttcagcaagccttccaacagctggttcccagtggaaggcccggctgacatctgtcaatgctgtaacaaaggtgactgtggcactccaagccattccaggaggcagcctcgtgtcgtgagccagtggtccacgtctgcttcccgtaaccgcaggcatgtgacagaagaagcagatgtcaccgtgggggccactgatcttcctggacaggagtggtgaccatgaagtagagcagtgggctttgccttctgacacctcagtggtgctgctgggcgtaggcctggctgtggtggtgtccctgactctgactgctgttatcctggttctcaccaggaggtgtcgcactgcctcccaccctgtgtctgcttccgaataaaagaagaaagcaataaaaaatggtcgtggtgtg

SEQ ID NO: 364246 - DNA, 1620 bp, Homo sapiens
gggccggcggctgcggcggctggagcaggcgagcggcggcggccgatagcgagtgtcagggccggccggggcggcgcttctcggcctgtcgctggtcggcctcctactgtacctcgtgcctgctgcggctgcgctggcctggctggccgtggggactaccgcggcctggtggggactgagccgcgagccccgaggttcgcgccccttgtcctccttcgttcagaaggcgcgacatcggcgaacactgttcgcttcgcctccggccaagtcgacagccaacggaaacctcctagagccgcggaccctgctcgaaggacctgaccctgccgaactgctcctcatgggcagttacctgggcaagcccgggccgccgcagcccgcccccgctccggagggccaggacctgcggaataggcctggccgccgcccgcccgcccggcgccgcgctccacaccgccctccccgccgacccatcgcgttcaccacttttacccctctctccccactcctcttctccgaccctccgggaggccttccccacgggatcgtgggactttaccagatcggtttgtaataacacctcaaagacgctatccgatccatcaggcccagtattcctgtctgggggtacttcccacagtgtgctggaatggttatcacaagaaggctgtgctgtcccctcgcaactccaggatggtgtgtagcccagtgactctgaggatcgcccctcctgacagaagattttcgcgttctgcgataccagagcagataatcagctcaacactgtcctcaccatcaagtaatgccccagacccatgtgcaaaggagactgtactgagtgccctcaaagagaagaagaagaaaaggacagtggaggaagaagaccaaatattccttgatggccaggaaaataaaagaagaccgagtctcagtctgtcacccaggctagtgcaatggtgcaattttggctcactacaccctctgcctcccagattcaagcgattctcctgcctcagcctcccgactgtcttgtcgacggtctcactgatgcctcttctgcattcaaagttcctcgacccgggccagatacactccagttcacagtggatgtcttccactttgctaatgactccagaaacatgatatacatcacctgccacctgaaggtcaccctagctgagcaggacccagatgaactcaacaaggcctgttccttcagcaagccttccaacagctggttcccagtggaaggcccggctgacatctgtcaatgctgtaacaaaggtgactgtggcactccaagccattccaggaggcagcctcgtgtcgtgagccagtggtccacgtctgcttcccgtaaccgcaggcatgtgacagaagaagcagatgtcaccgtgggggccactgatcttcctggacaggagtggtgaccatgaagtagagcagtgggctttgccttctgacacctcagtggtgctgctgggcgtaggcctggctgtggtggtgtccctgactctgactgctgttatcctggttctcaccaggaggtgtcgcactgcctcccaccctgtgtctgcttccgaataaaagaagaaagcaataaaaaatggtcgtggtgtg

SEQ ID NO: 364247 - DNA, 1287 bp, Homo sapiens
gggccggcggctgcggcggctggagcaggcgagcggcggcggccgatagcgagtgtcagggccggccggggcggcgcttctcggcctgtcgctggtcggcctcctactgtacctcgtgcctgctgcggctgcgctggcctggctggccgtggggactaccgcggcctggtggggactgagccgcgagccccgaggttcgcgccccttgtcctccttcgttcagaaggcgcgacatcggcgaacactgttcgcttcgcctccggccaagtcgacagccaacggaaacctcctagagccgcggaccctgctcgaaggacctgaccctgccgaactgctcctcatgggcagttacctgggcaagcccgggccgccgcagcccgcccccgctccggagggccaggacctgcggaataggcctggccgccgcccgcccgcccggcgccgcgctccacaccgccctccccgccgacccatcgcgttcaccacttttacccctctctccccactcctcttctccgaccctccgggaggccttccccacgggatcgtgggactttaccagatcggtttgtaataacacctcaaagacgctatccgatccatcaggcccagtattcctgtctgggggtacttcccacagtgtgctggaatggttatcacaagaaggctgtgctgtcccctcgcaactccaggatggtgtgtagcccagtgactctgaggatcgcccctcctgacagaagattttcgcgttctgcgataccagagcagataatcagctcaacactgtcctcaccatcaagtaatgccccagacccatgtgcaaaggagactgtactgagtgccctcaaagagaagaagaagaaaaggacagtggaggaagaagaccaaatattccttgatggccaggaaaataaaagaagctgtcttgtcgacggtctcactgatgcctcttctgcattcaaagttcctcgacccgggccagatacactccagttcacagtggatgtcttccactttgctaatgactccagaaacatgtgacagaagaagcagatgtcaccgtgggggccactgatcttcctggacaggagtggtgaccatgaagtagagcagtgggctttgccttctgacacctcagtggtgctgctgggcgtaggcctggctgtggtggtgtccctgactctgactgctgttatcctggttctcaccaggaggtgtcgcactgcctcccaccctgtgtctgcttccgaataaaagaagaaagcaataaaaaatggtcgtggtgtg

SEQ ID NO: 364248 - DNA, 874 bp, Homo sapiens
gggccggcggctgcggcggctggagcaggcgagcggcggcggccgatagcgagtgtcagggccggccggggcggcgcttctcggcctgtcgctggtcggcctcctactgtacctcgtgcctgctgcggctgcgctggcctggctggccgtggggactaccgcggcctggtggggactgagccgcgagccccgaggttcgcgccccttgtcctccttcgttcagaaggcgcgacatcggcgaacactgttcgcttcgcctccggccaagtcgacagccaacggaaacctcctagagccgcggaccctgctcgaaggacctgaccctgccgaactgctcctcatgggcagttacctgggcaagcccgggccgccgcagcccgcccccgctccggagggccaggacctgcggaataggcctggccgccgcccgcccgcccggcgccgcgctccacaccgccctccccgccgacccatcgcgttcaccacttttacccctctctccccactcctcttctccgaccctccgggaggccttccccacgggatcgtgggactttaccagatcggtttgtaataacacctcaaagacgctatccgatccatcaggcccagtattcctgtctgggggtacttcccacagtgtgctggaatggttatcacaagaaggctgtgctgtcccctcgcaactccaggatggtgtgtagcccagtgactctgaggatcgcccctcctgacagaagattttcgcgttctgcgatatgtgagtattatcgttggaagaatactctcccttttcgtgtccactttattcttctccagttgttcctatgacaacatgacatgttggccaggttggtctcgaactcctgacctc

SEQ ID NO: 364249 - DNA, 622 bp, Homo sapiens
acgtgttctgtgttgcgtagaaagagacttaagttctttggaaaatgtcttaactggtgggtttttaaccgtctaaaattttgacattcttttatactttgtttccatgatttgtctcgcattctctgcagggatcgtgggactttaccagatcggtttgtaataacacctcaaagacgctatccgatccatcaggcccagtattcctgtctgggggtacttcccacagtgtgctggaatggttatcacaagaaggctgtgctgtcccctcgcaactccaggatggtgtgtagcccagtgactctgaggatcgcccctcctgacagaagattttcgcgttctgcgatgtctgcttcccgtaaccgcaggcatgtgacagaagaagcagatgtcaccgtgggggccactgatcttcctggacaggagtggtgaccatgaagtagagcagtgggctttgccttctgacacctcagtggtgctgctgggcgtaggcctggctgtggtggtgtccctgactctgactgctgttatcctggttctcaccaggaggtgtcgcactgcctcccaccctgtgtctgcttccgaataaaagaagaaagcaataaaaaatggtcgtggtgtg

SEQ ID NO: 364250 - DNA, 397 bp, Homo sapiens
tgacaggccctgtctcagaagcccagggtcaagcatgttcaatgattgggtaagtttggaaaagatcaggggaataagtggtggattccagtctaaaactagttgctacttgctctaacattgggtaagtgaacctttacaccatcttagagatgaggctcttccttccccctgtttattttatgagacagtctcactctgtcagccaggctggggtgcagtggcatgatctcggctcactgcaacttctgcctcccaggttccagtgattctcctgcctcagccttccaggtagctgggactacaggtacccaccaccacgcccagctaactttgtatttttagtagcgatggggtttcaccatgttggccaggttggtctcgaactcctgacctc

SEQ ID NO: 364251 - DNA, 315 bp, Homo sapiens
acccaccttggcctcccaaagtgctgggattatgggcgtgagccacggtgcccggcccacctgtctggctttaacaccgttctgttttcttccaagctgtcttgtcgacggtctcactgatgcctcttctgcattcaaagttcctcgacccgggccagatacactccagttcacagtggatgtcttccactttgctaatgactccagaaacatgtggtaagagctttaacagcctgaaagaaggctgaacttgcaaccttcatatcctactgaatggggtcactcactagctccacccctaagcaaatgacttag

SEQ ID NO: 364252 - DNA, 200 bp, Homo sapiens
agtttagcccactgaggcagaataaaacctccaacccagttcccggttagggactaagatgacccttggttgtgtgttctcctttcacagtgacagaagaagcagatgtcaccgtgggggccactgatcttcctggacaggagtggtgaccatgaagtagagcagtgggctttgccttctgacacctcagtggtgctgct

SEQ ID NO: 364253 - DNA, 366 bp, Homo sapiens
catgttggccaggttggtctcgaactcctgacctcaggtgatatacccgccttggcctcccaaagtgctgggattataggtgtgtgccatcgcacccggccccttctcactctttaaagggttgagggttataagagaactggtgtgttaaactcccaggcacagcctggaactcggcctggaaatagctgttattccttgcagaatatacatcacctgccacctgaaggtcaccctagctgagcaggacccagatgaactcaacaaggcctgttccttcagcaagccttccaacaggtgaggacaggtgctccgtgactggagtagaaactgaatcggcgaccccttgtctatttcccccaatat

SEQ ID NO: 364254 - DNA, 1516 bp, Homo sapiens
gggccggcggctgcggcggctggagcaggcgagcggcggcggccgatagcgagtgtcagggccggccggggcggcgcttctcggcctgtcgctggtcggcctcctactgtacctcgtgcctgctgcggctgcgctggcctggctggccgtggggactaccgcggcctggtggggactgagccgcgagccccgaggttcgcgccccttgtcctccttcgttcagaaggcgcgacatcggcgaacactgttcgcttcgcctccggccaagtcgacagccaacggaaacctcctagagccgcggaccctgctcgaaggacctgaccctgccgaactgctcctcatgggcagttacctgggcaagcccgggccgccgcagcccgcccccgctccggagggccaggacctgcggaataggcctggccgccgcccgcccgcccggcgccgcgctccacaccgccctccccgccgacccatcgcgttcaccacttttacccctctctccccactcctcttctccgaccctccgggaggccttccccacgggatcgtgggactttaccagatcggtttgtaataacacctcaaagacgctatccgatccatcaggcccagtattcctgtctgggggtacttcccacagtgtgctggaatggttatcacaagaaggctgtgctgtcccctcgcaactccaggatggtgtgtagcccagtgactctgaggatcgcccctcctgacagaagattttcgcgttctgcgataccagagcagataatcagctcaacactgtcctcaccatcaagtaatgccccagacccatgtgcaaaggagactgtactgagtgccctcaaagagaagaagaagaaaaggacagtggaggaagaagaccaaatattccttgatggccaggaaaataaaagaagctgtcttgtcgacggtctcactgatgcctcttctgcattcaaagttcctcgacccgggccagatacactccagttcacagtggatgtcttccactttgctaatgactccagaaacatgatatacatcacctgccacctgaaggtcaccctagctgagcaggacccagatgaactcaacaaggcctgttccttcagcaagccttccaacagctggttcccagtggaaggcccggctgacatctgtcaatgctgtaacaaaggtgactgtggcactccaagccattccaggaggcagcctcgtgtcgtgagccagtggtccacgtctgcttcccgtaaccgcaggcatgtgacagaagaagcagatgtcaccgtgggggccactgatcttcctggacaggagtggtgaccatgaagtagagcagtgggctttgccttctgacacctcagtggtgctgctgggcgtaggcctggctgtggtggtgtccctgactctgactgctgttatcctggttctcaccaggaggtgtcgcactgcctcccaccctgtgtctgcttccgaataaaagaagaaagcaataaaaaatggtcgtggtgtg

SEQ ID NO: 364255 - DNA, 1248 bp, Homo sapiens
cacgaactacgatttgcgccggcagctggaccctgatgagaagataccgtacatcggcgtgacgcacaggacgtacaaccacgtagtgactgtggcttatgaggtggcaacatcttgtacttcagagattctgaagccgagcaacttgcccaagtccttcttcttttcccattaacaagatatgatatcaccaagccaaacgtcatcattaagttggagcagggagaggagctgtggataacgggaggtgaatttccatgtcaacatagtccagggatcgtgggactttaccagatcggtttgtaataacacctcaaagacgctatccgatccatcaggcccagtattcctgtctgggggtacttcccacagtgtgctggaatggttatcacaagaaggctgtgctgtcccctcgcaactccaggatggtgtgtagcccagtgactctgaggatcgcccctcctgacagaagattttcgcgttctgcgataccagagcagataatcagctcaacactgtcctcaccatcaagtaatgccccagacccatgtgcaaaggagactgtactgagtgccctcaaagagaagaagaagaaaaggacagtggaggaagaagaccaaatattccttgatggccaggaaaataaaagaagctgtcttgtcgacggtctcactgatgcctcttctgcattcaaagttcctcgacccgggccagatacactccagttcacagtggatgtcttccactttgctaatgactccagaaacatgatatacatcacctgccacctgaaggtcaccctagctgagcaggacccagatgaactcaacaaggcctgttccttcagcaagccttccaacagctggttcccagtggaaggcccggctgacatctgtcaatgctgtaacaaaggtgactgtggcactccaagccattccaggaggcagcctcgtgtcgtgagccagtggtccacgtctgcttcccgtaaccgcaggcatgtgacagaagaagcagatgtcaccgtgggggccactgatcttcctggacaggagtggtgaccatgaagtagagcagtgggctttgccttctgacacctcagtggtgctgctgggcgtaggcctggctgtggtggtgtccctgactctgactgctgttatcctggttctcaccaggaggtgtcgcactgcctcccaccctgtgtctgcttccgaataaaagaagaaagcaataaaaaatggtcgtggtgtg

SEQ ID NO: 364256 - DNA, 1105 bp, Homo sapiens
acgtgttctgtgttgcgtagaaagagacttaagttctttggaaaatgtcttaactggtgggtttttaaccgtctaaaattttgacattcttttatactttgtttccatgatttgtctcgcattctctgcagggatcgtgggactttaccagatcggtttgtaataacacctcaaagacgctatccgatccatcaggcccagtattcctgtctgggggtacttcccacagtgtgctggaatggttatcacaagaaggctgtgctgtcccctcgcaactccaggatggtgtgtagcccagtgactctgaggatcgcccctcctgacagaagattttcgcgttctgcgataccagagcagataatcagctcaacactgtcctcaccatcaagtaatgccccagacccatgtgcaaaggagactgtactgagtgccctcaaagagaagaagaagaaaaggacagtggaggaagaagaccaaatattccttgatggccaggaaaataaaagaagctgtcttgtcgacggtctcactgatgcctcttctgcattcaaagttcctcgacccgggccagatacactccagttcacagtggatgtcttccactttgctaatgactccagaaacatgatatacatcacctgccacctgaaggtcaccctagctgagcaggacccagatgaactcaacaaggcctgttccttcagcaagccttccaacagctggttcccagtggaaggcccggctgacatctgtcaatgctgtaacaaaggtgactgtggcactccaagccattccaggaggcagcctcgtgtcgtgagccagtggtccacgtctgcttcccgtaaccgcaggcatgtgacagaagaagcagatgtcaccgtgggggccactgatcttcctggacaggagtggtgaccatgaagtagagcagtgggctttgccttctgacacctcagtggtgctgctgggcgtaggcctggctgtggtggtgtccctgactctgactgctgttatcctggttctcaccaggaggtgtcgcactgcctcccaccctgtgtctgcttccgaataaaagaagaaagcaataaaaaatggtcgtggtgtg

SEQ ID NO: 364257 - DNA, 1834 bp, Homo sapiens
gggccggcggctgcggcggctggagcaggcgagcggcggcggccgatagcgagtgtcagggccggccggggcggcgcttctcggcctgtcgctggtcggcctcctactgtacctcgtgcctgctgcggctgcgctggcctggctggccgtggggactaccgcggcctggtggggactgagccgcgagccccgaggttcgcgccccttgtcctccttcgttcagaaggcgcgacatcggcgaacactgttcgcttcgcctccggccaagtcgacagccaacggaaacctcctagagccgcggaccctgctcgaaggacctgaccctgccgaactgctcctcatgggcagttacctgggcaagcccgggccgccgcagcccgcccccgctccggagggccaggacctgcggaataggcctggccgccgcccgcccgcccggcgccgcgctccacaccgccctccccgccgacccatcgcgttcaccacttttacccctctctccccactcctcttctccgaccctccgggaggccttccccacgggatcgtgggactttaccagatcggtttgtaataacacctcaaagacgctatccgatccatcaggcccagtattcctgtctgggggtacttcccacagtgtgctggaatggttatcacaagaaggctgtgctgtcccctcgcaactccaggatggtgtgtagcccagtgactctgaggatcgcccctcctgacagaagattttcgcgttctgcgataccagagcagataatcagctcaacactgtcctcaccatcaagtaatgccccagacccatgtgcaaaggagactgtactgagtgccctcaaagagaagaagaagaaaaggacagtggaggaagaagaccaaatattccttgatggccaggaaaataaaagaagctgtcttgtcgacggtctcactgatgcctcttctgcattcaaagttcctcgacccgggccagatacactccagttcacagtggatgtcttccactttgctaatgactccagaaacatgatatacatcacctgccacctgaaggtcaccctagctgagcaggacccagatgaactcaacaaggcctgttccttcagcaagccttccaacagctggttcccagtggaaggcccggctgacatctgtcaatgctgtaacaaaggtgactgtggcactccaagccattccaggaggcagcctcgtgtcgtgagccagtggtccacgtctgcttcccgtaaccgcaggcatgtgacagaagaagcagatgtcaccgtgggggccactgatcttcctggacaggagtggtgaccatgaagtagagcagtgggctttgccttctgacacctcagtggtgctgctgggcgtaggcctggctgtggtggtgtccctgactctgactgctgttatcctggttctcaccaggaggtgtcgcactgcctcccaccctgtgtctgcttccgaataaaagaagaaacccaataaagcccattattaatttcgccctcgtcgacctaagcggaggggctctcgctgcctgttgccttgagtacggcccccacactatgtcacagtccccgcattccggcgcccgggccccccgactccgcccgacgtctcacatcatatacaccgtgcatactgtcccacacacattctgggctatcctaaaagcttactctgatctagaggccttttcatcctcttcccttcagacgcactccctctctgtatgccaataggctccccatgtagctttctctctatggttacctactattaaatgtagtccacaacattcgttgagagacggtcaaag

SEQ ID NO: 364258 - DNA, 1249 bp, Homo sapiens
gggccggcggctgcggcggctggagcaggcgagcggcggcggccgatagcgagtgtcagggccggccggggcggcgcttctcggcctgtcgctggtcggcctcctactgtacctcgtgcctgctgcggctgcgctggcctggctggccgtggggactaccgcggcctggtggggactgagccgcgagccccgaggttcgcgccccttgtcctccttcgttcagaaggcgcgacatcggcgaacactgttcgcttcgcctccggccaagtcgacagccaacggaaacctcctagagccgcggaccctgctcgaaggacctgaccctgccgaactgctcctcatgggcagttacctgggcaagcccgggccgccgcagcccgcccccgctccggagggccaggacctgcggaataggcctggccgccgcccgcccgcccggcgccgcgctccacaccgccctccccgccgacccatcgcgttcaccacttttacccctctctccccactcctcttctccgaccctccgggaggccttccccacgggatcgtgggactttaccagatcggtttgtaataacacctcaaagacgctatccgatccatcaggcccagtattcctgtctgggggtacttcccacagtgtgctggaatggttatcacaagaaggctgtgctgtcccctcgcaactccaggatggtgtgtagcccagtgactctgaggatcgcccctcctgacagaagattttcgcgttctgcgataccagagcagataatcagctcaacactgtcctcaccatcaagtaatgccccagacccatgtgcaaaggagactgtactgagtgccctcaaagagaagaagaagaaaaggacagtggaggaagaagaccaaatattccttgatggccaggaaaataaaagaagctgtcttgtcgacggtctcactgatgcctcttctgcattcaaagttcctcgacccgggccagatacactccagttcacagtggatgtcttccactttgctaatgactccagaaacatgagaagattttcgcgttctgcgataccaggtagagcagtgggctttgccttctgacacctcagtggtgctgctgggcgtaggcctggctgtggtggtgtccctgactctgactgctgttatcctggttctcaccaggaggtgtcgcactgcctcccaccctgtgtctgcttccgaataaaagaagaaagcaataaaaaatggtcgtggtgtg

SEQ ID NO: 364259 - DNA, 416 bp, Homo sapiens
tggaagacttggatttggtggaagacacagatttttctggaagacatggattagctggaagatctgtatttgatggaagaccttgaaattattggaagacatggatttcctggaagacgtggattttcctggaagatctggatttggtggaagaccagtaattgctggaagactggatttgctggaagacttgatttactggaagacttggagcttcttggaagacatggattgtccggaagacatggattgtctggaagatgtggattttctggaagctcaggattatctggaagaccttgagattattggaagacttgaagtcgctggaagacccggagttgttggaagaccttgacacaggtgccatcggaaaccctggatattggaaacattgtaagcacaggatattggag

SEQ ID NO: 364260 - DNA, 2024 bp, Homo sapiens
  misc_feature (161)..(161): n is a, c, g, or t
  misc_feature (173)..(173): n is a, c, g, or t
  misc_feature (220)..(221): n is a, c, g, or t
  misc_feature (228)..(228): n is a, c, g, or t
  misc_feature (1813)..(1813): n is a, c, g, or t
  misc_feature (1853)..(1854): n is a, c, g, or t
  misc_feature (1863)..(1863): n is a, c, g, or t
gaataaaaaagaagaaaaattggaagacatggatttcctggaagacgtggattttcctggaagatctggatttggtggaagaccagtaattgctggaagactggatttgctggaagacttgatttactggaagacttggagcttctggaagacatggatgnccggaagacatngatgtctggaagatgtgattttctggaagctcagatatctggagacnngagattntggaagacttgaagtcgctggaagacccggagttgtaggaagaccttgacacaggtgccatcggaaaccctggatattgcagacactggaagacctgaatgtcagaagatcagcacactggagacgttggaagacatggatattgagccagttgatggaagactgggtagttgttggaagacatgaagatgctggaagacacagagatgctggaagacgtggagatgttggaagacgagcagatgctggaagccctggagatgctggaagacctggagatataggaagacatggatttgttggaagacgtagcttagttggaagacatatattttctggaagacgtggattttctggaagacatggcttggttggaagacgtggattttctggaagacgtacctttgttggaagacatacctttgttggaagacgtacctttgttggaagacgtacctttgttggaagacacaagtaggctggaagacattaatttgatggaagacatggctttgttggaagacgtggatttgctggaagacacggatttcctggaagacctggatttttcggaagctatggatttgagggaagacaaggattttctggaagacatggatagtctggaagacatggctttgttggaagacgtggacttgctggaagacacggatttcctggaagacccggattttttggaagctatagatttaagggaagacaaggattttctggaagacatggatagtctggaagacctgaggccattggaagatgtggattttctggaagacatggcttttttggaagacgtagattttcaggaagacccaaattatccggaagacttggattgttgggaagacgtggattttctggaagactggaggttactggaagacatggattttctggaagacatggattttctggaagacgtggatcttcaggaagacatatattggctggaagacctggattttttccggaagatgtggattgactggaagacctggatttggtggaagacgtagatttttctggaagacactgactgactggaagacctggatttctttctggaagacactgattgactggaagacctggatttctttctggaagacactgattgactggaagatctagatttttctggaagaactagatttactggaagacttggatttggtggaagacacagatttttctggaagacatggattagctggaagatctgtatttgatggaagaccttgaaattattggaagacatggatttcctggaagacgtggattttcctggaagatctggatttggtggaagaccagtaattgctggaagactggatttgctggaagacttgatttactggaagacttggagcttcttggaagacatggattgtccggaagacatggattgtctggaagatgtggattttctggaagctcaggattatctggaagaccttgagattattggaagacttgaagtcgctggaagacccggagttgttggaagaccttgacacaggtgccatcggaaaccctggatattgcagacactggaagacctgaatgncagaagatcagcacactggagacgttggaagacatggatnntgagccagntgatggaagactgggtagttgttggaagacatgaagatgctggaagacacagagatgctggaagacgtggagatgttggaagacgagcagatgctggaagacctggagatgctgtaacctttgttggaagacacaaggtgctcacaagcatgggccaggta

SEQ ID NO: 364261 - DNA, 380 bp, Homo sapiens
tgaattcttcagtttgcctaaggaaaaaacatgctctgaaataaccacaattccataatcacacctaagaaaataaggtcgtaatagcatctattattactatgtaatatctcctcttatttgctttaatatagtaactcattagcagtgacataatattcatacagcagtgtttatcttcattacttgctttacttaatgaagacttaagccctttttacagccccattttctctcccctgtacgcccagtattattttattgctgctttagttgaatcattaaatagtattctcattattttgttagtgttccagctgtcagcctcattttctttttttttttttttttgttttttgttttttgagacagagtgtggc

SEQ ID NO: 364262 - DNA, 1153 bp, Homo sapiens
agcggagagtttcggaggcggtgaccgtgacgtagaaggtggagaccgcttcaccctgatcagggagtatcggctgcgggtgcgcaaggcgtccaggagtgacctggggctgtggagagcgacccgtggccttgtgtttcaggtacggaggttccggactggacgggcgtcaggaagtcacagacttgtcctctgatgtggccccgcccgccgccgcactaatctcttcggcgtcgtacccgtcggcccagctcgacccgccgcagccccggccccgaccgtggacactgggggtccccgagggcgctgcgacctcctcccgggtgaaatgaaacccgagggcagtcccccttaccgaccccattagagacgtatctgccgtgccaggggtctaggctccagaaacaggggtgaggactgggtagagggctggggttcgaattgcccctgtgcccccaggctggctgtgtcacaagcttgggccaggctttttgcccctctgaacctcagttcccctgtctgcaaagtggagttaatggtgcttacggagttgtggaagggattaagtggaataacgatgcaagtaaagcgcttacatagcacaggtcctagcacagaataagcgtttaacagttgacagttgttgcttttctaagcctggatctgtgtgatacagtcgttattatccaagcctggatttgtgtgatattgtcataaggaccgtgggggattcagatccttgaccgagccctccttgttatcttttcctttttgtccctctgcatatattcatatctttttacttagcaccccccacagacagatttctgctgggagggaggggacgatgaagagatgcctaggtgacatccctgccttccaggcagttgttcctgacagtcactaggaatacaaatacagcctggctggggagacagacatgtaaacagattttatagccaatgctacgaaggccaaggggcataaccaccaactctgccaaagataagtgatgtgaaagcttcatatttgagccaggttgggaaggatgaataagtttaacaggtagaaggacagatatgtgcaaagattcagaagtagtacagggaataggactgggaggagagagcaggaatgggtaaattgggactag

SEQ ID NO: 364263 - DNA, 272 bp, Homo sapiens
catttccacgagtcacggctatggcatacagattcataaagtgggaggacatttttcagttttgttagttgctaactatgtaactatccagctccttaaatgtggctatgttttatgttagagctcagccggtctatcagtgtcgatttagcagaaagcaaacggcttggctgtctcctgctttccagtttccaggtaaggttcttataactaggaaatgtttttgtgtttgttaactgctattgtgactcgtggatatgtccgggatcctc

SEQ ID NO: 364264 - DNA, 347 bp, Homo sapiens
tcctgacctcaagtaattcgccctacttagcctcccaaagtgctgagattataggtgtgagccatcctgcctgttcttattttttgtatttttctagagatgaagtttcaccatgttggccaggttggtcttgaactcctaacctcaggtgatctgcctgcctcagcctcccaaagtgctgggattacaggcatgagccaccgcgccggcctatttttaattttaaaggcggggtctccctatgttactgaggcctttagaactcctgggctcaagcgatcctcctgcctctgcctcccaaagtgctgggattacagccatgagcccccacacccagcggattcagc

SEQ ID NO: 364265 - DNA, 2648 bp, Homo sapiens
agcggagagtttcggaggcggtgaccgtgacgtagaaggtggagaccgcttcaccctgatcagggagtatcggctgcgggtgcgcaaggcgtccaggagtgacctggggctgtggagagcgacccgtggccttgtgtttcagagtttaccacctaggatgacttcagtgactagatcagagatcatagatgaaaaaggaccagtgatgtctaagactcatgatcatcaattggaatcaagtctcagtcctgtggaagtgtttgctaaaacaatctgccagttatcaagacaggaggcaatcctggcggcgagcaagtatgaaagaaacgaaccggcggaagtcgctgcatcccattcaccagggcatcacagagctcagccggtctatcagtgtcgatttagcagaaagcaaacggcttggctgtctcctgctttccagtttccagttctctattcagaaacttgaacctttcctaagggacactaagggcttcagtcttgaaagttttagagccaaagcatcttctctttctgaagaattgaaacattttgcagacggactggaaactgatggaactctacaaaaatgttttgaagattcaaatggaaaagcatcagatttttctttggaagcatctgtggctgagatgaaggaatacataacaaagttttctttagaacgtcagacttgggatcagctcttgcttcactaccagcaggaggctaaagagatattgtccagaggatcaactgaggccaaaattactgaggtcaaagtggaacctatgacatatcttgggtcttctcagaatgaagttcttaatacaaaacctgactaccagaaaatattacagaaccagagcaaagtctttgactgtatggagttggtgatggatgaactgcaaggatcagtgaaacagctgcaggcctttatggatgaaagtacccagtgcttccagaaggtgtcagtacagctcggaaagagaagcatgcaacaattagatccctcaccagctcgaaaactgttgaagcttcagctacagaacccacctgccatacatggatctggatctggatcttgtcagtgactttatgagagtttctgccacaaggtgcccaagaggagaggaatgggaagagtgccccagcacgtggtgactgcgtgatttctgctcgttgcctttgaagataactggcaggactgactgtagaacactttgacttttttcaaaaagtgatggaatttgtacatccaaatgaatattgtatagacaattttcccaggaatgtgcaaaatgcttgaaagttcaaacttcttttttgaaatgatcttcagatccagtggcccattcttttatctttatcctgtgaaggtgtttttcaggttttgaaacaatccaaaaatcatttaggaccaagtctaaggaaacattttagtggccaagttggattccgattgtaaaggaatgatactaattttctagcatggctctgaaggtgattttaggtagaagagttttgaggctgggcgcaatggctcacgcctgtaatcctagcattttgggtgactgaggcgggtggattgcttgagcccagaagttgaagaccagcctgagaaataaggtgaaaccctgtctacaaaaaatacaaaaagttagctgggtgtggtggcgtgtgcctgtagtgctagctactcagaaggctgaggtgggaggattgtttgagcccaggaggttgaggctgcagtgagttctaattgcgccactgcactccagcctgagcgacagagtgagacactgtcttaaaaaaaattaaaaattgtaaaaaaatgaaaaaaaaagttttgagcattatttgcatcattgggatacatatgtcacttcacaagatgttcaatttgaaggaaataccactcattctctatgtcctgttgtctgtagtgtgcttcagtttttcatattgagttgacctaaatcctggattcatgacaagaaaggagtaagtactactattcattgttctatttgtttataatctgtattataaaattgcacataattaaaagctttcccttgtcttcaaaataaaaggggaaaaaaaaaaaaaaaaaaaaaaaaaaaaaaaaaaaaaaaaaaaaaaaaataaaaaaaaaaaaaaataaaaaataaaaaaaaaaaaaaaaataaacttaaacaatacacactatagagaagaatattacaatttgctggccgactttaaacaacaaaaaagaatttttttgcgctggcgtttcccaccttagtttttttgcagtaaaaccttttttcgccggctggcataatagctacatggccccaccccttctcctttagcaacatttccacactctgggggccgattgtaaataccgggccttagtatacatccaaagttcgcgcaaattttttgttaagaagacacttctttctccaccgtcccgaaatatgaaatggcctttttatcatagattcctccaatttggggtctcttgttgctccaatttaaacttgggcccttttttaaaaacaaccccccacattttggtcaaacaccttttttatactatgcccccccggcaacctcccttaacaaaataaccccccagggcttaggtttatttcaccaaa

SEQ ID NO: 364266 - DNA, 2572 bp, Homo sapiens
agcggagagtttcggaggcggtgaccgtgacgtagaaggtggagaccgcttcaccctgatcagggagtatcggctgcgggtgcgcaaggcgtccaggagtgacctggggctgtggagagcgacccgtggccttgtgtttcagagtttaccacctaggatgacttcagtgactagatcagagatcatagatgaacaatctgccagttatcaagacaggaggcaatcctggcggcgagcaagtatgaaagaaacgaaccggcggaagtcgctgcatcccattcaccagggcatcacagagctcagccggtctatcagtgtcgatttagcagaaagcaaacggcttggctgtctcctgctttccagtttccagttctctattcagaaacttgaacctttcctaagggacactaagggcttcagtcttgaaagttttagagccaaagcatcttctctttctgaagaattgaaacattttgcagacggactggaaactgatggaactctacaaaaatgttttgaagattcaaatggaaaagcatcagatttttctttggaagcatctgtggctgagatgaaggaatacataacaaagttttctttagaacgtcagacttgggatcagctcttgcttcactaccagcaggaggctaaagagatattgtccagaggatcaactgaggccaaaattactgaggtcaaagtggaacctatgacatatcttgggtcttctcagaatgaagttcttaatacaaaacctgactaccagaaaatattacagaaccagagcaaagtctttgactgtatggagttggtgatggatgaactgcaaggatcagtgaaacagctgcaggcctttatggatgaaagtacccagtgcttccagaaggtgtcagtacagctcggaaagagaagcatgcaacaattagatccctcaccagctcgaaaactgttgaagcttcagctacagaacccacctgccatacatggatctggatctggatcttgtcagtgactttatgagagtttctgccacaaggtgcccaagaggagaggaatgggaagagtgccccagcacgtggtgactgcgtgatttctgctcgttgcctttgaagataactggcaggactgactgtagaacactttgacttttttcaaaaagtgatggaatttgtacatccaaatgaatattgtatagacaattttcccaggaatgtgcaaaatgcttgaaagttcaaacttcttttttgaaatgatcttcagatccagtggcccattcttttatctttatcctgtgaaggtgtttttcaggttttgaaacaatccaaaaatcatttaggaccaagtctaaggaaacattttagtggccaagttggattccgattgtaaaggaatgatactaattttctagcatggctctgaaggtgattttaggtagaagagttttgaggctgggcgcaatggctcacgcctgtaatcctagcattttgggtgactgaggcgggtggattgcttgagcccagaagttgaagaccagcctgagaaataaggtgaaaccctgtctacaaaaaatacaaaaagttagctgggtgtggtggcgtgtgcctgtagtgctagctactcagaaggctgaggtgggaggattgtttgagcccaggaggttgaggctgcagtgagttctaattgcgccactgcactccagcctgagcgacagagtgagacactgtcttaaaaaaaattaaaaattgtaaaaaaatgaaaaaaaaagttttgagcattatttgcatcattgggatacatatgtcacttcacaagatgttcaatttgaaggaaataccactcattctctatgtcctgttgtctgtagtgtgcttcagtttttcatattgagttgacctaaatcctggattcatgacaagaaaggagtaagtactactattcattgttctatttgtttataatctgtattataaaattgcacataattaaaagctttcccttgtcttcaaaataaaaggggaaaaaaaaaaaaaaaaaaaaaaaaaaaaaaaaaaaaaaaaaaaaaaaaataaaaaaaaaaaaaaataaaaaataaaaaaaaaaaaaaaaataaacttaaacaatacacactatagagaagaatattacaatttgctggccgactttaaacaacaaaaaagaatttttttgcgctggcgtttcccaccttagtttttttgcagtaaaaccttttttcgccggctggcataatagctacatggccccaccccttctcctttagcaacatttccacactctgggggccgattgtaaataccgggccttagtatacatccaaagttcgcgcaaattttttgttaagaagacacttctttctccaccgtcccgaaatatgaaatggcctttttatcatagattcctccaatttggggtctcttgttgctccaatttaaacttgggcccttttttaaaaacaaccccccacattttggtcaaacaccttttttatactatgcccccccggcaacctcccttaacaaaataaccccccagggcttaggtttatttcaccaaa

SEQ ID NO: 364267 - DNA, 2739 bp, Homo sapiens
agcggagagtttcggaggcggtgaccgtgacgtagaaggtggagaccgcttcaccctgatcagggagtatcggctgcgggtgcgcaaggcgtccaggagtgacctggggctgtggagagcgacccgtggccttgtgtttcagaaaaaggaccagtgatgtctaagactcatgatcatcaattggaatcaagtctcagtcctgtggaagtgtttgctaaaacatctgcctccctggagatgaatcaaggcgtttcagaggaaagaattcaccttggctctagccctaaaaaagggggaaattgtgatctcagccaccaggaaagacttcagtcgaagtcccttcatttgtctcctcaagaacaatctgccagttatcaagacaggaggcaatcctggcggcgagcaagtatgaaagaaacgaaccggcggaagtcgctgcatcccattcaccagggcatcacagagctcagccggtctatcagtgtcgatttagcagaaagcaaacggcttggctgtctcctgctttccagtttccagttctctattcagaaacttgaacctttcctaagggacactaagggcttcagtcttgaaagttttagagccaaagcatcttctctttctgaagaattgaaacattttgcagacggactggaaactgatggaactctacaaaaatgttttgaagattcaaatggaaaagcatcagatttttctttggaagcatctgtggctgagatgaaggaatacataacaaagttttctttagaacgtcagacttgggatcagctcttgcttcactaccagcaggaggctaaagagatattgtccagaggatcaactgaggccaaaattactgaggtcaaagtggaacctatgacatatcttgggtcttctcagaatgaagttcttaatacaaaacctgactaccagaaaatattacagaaccagagcaaagtctttgactgtatggagttggtgatggatgaactgcaaggatcagtgaaacagctgcaggcctttatggatgaaagtacccagtgcttccagaaggtgtcagtacagctcggaaagagaagcatgcaacaattagatccctcaccagctcgaaaactgttgaagcttcagctacagaacccacctgccatacatggatctggatctggatcttgtcagtgactttatgagagtttctgccacaaggtgcccaagaggagaggaatgggaagagtgccccagcacgtggtgactgcgtgatttctgctcgttgcctttgaagataactggcaggactgactgtagaacactttgacttttttcaaaaagtgatggaatttgtacatccaaatgaatattgtatagacaattttcccaggaatgtgcaaaatgcttgaaagttcaaacttcttttttgaaatgatcttcagatccagtggcccattcttttatctttatcctgtgaaggtgtttttcaggttttgaaacaatccaaaaatcatttaggaccaagtctaaggaaacattttagtggccaagttggattccgattgtaaaggaatgatactaattttctagcatggctctgaaggtgattttaggtagaagagttttgaggctgggcgcaatggctcacgcctgtaatcctagcattttgggtgactgaggcgggtggattgcttgagcccagaagttgaagaccagcctgagaaataaggtgaaaccctgtctacaaaaaatacaaaaagttagctgggtgtggtggcgtgtgcctgtagtgctagctactcagaaggctgaggtgggaggattgtttgagcccaggaggttgaggctgcagtgagttctaattgcgccactgcactccagcctgagcgacagagtgagacactgtcttaaaaaaaattaaaaattgtaaaaaaatgaaaaaaaaagttttgagcattatttgcatcattgggatacatatgtcacttcacaagatgttcaatttgaaggaaataccactcattctctatgtcctgttgtctgtagtgtgcttcagtttttcatattgagttgacctaaatcctggattcatgacaagaaaggagtaagtactactattcattgttctatttgtttataatctgtattataaaattgcacataattaaaagctttcccttgtcttcaaaataaaaggggaaaaaaaaaaaaaaaaaaaaaaaaaaaaaaaaaaaaaaaaaaaaaaaaataaaaaaaaaaaaaaataaaaaataaaaaaaaaaaaaaaaataaacttaaacaatacacactatagagaagaatattacaatttgctggccgactttaaacaacaaaaaagaatttttttgcgctggcgtttcccaccttagtttttttgcagtaaaaccttttttcgccggctggcataatagctacatggccccaccccttctcctttagcaacatttccacactctgggggccgattgtaaataccgggccttagtatacatccaaagttcgcgcaaattttttgttaagaagacacttctttctccaccgtcccgaaatatgaaatggcctttttatcatagattcctccaatttggggtctcttgttgctccaatttaaacttgggcccttttttaaaaacaaccccccacattttggtcaaacaccttttttatactatgcccccccggcaacctcccttaacaaaataaccccccagggcttaggtttatttcaccaaa

SEQ ID NO: 364268 - DNA, 2734 bp, Homo sapiens
agcggagagtttcggaggcggtgaccgtgacgtagaaggtggagaccgcttcaccctgatcagggagtatcggctgcgggtgcgcaaggcgtccaggagtgacctggggctgtggagagcgacccgtggccttgtgtttcagagtttaccacctaggatgacttcagtgactagatcagagatcatagatgaaaaaggaccagtgatgtctaagactcatgatcatcaattggaatcaagtctcagtcctgtggaagtgtttgctaaaacatctgcctccctggagatgaatcaaggcgtttcagaggaaagaattcaccttggctctagccctaaaaaagggggaaattgtgatctcagccaccaggaaagacttcagtcgaagtcccttcatttgtctcctcaagaacaatctgccagttatcaagacaggaggcaatcctggcggcgagcaagtatgaaagaaacgaaccggcggaagtcgctgcatcccattcaccagggcatcacagagctcagccggtctatcagtgtcgatttagcagaaagcaaacggcttggctgtctcctgctttccagtttccagttctctattcagaaacttgaacctttcctaagggacactaagggcttcagtcttgaaagttttagagccaaagcatcttctctttctgaagaattgaaacattttgcagacggactggaaactgatggaactctacaaaaatgttttgaagattcaaatggaaaagcatcagatttttctttggaagcatctgtggctgagatgaaggaatacataacaaagttttctttagaacgtcagacttgggatcagctcttgcttcactaccagcaggaggctaaagagatattgtccagaggatcaactgaggccaaaattactgaggtcaaagtggaacctatgacatatcttgggtcttctcagaatgaagttcttaatacaaaacctgactaccagaaaatattacagaaccagagcaaagtctttgactgtatggagttggtgatggatgaactgcaaggatcagtgaaacagctgcaggcctttatggatgaaagtacccagtgcttccagaaggtgtcagtacagctcggaaagagaagcatgcaacaattagatccctcaccagctcgaaaactgttgaagcttcagctacagaacccacctgccatacatggatctggatctggatcttgtcagtgactttatgagagtttctgccacaaggtgcccaagaggagaggaatgggaagagtgccccagcacgtggtgactgcgtgatttctgctcgttgcctttgaagataactggcaggactgactgtagaacactttgacttttttcaaaaagtgatggaatttgtacatccaaatgaatattgtatagacaattttcccaggaatgtgcaaaatgcttgaaagttcaaacttcttttttgaaatgatcttcagatccagtggcccattcttttatctttatcctgtgaaggtgtttttcaggttttgaaacaatccaaaaatcatttaggaccaagtctaaggaaacattttagtggccaagttggattccgattgtaaaggaatgatactaattttctagcatggctctgaaggtgattttaggtagaagagttttgaggctgggcgcaatggctcacgcctgtaatcctagcattttgggtgactgaggcgggtggattgcttgagcccagaagttgaagaccagcctgagaaataaggtgaaaccctgtctacaaaaaatacaaaaagttagctgggtgtggtggcgtgtgcctgtagtgctagctactcagaaggctgaggtgggaggattgtttgagcccaggaggttgaggctgcagtgagttctaattgcgccactgcactccagcctgagcgacagagtggagcattatttgcatcattgggatacatatgtcacttcacaagatgttcaatttgaaggaaataccactcattctctatgtcctgttgtctgtagtgtgcttcagtttttcatattgagttgacctaaatcctggattcatgacaagaaaggagtaagtactactattcattgttctatttgtttataatctgtattataaaattgcacataattaaaagctttcccttgtcttcaaaataaaaggggaaaaaaaaaaaaaaaaaaaaaaaaaaaaaaaaaaaaaaaaaaaaaaaaataaaaaaaaaaaaaaataaaaaataaaaaaaaaaaaaaaaataaacttaaacaatacacactatagagaagaatattacaatttgctggccgactttaaacaacaaaaaagaatttttttgcgctggcgtttcccaccttagtttttttgcagtaaaaccttttttcgccggctggcataatagctacatggccccaccccttctcctttagcaacatttccacactctgggggccgattgtaaataccgggccttagtatacatccaaagttcgcgcaaattttttgttaagaagacacttctttctccaccgtcccgaaatatgaaatggcctttttatcatagattcctccaatttggggtctcttgttgctccaatttaaacttgggcccttttttaaaaacaaccccccacattttggtcaaacaccttttttatactatgcccccccggcaacctcccttaacaaaataaccccccagggcttaggtttatttcaccaaa

SEQ ID NO: 364269 - DNA, 2418 bp, Homo sapiens
agcggagagtttcggaggcggtgaccgtgacgtagaaggtggagaccgcttcaccctgatcagggagtatcggctgcgggtgcgcaaggcgtccaggagtgacctggggctgtggagagcgacccgtggccttgtgtttcagagctcagccggtctatcagtgtcgatttagcagaaagcaaacggcttggctgtctcctgctttccagtttccagttctctattcagaaacttgaacctttcctaagggacactaagggcttcagtcttgaaagttttagagccaaagcatcttctctttctgaagaattgaaacattttgcagacggactggaaactgatggaactctacaaaaatgttttgaagattcaaatggaaaagcatcagatttttctttggaagcatctgtggctgagatgaaggaatacataacaaagttttctttagaacgtcagacttgggatcagctcttgcttcactaccagcaggaggctaaagagatattgtccagaggatcaactgaggccaaaattactgaggtcaaagtggaacctatgacatatcttgggtcttctcagaatgaagttcttaatacaaaacctgactaccagaaaatattacagaaccagagcaaagtctttgactgtatggagttggtgatggatgaactgcaaggatcagtgaaacagctgcaggcctttatggatgaaagtacccagtgcttccagaaggtgtcagtacagctcggaaagagaagcatgcaacaattagatccctcaccagctcgaaaactgttgaagcttcagctacagaacccacctgccatacatggatctggatctggatcttgtcagtgactttatgagagtttctgccacaaggtgcccaagaggagaggaatgggaagagtgccccagcacgtggtgactgcgtgatttctgctcgttgcctttgaagataactggcaggactgactgtagaacactttgacttttttcaaaaagtgatggaatttgtacatccaaatgaatattgtatagacaattttcccaggaatgtgcaaaatgcttgaaagttcaaacttcttttttgaaatgatcttcagatccagtggcccattcttttatctttatcctgtgaaggtgtttttcaggttttgaaacaatccaaaaatcatttaggaccaagtctaaggaaacattttagtggccaagttggattccgattgtaaaggaatgatactaattttctagcatggctctgaaggtgattttaggtagaagagttttgaggctgggcgcaatggctcacgcctgtaatcctagcattttgggtgactgaggcgggtggattgcttgagcccagaagttgaagaccagcctgagaaataaggtgaaaccctgtctacaaaaaatacaaaaagttagctgggtgtggtggcgtgtgcctgtagtgctagctactcagaaggctgaggtgggaggattgtttgagcccaggaggttgaggctgcagtgagttctaattgcgccactgcactccagcctgagcgacagagtgagacactgtcttaaaaaaaattaaaaattgtaaaaaaatgaaaaaaaaagttttgagcattatttgcatcattgggatacatatgtcacttcacaagatgttcaatttgaaggaaataccactcattctctatgtcctgttgtctgtagtgtgcttcagtttttcatattgagttgacctaaatcctggattcatgacaagaaaggagtaagtactactattcattgttctatttgtttataatctgtattataaaattgcacataattaaaagctttcccttgtcttcaaaataaaaggggaaaaaaaaaaaaaaaaaaaaaaaaaaaaaaaaaaaaaaaaaaaaaaaaataaaaaaaaaaaaaaataaaaaataaaaaaaaaaaaaaaaataaacttaaacaatacacactatagagaagaatattacaatttgctggccgactttaaacaacaaaaaagaatttttttgcgctggcgtttcccaccttagtttttttgcagtaaaaccttttttcgccggctggcataatagctacatggccccaccccttctcctttagcaacatttccacactctgggggccgattgtaaataccgggccttagtatacatccaaagttcgcgcaaattttttgttaagaagacacttctttctccaccgtcccgaaatatgaaatggcctttttatcatagattcctccaatttggggtctcttgttgctccaatttaaacttgggcccttttttaaaaacaaccccccacattttggtcaaacaccttttttatactatgcccccccggcaacctcccttaacaaaataaccccccagggcttaggtttatttcaccaaa

SEQ ID NO: 364270 - DNA, 933 bp, Homo sapiens
agcggagagtttcggaggcggtgaccgtgacgtagaaggtggagaccgcttcaccctgatcagggagtatcggctgcgggtgcgcaaggcgtccaggagtgacctggggctgtggagagcgacccgtggccttgtgtttcagagtttaccacctaggatgacttcagtgactagatcagagatcatagatgaaaaaggaccagtgatgtctaagactcatgatcatcaattggaatcaagtctcagtcctgtggaagtgtttgctaaaacatctgcctccctggagatgaatcaaggcgtttcagaggaaagaattcaccttggctctagccctaaaaaagggggaaattgtgatctcagccaccaggaaagacttcagtcgaagtcccttcatttgtctcctcaagaacaatctgccagttatcaagacaggaggcaatcctggcggcgagcaagtatgaaagaaacgaaccggcggaagtcgctgcatcccattcaccagggcatcacagagctcagccggtctatcagtgtcgatttagcagaaagcaaacggcttggctgtctcctgctttccagtttccagttctctattcagaaacttgaacctttcctaagggacactaagggcttcagtcttgaaagttttagagccaaagcatcttctctttctgaagaattgaaacattttgcagacggactggaaactgatggaactctacaaaaatgttttgaagattcaaatggaaaagcatcagatttttctttggaagcatctgtggctgagatgaaggaatacataacaaagttttctttagaacgtcagacttgggatcagctcttgcttcactaccagcaggaggctaaagagatattgtccaggaccagctgagggcatagctggccgtccgtttaccctcaggaagcagctag

SEQ ID NO: 364271 - DNA, 1422 bp, Homo sapiens
aatagctgaacaaattggaagagcacagttatgacgcactgacccagggccacgtggcttgtttggaatccagccccgcaggtcccttgctcaagcagctctgcgaagcttctgagcctcgtctcctcatctgcaaaacaggaacgttttcagcacctacctcacagggtcggtaagaggattaaactgtcaactgataatgcacgtactgcctgtgcgggggcctggtaattagtgagcctcctaataggtggtagccgtgttttgtttgttgaaacagtctgtctctgtcgcccaggctggagtgcattgttgcaatctcagctcactgcaacctctgcctctgggtttcaagcgattctcctgcctcagcctcccgagtagctgggaaaataaggtgaaaccctgtctacaaaaaatacaaaaagttagctgggtgtggtggcgtgtgcctgtagtgctagctactcagaaggctgaggtgggaggattgtttgagcccaggaggttgaggctgcagtgagttctaattgcgccactgcactccagcctgagcgacagagtgagacactgtcttaaaaaaaattaaaaattgtaaaaaaatgaaaaaaaaagttttgagcattatttgcatcattgggatacatatgtcacttcacaagatgttcaatttgaaggaaataccactcattctctatgtcctgttgtctgtagtgtgcttcagtttttcatattgagttgacctaaatcctggattcatgacaagaaaggagtaagtactactattcattgttctatttgtttataatctgtattataaaattgcacataattaaaagctttcccttgtcttcaaaataaaaggggaaaaaaaaaaaaaaaaaaaaaaaaaaaaaaaaaaaaaaaaaaaaaaaaataaaaaaaaaaaaaaataaaaaataaaaaaaaaaaaaaaaataaacttaaacaatacacactatagagaagaatattacaatttgctggccgactttaaacaacaaaaaagaatttttttgcgctggcgtttcccaccttagtttttttgcagtaaaaccttttttcgccggctggcataatagctacatggccccaccccttctcctttagcaacatttccacactctgggggccgattgtaaataccgggccttagtatacatccaaagttcgcgcaaattttttgttaagaagacacttctttctccaccgtcccgaaatatgaaatggcctttttatcatagattcctccaatttggggtctcttgttgctccaatttaaacttgggcccttttttaaaaacaaccccccacattttggtcaaacaccttttttatactatgcccccccggcaacctcccttaacaaaataaccccccagggcttaggtttatttcaccaaa

SEQ ID NO: 364272 - DNA, 443 bp, Homo sapiens
gtctaagactcatgatcatcaattggaatcaagtctcagtcctgtggaagtgtttgctaaaacatctgcctccctggagatgaatcaaggcgtttcagaggaaagaattcaccttggctctagccctaaaaaagggggaaattgtgatctcagccaccaggaaagacttcagtcgaagtcccttcatttgtctcctcaagaacaatctgccagttatcaagacaggaggcaatcctggcggcgagcaagtatgaaagaaacgaaccggcggaagtcgctgcatcccattcaccagggcatcacaggtggggtgctgtgtacacaagacagtgaggttccagctcagataagagacaggttccagctcagataagaggcagtgaggtatggcagaaagtgtgggagaatagacatgacttgctactttataagtactgatgtca

SEQ ID NO: 364273 - DNA, 340 bp, Homo sapiens
taaatagataaaaatgagttgtctttcattttatctatacctaccagaaaaaaaagataaaatctttctacatacttaactccacacttttgggtgggcttgaggaccaacatgtaacagtacctagagctgagactaccttaatatacctttgtcagcatctcactatgaaaacgtatatttcctttattttatgacacgtaaatttgtgctgtctagcatcttctctttctgaagaattgaaacattttgcagacggactggaaactgatggaactctacaaaaatgttttgaagattcaaatgggtaagagcagttccccttctgtcctaaattatg

SEQ ID NO: 364274 - DNA, 2788 bp, Homo sapiens
agcggagagtttcggaggcggtgaccgtgacgtagaaggtggagaccgcttcaccctgatcagggagtatcggctgcgggtgcgcaaggcgtccaggagtgacctggggctgtggagagcgacccgtggccttgtgtttcagagtttaccacctaggatgacttcagtgactagatcagagatcatagatgaaaaaggaccagtgatgtctaagactcatgatcatcaattggaatcaagtctcagtcctgtggaagtgtttgctaaaacatctgcctccctggagatgaatcaaggcgtttcagaggaaagaattcaccttggctctagccctaaaaaagggggaaattgtgatctcagccaccaggaaagacttcagtcgaagtcccttcatttgtctcctcaagaacaatctgccagttatcaagacaggaggcaatcctggcggcgagcaagtatgaaagaaacgaaccggcggaagtcgctgcatcccattcaccagggcatcacagagctcagccggtctatcagtgtcgatttagcagaaagcaaacggcttggctgtctcctgctttccagtttccagttctctattcagaaacttgaacctttcctaagggacactaagggcttcagtcttgaaagttttagagccaaagcatcttctctttctgaagaattgaaacattttgcagacggactggaaactgatggaactctacaaaaatgttttgaagattcaaatggaaaagcatcagatttttctttggaagcatctgtggctgagatgaaggaatacataacaaagttttctttagaacgtcagacttgggatcagctcttgcttcactaccagcaggaggctaaagagatattgtccagaggatcaactgaggccaaaattactgaggtcaaagtggaacctatgacatatcttgggtcttctcagaatgaagttcttaatacaaaacctgactaccagaaaatattacagaaccagagcaaagtctttgactgtatggagttggtgatggatgaactgcaaggatcagtgaaacagctgcaggcctttatggatgaaagtacccagtgcttccagaaggtgtcagtacagctcggaaagagaagcatgcaacaattagatccctcaccagctcgaaaactgttgaagcttcagctacagaacccacctgccatacatggatctggatctggatcttgtcagtgactttatgagagtttctgccacaaggtgcccaagaggagaggaatgggaagagtgccccagcacgtggtgactgcgtgatttctgctcgttgcctttgaagataactggcaggactgactgtagaacactttgacttttttcaaaaagtgatggaatttgtacatccaaatgaatattgtatagacaattttcccaggaatgtgcaaaatgcttgaaagttcaaacttcttttttgaaatgatcttcagatccagtggcccattcttttatctttatcctgtgaaggtgtttttcaggttttgaaacaatccaaaaatcatttaggaccaagtctaaggaaacattttagtggccaagttggattccgattgtaaaggaatgatactaattttctagcatggctctgaaggtgattttaggtagaagagttttgaggctgggcgcaatggctcacgcctgtaatcctagcattttgggtgactgaggcgggtggattgcttgagcccagaagttgaagaccagcctgagaaataaggtgaaaccctgtctacaaaaaatacaaaaagttagctgggtgtggtggcgtgtgcctgtagtgctagctactcagaaggctgaggtgggaggattgtttgagcccaggaggttgaggctgcagtgagttctaattgcgccactgcactccagcctgagcgacagagtgagacactgtcttaaaaaaaattaaaaattgtaaaaaaatgaaaaaaaaagttttgagcattatttgcatcattgggatacatatgtcacttcacaagatgttcaatttgaaggaaataccactcattctctatgtcctgttgtctgtagtgtgcttcagtttttcatattgagttgacctaaatcctggattcatgacaagaaaggagtaagtactactattcattgttctatttgtttataatctgtattataaaattgcacataattaaaagctttcccttgtcttcaaaataaaaggggaaaaaaaaaaaaaaaaaaaaaaaaaaaaaaaaaaaaaaaaaaaaaaaaataaaaaaaaaaaaaaataaaaaataaaaaaaaaaaaaaaaataaacttaaacaatacacactatagagaagaatattacaatttgctggccgactttaaacaacaaaaaagaatttttttgcgctggcgtttcccaccttagtttttttgcagtaaaaccttttttcgccggctggcataatagctacatggccccaccccttctcctttagcaacatttccacactctgggggccgattgtaaataccgggccttagtatacatccaaagttcgcgcaaattttttgttaagaagacacttctttctccaccgtcccgaaatatgaaatggcctttttatcatagattcctccaatttggggtctcttgttgctccaatttaaacttgggcccttttttaaaaacaaccccccacattttggtcaaacaccttttttatactatgcccccccggcaacctcccttaacaaaataaccccccagggcttaggtttatttcaccaaa

SEQ ID NO: 364275 - DNA, 3019 bp, Homo sapiens
agcggagagtttcggaggcggtgaccgtgacgtagaaggtggagaccgcttcaccctgatcagggagtatcggctgcgggtgcgcaaggcgtccaggagtgacctggggctgtggagagcgacccgtggccttgtgtttcagagtttaccacctaggatgacttcagtgactagatcagagatcatagatggtaagtattgtagtgaaattcagtacctcttaccttgggttcaggcttctgagctatacccaaatctttcctggctcctggtagatttggaatcacatactcattatttgcagagatgctttctttatgtttccacgatctaggggcatacatttactttttccacttttttgcacaaatagttgtggcgggcttgatcttgtattttgacttttttataacaaatactagaaaaaggaccagtgatgtctaagactcatgatcatcaattggaatcaagtctcagtcctgtggaagtgtttgctaaaacatctgcctccctggagatgaatcaaggcgtttcagaggaaagaattcaccttggctctagccctaaaaaagggggaaattgtgatctcagccaccaggaaagacttcagtcgaagtcccttcatttgtctcctcaagaacaatctgccagttatcaagacaggaggcaatcctggcggcgagcaagtatgaaagaaacgaaccggcggaagtcgctgcatcccattcaccagggcatcacagagctcagccggtctatcagtgtcgatttagcagaaagcaaacggcttggctgtctcctgctttccagtttccagttctctattcagaaacttgaacctttcctaagggacactaagggcttcagtcttgaaagttttagagccaaagcatcttctctttctgaagaattgaaacattttgcagacggactggaaactgatggaactctacaaaaatgttttgaagattcaaatggaaaagcatcagatttttctttggaagcatctgtggctgagatgaaggaatacataacaaagttttctttagaacgtcagacttgggatcagctcttgcttcactaccagcaggaggctaaagagatattgtccagaggatcaactgaggccaaaattactgaggtcaaagtggaacctatgacatatcttgggtcttctcagaatgaagttcttaatacaaaacctgactaccagaaaatattacagaaccagagcaaagtctttgactgtatggagttggtgatggatgaactgcaaggatcagtgaaacagctgcaggcctttatggatgaaagtacccagtgcttccagaaggtgtcagtacagctcggaaagagaagcatgcaacaattagatccctcaccagctcgaaaactgttgaagcttcagctacagaacccacctgccatacatggatctggatctggatcttgtcagtgactttatgagagtttctgccacaaggtgcccaagaggagaggaatgggaagagtgccccagcacgtggtgactgcgtgatttctgctcgttgcctttgaagataactggcaggactgactgtagaacactttgacttttttcaaaaagtgatggaatttgtacatccaaatgaatattgtatagacaattttcccaggaatgtgcaaaatgcttgaaagttcaaacttcttttttgaaatgatcttcagatccagtggcccattcttttatctttatcctgtgaaggtgtttttcaggttttgaaacaatccaaaaatcatttaggaccaagtctaaggaaacattttagtggccaagttggattccgattgtaaaggaatgatactaattttctagcatggctctgaaggtgattttaggtagaagagttttgaggctgggcgcaatggctcacgcctgtaatcctagcattttgggtgactgaggcgggtggattgcttgagcccagaagttgaagaccagcctgagaaataaggtgaaaccctgtctacaaaaaatacaaaaagttagctgggtgtggtggcgtgtgcctgtagtgctagctactcagaaggctgaggtgggaggattgtttgagcccaggaggttgaggctgcagtgagttctaattgcgccactgcactccagcctgagcgacagagtgagacactgtcttaaaaaaaattaaaaattgtaaaaaaatgaaaaaaaaagttttgagcattatttgcatcattgggatacatatgtcacttcacaagatgttcaatttgaaggaaataccactcattctctatgtcctgttgtctgtagtgtgcttcagtttttcatattgagttgacctaaatcctggattcatgacaagaaaggagtaagtactactattcattgttctatttgtttataatctgtattataaaattgcacataattaaaagctttcccttgtcttcaaaataaaaggggaaaaaaaaaaaaaaaaaaaaaaaaaaaaaaaaaaaaaaaaaaaaaaaaataaaaaaaaaaaaaaataaaaaataaaaaaaaaaaaaaaaataaacttaaacaatacacactatagagaagaatattacaatttgctggccgactttaaacaacaaaaaagaatttttttgcgctggcgtttcccaccttagtttttttgcagtaaaaccttttttcgccggctggcataatagctacatggccccaccccttctcctttagcaacatttccacactctgggggccgattgtaaataccgggccttagtatacatccaaagttcgcgcaaattttttgttaagaagacacttctttctccaccgtcccgaaatatgaaatggcctttttatcatagattcctccaatttggggtctcttgttgctccaatttaaacttgggcccttttttaaaaacaaccccccacattttggtcaaacaccttttttatactatgcccccccggcaacctcccttaacaaaataaccccccagggcttaggtttatttcaccaaa

SEQ ID NO: 364276 - DNA, 2467 bp, Homo sapiens
agcggagagtttcggaggcggtgaccgtgacgtagaaggtggagaccgcttcaccctgatcagggagtatcggctgcgggtgcgcaaggcgtccaggagtgacctggggctgtggagagcgacccgtggccttgtgtttcagagtttaccacctaggatgacttcagtgactagatcagagatcatagatgagctcagccggtctatcagtgtcgatttagcagaaagcaaacggcttggctgtctcctgctttccagtttccagttctctattcagaaacttgaacctttcctaagggacactaagggcttcagtcttgaaagttttagagccaaagcatcttctctttctgaagaattgaaacattttgcagacggactggaaactgatggaactctacaaaaatgttttgaagattcaaatggaaaagcatcagatttttctttggaagcatctgtggctgagatgaaggaatacataacaaagttttctttagaacgtcagacttgggatcagctcttgcttcactaccagcaggaggctaaagagatattgtccagaggatcaactgaggccaaaattactgaggtcaaagtggaacctatgacatatcttgggtcttctcagaatgaagttcttaatacaaaacctgactaccagaaaatattacagaaccagagcaaagtctttgactgtatggagttggtgatggatgaactgcaaggatcagtgaaacagctgcaggcctttatggatgaaagtacccagtgcttccagaaggtgtcagtacagctcggaaagagaagcatgcaacaattagatccctcaccagctcgaaaactgttgaagcttcagctacagaacccacctgccatacatggatctggatctggatcttgtcagtgactttatgagagtttctgccacaaggtgcccaagaggagaggaatgggaagagtgccccagcacgtggtgactgcgtgatttctgctcgttgcctttgaagataactggcaggactgactgtagaacactttgacttttttcaaaaagtgatggaatttgtacatccaaatgaatattgtatagacaattttcccaggaatgtgcaaaatgcttgaaagttcaaacttcttttttgaaatgatcttcagatccagtggcccattcttttatctttatcctgtgaaggtgtttttcaggttttgaaacaatccaaaaatcatttaggaccaagtctaaggaaacattttagtggccaagttggattccgattgtaaaggaatgatactaattttctagcatggctctgaaggtgattttaggtagaagagttttgaggctgggcgcaatggctcacgcctgtaatcctagcattttgggtgactgaggcgggtggattgcttgagcccagaagttgaagaccagcctgagaaataaggtgaaaccctgtctacaaaaaatacaaaaagttagctgggtgtggtggcgtgtgcctgtagtgctagctactcagaaggctgaggtgggaggattgtttgagcccaggaggttgaggctgcagtgagttctaattgcgccactgcactccagcctgagcgacagagtgagacactgtcttaaaaaaaattaaaaattgtaaaaaaatgaaaaaaaaagttttgagcattatttgcatcattgggatacatatgtcacttcacaagatgttcaatttgaaggaaataccactcattctctatgtcctgttgtctgtagtgtgcttcagtttttcatattgagttgacctaaatcctggattcatgacaagaaaggagtaagtactactattcattgttctatttgtttataatctgtattataaaattgcacataattaaaagctttcccttgtcttcaaaataaaaggggaaaaaaaaaaaaaaaaaaaaaaaaaaaaaaaaaaaaaaaaaaaaaaaaataaaaaaaaaaaaaaataaaaaataaaaaaaaaaaaaaaaataaacttaaacaatacacactatagagaagaatattacaatttgctggccgactttaaacaacaaaaaagaatttttttgcgctggcgtttcccaccttagtttttttgcagtaaaaccttttttcgccggctggcataatagctacatggccccaccccttctcctttagcaacatttccacactctgggggccgattgtaaataccgggccttagtatacatccaaagttcgcgcaaattttttgttaagaagacacttctttctccaccgtcccgaaatatgaaatggcctttttatcatagattcctccaatttggggtctcttgttgctccaatttaaacttgggcccttttttaaaaacaaccccccacattttggtcaaacaccttttttatactatgcccccccggcaacctcccttaacaaaataaccccccagggcttaggtttatttcaccaaa

SEQ ID NO: 364277 - DNA, 2066 bp, Homo sapiens
tgtcataatcctatctgttttccagaaaagcatcagatttttctttggaagcatctgtggctgagatgaaggaatacataacaaagttttctttagaacgtcagacttgggatcagctcttgcttcactaccagcaggaggctaaagagatattgtccagaggatcaactgaggccaaaattactgaggtcaaagtggaacctatgacatatcttgggtcttctcagaatgaagttcttaatacaaaacctgactaccagaaaatattacagaaccagagcaaagtctttgactgtatggagttggtgatggatgaactgcaaggatcagtgaaacagctgcaggcctttatggatgaaagtacccagtgcttccagaaggtgtcagtacagctcggaaagagaagcatgcaacaattagatccctcaccagctcgaaaactgttgaagcttcagctacagaacccacctgccatacatggatctggatctggatcttgtcagtgactttatgagagtttctgccacaaggtgcccaagaggagaggaatgggaagagtgccccagcacgtggtgactgcgtgatttctgctcgttgcctttgaagataactggcaggactgactgtagaacactttgacttttttcaaaaagtgatggaatttgtacatccaaatgaatattgtatagacaattttcccaggaatgtgcaaaatgcttgaaagttcaaacttcttttttgaaatgatcttcagatccagtggcccattcttttatctttatcctgtgaaggtgtttttcaggttttgaaacaatccaaaaatcatttaggaccaagtctaaggaaacattttagtggccaagttggattccgattgtaaaggaatgatactaattttctagcatggctctgaaggtgattttaggtagaagagttttgaggctgggcgcaatggctcacgcctgtaatcctagcattttgggtgactgaggcgggtggattgcttgagcccagaagttgaagaccagcctgagaaataaggtgaaaccctgtctacaaaaaatacaaaaagttagctgggtgtggtggcgtgtgcctgtagtgctagctactcagaaggctgaggtgggaggattgtttgagcccaggaggttgaggctgcagtgagttctaattgcgccactgcactccagcctgagcgacagagtgagacactgtcttaaaaaaaattaaaaattgtaaaaaaatgaaaaaaaaagttttgagcattatttgcatcattgggatacatatgtcacttcacaagatgttcaatttgaaggaaataccactcattctctatgtcctgttgtctgtagtgtgcttcagtttttcatattgagttgacctaaatcctggattcatgacaagaaaggagtaagtactactattcattgttctatttgtttataatctgtattataaaattgcacataattaaaagctttcccttgtcttcaaaataaaaggggaaaaaaaaaaaaaaaaaaaaaaaaaaaaaaaaaaaaaaaaaaaaaaaaataaaaaaaaaaaaaaataaaaaataaaaaaaaaaaaaaaaataaacttaaacaatacacactatagagaagaatattacaatttgctggccgactttaaacaacaaaaaagaatttttttgcgctggcgtttcccaccttagtttttttgcagtaaaaccttttttcgccggctggcataatagctacatggccccaccccttctcctttagcaacatttccacactctgggggccgattgtaaataccgggccttagtatacatccaaagttcgcgcaaattttttgttaagaagacacttctttctccaccgtcccgaaatatgaaatggcctttttatcatagattcctccaatttggggtctcttgttgctccaatttaaacttgggcccttttttaaaaacaaccccccacattttggtcaaacaccttttttatactatgcccccccggcaacctcccttaacaaaataaccccccagggcttaggtttatttcaccaaa

SEQ ID NO: 364278 - DNA, 709 bp, Homo sapiens
agcggagagtttcggaggcggtgaccgtgacgtagaaggtggagaccgcttcaccctgatcagggagtatcggctgcgggtgcgcaaggcgtccaggagtgacctggggctgtggagagcgacccgtggccttgtgtttcagagtttaccacctaggatgacttcagtgactagatcagagatcatagatggtaagtattgtagtgaaattcagtacctcttaccttgggttcaggcttctgagctatacccaaatctttcctggctcctggtagatttggaatcacatactcattatttgcagagatgctttctttatgtttccacgatctaggggcatacatttactttttccacttttttgcacaaatagttgtggcgggcttgatcttgtattttgacttttttataacaaatactagaaaaaggaccagtgatgtctaagactcatgatcatcaattggaatcaagtctcagtcctgtggaagtgtttgctaaaacatctgcctccctggagatgaatcaaggcgtttcagaggaaagaattcaccttggctctagccctaaaaaagggggaaattgtgatctcagccaccaggaaagacttcagtcgaagtcccttcatttgtctcctcaagcgatcctcctgcctctgcctcccaaagtgctgggattacagccatgagcccccacacccagcggattcagc

SEQ ID NO: 364279 - DNA, 639 bp, Homo sapiens
gtagaaatcacaagacaactagaattagaattagggccttaaggtgagatgaaattgctgtaaactcatgatgaaacttgaacaaatagggagttgcttcttatggatgagcaaagaaaatattttcttgagatggaatataatccaggtggagatgctatcaacattgttgaaatgacaacaaaggatttagaatattccataaacctagttgataaagcagcagcagggtttgagagggtttactccaattttgaaagaagttctactgttgataaaatgctgtcaaacagcatcacatgctacagggaaatcttttgtgaaaggaacaaacttcattgttttaaaaaattgacacaggcttccaaccttcagcagcccccacactgattagccagcagtcatcaatatagaggcaagactctcaccagcaaaaagattatgacttggtaaggctcagatattcattagcattttttagcactgacgtattttaacttaaggtatgtacacagttttttagacatgctattaattactaattaataattattaaatactcattagactacaatatagtttaagcataacttttataagcactgggaaataaaatgtttatgcaactaaaaaaagtaa

SEQ ID NO: 364280 - DNA, 376 bp, Homo sapiens
tgtttccagagtgtgatctcctacaggagattatgttgggttggcccagaggagaagggagggagtgtttttgggtggggcgacagagacatgagagatatctgtacagctgcaggtttagggaagattggaactgctccctcctccctgcctctcacataggaaagctgggctagaaattctgaggttcccagcattggccaatgaagtcccaaagccctgcctagcctagaggcagcacagggtcatgtagaatgaccatagagagaaagacacacatgaactgataaatattttagcaattaaagacctccatattctttactcaactctagacaaagggaaggaaatccaagactgaggttggagcttaaac

SEQ ID NO: 364281 - DNA, 818 bp, Homo sapiens
ttcaccaagatgctaaaggaatccaagcacaaaaggaagttaaaaagcacctgcctgacccagtgcagtggctcacagctgtaatcccagcactttgcgaggccgagacaggcgaattgcttgagccctggagttagagaccagcttggacaacatggtgaaattccgtctctataaaaaatgcaaaaattagcagggtgtgatggtacatgcctgtagtaccagtgctggggaggctgagtaactgggaccacaagtacacggcaccacgtctgggtaatttgtttcttttctttttattttcgtagcgatagggtcttgccacattgcccaagctggcctcgaactctggtgctcaagcaattcacccaccgtggtctcccaaattgctgaaattataatcgtgagccatcatgcctgaccgtaaaagttttattataagaatccaaggccttcaccaagatgctaaaggaatccaagcacaaaaggaagttaaaaagcacctgcctgacccagtgcagtggctcacagctgtaatcccagcactttgcgaggccgagacaggcgaattgcttgagccctggagttagagaccagcttggacaacatggtgaaattccgtctctataaaaaatgcaaaaattagcagggtgtgatggtacatgcctgtagtaccagtgctggggaggctgaggtgggaggattacctgagcctgagaaatcaaggctgtagtgagccgtgatcatgctactgcactctagcctgggagaaagtgagaccctgtctctcaaaaaaagcgcttgctctaatcagacat

SEQ ID NO: 364282 - DNA, 3776 bp, Homo sapiens
gcggcggcggcgtgctgcgggctctgtggcgggagcgaggccgacgggcggggccgcgcggccgcgtgacgcgaagcgttcgagagcgcgcgtcgtggaacgtcttggttgccacggcaagcgcgcgcgcgaggccttgggaacctcgggaccggcccccggcgagcgcagcggcgcccagtgtaagggagtgggagctggtccgtgccgcggcggccgcgcagggagctctcgaggcaacgccggggcgcccgaggtctggaaggcgcagaaatggagcaagagccacaaaatggagaacctgctgaaattaagatcatcagagaagcatataagaaggcctttttatttgttaacaaaggtctgaatacagatgaattaggtcagaaggaagaagcaaagaactactataagcaaggaataggacacctgctcagagggatcagcatttcatcaaaagagtctgaacacacaggtcctgggtgggaatctgctagacagatgcaacagaaaatgaaagaaactctacagaatgtacgcaccaggctggaaattctagagaagggtcttgccacttctctgcagaatgatcttcaggaggtgcccaagttatatccagaatttccacctaaagacatgtgtgaaaaattaccagagcctcagtcttttagttcagctcctcagcatgctgaagtaaatggaaacacctcaactccaagtgcaggggcagttgctgcacctgcttctctgtctttaccatcacaaagttgtccagcagaagctcctcctgcttatactcctcaagctgctgaaggtcactacactgtatcctatggaacagattctggggagttttcatcagttggagaggagttttataggaatcattctcagccaccgcctcttgagaccttagggctggatgcagatgaattgattttgataccaaatggagtacagattttttttgtaaatcctgcaggggaggttagtgcaccttcgtatcctgggtaccttcgaattgtgaggtttttggataattctctcgatacggttctaaaccgtcctcccgggtttcttcaggtttgtgactggttatatcctctagttcctgatagatctccggttctgaaatgtactgcgggagcctacatgtttcctgatacaatgctacaagcagcaggatgctttgtgggggtcgtcctgtcctctgagttaccagaggatgatagagagctctttgaggatctgttaaggcaaatgtctgaccttcggctccaggccaactggaacagagcagaagaagaaaatgaattccaaatccctggaagaactagaccctcctctgaccaactaaaagaagcctctggcactgatgtgaaacagttggaccaaggcaataaggatgtacgtcataaaggaaaacgtggaaaaagggctaaagatacttcaagtgaagaagttaacctgagtcacattgtaccatgtgagccagttccagaagaaaagccaaaagaattacctgaatggagtgaaaaagtggctcacaacattttgtcaggtgcttcctgggtgagttggggtttagtcaaaggtgctgagattactggtaaggcaatccagaaaggtgcttctaaactccgagagcggattcaaccagaagaaaaacccgtggaagttagtccagctgtcaccaagggactttatatagcgaagcaagctacaggaggagcagcaaaagtcagtcagttcctggttgatggagtttgcactgtagcaaattgcgttggaaaagaactagctccacatgtcaagaagcatggaagcaaacttgttccagaatctcttaaaaaagacaaagatgggaaatctcctctggatggtgctatggttgtagcagcaagtagtgttcaaggattttcaactgtctggcaaggattggaatgtgcagctaaatgcatcgttaacaatgtttcagcagaaactgtacaaactgtcagatacaaatacggatataatgcaggagaagctacccaccatgcggtggattctgcggtcaatgttggcgtaactgcctacaatattaacaacattggtatcaaagcaatggtgaagaaaactgcaacacaaacaggacacactctccttgaggactatcagatagttgataattctcagagggaaaatcaagaaggagcagcaaatgtcaacgtgagaggggagaaggatgagcagacgaaggaagtaaaggaggcaaagaagaaagataaatgatgaagtgctgggaatcacttataccaaagccttatgaaatggatgaaattttgttaaataggcaaatgtggaattcctcacagattaaccagtattttttaaatgtattcattcctacaaattaactttcataaattttatggcatgtcttctatttaaaaggaaaagaataagtattcttgcatctggccttagaaatgtgaagttatattctcaagtttatttttttccaagtgtagctaaaatatttttgcaggtaaaataaagctgatagtacatgtgttgttcaaaccttgttaaacctaatattgaactatttttatatctgctgtctttcagaaggcaaataggaaactatatatttgcttaaaaattggcatttagtaaccttaattctttttatagaaggaatgacttaaagtattgtcccctctttttgcactaattgtggatttttttagatgcttctcaaaattttcagtgtgtaagctaaacaaaaactaaaactaagaattctcaaaaaaacttgttcaaaacagggaaagactgatgaaaagtaaaatggactacttttgtaacttacctgtttgttaggaaatggaatggtctctttgatttaaaatgaataaaaatagattattacgtcttttgtattgagactgtattgttatgagcctaggaaatttgggaacatgattgtattgtattaaaattcgaagtgattattatcagcttaattggattaaaaaagtacttcaagaaattattttatcatatctgcttctgtttttccaaaaggttaaaacttgtaaaaaaaatatatataaacaattgagtttactaatggtaaacatttttattctgggattcggtcattggaatttatattaaaagacaagttattaaaaaggaaaggttctattcataatcagggtaaagaatatgaaaaccttagacgtaatccatggtggataggcattatggtttccactttggcagaaggcagactattcacagccctatttacttacataggctaaaaaactatgtaactaaatacctaatggtatttaatttttgtttattgaatttaagagattggtattagttttcatagctgtagtccattctaataatttctgatcttctagtggctacttaattagacattatttgaagctgtctgaagaatgcactttatgaattaaaaaactgaattgcctgacctcgttatcacatgagcttatattttgggaacacatagaactgatggaggcttttcctaaggccaaggataatgtactagttgttaaaatggaaataaaagtgaagtggtaaatagcttacagacagtctatgctttgtttaagaaatggaatggcacttcatatattctcatttgtgggagctaaaaattacaataatcaaacttaaggagatagagagtagaatgatggttaccagaggctgggaggcattgaagggatggggagggaagtgag

SEQ ID NO: 364283 - DNA, 3581 bp, Homo sapiens
accttccgtctgtgcatgttttcttcaatcctggaaggaaatcataagtgatttgccccaaaaggattgctgttgaaaatggagcaagagccacaaaatggagaacctgctgaaattaagatcatcagagaagcatataagaaggcctttttatttgttaacaaaggtctgaatacagatgaattaggtcagaaggaagaagcaaagaactactataagcaaggaataggacacctgctcagagggatcagcatttcatcaaaagagtctgaacacacaggtcctgggtgggaatctgctagacagatgcaacagaaaatgaaagaaactctacagaatgtacgcaccaggctggaaattctagagaagggtcttgccacttctctgcagaatgatcttcaggaggtgcccaagttatatccagaatttccacctaaagacatgtgtgaaaaattaccagagcctcagtcttttagttcagctcctcagcatgctgaagtaaatggaaacacctcaactccaagtgcaggggcagttgctgcacctgcttctctgtctttaccatcacaaagttgtccagcagaagctcctcctgcttatactcctcaagctgctgaaggtcactacactgtatcctatggaacagattctggggagttttcatcagttggagaggagttttataggaatcattctcagccaccgcctcttgagaccttagggctggatgcagatgaattgattttgataccaaatggagtacagattttttttgtaaatcctgcaggggaggttagtgcaccttcgtatcctgggtaccttcgaattgtgaggtttttggataattctctcgatacggttctaaaccgtcctcccgggtttcttcaggtttgtgactggttatatcctctagttcctgatagatctccggttctgaaatgtactgcgggagcctacatgtttcctgatacaatgctacaagcagcaggatgctttgtgggggtcgtcctgtcctctgagttaccagaggatgatagagagctctttgaggatctgttaaggcaaatgtctgaccttcggctccaggccaactggaacagagcagaagaagaaaatgaattccaaatccctggaagaactagaccctcctctgaccaactaaaagaagcctctggcactgatgtgaaacagttggaccaaggcaataaggatgtacgtcataaaggaaaacgtggaaaaagggctaaagatacttcaagtgaagaagttaacctgagtcacattgtaccatgtgagccagttccagaagaaaagccaaaagaattacctgaatggagtgaaaaagtggctcacaacattttgtcaggtgcttcctgggtgagttggggtttagtcaaaggtgctgagattactggtaaggcaatccagaaaggtgcttctaaactccgagagcggattcaaccagaagaaaaacccgtggaagttagtccagctgtcaccaagggactttatatagcgaagcaagctacaggaggagcagcaaaagtcagtcagttcctggttgatggagtttgcactgtagcaaattgcgttggaaaagaactagctccacatgtcaagaagcatggaagcaaacttgttccagaatctcttaaaaaagacaaagatgggaaatctcctctggatggtgctatggttgtagcagcaagtagtgttcaaggattttcaactgtctggcaaggattggaatgtgcagctaaatgcatcgttaacaatgtttcagcagaaactgtacaaactgtcagatacaaatacggatataatgcaggagaagctacccaccatgcggtggattctgcggtcaatgttggcgtaactgcctacaatattaacaacattggtatcaaagcaatggtgaagaaaactgcaacacaaacaggacacactctccttgaggactatcagatagttgataattctcagagggaaaatcaagaaggagcagcaaatgtcaacgtgagaggggagaaggatgagcagacgaaggaagtaaaggaggcaaagaagaaagataaatgatgaagtgctgggaatcacttataccaaagccttatgaaatggatgaaattttgttaaataggcaaatgtggaattcctcacagattaaccagtattttttaaatgtattcattcctacaaattaactttcataaattttatggcatgtcttctatttaaaaggaaaagaataagtattcttgcatctggccttagaaatgtgaagttatattctcaagtttatttttttccaagtgtagctaaaatatttttgcaggtaaaataaagctgatagtacatgtgttgttcaaaccttgttaaacctaatattgaactatttttatatctgctgtctttcagaaggcaaataggaaactatatatttgcttaaaaattggcatttagtaaccttaattctttttatagaaggaatgacttaaagtattgtcccctctttttgcactaattgtggatttttttagatgcttctcaaaattttcagtgtgtaagctaaacaaaaactaaaactaagaattctcaaaaaaacttgttcaaaacagggaaagactgatgaaaagtaaaatggactacttttgtaacttacctgtttgttaggaaatggaatggtctctttgatttaaaatgaataaaaatagattattacgtcttttgtattgagactgtattgttatgagcctaggaaatttgggaacatgattgtattgtattaaaattcgaagtgattattatcagcttaattggattaaaaaagtacttcaagaaattattttatcatatctgcttctgtttttccaaaaggttaaaacttgtaaaaaaaatatatataaacaattgagtttactaatggtaaacatttttattctgggattcggtcattggaatttatattaaaagacaagttattaaaaaggaaaggttctattcataatcagggtaaagaatatgaaaaccttagacgtaatccatggtggataggcattatggtttccactttggcagaaggcagactattcacagccctatttacttacataggctaaaaaactatgtaactaaatacctaatggtatttaatttttgtttattgaatttaagagattggtattagttttcatagctgtagtccattctaataatttctgatcttctagtggctacttaattagacattatttgaagctgtctgaagaatgcactttatgaattaaaaaactgaattgcctgacctcgttatcacatgagcttatattttgggaacacatagaactgatggaggcttttcctaaggccaaggataatgtactagttgttaaaatggaaataaaagtgaagtggtaaatagcttacagacagtctatgctttgtttaagaaatggaatggcacttcatatattctcatttgtgggagctaaaaattacaataatcaaacttaaggagatagagagtagaatgatggttaccagaggctgggaggcattgaagggatggggagggaagtgag

SEQ ID NO: 364284 - DNA, 3672 bp, Homo sapiens
gctttctttatgacagacctaatagtaggcttaaaggatagtataatagtgaacaaaacagagataagcgaggcacttgtcctcttaaaatatattcaggtaggagatacgaatcataagtaaacaatagctaagcaagataattaaatatgtctccaattttgcagaaatggagcaagagccacaaaatggagaacctgctgaaattaagatcatcagagaagcatataagaaggcctttttatttgttaacaaaggtctgaatacagatgaattaggtcagaaggaagaagcaaagaactactataagcaaggaataggacacctgctcagagggatcagcatttcatcaaaagagtctgaacacacaggtcctgggtgggaatctgctagacagatgcaacagaaaatgaaagaaactctacagaatgtacgcaccaggctggaaattctagagaagggtcttgccacttctctgcagaatgatcttcaggaggtgcccaagttatatccagaatttccacctaaagacatgtgtgaaaaattaccagagcctcagtcttttagttcagctcctcagcatgctgaagtaaatggaaacacctcaactccaagtgcaggggcagttgctgcacctgcttctctgtctttaccatcacaaagttgtccagcagaagctcctcctgcttatactcctcaagctgctgaaggtcactacactgtatcctatggaacagattctggggagttttcatcagttggagaggagttttataggaatcattctcagccaccgcctcttgagaccttagggctggatgcagatgaattgattttgataccaaatggagtacagattttttttgtaaatcctgcaggggaggttagtgcaccttcgtatcctgggtaccttcgaattgtgaggtttttggataattctctcgatacggttctaaaccgtcctcccgggtttcttcaggtttgtgactggttatatcctctagttcctgatagatctccggttctgaaatgtactgcgggagcctacatgtttcctgatacaatgctacaagcagcaggatgctttgtgggggtcgtcctgtcctctgagttaccagaggatgatagagagctctttgaggatctgttaaggcaaatgtctgaccttcggctccaggccaactggaacagagcagaagaagaaaatgaattccaaatccctggaagaactagaccctcctctgaccaactaaaagaagcctctggcactgatgtgaaacagttggaccaaggcaataaggatgtacgtcataaaggaaaacgtggaaaaagggctaaagatacttcaagtgaagaagttaacctgagtcacattgtaccatgtgagccagttccagaagaaaagccaaaagaattacctgaatggagtgaaaaagtggctcacaacattttgtcaggtgcttcctgggtgagttggggtttagtcaaaggtgctgagattactggtaaggcaatccagaaaggtgcttctaaactccgagagcggattcaaccagaagaaaaacccgtggaagttagtccagctgtcaccaagggactttatatagcgaagcaagctacaggaggagcagcaaaagtcagtcagttcctggttgatggagtttgcactgtagcaaattgcgttggaaaagaactagctccacatgtcaagaagcatggaagcaaacttgttccagaatctcttaaaaaagacaaagatgggaaatctcctctggatggtgctatggttgtagcagcaagtagtgttcaaggattttcaactgtctggcaaggattggaatgtgcagctaaatgcatcgttaacaatgtttcagcagaaactgtacaaactgtcagatacaaatacggatataatgcaggagaagctacccaccatgcggtggattctgcggtcaatgttggcgtaactgcctacaatattaacaacattggtatcaaagcaatggtgaagaaaactgcaacacaaacaggacacactctccttgaggactatcagatagttgataattctcagagggaaaatcaagaaggagcagcaaatgtcaacgtgagaggggagaaggatgagcagacgaaggaagtaaaggaggcaaagaagaaagataaatgatgaagtgctgggaatcacttataccaaagccttatgaaatggatgaaattttgttaaataggcaaatgtggaattcctcacagattaaccagtattttttaaatgtattcattcctacaaattaactttcataaattttatggcatgtcttctatttaaaaggaaaagaataagtattcttgcatctggccttagaaatgtgaagttatattctcaagtttatttttttccaagtgtagctaaaatatttttgcaggtaaaataaagctgatagtacatgtgttgttcaaaccttgttaaacctaatattgaactatttttatatctgctgtctttcagaaggcaaataggaaactatatatttgcttaaaaattggcatttagtaaccttaattctttttatagaaggaatgacttaaagtattgtcccctctttttgcactaattgtggatttttttagatgcttctcaaaattttcagtgtgtaagctaaacaaaaactaaaactaagaattctcaaaaaaacttgttcaaaacagggaaagactgatgaaaagtaaaatggactacttttgtaacttacctgtttgttaggaaatggaatggtctctttgatttaaaatgaataaaaatagattattacgtcttttgtattgagactgtattgttatgagcctaggaaatttgggaacatgattgtattgtattaaaattcgaagtgattattatcagcttaattggattaaaaaagtacttcaagaaattattttatcatatctgcttctgtttttccaaaaggttaaaacttgtaaaaaaaatatatataaacaattgagtttactaatggtaaacatttttattctgggattcggtcattggaatttatattaaaagacaagttattaaaaaggaaaggttctattcataatcagggtaaagaatatgaaaaccttagacgtaatccatggtggataggcattatggtttccactttggcagaaggcagactattcacagccctatttacttacataggctaaaaaactatgtaactaaatacctaatggtatttaatttttgtttattgaatttaagagattggtattagttttcatagctgtagtccattctaataatttctgatcttctagtggctacttaattagacattatttgaagctgtctgaagaatgcactttatgaattaaaaaactgaattgcctgacctcgttatcacatgagcttatattttgggaacacatagaactgatggaggcttttcctaaggccaaggataatgtactagttgttaaaatggaaataaaagtgaagtggtaaatagcttacagacagtctatgctttgtttaagaaatggaatggcacttcatatattctcatttgtgggagctaaaaattacaataatcaaacttaaggagatagagagtagaatgatggttaccagaggctgggaggcattgaagggatggggagggaagtgag

SEQ ID NO: 364285 - DNA, 3893 bp, Homo sapiens
tgaggggataatcagcctttattgtctctcgtgcactgtgcccagcgctccctctagcggctacaagcgctcactgcccacactctctactaggctctccggaggcctcggtttcgctggagagaaagagattgcgcaggcgcggagcagccgacgtggccgcaggggaccgtgcctggggggggtctgcgcggggccgctgactcgcgaggttctctgtcgcctgccgccctcgctccttttctccccttctagagtgttacggtgactcttgggtccgaaggggacggacgtcctcccacgtaccatttagaagagtcatcttagtgggatttggggaagcaacagggctgtgtggggtaacctgccacctttaagtggaaatcagaaatggagcaagagccacaaaatggagaacctgctgaaattaagatcatcagagaagcatataagaaggcctttttatttgttaacaaaggtctgaatacagatgaattaggtcagaaggaagaagcaaagaactactataagcaaggaataggacacctgctcagagggatcagcatttcatcaaaagagtctgaacacacaggtcctgggtgggaatctgctagacagatgcaacagaaaatgaaagaaactctacagaatgtacgcaccaggctggaaattctagagaagggtcttgccacttctctgcagaatgatcttcaggaggtgcccaagttatatccagaatttccacctaaagacatgtgtgaaaaattaccagagcctcagtcttttagttcagctcctcagcatgctgaagtaaatggaaacacctcaactccaagtgcaggggcagttgctgcacctgcttctctgtctttaccatcacaaagttgtccagcagaagctcctcctgcttatactcctcaagctgctgaaggtcactacactgtatcctatggaacagattctggggagttttcatcagttggagaggagttttataggaatcattctcagccaccgcctcttgagaccttagggctggatgcagatgaattgattttgataccaaatggagtacagattttttttgtaaatcctgcaggggaggttagtgcaccttcgtatcctgggtaccttcgaattgtgaggtttttggataattctctcgatacggttctaaaccgtcctcccgggtttcttcaggtttgtgactggttatatcctctagttcctgatagatctccggttctgaaatgtactgcgggagcctacatgtttcctgatacaatgctacaagcagcaggatgctttgtgggggtcgtcctgtcctctgagttaccagaggatgatagagagctctttgaggatctgttaaggcaaatgtctgaccttcggctccaggccaactggaacagagcagaagaagaaaatgaattccaaatccctggaagaactagaccctcctctgaccaactaaaagaagcctctggcactgatgtgaaacagttggaccaaggcaataaggatgtacgtcataaaggaaaacgtggaaaaagggctaaagatacttcaagtgaagaagttaacctgagtcacattgtaccatgtgagccagttccagaagaaaagccaaaagaattacctgaatggagtgaaaaagtggctcacaacattttgtcaggtgcttcctgggtgagttggggtttagtcaaaggtgctgagattactggtaaggcaatccagaaaggtgcttctaaactccgagagcggattcaaccagaagaaaaacccgtggaagttagtccagctgtcaccaagggactttatatagcgaagcaagctacaggaggagcagcaaaagtcagtcagttcctggttgatggagtttgcactgtagcaaattgcgttggaaaagaactagctccacatgtcaagaagcatggaagcaaacttgttccagaatctcttaaaaaagacaaagatgggaaatctcctctggatggtgctatggttgtagcagcaagtagtgttcaaggattttcaactgtctggcaaggattggaatgtgcagctaaatgcatcgttaacaatgtttcagcagaaactgtacaaactgtcagatacaaatacggatataatgcaggagaagctacccaccatgcggtggattctgcggtcaatgttggcgtaactgcctacaatattaacaacattggtatcaaagcaatggtgaagaaaactgcaacacaaacaggacacactctccttgaggactatcagatagttgataattctcagagggaaaatcaagaaggagcagcaaatgtcaacgtgagaggggagaaggatgagcagacgaaggaagtaaaggaggcaaagaagaaagataaatgatgaagtgctgggaatcacttataccaaagccttatgaaatggatgaaattttgttaaataggcaaatgtggaattcctcacagattaaccagtattttttaaatgtattcattcctacaaattaactttcataaattttatggcatgtcttctatttaaaaggaaaagaataagtattcttgcatctggccttagaaatgtgaagttatattctcaagtttatttttttccaagtgtagctaaaatatttttgcaggtaaaataaagctgatagtacatgtgttgttcaaaccttgttaaacctaatattgaactatttttatatctgctgtctttcagaaggcaaataggaaactatatatttgcttaaaaattggcatttagtaaccttaattctttttatagaaggaatgacttaaagtattgtcccctctttttgcactaattgtggatttttttagatgcttctcaaaattttcagtgtgtaagctaaacaaaaactaaaactaagaattctcaaaaaaacttgttcaaaacagggaaagactgatgaaaagtaaaatggactacttttgtaacttacctgtttgttaggaaatggaatggtctctttgatttaaaatgaataaaaatagattattacgtcttttgtattgagactgtattgttatgagcctaggaaatttgggaacatgattgtattgtattaaaattcgaagtgattattatcagcttaattggattaaaaaagtacttcaagaaattattttatcatatctgcttctgtttttccaaaaggttaaaacttgtaaaaaaaatatatataaacaattgagtttactaatggtaaacatttttattctgggattcggtcattggaatttatattaaaagacaagttattaaaaaggaaaggttctattcataatcagggtaaagaatatgaaaaccttagacgtaatccatggtggataggcattatggtttccactttggcagaaggcagactattcacagccctatttacttacataggctaaaaaactatgtaactaaatacctaatggtatttaatttttgtttattgaatttaagagattggtattagttttcatagctgtagtccattctaataatttctgatcttctagtggctacttaattagacattatttgaagctgtctgaagaatgcactttatgaattaaaaaactgaattgcctgacctcgttatcacatgagcttatattttgggaacacatagaactgatggaggcttttcctaaggccaaggataatgtactagttgttaaaatggaaataaaagtgaagtggtaaatagcttacagacagtctatgctttgtttaagaaatggaatggcacttcatatattctcatttgtgggagctaaaaattacaataatcaaacttaaggagatagagagtagaatgatggttaccagaggctgggaggcattgaagggatggggagggaagtgag

SEQ ID NO: 364286 - DNA, 3054 bp, Homo sapiens
gcggcggcggcgtgctgcgggctctgtggcgggagcgaggccgacgggcggggccgcgcggccgcgtgacgcgaagcgttcgagagcgcgcgtcgtggaacgtcttggttgccacggcaagcgcgcgcgcgaggccttgggaacctcgggaccggcccccggcgagcgcagcggcgcccagtgtaagggagtgggagctggtccgtgccgcggcggccgcgcagggagctctcgaggcaacgccggggcgcccgaggtctggaaggcgcagaaatggagcaagagccacaaaatggagaacctgctgaaattaagatcatcagagaagcatataagaaggcctttttatttgttaacaaaggtctgaatacagatgaattaggtcagaaggaagaagcaaagaactactataagcaaggaataggacacctgctcagagggatcagcatttcatcaaaagagtctgaacacacaggtcctgggtgggaatctgctagacagatgcaacagaaaatgaaagaaactctacagaatgtacgcaccaggctggaaattctagagaagggtcttgccacttctctgcagaatgatcttcaggaggtgcccaagttatatccagaatttccacctaaagacatgtgtgaaaaattaccagagcctcagtcttttagttcagctcctcagcatgctgaagtaaatggaaacacctcaactccaagtgcaggggcagttgctgcacctgcttctctgtctttaccatcacaaagttgtccagcagaagctcctcctgcttatactcctcaagctgctgaaggtcactacactgtatcctatggaacagattctggggagttttcatcagttggagaggagttttataggaatcattctcagccaccgcctcttgagaccttagggctggatgcagatgaattgattttgataccaaatggagtacagattttttttgtaaatcctgcaggggaggttagtgcaccttcgtatcctgggtaccttcgaattgtgaggtttttggataattctctcgatacggttctaaaccgtcctcccgggtttcttcaggtttgtgactggttatatcctctagttcctgatagatctccggttctgaaatgtactgcgggagcctacatgtttcctgatacaatgctacaagcagcaggatgctttgtgggggtcgtcctgtcctctgagttaccagaggatgatagagagctctttgaggatctgttaaggcaaatgtctgaccttcggctccaggccaactggaacagagcagaagaagaaaatgaattccaaatccctggaagaactagaccctcctctgaccaactaaaagaagcctctggcactgatgtgaaacagttggaccaaggcaataaggatgtacgtcataaaggaaaacgtggaaaaagggctaaagatacttcaagtgaagaagttaacctgagtcacattgtaccatgtgagccagttccagaagaaaagccaaaagaattacctgaatggagtgaaaaagtggctcacaacattttgtcaggtgcttcctgggtgagttggggtttagtcaaaggtgctgagattactggtaaggcaatccagaaaggtgcttctaaactccgagagcggattcaaccagaagaaaaacccgtggaagttagtccagctgtcaccaagggactttatatagcgaagcaagctacaggaggagcagcaaaagtcagtcagttcctggttgatggagtttgcactgtagcaaattgcgttggaaaagaactagctccacatgtcaagaagcatggaagcaaacttgttccagaatctcttaaaaaagacaaagatgggaaatctcctctggatggtgctatggttgtagcagcaagtagtgttcaaggattttcaactgtctggcaaggattggaatgtgcagctaaatgcatcgttaacaatgtttcagcagaaactgtacaaactgtcagatacaaatacggatataatgcaggagaagctacccaccatgcggtggattctgcggtcaatgttggcgtaactgcctacaatattaacaacattggtatcaaagcaatggtgaagaaaactgcaacacaaacaggacacactctccttgaggactatcagatagttgataattctcagagggaaaatcaagaaggagcagcaaatgtcaacgtgagaggggagaaggatgagcagacgaaggaagtaaaggaggcaaagaagaaagataaatgatgaagtgctgggaatcacttataccaaagccttatgaaatggatgaaattttgttaaataggcaaatgtggaattcctcacagattaaccagtattttttaaatgtattcattcctacaaattaactttcataaattttatggcatgtcttctatttaaaaggaaaagaataagtattcttgcatctggccttagaaatgtgaagttatattctcaagtttatttttttccaagtgtagctaaaatatttttgcaggtaaaataaagctgatagtacatgtgttgttcaaaccttgttaaacctaatattgaactatttttatatctgctgtctttcagaaggcaaataggaaactatatatttgcttaaaaattggcatttagtaaccttaattctttttatagaaggaatgacttaaagtattgtcccctctttttgcactaattgtggatttttttagatgcttctcaaaattttcagtgtgtaagctaaacaaaaactaaaactaagaattctcaaaaaaacttgttcaaaacagggaaagactgatgaaaagtaaaatggactacttttgtaacttacctgtttgttaggaaatggaatggtctctttgatttaaaatgaataaaaatagattattacgtcttttgtattgagactgtattgttatgagcctaggaaatttgggaacatgattgtattgtattaaaattcgaagtgattgttcccgatagaggggaacaatcacttcgttggaaagtgccgagattcccccattc

SEQ ID NO: 364287 - DNA, 2127 bp, Homo sapiens
atagtaaaacaatttagatgttcatttaagaatgttgcaagatgagtggtaaaaatcaagggaataatatatttttcctaagttttctttttttatggtcatattagttgatggagtttgcactgtagcaaattgcgttggaaaagaactagctccacatgtcaagaagcatggaagcaaacttgttccagaatctcttaaaaaagacaaagatgggaaatctcctctggatggtgctatggttgtagcagcaagtagtgttcaaggattttcaactgtctggcaaggattggaatgtgcagctaaatgcatcgttaacaatgtttcagcagaaactgtacaaactgtcagatacaaatacggatataatgcaggagaagctacccaccatgcggtggattctgcggtcaatgttggcgtaactgcctacaatattaacaacattggtatcaaagcaatggtgaagaaaactgcaacacaaacaggacacactctccttgaggactatcagatagttgataattctcagagggaaaatcaagaaggagcagcaaatgtcaacgtgagaggggagaaggatgagcagacgaaggaagtaaaggaggcaaagaagaaagataaatgatgaagtgctgggaatcacttataccaaagccttatgaaatggatgaaattttgttaaataggcaaatgtggaattcctcacagattaaccagtattttttaaatgtattcattcctacaaattaactttcataaattttatggcatgtcttctatttaaaaggaaaagaataagtattcttgcatctggccttagaaatgtgaagttatattctcaagtttatttttttccaagtgtagctaaaatatttttgcaggtaaaataaagctgatagtacatgtgttgttcaaaccttgttaaacctaatattgaactatttttatatctgctgtctttcagaaggcaaataggaaactatatatttgcttaaaaattggcatttagtaaccttaattctttttatagaaggaatgacttaaagtattgtcccctctttttgcactaattgtggatttttttagatgcttctcaaaattttcagtgtgtaagctaaacaaaaactaaaactaagaattctcaaaaaaacttgttcaaaacagggaaagactgatgaaaagtaaaatggactacttttgtaacttacctgtttgttaggaaatggaatggtctctttgatttaaaatgaataaaaatagattattacgtcttttgtattgagactgtattgttatgagcctaggaaatttgggaacatgattgtattgtattaaaattcgaagtgattattatcagcttaattggattaaaaaagtacttcaagaaattattttatcatatctgcttctgtttttccaaaaggttaaaacttgtaaaaaaaatatatataaacaattgagtttactaatggtaaacatttttattctgggattcggtcattggaatttatattaaaagacaagttattaaaaaggaaaggttctattcataatcagggtaaagaatatgaaaaccttagacgtaatccatggtggataggcattatggtttccactttggcagaaggcagactattcacagccctatttacttacataggctaaaaaactatgtaactaaatacctaatggtatttaatttttgtttattgaatttaagagattggtattagttttcatagctgtagtccattctaataatttctgatcttctagtggctacttaattagacattatttgaagctgtctgaagaatgcactttatgaattaaaaaactgaattgcctgacctcgttatcacatgagcttatattttgggaacacatagaactgatggaggcttttcctaaggccaaggataatgtactagttgttaaaatggaaataaaagtgaagtggtaaatagcttacagacagtctatgctttgtttaagaaatggaatggcacttcatatattctcatttgtgggagctaaaaattacaataatcaaacttaaggagatagagagtagaatgatggttaccagaggctgggaggcattgaagggatggggagggaagtgag

SEQ ID NO: 364288 - DNA, 1793 bp, Homo sapiens
cggacgcgtgggtcgacccacgcatacggatataatgcaggagaagctacccaccatgcggtggattctgcggtcaatgttggcgtaactgcctacaatattaacaacattggtatcaaagcaatggtgaagaaaactgcaacacaaacaggacacactctccttgaggactatcagatagttgataattctcagagggaaaatcaagaaggagcagcaaatgtcaacgtgagaggggagaaggatgagcagacgaaggaagtaaaggaggcaaagaagaaagataaatgatgaagtgctgggaatcacttataccaaagccttatgaaatggatgaaattttgttaaataggcaaatgtggaattcctcacagattaaccagtattttttaaatgtattcattcctacaaattaactttcataaattttatggcatgtcttctatttaaaaggaaaagaataagtattcttgcatctggccttagaaatgtgaagttatattctcaagtttatttttttccaagtgtagctaaaatatttttgcaggtaaaataaagctgatagtacatgtgttgttcaaaccttgttaaacctaatattgaactatttttatatctgctgtctttcagaaggcaaataggaaactatatatttgcttaaaaattggcatttagtaaccttaattctttttatagaaggaatgacttaaagtattgtcccctctttttgcactaattgtggatttttttagatgcttctcaaaattttcagtgtgtaagctaaacaaaaactaaaactaagaattctcaaaaaaacttgttcaaaacagggaaagactgatgaaaagtaaaatggactacttttgtaacttacctgtttgttaggaaatggaatggtctctttgatttaaaatgaataaaaatagattattacgtcttttgtattgagactgtattgttatgagcctaggaaatttgggaacatgattgtattgtattaaaattcgaagtgattattatcagcttaattggattaaaaaagtacttcaagaaattattttatcatatctgcttctgtttttccaaaaggttaaaacttgtaaaaaaaatatatataaacaattgagtttactaatggtaaacatttttattctgggattcggtcattggaatttatattaaaagacaagttattaaaaaggaaaggttctattcataatcagggtaaagaatatgaaaaccttagacgtaatccatggtggataggcattatggtttccactttggcagaaggcagactattcacagccctatttacttacataggctaaaaaactatgtaactaaatacctaatggtatttaatttttgtttattgaatttaagagattggtattagttttcatagctgtagtccattctaataatttctgatcttctagtggctacttaattagacattatttgaagctgtctgaagaatgcactttatgaattaaaaaactgaattgcctgacctcgttatcacatgagcttatattttgggaacacatagaactgatggaggcttttcctaaggccaaggataatgtactagttgttaaaatggaaataaaagtgaagtggtaaatagcttacagacagtctatgctttgtttaagaaatggaatggcacttcatatattctcatttgtgggagctaaaaattacaataatcaaacttaaggagatagagagtagaatgatggttaccagaggctgggaggcattgaagggatggggagggaagtgag

SEQ ID NO: 364289 - DNA, 1466 bp, Homo sapiens
  misc_feature (14)..(14): n is a, c, g, or t
  misc_feature (43)..(43): n is a, c, g, or t
ggatcaatccaaancttatgaatgatgaaggtaatagcaatgngaatcctcccagattaccagataaaggattcattcctacaaattaactttcataaattttatggcatgtcttctatttaaaaggaaaagaataagtattcttgcatctggccttagaaatgtgaagttatattctcaagtttatttttttccaagtgtagctaaaatatttttgcaggtaaaataaagctgatagtacatgtgttgttcaaaccttgttaaacctaatattgaactatttttatatctgctgtctttcagaaggcaaataggaaactatatatttgcttaaaaattggcatttagtaaccttaattctttttatagaaggaatgacttaaagtattgtcccctctttttgcactaattgtggatttttttagatgcttctcaaaattttcagtgtgtaagctaaacaaaaactaaaactaagaattctcaaaaaaacttgttcaaaacagggaaagactgatgaaaagtaaaatggactacttttgtaacttacctgtttgttaggaaatggaatggtctctttgatttaaaatgaataaaaatagattattacgtcttttgtattgagactgtattgttatgagcctaggaaatttgggaacatgattgtattgtattaaaattcgaagtgattattatcagcttaattggattaaaaaagtacttcaagaaattattttatcatatctgcttctgtttttccaaaaggttaaaacttgtaaaaaaaatatatataaacaattgagtttactaatggtaaacatttttattctgggattcggtcattggaatttatattaaaagacaagttattaaaaaggaaaggttctattcataatcagggtaaagaatatgaaaaccttagacgtaatccatggtggataggcattatggtttccactttggcagaaggcagactattcacagccctatttacttacataggctaaaaaactatgtaactaaatacctaatggtatttaatttttgtttattgaatttaagagattggtattagttttcatagctgtagtccattctaataatttctgatcttctagtggctacttaattagacattatttgaagctgtctgaagaatgcactttatgaattaaaaaactgaattgcctgacctcgttatcacatgagcttatattttgggaacacatagaactgatggaggcttttcctaaggccaaggataatgtactagttgttaaaatggaaataaaagtgaagtggtaaatagcttacagacagtctatgctttgtttaagaaatggaatggcacttcatatattctcatttgtgggagctaaaaattacaataatcaaacttaaggagatagagagtagaatgatggttaccagaggctgggaggcattgaagggatggggagggaagtgag

SEQ ID NO: 364290 - DNA, 1966 bp, Homo sapiens
  misc_feature (1950)..(1950): n is a, c, g, or t
gcggcggcggcgtgctgcgggctctgtggcgggagcgaggccgacgggcggggccgcgcggccgcgtgacgcgaagcgttcgagagcgcgcgtcgtggaacgtcttggttgccacggcaagcgcgcgcgcgaggccttgggaacctcgggaccggcccccggcgagcgcagcggcgcccagtgtaagggagtgggagctggtccgtgccgcggcggccgcgcagggagctctcgaggcaacgccggggcgcccgaggtctggaaggcgcagaaatggagcaagagccacaaaatggagaacctgctgaaattaagatcatcagagaagcatataagaaggcctttttatttgttaacaaaggtctgaatacagatgaattaggtcagaaggaagaagcaaagaactactataagcaaggaataggacacctgctcagagggatcagcatttcatcaaaagagtctgaacacacaggtcctgggtgggaatctgctagacagatgcaacagaaaatgaaagaaactctacagaatgtacgcaccaggctggaaattctagagaagggtcttgccacttctctgcagaatgatcttcaggaggtgcccaagttatatccagaatttccacctaaagacatgtgtgaaaaattaccagagcctcagtcttttagttcagctcctcagcatgctgaagtaaatggaaacacctcaactccaagtgcaggggcagttgctgcacctgcttctctgtctttaccatcacaaagttgtccagcagaagctcctcctgcttatactcctcaagctgctgaaggtcactacactgtatcctatggaacagattctggggagttttcatcagttggagaggagttttataggaatcattctcagccaccgcctcttgagaccttagggctggatgcagatgaattgattttgataccaaatggagtacagattttttttgtaaatcctgcaggggaggttagtgcaccttcgtatcctgggtaccttcgaattgtgaggtttttggataattctctcgatacggttctaaaccgtcctcccgggtttcttcaggtttgtgactggttatatcctctagttcctgatagatctccggttctgaaatgtactgcgggagcctacatgtttcctgatacaatgctacaagcagcaggatgctttgtgggggtcgtcctgtcctctgagttaccagaggatgatagagagctctttgaggatctgttaaggcaaatgtctgaccttcggctccaggccaactggaacagagcagaagaagaaaatgaattccaaatccctggaagaactagaccctcctctgaccaactaaaagaagcctctggcactgatgtgaaacagttggaccaaggcaataaggatgtacgtcataaaggaaaacgtggaaaaagggctaaagatacttcaagtgaagaagttaacctgagtcacattgtaccatgtgagccagttccagaagaaaagccaaaagaattacctgaatggagtgaaaaagtggctcacaacattttgtcaggtgcttcctgggtgagttggggtttagtcaaaggtgctgagattactggtaaggcaatccagaaaggtgcttctaaactccgagagcggattcaaccagaagaaaaacccgtggaagttagtccagctgtcaccaagggactttatatagcgaagcaagctacaggaggagcagcaaaagtcagtcagttcctggttgatggagtttgcactgtagcaaattgcgttggaaaagaactagctccacatgtcaagaagcatggaagcaaacttgttccagaatctcttaaaaaagacaaagatgggaaatctcctctggatggtgctatgggttggtaaccaaccgaattaatgggttcaaagggatttttcaaactgggcttggccaangggaattgggaaatgt

SEQ ID NO: 364291 - DNA, 144 bp, Homo sapiens
ggcgcccgaggtctggaaggcgcaggcaggtggggcgcgggggagttcacccctgcgcggtcccttgggtgggcggggtgggcgccccaggccccgcggactcggctgggaggctgagcgggcgacggtcacgggacaagggtg

SEQ ID NO: 364292 - DNA, 346 bp, Homo sapiens
tgaggggataatcagcctttattgtctctcgtgcactgtgcccagcgctccctctagcggctacaagcgctcactgcccacactctctactaggctctccggaggcctcggtttcgctggagagaaagagattgcgcaggcgcggagcagccgacgtggccgcaggggaccgtgcctggggggggtctgcgcggggccgctgactcgcgaggttctctgtcgcctgccgccctcgctccttttctccccttctagagtgttacggtgactcttgggtccgaaggggacggacgtcctcccacgtaccatttagaaggtcagagtgggcagaacctagtctgagcag

SEQ ID NO: 364293 - DNA, 3821 bp, Homo sapiens
tgaggggataatcagcctttattgtctctcgtgcactgtgcccagcgctccctctagcggctacaagcgctcactgcccacactctctactaggctctccggaggcctcggtttcgctggagagaaagagattgcgcaggcgcggagcagccgacgtggccgcaggggaccgtgcctggggggggtctgcgcggggccgctgactcgcgaggttctctgtcgcctgccgccctcgctccttttctccccttctagagtgttacggtgactcttgggtccgaaggggacggacgtcctcccacgtaccatttagaagaaatggagcaagagccacaaaatggagaacctgctgaaattaagatcatcagagaagcatataagaaggcctttttatttgttaacaaaggtctgaatacagatgaattaggtcagaaggaagaagcaaagaactactataagcaaggaataggacacctgctcagagggatcagcatttcatcaaaagagtctgaacacacaggtcctgggtgggaatctgctagacagatgcaacagaaaatgaaagaaactctacagaatgtacgcaccaggctggaaattctagagaagggtcttgccacttctctgcagaatgatcttcaggaggtgcccaagttatatccagaatttccacctaaagacatgtgtgaaaaattaccagagcctcagtcttttagttcagctcctcagcatgctgaagtaaatggaaacacctcaactccaagtgcaggggcagttgctgcacctgcttctctgtctttaccatcacaaagttgtccagcagaagctcctcctgcttatactcctcaagctgctgaaggtcactacactgtatcctatggaacagattctggggagttttcatcagttggagaggagttttataggaatcattctcagccaccgcctcttgagaccttagggctggatgcagatgaattgattttgataccaaatggagtacagattttttttgtaaatcctgcaggggaggttagtgcaccttcgtatcctgggtaccttcgaattgtgaggtttttggataattctctcgatacggttctaaaccgtcctcccgggtttcttcaggtttgtgactggttatatcctctagttcctgatagatctccggttctgaaatgtactgcgggagcctacatgtttcctgatacaatgctacaagcagcaggatgctttgtgggggtcgtcctgtcctctgagttaccagaggatgatagagagctctttgaggatctgttaaggcaaatgtctgaccttcggctccaggccaactggaacagagcagaagaagaaaatgaattccaaatccctggaagaactagaccctcctctgaccaactaaaagaagcctctggcactgatgtgaaacagttggaccaaggcaataaggatgtacgtcataaaggaaaacgtggaaaaagggctaaagatacttcaagtgaagaagttaacctgagtcacattgtaccatgtgagccagttccagaagaaaagccaaaagaattacctgaatggagtgaaaaagtggctcacaacattttgtcaggtgcttcctgggtgagttggggtttagtcaaaggtgctgagattactggtaaggcaatccagaaaggtgcttctaaactccgagagcggattcaaccagaagaaaaacccgtggaagttagtccagctgtcaccaagggactttatatagcgaagcaagctacaggaggagcagcaaaagtcagtcagttcctggttgatggagtttgcactgtagcaaattgcgttggaaaagaactagctccacatgtcaagaagcatggaagcaaacttgttccagaatctcttaaaaaagacaaagatgggaaatctcctctggatggtgctatggttgtagcagcaagtagtgttcaaggattttcaactgtctggcaaggattggaatgtgcagctaaatgcatcgttaacaatgtttcagcagaaactgtacaaactgtcagatacaaatacggatataatgcaggagaagctacccaccatgcggtggattctgcggtcaatgttggcgtaactgcctacaatattaacaacattggtatcaaagcaatggtgaagaaaactgcaacacaaacaggacacactctccttgaggactatcagatagttgataattctcagagggaaaatcaagaaggagcagcaaatgtcaacgtgagaggggagaaggatgagcagacgaaggaagtaaaggaggcaaagaagaaagataaatgatgaagtgctgggaatcacttataccaaagccttatgaaatggatgaaattttgttaaataggcaaatgtggaattcctcacagattaaccagtattttttaaatgtattcattcctacaaattaactttcataaattttatggcatgtcttctatttaaaaggaaaagaataagtattcttgcatctggccttagaaatgtgaagttatattctcaagtttatttttttccaagtgtagctaaaatatttttgcaggtaaaataaagctgatagtacatgtgttgttcaaaccttgttaaacctaatattgaactatttttatatctgctgtctttcagaaggcaaataggaaactatatatttgcttaaaaattggcatttagtaaccttaattctttttatagaaggaatgacttaaagtattgtcccctctttttgcactaattgtggatttttttagatgcttctcaaaattttcagtgtgtaagctaaacaaaaactaaaactaagaattctcaaaaaaacttgttcaaaacagggaaagactgatgaaaagtaaaatggactacttttgtaacttacctgtttgttaggaaatggaatggtctctttgatttaaaatgaataaaaatagattattacgtcttttgtattgagactgtattgttatgagcctaggaaatttgggaacatgattgtattgtattaaaattcgaagtgattattatcagcttaattggattaaaaaagtacttcaagaaattattttatcatatctgcttctgtttttccaaaaggttaaaacttgtaaaaaaaatatatataaacaattgagtttactaatggtaaacatttttattctgggattcggtcattggaatttatattaaaagacaagttattaaaaaggaaaggttctattcataatcagggtaaagaatatgaaaaccttagacgtaatccatggtggataggcattatggtttccactttggcagaaggcagactattcacagccctatttacttacataggctaaaaaactatgtaactaaatacctaatggtatttaatttttgtttattgaatttaagagattggtattagttttcatagctgtagtccattctaataatttctgatcttctagtggctacttaattagacattatttgaagctgtctgaagaatgcactttatgaattaaaaaactgaattgcctgacctcgttatcacatgagcttatattttgggaacacatagaactgatggaggcttttcctaaggccaaggataatgtactagttgttaaaatggaaataaaagtgaagtggtaaatagcttacagacagtctatgctttgtttaagaaatggaatggcacttcatatattctcatttgtgggagctaaaaattacaataatcaaacttaaggagatagagagtagaatgatggttaccagaggctgggaggcattgaagggatggggagggaagtgag

SEQ ID NO: 364294 - DNA, 3759 bp, Homo sapiens
gcggcggcggcgtgctgcgggctctgtggcgggagcgaggccgacgggcggggccgcgcggccgcgtgacgcgaagcgttcgagagcgcgcgtcgtggaacgtcttggttgccacggcaagcgcgcgcgcgaggccttgggaacctcgggaccggcccccggcgagcgcagcggcgcccagtagtcatcttagtgggatttggggaagcaacagggctgtgtggggtaacctgccacctttaagtggaaatcagaaatggagcaagagccacaaaatggagaacctgctgaaattaagatcatcagagaagcatataagaaggcctttttatttgttaacaaaggtctgaatacagatgaattaggtcagaaggaagaagcaaagaactactataagcaaggaataggacacctgctcagagggatcagcatttcatcaaaagagtctgaacacacaggtcctgggtgggaatctgctagacagatgcaacagaaaatgaaagaaactctacagaatgtacgcaccaggctggaaattctagagaagggtcttgccacttctctgcagaatgatcttcaggaggtgcccaagttatatccagaatttccacctaaagacatgtgtgaaaaattaccagagcctcagtcttttagttcagctcctcagcatgctgaagtaaatggaaacacctcaactccaagtgcaggggcagttgctgcacctgcttctctgtctttaccatcacaaagttgtccagcagaagctcctcctgcttatactcctcaagctgctgaaggtcactacactgtatcctatggaacagattctggggagttttcatcagttggagaggagttttataggaatcattctcagccaccgcctcttgagaccttagggctggatgcagatgaattgattttgataccaaatggagtacagattttttttgtaaatcctgcaggggaggttagtgcaccttcgtatcctgggtaccttcgaattgtgaggtttttggataattctctcgatacggttctaaaccgtcctcccgggtttcttcaggtttgtgactggttatatcctctagttcctgatagatctccggttctgaaatgtactgcgggagcctacatgtttcctgatacaatgctacaagcagcaggatgctttgtgggggtcgtcctgtcctctgagttaccagaggatgatagagagctctttgaggatctgttaaggcaaatgtctgaccttcggctccaggccaactggaacagagcagaagaagaaaatgaattccaaatccctggaagaactagaccctcctctgaccaactaaaagaagcctctggcactgatgtgaaacagttggaccaaggcaataaggatgtacgtcataaaggaaaacgtggaaaaagggctaaagatacttcaagtgaagaagttaacctgagtcacattgtaccatgtgagccagttccagaagaaaagccaaaagaattacctgaatggagtgaaaaagtggctcacaacattttgtcaggtgcttcctgggtgagttggggtttagtcaaaggtgctgagattactggtaaggcaatccagaaaggtgcttctaaactccgagagcggattcaaccagaagaaaaacccgtggaagttagtccagctgtcaccaagggactttatatagcgaagcaagctacaggaggagcagcaaaagtcagtcagttcctggttgatggagtttgcactgtagcaaattgcgttggaaaagaactagctccacatgtcaagaagcatggaagcaaacttgttccagaatctcttaaaaaagacaaagatgggaaatctcctctggatggtgctatggttgtagcagcaagtagtgttcaaggattttcaactgtctggcaaggattggaatgtgcagctaaatgcatcgttaacaatgtttcagcagaaactgtacaaactgtcagatacaaatacggatataatgcaggagaagctacccaccatgcggtggattctgcggtcaatgttggcgtaactgcctacaatattaacaacattggtatcaaagcaatggtgaagaaaactgcaacacaaacaggacacactctccttgaggactatcagatagttgataattctcagagggaaaatcaagaaggagcagcaaatgtcaacgtgagaggggagaaggatgagcagacgaaggaagtaaaggaggcaaagaagaaagataaatgatgaagtgctgggaatcacttataccaaagccttatgaaatggatgaaattttgttaaataggcaaatgtggaattcctcacagattaaccagtattttttaaatgtattcattcctacaaattaactttcataaattttatggcatgtcttctatttaaaaggaaaagaataagtattcttgcatctggccttagaaatgtgaagttatattctcaagtttatttttttccaagtgtagctaaaatatttttgcaggtaaaataaagctgatagtacatgtgttgttcaaaccttgttaaacctaatattgaactatttttatatctgctgtctttcagaaggcaaataggaaactatatatttgcttaaaaattggcatttagtaaccttaattctttttatagaaggaatgacttaaagtattgtcccctctttttgcactaattgtggatttttttagatgcttctcaaaattttcagtgtgtaagctaaacaaaaactaaaactaagaattctcaaaaaaacttgttcaaaacagggaaagactgatgaaaagtaaaatggactacttttgtaacttacctgtttgttaggaaatggaatggtctctttgatttaaaatgaataaaaatagattattacgtcttttgtattgagactgtattgttatgagcctaggaaatttgggaacatgattgtattgtattaaaattcgaagtgattattatcagcttaattggattaaaaaagtacttcaagaaattattttatcatatctgcttctgtttttccaaaaggttaaaacttgtaaaaaaaatatatataaacaattgagtttactaatggtaaacatttttattctgggattcggtcattggaatttatattaaaagacaagttattaaaaaggaaaggttctattcataatcagggtaaagaatatgaaaaccttagacgtaatccatggtggataggcattatggtttccactttggcagaaggcagactattcacagccctatttacttacataggctaaaaaactatgtaactaaatacctaatggtatttaatttttgtttattgaatttaagagattggtattagttttcatagctgtagtccattctaataatttctgatcttctagtggctacttaattagacattatttgaagctgtctgaagaatgcactttatgaattaaaaaactgaattgcctgacctcgttatcacatgagcttatattttgggaacacatagaactgatggaggcttttcctaaggccaaggataatgtactagttgttaaaatggaaataaaagtgaagtggtaaatagcttacagacagtctatgctttgtttaagaaatggaatggcacttcatatattctcatttgtgggagctaaaaattacaataatcaaacttaaggagatagagagtagaatgatggttaccagaggctgggaggcattgaagggatggggagggaagtgag

SEQ ID NO: 364295 - DNA, 3373 bp, Homo sapiens
gcggcggcggcgtgctgcgggctctgtggcgggagcgaggccgacgggcggggccgcgcggccgcgtgacgcgaagcgttcgagagcgcgcgtcgtggaacgtcttggttgccacggcaagcgcgcgcgcgaggccttgggaacctcgggaccggcccccggcgagcgcagcggcgcccagtgtaagggagtgggagctggtccgtgccgcggcggccgcgcagggagctctcgaggcaacgccggggcgcccgaggtctggaaggcgcagaaatggagcaagagccacaaaatggagaacctgctgaaattaagatcatcagagaagcatataagaaggcctttttatttgttaacaaaggtctgaatacagatgaattaggtcagaaggaagaagcaaagaactactataagcaaggaataggacacctgctcagagggatcagcatttcatcaaaagagtctgaacacacaggtcctgggtgggaatctgctagacagatgcaacagaaaatgaaagaaactctacagaatgtacgcaccaggctggaaattctagagaagggtcttgccacttctctgcagaatgatcttcaggaggtgcccaagttatatccagaatttccacctaaagacatgtgtgaaaaattaccagagcctcagtcttttagttcagctcctcagcatgctgaagtaaatggaaacacctcaactccaagtgcaggggcagttgctgcacctgcttctctgtctttaccatcacaaagttgtccagcagaagctcctcctgcttatactcctcaagctgctgaaggtcactacactgtatcctatggaacagattctggggagttttcatcagttggagaggagttttataggaatcattctcagccaccgcctcttgagaccttagggctggatgcagatgaattgattttgataccaaatggagtacagattttttttgtaaatcctgcaggggaggttagtgcaccttcgtatcctgggtaccttcgaattgtgaggtttttggataattctctcgatacggttctaaaccgtcctcccgggtttcttcaggtttgtgactggttatatcctctagttcctgatagatctccggttctgaaatgtactgcgggagcctacatgtttcctgatacaatgctacaagcagcaggatgctttgtgggggtcgtcctgtcctctgagttaccagaggatgatagagagctctttgaggatctgttaaggcaaatgtctgaccttcggctccaggccaactggaacagagcagaagaagaaaatgaattccaaatccctggaagaactagaccctcctctgaccaactaaaagaagcctctggcactgatgtgaaacagttggaccaaggcaataaggatgtacgtcataaaggaaaacgtggaaaaagggctaaagatacttcaagtgaagaagttaacctgagtcacattgtaccatgtgagccagttccagaagaaaagccaaaagaattacctgaatggagtgaaaaagtggctcacaacattttgtcaggtgcttcctgggtgagttggggtttagtcaaaggtgctgagattactggtaaggcaatccagaaaggtgcttctaaactccgagagcggattcaaccagaagaaaaacccgtggaagttagtccagctgtcaccaagggactttatatagcgaagcaagctacaggaggagcagcaaaagtcagtcagttcctggttgatggagtttgcactgtagcaaattgcgttggaaaagaactagctccacatgtcaagaagcatggaagcaaacttgttccagaatctcttaaaaaagacaaagatgggaaatctcctctggatggtgctatggttgtagcagcaagtagtgttcaaggattttcaactgtctggcaaggattggaatgtgcagctaaatgcatcgttaacaatgtttcagcagaaactgtacaaactgtcagatacaaatacggatataatgcaggagaagctacccaccatgcggtggattctgcggtcaatgttggcgtaactgcctacaatattaacaacattggtatcaaagcaatggtgaagaaaactgcaacacaaacaggacacactctccttgaggactatcagatagttgataattctcagagggaaaatcaagaaggagcagcaaatgtcaacgtgagaggggagaaggatgagcagacgaaggaagtaaaggaggcaaagaagaaagataaatgatgaagtgctgggaatcacttataccaaagccttatgaaatggatgaaattttgttaaataggcaaatgtggaattcctcacagattaaccagtattttttaaatgtattcattcctacaaattaactttcataaattttatggcatgtcttctatttaaaaggaaaagaataagtattcttgcatctggccttagaaatgtgaagttatattctcaagtttatttttttccaagtgtagctaaaatatttttgcaggtaaaataaagctgatagtacatgtgttgttcaaaccttgttaaacctaatattgaactatttttatatctgctgtctttcagaaggcaaataggaaactatatatttgcttaaaaattggcatttagtaaccttaattctttttatagaaggaatgacttaaagtattgtcccctctttttgcactaattgtggatttttttagatgcttctcaaaattttcagtgtgtaagctaaacaaaaactaaaactaagaattctcaaaaaaacttgttcaaaacagggaaagactgatgaaaagtaaaatggactacttttgtaacttacctgtttgttaggaaatggaatggtctctttgatttaaaatgaataaaaatagattattacgtcttttgtattgagactgtattgttatgagcctaggaaatttgggaacatgattgtattgtattaaaattcgaagtgattattatcagcttaattggattaaaaaagtacttctaacaaaaacaacacaaaagcacaacaaaaaacagtgtgttgggacggactatggaccccgtcgaaaaaaacctttttaaaaaccaaatgcgtatgggaccaggggagcccaagagcgtctagtcgaactggggacacaaagggtccccgaaggagaacaccccgagcccaagcaaccacaaggtccgagagagctccacaacgcgaattaaaaaaaggccccgcgggagaaacaagaagacgtctcggaaaacaatcccccagacgggagatctcgagggcaaaacgggggaatctcacacaccagcggtctacacagggaagctcggacaaaaaaataac

SEQ ID NO: 364296 - DNA, 2350 bp, Homo sapiens
ttaaattttcttttaaaaaggtgcttcctgggtgagttggggtttagtcaaaggtgctgagattactggtaaggcaatccagaaaggtgcttctaaactccgagagcggattcaaccagaagaaaaacccgtggaagttagtccagctgtcaccaagggactttatatagcgaagcaagctacaggaggagcagcaaaagtcagtcagttcctggtgagacctgcggaccagcaacatcacatcgtcctatctggaatccttagaaatgcagaattttagggacagacacacctactgattcagaatctgcattttcacaagatccctagttgatggagtttgcactgtagcaaattgcgttggaaaagaactagctccacatgtcaagaagcatggaagcaaacttgttccagaatctcttaaaaaagacaaagatgggaaatctcctctggatggtgctatggttgtagcagcaagtagtgttcaaggattttcaactgtctggcaaggattggaatgtgcagctaaatgcatcgttaacaatgtttcagcagaaactgtacaaactgtcagatacaaatacggatataatgcaggagaagctacccaccatgcggtggattctgcggtcaatgttggcgtaactgcctacaatattaacaacattggtatcaaagcaatggtgaagaaaactgcaacacaaacaggacacactctccttgaggactatcagatagttgataattctcagagggaaaatcaagaaggagcagcaaatgtcaacgtgagaggggagaaggatgagcagacgaaggaagtaaaggaggcaaagaagaaagataaatgatgaagtgctgggaatcacttataccaaagccttatgaaatggatgaaattttgttaaataggcaaatgtggaattcctcacagattaaccagtattttttaaatgtattcattcctacaaattaactttcataaattttatggcatgtcttctatttaaaaggaaaagaataagtattcttgcatctggccttagaaatgtgaagttatattctcaagtttatttttttccaagtgtagctaaaatatttttgcaggtaaaataaagctgatagtacatgtgttgttcaaaccttgttaaacctaatattgaactatttttatatctgctgtctttcagaaggcaaataggaaactatatatttgcttaaaaattggcatttagtaaccttaattctttttatagaaggaatgacttaaagtattgtcccctctttttgcactaattgtggatttttttagatgcttctcaaaattttcagtgtgtaagctaaacaaaaactaaaactaagaattctcaaaaaaacttgttcaaaacagggaaagactgatgaaaagtaaaatggactacttttgtaacttacctgtttgttaggaaatggaatggtctctttgatttaaaatgaataaaaatagattattacgtcttttgtattgagactgtattgttatgagcctaggaaatttgggaacatgattgtattgtattaaaattcgaagtgattattatcagcttaattggattaaaaaagtacttcaagaaattattttatcatatctgcttctgtttttccaaaaggttaaaacttgtaaaaaaaatatatataaacaattgagtttactaatggtaaacatttttattctgggattcggtcattggaatttatattaaaagacaagttattaaaaaggaaaggttctattcataatcagggtaaagaatatgaaaaccttagacgtaatccatggtggataggcattatggtttccactttggcagaaggcagactattcacagccctatttacttacataggctaaaaaactatgtaactaaatacctaatggtatttaatttttgtttattgaatttaagagattggtattagttttcatagctgtagtccattctaataatttctgatcttctagtggctacttaattagacattatttgaagctgtctgaagaatgcactttatgaattaaaaaactgaattgcctgacctcgttatcacatgagcttatattttgggaacacatagaactgatggaggcttttcctaaggccaaggataatgtactagttgttaaaatggaaataaaagtgaagtggtaaatagcttacagacagtctatgctttgtttaagaaatggaatggcacttcatatattctcatttgtgggagctaaaaattacaataatcaaacttaaggagatagagagtagaatgatggttaccagaggctgggaggcattgaagggatggggagggaagtgag

SEQ ID NO: 364297 - DNA, 2228 bp, Homo sapiens
  misc_feature (1773)..(1773): n is a, c, g, or t
gcggcggcggcgtgctgcgggctctgtggcgggagcgaggccgacgggcggggccgcgcggccgcgtgacgcgaagcgttcgagagcgcgcgtcgtggaacgtcttggttgccacggcaagcgcgcgcgcgaggccttgggaacctcgggaccggcccccggcgagcgcagcggcgcccagtgtaagggagtgggagctggtccgtgccgcggcggccgcgcagggagctctcgaggcaacgccggggcgcccgaggtctggaaggcgcagaaatggagcaagagccacaaaatggagaacctgctgaaattaagatcatcagagaagcatataagaaggcctttttatttgttaacaaaggtctgaatacagatgaattaggtcagaaggaagaagcaaagaactactataagcaaggaataggacacctgctcagagggatcagcatttcatcaaaagagtctgaacacacaggtcctgggtgggaatctgctagacagatgcaacagaaaatgaaagaaactctacagaatgtacgcaccaggctggaaattctagagaagggtcttgccacttctctgcagaatgatcttcaggaggtgcccaagttatatccagaatttccacctaaagacatgtgtgaaaaattaccagagcctcagtcttttagttcagctcctcagcatgctgaagtaaatggaaacacctcaactccaagtgcaggggcagttgctgcacctgcttctctgtctttaccatcacaaagttgtccagcagaagctcctcctgcttatactcctcaagctgctgaaggtcactacactgtatcctatggaacagattctggggagttttcatcagttggagaggagttttataggaatcattctcagccaccgcctcttgagaccttagggctggatgcagatgaattgattttgataccaaatggagtacagattttttttgtaaatcctgcaggggaggttagtgcaccttcgtatcctgggtaccttcgaattgtgaggtttttggataattctctcgatacggttctaaaccgtcctcccgggtttcttcaggtttgtgactggttatatcctctagttcctgatagatctccggttctgaaatgtactgcgggagcctacatgtttcctgatacaatgctacaagcagcaggatgctttgtgggggtcgtcctgtcctctgagttaccagaggatgatagagagctctttgaggatctgttaaggcaaatgtctgaccttcggctccaggccaactggaacagagcagaagaagaaaatgaattccaaatccctggaagaactagaccctcctctgaccaactaaaagaagcctctggcactgatgtgaaacagttggaccaaggcaataaggatgtacgtcataaaggaaaacgtggaaaaagggctaaagatacttcaagtgaagaagttaacctgagtcacattgtaccatgtgagccagttccagaagaaaagccaaaagaattacctgaatggagtgaaaaagtggctcacaacattttgtcaggtattacagtaatgttaatttttttccctgtatgacattaagcctttggaaccaaataaagatattgtttattagggaatactgagaaagataatattttgtattttggttttaaatgatcaatttagaaataaatgtagaaggaactagtcttttgaaacatcagatattgtcatataagtataaattcttcctggcctattattctgttntactattgggaaaatggatagtgaaaagcttcaggaatcttcaaattcttaatagttctgaatctaaaattagttatgttcgtttcccctttgaagctccctcttaacctccccctacccctgtccctcagctgtggtctgaatgtgtcccttcaaaattcatatattgaaatcctaacccctgaggtgatggttttaggaggtggggcctttggaaggtgattaggtcatgagggaggagccctcatcaatgggattagtcccttataaaagagatcccaaagagctgccttgtccctttcactatgtgaggaagcagtaagaaggtgtcattctatgaaccaggaagtgggcccctcaccagagaccaaatgtaccagcaccttagtcttgtacttcccagcctctagaattgtgagaaataaatttttgttgttaataagctactagtttat

SEQ ID NO: 364298 - DNA, 500 bp, Homo sapiens
cacagccatgagcctcggcgtttattccttcctctctggagtgccttcccctactacagagatttgaaagcttgaactacatttcccacagccctttgcagtcagggtcctggttacaaaatcagttctgtaagagaagcacttacatgacgttagaagacagaaggcaaacaggaaagaccagtgtccagcctcctgctccagtcgcagcagtggctggattcagcatccccatggccagccatcagctttctgtgtcaaaaggcagctgtctctacgactgaggatttaggcccacgggcactggcagctccctaatcccatcttcccgattccctgggtcacagctatgacaacgtgttcctggagttaatttcctgttccttggtattctggtagtcattcctggagacccagactggaattgagccatcagcctcttcagatgattttgtaaatctttaagtgcctgtattaaatcccttcctgcttaaagtacc

SEQ ID NO: 364299 - DNA, 2400 bp, Homo sapiens
  misc_feature (1644)..(1644): n is a, c, g, or t
tcctttgtcaaagatcagttgaccatatttatatggatctatttctgggctctctgttctgttgcattgctctctatctgttgtccttcctttcactgctaccatactgtctttgattcctatagctttacagttagtcttgaagtcacaaaagcatgggatcccccattagtggatcgtcctggaatttttaactctcagatttgtacacacctagccttcagcaatttgtgaattacagttcagattttcctaccctagcactggttcccaaagaggtttctgttaaagtatgttgtgattctctccatctacgactttctcttcctatttttgggacagaggtttgtcttgtgacctcacttctcttacagatctaagagtaatggttgatttttcagtttgttcaactttttacttgttaggatagagtggtgacttccaagcttcatgcagaaccggacaacagaaattgagagggaaatttctatgacagaagagagaaagaagaaaattgctggaataatgaccttgaatagaggaaatgggatatcatctggtaagcaaatagagaagctggctttagataagagcctggacaattcattcatagaatagcagaaaaggcagaatttatgtccatagatgcaagtggtatagtagatatagtgatgggagtttgtaaaagttaccttctaattgctattttttttaatgaaataagaaacaaagtcatcaactcaaagtgagtaatatgtaggaggtgattattgtttgaggagagaggagaatgtgtgatatcttttgttaattatggtaaaatataacacaaaatttgccattttaaccattttaagtggacaattaagtgtcattaattacattcacactgttgtacatctgccaccactatcttcttctaaaactttttatcacctcttatagtttaaattgtgcccccacagaagatatgttggagtcctatcccttaatattaatgtgaccttatttggagataggatctttataaaggtattcaaattaacatgagatcattagggtggaatcctaatccaatatgattagtgtccttataaaaaggggaaatttggacacagaggcaagcacacagggagagtgccaagtgaagatgaagaaaaagatcagagtgatacaaagaagtcaaagaacaccaaagattgccaacaaaccaccagaagctaggagaaaggcctgaaacatatccttcccgcatgccttcagagggagcgtgggcctgcagacactttgatctcagacttctaccctatggaactgtgcaaaaataaatgtctgttgtttaagccattcagtttgtgttacagcacaaatgtattctatttagaatacatcattctaaatagaaattttttaataattaagtattttcctctccttggagcacttggtaacttctaattctactttctatctctattaatttgcctattctagatatatcaaatgagtgaaataatacaatagttgtctttttgtgtctggcttcttttactttgcataatgttttcaaggttcattcatgttgtagcatgtatctgaacttcattctttttctggctgaaaattttattatatgtatgtatnacattttgtgtctctattcatcacttgatggatatttggatagatttaagtcatttgtcttttgtgaatagtgctattaatattatgaacacttgagtacaagtttttgtttaaatacctcttttcttttttcttggatgtattatctaggtgaagaatggcaagatcatatggtaattctatttagctttttgaggaactgccaaacctttccacaatgactgcacaattatacatttccagtagggttccagtttatccatattctcaccaatgcttttatttttctgttttttaaaattatactgatcataggaggtgtaaagcagtatttcagtttggttttgatttgcatttccctaatgattaatgatgttgagaatcctttcacatgcttattgaccatttttatgtcattttgggaaaatatttattcacatttttgcccattttttagttgggttgtctttttttgctgttgagttgtaggagttctttatattttctggatattaaaccctcatcagataaattatttgcaaatgttttcttccattctgttaattttcttaatgttgtcttttgatgcacattgtaaaaatttttaaaatcaatttccattttcttatttttttattattatgctttaagttctgggatacatgtgcagagcgtgcaggtttgttacataggtatatacgtgccatggtggtttgctgcacccatcaacccatcatctacattaggcgtttctcc

SEQ ID NO: 364300 - DNA, 931 bp, Homo sapiens
ctggaaacccatgttgcatttcagttcaggaaagaatggtaggcttggtggggggagctcccgcaaaaggggaactaatacagaaacactctggtatttgtctgcctctcttgttccagcgccgttttccctatatccggaattcgtccctgcgcattccaatacctgaagcggccacagggtacaggacagggagccctccgacagaaaagagtcgcggcgctaaacaaagcctgatatcactccgcttccataagccggatccccataaactacgctctagctcctcccactgccgttgtgggtaacgcggacgtggaagaacctcgtctgcggaggaaaaggtagatgttaaatggtaactacgcgcgaggttctgaggagccctgggaacaggaaggagaaaagaataccaaaagtgacaacagtttgccaatcgcagtctttaatctgataaagcggttatctcgtcttgagtcccaggtgccgagtcaatccccatacacagccgccgccattgcctcgagtccttgtgtctgactgtctgttcctgctgctgtatgacacagcacctcgaggcaaggaaataagaaaactgcctctgatccaagcagagaaggcagagaagcagtgagaaggtgcgcatcgcttgggggtggatgtgggtatcagaggtgaacactggatacgcgacctggtcatgggaggcgggcggtgagaaggagagagagatgggtaattggaatggcacacaacaattaaaaaaaaatgatctaccttttgctagcttgatttccatacactcggttcacctcagaccatgcttgggaagaaaaaggttgcagcttctagcagggaaaaggcagactagatgaggaagagagggctacttccacaggcgaggacagttgtctggggagccctgagaggg

SEQ ID NO: 364301 - DNA, 2903 bp, Homo sapiens
gtctctgtttttgtgaatccctgtaggtagatctgtccccaggtctgtggaactgtcagttgtgaagttttgtaaaatggtcacccaacttaaaactaggaaattacgaagaagagaaaattgccctgtatctgttaaggttggtgtaaaggtacagggacaggggggcaacttcgactagagaattccatctcttctgttttgtcattttaccaattattcccatctgccccaccccctgctgctgctgatttagttgggagtcttggtaagttgtgggggtacagaatgctaagctgcctttcccactctccactgcttgtcctgctctcacgcttgaacctagtctaatctgaacgagggacattctagggcaatcactgaagaggaagatggtgggcaataggaaggaggaggaggagtagccctgaaacaaagcagtgggggagaggggataggaggagggaaacactagacaaaatctggaaaggcaagaataagggcaagggaccaaggtctgtcaccaggagatcagtttccacattctcctgtttgtttatttgtccataggtctgcctgtagatctgctgtagggcttgtcaccattggaagcaaggtcctacttcagtggcagatctggtggccttggagtggctgaagaccaccaccctccacagggctgggcccatgcacagccatccttccctaccttgagtgagcttcctctgcatgttttctatatcactggcagagcctgtagttggaaaggggacagagtgactactggactttgtgtgaaaacaccaaccgggacaaaacttcagtcaaggctgagacgggtgggggtatataacttgtccttacgttaaacttggaacatggttgactctgggacagaagcaagggctagaggaaaggctgaggctggcctgcaagatggaatcagtggtcctgccactgctagagtgaatggtaaaacccaggccgaggcagtggctgaggcagaactgaaaacagaatcagtgacccaggccaaagctggtgatggagcaatgaccaggacacatacagtgacctacagggaggctatggctgtgacaagggaagtgatcaaggtggaagatacaactaagactagagtcatggttgagactaagacaaaacccctggcagaacgcagtatagtgccacaaaccaagtcaaaggccatgcctatgtctagggtcagtactgtaaccaagtctgaagtcaaggttgttgctgtcattgaggcaaatattaggtcctatgccaagtcacatgataaggccaatactgggtccagacctgacagaagggaagagaccagcattgggatgaaatccagtgatgaggatgaagaaaatatatgctcctggttctggactggagaagagcctagtgtagggtcctggttctggcctgaagaagagacctctcttcaagtttataagcccctacctaagatccaggaaaagcccaagcccacacacaaacccacacttactataaaacaaaaggtaatagcatggtcaagggccaggtatattgtcctagttccagttgaaggaggggagcaatccttgcctccagaaggaaactggaccctggttgagaccttgattgaaactcctctggggattcgacctttgaccaagatcccaccttatcatgggccttattaccagaccttagctgagatcaaaaaacagattaggcaaagggaaaagtatgggcctaatccgaaggcctgccactgcaaatcacgtggctttagtttagagcctaaagagtttgataaacttgttgccctccttaagttaactaaggatcctttcattcatgaaatagctacaatgataatgggcatcagtcctgcttatccatttactcaagatataattcatgatgtaggtattactgttatgattgaaaacttggtcaataatcccaatgttaaagaacaccctggagctttaagtatggtggatgacagctctgagtcttccgaagaaccaaaatcaggggagtcatatatacatcaagtttgtaaaggcataatctcttgccccttgaactcccctgtgcagctggctggactgaaattactagggcacttgagtataaaatttgaagatcactatgtgattaccagttatattccagatttcctcaccttgttaaacaagggaagtgtcaaaaccaagttttatgttttaaaagtgttttcgtgtttgtctaaaaatcacgccaatacaagagaattgatcagtgccaaagtactgtcatcattggttgcaccctttaacaagaatgagtcaaaggccaatattcttaatattattgaaatatttgagaatataaattttcagttcaaaacaaaggcaaagctatttaccaaggaaaagttcactaaatctgagcttatttcaatattccaggaagcaaaacagtttggtcagaaactccaagacttagcagagcacagtgatcccgaagtgagagataaagtcatacgattaatactaaaactctgaatacccctctgttctcataaagcctcaaacagttttttggagttgcaatatgaaaccaatgcatattgtaattataaattcaatacttatgttttccatgttgattgagggaggcaattttatggataccaattaatcttgagatcctgaacatgtgctgatttttattgtgctatatagtatataaattgagatatttttggtatttctgcaacgtgacctgataatgaatctattcatcctgagtaagctatacttctgtgctttatattgatatgtgtattcttttgagattttatttacatgttgttaataaagttgcatgctaaaactggtgaaaaaattgtc

SEQ ID NO: 364302 - DNA, 3606 bp, Homo sapiens
agcgggttttcttgccgcatcctgcgcagcccctgcctactttggtgcagaggcgtggggggcgggacgcgtctttcccgttcggatcgcggggaaagcagtggctccaagtgagccagaggagagctgaggagaggagggggaggccgacgacctgggccctgggcctctgaaggtctggcgtattctgacaggacacagtgagcgtctgtagaggagaggcttgaaataaaggagcacgaatattgcctggatttctggaggcctactttaaggctggccaattctgcaagaaaggcaaggaggaggagactggctcacagctctggaggacccccttctgtcagctgtggggcttgacaccacttgaacaagaaaaggagggggaaactgcaccacatcagtgaagatccacctccagtggctgctctgctggtggtggagttgctgctgacaaccaccctcaacgggtctgcacccatccaggaaatatctgtcttcctttagcttggttgtacctgttctcactctatctgtattattgaattattgactgagactgtgtttgggaaggaggctgagtgactactggactggatattgactctaactcttattcccaagcttatatccttaatcacctaaagatcagagtgtgaagaaacaaacctgtgacagatctgtggttgaggtttagactacgggaggagtatattacctgactttctttgtaacttgtaccatgactggggcagagattgagcctagtgcccaggccaagcctgaaaagaaggctggggaagaggttatcgctgggcctgagagagagaatgatgtccctctggtggtcagacccaaggttaggacccaggcaactactggggcaaggcccaaaactgagaccaagtctgtgcctgcggcaaggcccaaaactgaggcccaagcaatgtctggggcaaggcccaaaactgaggtccaagtaatgggtggtgcaagacccaaaacggaggctcaaggaatcacaggggccaggcccaaaaccgatgccagggcagtaggtggcgctcgttctaaaactgatgccaaggcaatccctggagcaaggcccaaggatgaggcccaggcatgggcccagagtgaatttgggactgaagcagtgtcacaggcagaaggagtgtcccagactaatgccgttgcttggccactggccactgctgagtctggatcagttactaaatctaagggcctgtctatggatagagaactagtcaatgtggatgctgaaacctttcctggcacccagggtcagaaaggaatccagccctggtttggaccaggggaggagactaatatggggtcttggtgctattccaggcccagggccagagaggaggcctctaatgagtctgggttctggtcagcagatgagacctctacagcgtcttctttctggactggagaagagacaagtgtcagatcatggcccagggaagagtccaataccaggtccaggcacagggctaaacatcagactaatcccaggtccaggcccagatccaagcaagaagcctatgttgattcctggtctggatctgaggatgaggccagcaacccattctccttctgggttggagaaaataccaataacttgttcaggcccagagtcagggaggaggcaaatatcaggtccaagctcaggacaaatagagaagattgttttgaatctgagtctgaagatgagttctataagcagtcctgggttttgcctggagaagaggccaatagtagattcaggcacagagacaaagaagatcctaatactgccttgaaactcagggcccagaaagatgttgacagtgatagggtcaaacaagaacccaggtttgaggaggaagtcattattgggtcctggttctgggcagaaaaagaggccagtttggagggtggagcttcagcaatctgtgaatctgagccaggaactgaggagggggccattggcggatccgcgtactgggctgaggaaaagtccagtttgggggctgtggccagagaagaggccaagccggagtctgaagaagaggccatatttgggtcctggttctgggacagagatgaggcctgctttgacctaaatccctgtcctgtgtacaaggtcagtgataggttcagagatgcagctgaggagcttaatgcatcctccaggccccaaacctgggacgaggtcactgttgaattcaaacctggtctttttcatggggttggcttccgatccacaagcccctttggaattcccgaagaggcttctgaaatgcttgaggcaaagcccaagaacctggaacttagcccagaaggagaagagcaggaatctttgcttcagcctgatcagcctagtcctgagttcacatttcagtatgatccttcctaccggtcagtccgggaaattcgagagcatcttagggccagggagagtgcagagtctgagagttggtcctgcagctgcatacaatgtgagctgaaaattggttctgaagagtttgaagaattccttttattaatggacaaaattcgggatccttttattcatgaaatatctaaaattgcaatgggtatgagaagtgcttctcaatttacccgagatttcattcgagattcaggtgttgtctcacttattgaaaccttgcttaattatccatcctctagagttaggacaagttttttggaaaatatgattcacatggctccaccttatccaaatctaaacatgattgagacattcatatgtcaagtgtgtgaggaaacccttgcacatagtgtggattcccttgagcagctgactggaataaggatgcttagacacctcactatgactattgactatcacacactgattgccaactatatgtccgggtttctctccttattaaccacagccaatgcgagaacgaagtttcacgttctgaaaatgctattgaatttgtctgaaaatcctgctgtggcaaaaaaactattcagtgccaaagctctttcaatatttgtgggtctctttaacatagaagagacaaatgataatattcaaattgttattaaaatgtttcagaatatcagtaacattataaaaagtggaaagatgtccttaattgatgatgatttcagtcttgagccgcttatttctgcatttcgtgaatttgaggagttagctaagcaactacaagcccaaatagacaaccaaaatgatcctgaggtgggacaacaaagttaatatgattaaccacctgccgctgatcagccttatgttcccaaagagccctgagtagtgctttggtgttcacagtctgtttttttgttgtaacttatattttttaatgctgatgttaactttgtcaaactcttgttttgagctggatcattttgtggatgccaaatgaatatcaaaactgaaaacacatttgttgatatttgtcttgctgtccagattgcggtatttttcagtattaagttttcaatgaactgtgtcacctaagtaagctaccctgctattcgttgtttaaatatatggttctctatttgagtctgtgttttcaataaagttctatgttaaaattggca

SEQ ID NO: 364303 - DNA, 4287 bp, Homo sapiens
ctggaaacccatgttgcatttcagttcaggaaagaatggtaggcttggtggggggagctcccgcaaaaggggaactaatacagaaacactctggtatttgtctgcctctcttgttccagcgccgttttccctatatccggaattcgtccctgcgcattccaatacctgaagcggccacagggtacaggacagggagccctccgacagaaaagagtcgcggcgctaaacaaagcctgatatcactccgcttccataagccggatccccataaactacgctctagctcctcccactgccgttgtgggtaacgcggacgtggaagaacctcgtctgcggaggaaaaggtagatgttaaatggtaactacgcgcgaggttctgaggagccctgggaacaggaaggagaaaagaataccaaaagtgacaacagtttgccaatcgcagtctttaatctgataaagcggttatctcgtcttgagtcccaggtgccgagtcaatccccatacacagccgccgccattgcctcgagtccttgtgtctgactgtctgttcctgctgctgtatgacacagcacctcgaggcaaggaaataagaaaactgcctctgatccaagcagagaaggcagagaaggtctgcctgtagatctgctgtagggcttgtcaccattggaagcaaggtcctacttcagtggcagatctggtggccttggagtggctgaagaccaccaccctccacagggctgggcccatgcacagccatccttccctaccttgaaactcctgtagcctgtaataccagctgtgggtactactctcagtgttggagatcatcaaaatacaattggaccagaccctttggaaataattctgtgtctcaaatgccctgtggagcacacacttaatcagttgatggctatggaattttccaacatcagctaaagagaagggcctactttaaggctggccaattctgcaagaaaggcaaggaggaggagactggctcacagctctggaggacccccttctgtcagctgtggggcttgacaccacttgaacaagaaaaggagggggaaactgcaccacatcagtgaagatccacctccagtggctgctctgctggtggtggagttgctgctgacaaccaccctcaacgggtctgcacccatccaggaaatatctgtcttcctttagcttggttgtacctgttctcactctatctgtattattgaattattgactgagactgtgtttgggaaggaggctgagtgactactggactggatattgactctaactcttattcccaagcttatatccttaatcacctaaagatcagagtgtgaagaaacaaacctgtgacagatctgtggttgaggtttagactacgggaggagtatattacctgactttctttgtaacttgtaccatgactggggcagagattgagcctagtgcccaggccaagcctgaaaagaaggctggggaagaggttatcgctgggcctgagagagagaatgatgtccctctggtggtcagacccaaggttaggacccaggcaactactggggcaaggcccaaaactgagaccaagtctgtgcctgcggcaaggcccaaaactgaggcccaagcaatgtctggggcaaggcccaaaactgaggtccaagtaatgggtggtgcaagacccaaaacggaggctcaaggaatcacaggggccaggcccaaaaccgatgccagggcagtaggtggcgctcgttctaaaactgatgccaaggcaatccctggagcaaggcccaaggatgaggcccaggcatgggcccagagtgaatttgggactgaagcagtgtcacaggcagaaggagtgtcccagactaatgccgttgcttggccactggccactgctgagtctggatcagttactaaatctaagggcctgtctatggatagagaactagtcaatgtggatgctgaaacctttcctggcacccagggtcagaaaggaatccagccctggtttggaccaggggaggagactaatatggggtcttggtgctattccaggcccagggccagagaggaggcctctaatgagtctgggttctggtcagcagatgagacctctacagcgtcttctttctggactggagaagagacaagtgtcagatcatggcccagggaagagtccaataccaggtccaggcacagggctaaacatcagactaatcccaggtccaggcccagatccaagcaagaagcctatgttgattcctggtctggatctgaggatgaggccagcaacccattctccttctgggttggagaaaataccaataacttgttcaggcccagagtcagggaggaggcaaatatcaggtccaagctcaggacaaatagagaagattgttttgaatctgagtctgaagatgagttctataagcagtcctgggttttgcctggagaagaggccaatagtagattcaggcacagagacaaagaagatcctaatactgccttgaaactcagggcccagaaagatgttgacagtgatagggtcaaacaagaacccaggtttgaggaggaagtcattattgggtcctggttctgggcagaaaaagaggccagtttggagggtggagcttcagcaatctgtgaatctgagccaggaactgaggagggggccattggcggatccgcgtactgggctgaggaaaagtccagtttgggggctgtggccagagaagaggccaagccggagtctgaagaagaggccatatttgggtcctggttctgggacagagatgaggcctgctttgacctaaatccctgtcctgtgtacaaggtcagtgataggttcagagatgcagctgaggagcttaatgcatcctccaggccccaaacctgggacgaggtcactgttgaattcaaacctggtctttttcatggggttggcttccgatccacaagcccctttggaattcccgaagaggcttctgaaatgcttgaggcaaagcccaagaacctggaacttagcccagaaggagaagagcaggaatctttgcttcagcctgatcagcctagtcctgagttcacatttcagtatgatccttcctaccggtcagtccgggaaattcgagagcatcttagggccagggagagtgcagagtctgagagttggtcctgcagctgcatacaatgtgagctgaaaattggttctgaagagtttgaagaattccttttattaatggacaaaattcgggatccttttattcatgaaatatctaaaattgcaatgggtatgagaagtgcttctcaatttacccgagatttcattcgagattcaggtgttgtctcacttattgaaaccttgcttaattatccatcctctagagttaggacaagttttttggaaaatatgattcacatggctccaccttatccaaatctaaacatgattgagacattcatatgtcaagtgtgtgaggaaacccttgcacatagtgtggattcccttgagcagctgactggaataaggatgcttagacacctcactatgactattgactatcacacactgattgccaactatatgtccgggtttctctccttattaaccacagccaatgcgagaacgaagtttcacgttctgaaaatgctattgaatttgtctgaaaatcctgctgtggcaaaaaaactattcagtgccaaagctctttcaatatttgtgggtctctttaacatagaagagacaaatgataatattcaaattgttattaaaatgtttcagaatatcagtaacattataaaaagtggaaagatgtccttaattgatgatgatttcagtcttgagccgcttatttctgcatttcgtgaatttgaggagttagctaagcaactacaagcccaaatagacaaccaaaatgatcctgaggtgggacaacaaagttaatatgattaaccacctgccgctgatcagccttatgttcccaaagagccctgagtagtgctttggtgttcacagtctgtttttttgttgtaacttatattttttaatgctgatgttaactttgtcaaactcttgttttgagctggatcattttgtggatgccaaatgaatatcaaaactgaaaacacatttgttgatatttgtcttgctgtccagattgcggtatttttcagtattaagttttcaatgaactgtgtcacctaagtaagctaccctgctattcgttgtttaaatatatggttctctatttgagtctgtgttttcaataaagttctatgttaaaattggca

SEQ ID NO: 364304 - DNA, 4400 bp, Homo sapiens
ctggaaacccatgttgcatttcagttcaggaaagaatggtaggcttggtggggggagctcccgcaaaaggggaactaatacagaaacactctggtatttgtctgcctctcttgttccagcgccgttttccctatatccggaattcgtccctgcgcattccaatacctgaagcggccacagggtacaggacagggagccctccgacagaaaagagtcgcggcgctaaacaaagcctgatatcactccgcttccataagccggatccccataaactacgctctagctcctcccactgccgttgtgggtaacgcggacgtggaagaacctcgtctgcggaggaaaaggtagatgttaaatggtaactacgcgcgaggttctgaggagccctgggaacaggaaggagaaaagaataccaaaagtgacaacagtttgccaatcgcagtctttaatctgataaagcggttatctcgtcttgagtcccaggtgccgagtcaatccccatacacagccgccgccattgcctcgagtccttgtgtctgactgtctgttcctgctgctgtatgacacagcacctcgaggcaaggaaataagaaaactgcctctgatccaagcagagaaggcagagaaggtagatctgtccccaggtctgtggaactgtcagttgtgaagttttgtaaaatggtcacccaacttaaaactaggaaattacgaagaagagaaaattgccctgtatctgttaaggtctgcctgtagatctgctgtagggcttgtcaccattggaagcaaggtcctacttcagtggcagatctggtggccttggagtggctgaagaccaccaccctccacagggctgggcccatgcacagccatccttccctaccttgaaactcctgtagcctgtaataccagctgtgggtactactctcagtgttggagatcatcaaaatacaattggaccagaccctttggaaataattctgtgtctcaaatgccctgtggagcacacacttaatcagttgatggctatggaattttccaacatcagctaaagagaagggcctactttaaggctggccaattctgcaagaaaggcaaggaggaggagactggctcacagctctggaggacccccttctgtcagctgtggggcttgacaccacttgaacaagaaaaggagggggaaactgcaccacatcagtgaagatccacctccagtggctgctctgctggtggtggagttgctgctgacaaccaccctcaacgggtctgcacccatccaggaaatatctgtcttcctttagcttggttgtacctgttctcactctatctgtattattgaattattgactgagactgtgtttgggaaggaggctgagtgactactggactggatattgactctaactcttattcccaagcttatatccttaatcacctaaagatcagagtgtgaagaaacaaacctgtgacagatctgtggttgaggtttagactacgggaggagtatattacctgactttctttgtaacttgtaccatgactggggcagagattgagcctagtgcccaggccaagcctgaaaagaaggctggggaagaggttatcgctgggcctgagagagagaatgatgtccctctggtggtcagacccaaggttaggacccaggcaactactggggcaaggcccaaaactgagaccaagtctgtgcctgcggcaaggcccaaaactgaggcccaagcaatgtctggggcaaggcccaaaactgaggtccaagtaatgggtggtgcaagacccaaaacggaggctcaaggaatcacaggggccaggcccaaaaccgatgccagggcagtaggtggcgctcgttctaaaactgatgccaaggcaatccctggagcaaggcccaaggatgaggcccaggcatgggcccagagtgaatttgggactgaagcagtgtcacaggcagaaggagtgtcccagactaatgccgttgcttggccactggccactgctgagtctggatcagttactaaatctaagggcctgtctatggatagagaactagtcaatgtggatgctgaaacctttcctggcacccagggtcagaaaggaatccagccctggtttggaccaggggaggagactaatatggggtcttggtgctattccaggcccagggccagagaggaggcctctaatgagtctgggttctggtcagcagatgagacctctacagcgtcttctttctggactggagaagagacaagtgtcagatcatggcccagggaagagtccaataccaggtccaggcacagggctaaacatcagactaatcccaggtccaggcccagatccaagcaagaagcctatgttgattcctggtctggatctgaggatgaggccagcaacccattctccttctgggttggagaaaataccaataacttgttcaggcccagagtcagggaggaggcaaatatcaggtccaagctcaggacaaatagagaagattgttttgaatctgagtctgaagatgagttctataagcagtcctgggttttgcctggagaagaggccaatagtagattcaggcacagagacaaagaagatcctaatactgccttgaaactcagggcccagaaagatgttgacagtgatagggtcaaacaagaacccaggtttgaggaggaagtcattattgggtcctggttctgggcagaaaaagaggccagtttggagggtggagcttcagcaatctgtgaatctgagccaggaactgaggagggggccattggcggatccgcgtactgggctgaggaaaagtccagtttgggggctgtggccagagaagaggccaagccggagtctgaagaagaggccatatttgggtcctggttctgggacagagatgaggcctgctttgacctaaatccctgtcctgtgtacaaggtcagtgataggttcagagatgcagctgaggagcttaatgcatcctccaggccccaaacctgggacgaggtcactgttgaattcaaacctggtctttttcatggggttggcttccgatccacaagcccctttggaattcccgaagaggcttctgaaatgcttgaggcaaagcccaagaacctggaacttagcccagaaggagaagagcaggaatctttgcttcagcctgatcagcctagtcctgagttcacatttcagtatgatccttcctaccggtcagtccgggaaattcgagagcatcttagggccagggagagtgcagagtctgagagttggtcctgcagctgcatacaatgtgagctgaaaattggttctgaagagtttgaagaattccttttattaatggacaaaattcgggatccttttattcatgaaatatctaaaattgcaatgggtatgagaagtgcttctcaatttacccgagatttcattcgagattcaggtgttgtctcacttattgaaaccttgcttaattatccatcctctagagttaggacaagttttttggaaaatatgattcacatggctccaccttatccaaatctaaacatgattgagacattcatatgtcaagtgtgtgaggaaacccttgcacatagtgtggattcccttgagcagctgactggaataaggatgcttagacacctcactatgactattgactatcacacactgattgccaactatatgtccgggtttctctccttattaaccacagccaatgcgagaacgaagtttcacgttctgaaaatgctattgaatttgtctgaaaatcctgctgtggcaaaaaaactattcagtgccaaagctctttcaatatttgtgggtctctttaacatagaagagacaaatgataatattcaaattgttattaaaatgtttcagaatatcagtaacattataaaaagtggaaagatgtccttaattgatgatgatttcagtcttgagccgcttatttctgcatttcgtgaatttgaggagttagctaagcaactacaagcccaaatagacaaccaaaatgatcctgaggtgggacaacaaagttaatatgattaaccacctgccgctgatcagccttatgttcccaaagagccctgagtagtgctttggtgttcacagtctgtttttttgttgtaacttatattttttaatgctgatgttaactttgtcaaactcttgttttgagctggatcattttgtggatgccaaatgaatatcaaaactgaaaacacatttgttgatatttgtcttgctgtccagattgcggtatttttcagtattaagttttcaatgaactgtgtcacctaagtaagctaccctgctattcgttgtttaaatatatggttctctatttgagtctgtgttttcaataaagttctatgttaaaattggca

SEQ ID NO: 364305 - DNA, 4056 bp, Homo sapiens
ctggaaacccatgttgcatttcagttcaggaaagaatggtaggcttggtggggggagctcccgcaaaaggggaactaatacagaaacactctggtatttgtctgcctctcttgttccagcgccgttttccctatatccggaattcgtccctgcgcattccaatacctgaagcggccacagggtacaggacagggagccctccgacagaaaagagtcgcggcgctaaacaaagcctgatatcactccgcttccataagccggatccccataaactacgctctagctcctcccactgccgttgtgggtaacgcggacgtggaagaacctcgtctgcggaggaaaagtcccaggtgccgagtcaatccccatacacagccgccgccattgcctcgagtccttgtgtctgactgtctgttcctgctgctgtatgacacagcacctcgaggcaaggaaataagaaaactgcctctgatccaagcagagaaggcagagaaggtctgcctgtagatctgctgtagggcttgtcaccattggaagcaagaactcctgtagcctgtaataccagctgtgggtactactctcagtgttggagatcatcaaaatacaattggaccagaccctttggaaataattctgtgtctcaaatgccctgtggagcacacacttaatcagttgatggctatggaattttccaacatcagctaaagagaagggcctactttaaggctggccaattctgcaagaaaggcaaggaggaggagactggctcacagctctggaggacccccttctgtcagctgtggggcttgacaccacttgaacaagaaaaggagggggaaactgcaccacatcagtgaagatccacctccagtggctgctctgctggtggtggagttgctgctgacaaccaccctcaacgggtctgcacccatccaggaaatatctgtcttcctttagcttggttgtacctgttctcactctatctgtattattgaattattgactgagactgtgtttgggaaggaggctgagtgactactggactggatattgactctaactcttattcccaagcttatatccttaatcacctaaagatcagagtgtgaagaaacaaacctgtgacagatctgtggttgaggtttagactacgggaggagtatattacctgactttctttgtaacttgtaccatgactggggcagagattgagcctagtgcccaggccaagcctgaaaagaaggctggggaagaggttatcgctgggcctgagagagagaatgatgtccctctggtggtcagacccaaggttaggacccaggcaactactggggcaaggcccaaaactgagaccaagtctgtgcctgcggcaaggcccaaaactgaggcccaagcaatgtctggggcaaggcccaaaactgaggtccaagtaatgggtggtgcaagacccaaaacggaggctcaaggaatcacaggggccaggcccaaaaccgatgccagggcagtaggtggcgctcgttctaaaactgatgccaaggcaatccctggagcaaggcccaaggatgaggcccaggcatgggcccagagtgaatttgggactgaagcagtgtcacaggcagaaggagtgtcccagactaatgccgttgcttggccactggccactgctgagtctggatcagttactaaatctaagggcctgtctatggatagagaactagtcaatgtggatgctgaaacctttcctggcacccagggtcagaaaggaatccagccctggtttggaccaggggaggagactaatatggggtcttggtgctattccaggcccagggccagagaggaggcctctaatgagtctgggttctggtcagcagatgagacctctacagcgtcttctttctggactggagaagagacaagtgtcagatcatggcccagggaagagtccaataccaggtccaggcacagggctaaacatcagactaatcccaggtccaggcccagatccaagcaagaagcctatgttgattcctggtctggatctgaggatgaggccagcaacccattctccttctgggttggagaaaataccaataacttgttcaggcccagagtcagggaggaggcaaatatcaggtccaagctcaggacaaatagagaagattgttttgaatctgagtctgaagatgagttctataagcagtcctgggttttgcctggagaagaggccaatagtagattcaggcacagagacaaagaagatcctaatactgccttgaaactcagggcccagaaagatgttgacagtgatagggtcaaacaagaacccaggtttgaggaggaagtcattattgggtcctggttctgggcagaaaaagaggccagtttggagggtggagcttcagcaatctgtgaatctgagccaggaactgaggagggggccattggcggatccgcgtactgggctgaggaaaagtccagtttgggggctgtggccagagaagaggccaagccggagtctgaagaagaggccatatttgggtcctggttctgggacagagatgaggcctgctttgacctaaatccctgtcctgtgtacaaggtcagtgataggttcagagatgcagctgaggagcttaatgcatcctccaggccccaaacctgggacgaggtcactgttgaattcaaacctggtctttttcatggggttggcttccgatccacaagcccctttggaattcccgaagaggcttctgaaatgcttgaggcaaagcccaagaacctggaacttagcccagaaggagaagagcaggaatctttgcttcagcctgatcagcctagtcctgagttcacatttcagtatgatccttcctaccggtcagtccgggaaattcgagagcatcttagggccagggagagtgcagagtctgagagttggtcctgcagctgcatacaatgtgagctgaaaattggttctgaagagtttgaagaattccttttattaatggacaaaattcgggatccttttattcatgaaatatctaaaattgcaatgggtatgagaagtgcttctcaatttacccgagatttcattcgagattcaggtgttgtctcacttattgaaaccttgcttaattatccatcctctagagttaggacaagttttttggaaaatatgattcacatggctccaccttatccaaatctaaacatgattgagacattcatatgtcaagtgtgtgaggaaacccttgcacatagtgtggattcccttgagcagctgactggaataaggatgcttagacacctcactatgactattgactatcacacactgattgccaactatatgtccgggtttctctccttattaaccacagccaatgcgagaacgaagtttcacgttctgaaaatgctattgaatttgtctgaaaatcctgctgtggcaaaaaaactattcagtgccaaagctctttcaatatttgtgggtctctttaacatagaagagacaaatgataatattcaaattgttattaaaatgtttcagaatatcagtaacattataaaaagtggaaagatgtccttaattgatgatgatttcagtcttgagccgcttatttctgcatttcgtgaatttgaggagttagctaagcaactacaagcccaaatagacaaccaaaatgatcctgaggtgggacaacaaagttaatatgattaaccacctgccgctgatcagccttatgttcccaaagagccctgagtagtgctttggtgttcacagtctgtttttttgttgtaacttatattttttaatgctgatgttaactttgtcaaactcttgttttgagctggatcattttgtggatgccaaatgaatatcaaaactgaaaacacatttgttgatatttgtcttgctgtccagattgcggtatttttcagtattaagttttcaatgaactgtgtcacctaagtaagctaccctgctattcgttgtttaaatatatggttctctatttgagtctgtgttttcaataaagttctatgttaaaattggca

SEQ ID NO: 364306 - DNA, 4186 bp, Homo sapiens
ctggaaacccatgttgcatttcagttcaggaaagaatgcgccgttttccctatatccggaattcgtccctgcgcattccaatacctgaagcggccacagggtacaggacagggagccctccgacagaaaagagtcgcggcgctaaacaaagcctgatatcactccgcttccataagccggatccccataaactacgctctagctcctcccactgccgttgtgggtaacgcggacgtggaagaacctcgtctgcggaggaaaagtcccaggtgccgagtcaatccccatacacagccgccgccattgcctcgagtccttgtgtctgactgtctgttcctgctgctgtatgacacagcacctcgaggcaaggaaataagaaaactgcctctgatccaagcagagaaggcagagaaggtagatctgtccccaggtctgtggaactgtcagttgtgaagttttgtaaaatggtcacccaacttaaaactaggaaattacgaagaagagaaaattgccctgtatctgttaaggtctgcctgtagatctgctgtagggcttgtcaccattggaagcaaggtcctacttcagtggcagatctggtggccttggagtggctgaagaccaccaccctccacagggctgggcccatgcacagccatccttccctaccttgaaactcctgtagcctgtaataccagctgtgggtactactctcagtgttggagatcatcaaaatacaattggaccagaccctttggaaataattctgtgtctcaaatgccctgtggagcacacacttaatcagttgatggctatggaattttccaacatcagctaaagagaagggcctactttaaggctggccaattctgcaagaaaggcaaggaggaggagactggctcacagctctggaggacccccttctgtcagctgtggggcttgacaccacttgaacaagaaaaggagggggaaactgcaccacatcagtgaagatccacctccagtggctgctctgctggtggtggagttgctgctgacaaccaccctcaacgggtctgcacccatccaggaaatatctgtcttcctttagcttggttgtacctgttctcactctatctgtattattgaattattgactgagactgtgtttgggaaggaggctgagtgactactggactggatattgactctaactcttattcccaagcttatatccttaatcacctaaagatcagagtgtgaagaaacaaacctgtgacagatctgtggttgaggtttagactacgggaggagtatattacctgactttctttgtaacttgtaccatgactggggcagagattgagcctagtgcccaggccaagcctgaaaagaaggctggggaagaggttatcgctgggcctgagagagagaatgatgtccctctggtggtcagacccaaggttaggacccaggcaactactggggcaaggcccaaaactgagaccaagtctgtgcctgcggcaaggcccaaaactgaggcccaagcaatgtctggggcaaggcccaaaactgaggtccaagtaatgggtggtgcaagacccaaaacggaggctcaaggaatcacaggggccaggcccaaaaccgatgccagggcagtaggtggcgctcgttctaaaactgatgccaaggcaatccctggagcaaggcccaaggatgaggcccaggcatgggcccagagtgaatttgggactgaagcagtgtcacaggcagaaggagtgtcccagactaatgccgttgcttggccactggccactgctgagtctggatcagttactaaatctaagggcctgtctatggatagagaactagtcaatgtggatgctgaaacctttcctggcacccagggtcagaaaggaatccagccctggtttggaccaggggaggagactaatatggggtcttggtgctattccaggcccagggccagagaggaggcctctaatgagtctgggttctggtcagcagatgagacctctacagcgtcttctttctggactggagaagagacaagtgtcagatcatggcccagggaagagtccaataccaggtccaggcacagggctaaacatcagactaatcccaggtccaggcccagatccaagcaagaagcctatgttgattcctggtctggatctgaggatgaggccagcaacccattctccttctgggttggagaaaataccaataacttgttcaggcccagagtcagggaggaggcaaatatcaggtccaagctcaggacaaatagagaagattgttttgaatctgagtctgaagatgagttctataagcagtcctgggttttgcctggagaagaggccaatagtagattcaggcacagagacaaagaagatcctaatactgccttgaaactcagggcccagaaagatgttgacagtgatagggtcaaacaagaacccaggtttgaggaggaagtcattattgggtcctggttctgggcagaaaaagaggccagtttggagggtggagcttcagcaatctgtgaatctgagccaggaactgaggagggggccattggcggatccgcgtactgggctgaggaaaagtccagtttgggggctgtggccagagaagaggccaagccggagtctgaagaagaggccatatttgggtcctggttctgggacagagatgaggcctgctttgacctaaatccctgtcctgtgtacaaggtcagtgataggttcagagatgcagctgaggagcttaatgcatcctccaggccccaaacctgggacgaggtcactgttgaattcaaacctggtctttttcatggggttggcttccgatccacaagcccctttggaattcccgaagaggcttctgaaatgcttgaggcaaagcccaagaacctggaacttagcccagaaggagaagagcaggaatctttgcttcagcctgatcagcctagtcctgagttcacatttcagtatgatccttcctaccggtcagtccgggaaattcgagagcatcttagggccagggagagtgcagagtctgagagttggtcctgcagctgcatacaatgtgagctgaaaattggttctgaagagtttgaagaattccttttattaatggacaaaattcgggatccttttattcatgaaatatctaaaattgcaatgggtatgagaagtgcttctcaatttacccgagatttcattcgagattcaggtgttgtctcacttattgaaaccttgcttaattatccatcctctagagttaggacaagttttttggaaaatatgattcacatggctccaccttatccaaatctaaacatgattgagacattcatatgtcaagtgtgtgaggaaacccttgcacatagtgtggattcccttgagcagctgactggaataaggatgcttagacacctcactatgactattgactatcacacactgattgccaactatatgtccgggtttctctccttattaaccacagccaatgcgagaacgaagtttcacgttctgaaaatgctattgaatttgtctgaaaatcctgctgtggcaaaaaaactattcagtgccaaagctctttcaatatttgtgggtctctttaacatagaagagacaaatgataatattcaaattgttattaaaatgtttcagaatatcagtaacattataaaaagtggaaagatgtccttaattgatgatgatttcagtcttgagccgcttatttctgcatttcgtgaatttgaggagttagctaagcaactacaagcccaaatagacaaccaaaatgatcctgaggtgggacaacaaagttaatatgattaaccacctgccgctgatcagccttatgttcccaaagagccctgagtagtgctttggtgttcacagtctgtttttttgttgtaacttatattttttaatgctgatgttaactttgtcaaactcttgttttgagctggatcattttgtggatgccaaatgaatatcaaaactgaaaacacatttgttgatatttgtcttgctgtccagattgcggtatttttcagtattaagttttcaatgaactgtgtcacctaagtaagctaccctgctattcgttgtttaaatatatggttctctatttgagtctgtgttttcaataaagttctatgttaaaattggca

SEQ ID NO: 364307 - DNA, 2961 bp, Homo sapiens
ctggaaacccatgttgcatttcagttcaggaaagaatggtaggcttggtggggggagctcccgcaaaaggggaactaatacagaaacactctggtatttgtctgcctctcttgttccagcgccgttttccctatatccggaattcgtccctgcgcattccaatacctgaagcggccacagggtacaggacagggagccctccgacagaaaagagtcgcggcgctaaacaaagcctgatatcactccgcttccataagccggatccccataaactacgctctagctcctcccactgccgttgtgggtaacgcggacgtggaagaacctcgtctgcggaggaaaaggtagatgttaaatggtaactacgcgcgaggttctgaggagccctgggaacaggaaggagaaaagaataccaaaagtgacaacagtttgccaatcgcagtctttaatctgataaagcggttatctcgtcttgagtcccaggtgccgagtcaatccccatacacagccgccgccattgcctcgagtccttgtgtctgactgtctgttcctgctgctgtatgacacagcacctcgaggcaaggaaataagaaaactgcctctgatccaagcagagaaggcagagaaggtctgcctgtagatctgctgtagggcttgtcaccattggaagcaaggtcctacttcagtggcagatctggtggccttggagtggctgaagaccaccaccctccacagggctgggcccatgcacagccatccttccctaccttgagtgagcttcctctgcatgttttctatatcactggcagagcctgtagttggaaaggggacagagtgactactggactttgtgtgaaaacaccaaccgggacaaaacttcagtcaaggctgagacgggtgggggtatataacttgtccttacgttaaacttggaacatggttgactctgggacagaagcaagggctagaggaaaggctgaggctggcctgcaagatggaatcagtggtcctgccactgctagagtgaatggtaaaacccaggccgaggcagtggctgaggcagaactgaaaacagaatcagtgacccaggccaaagctggtgatggagcaatgaccaggacacatacagtgacctacagggaggctatggctgtgacaagggaagtgatcaaggtggaagatacaactaagactagagtcatggttgagactaagacaaaacccctggcagaacgcagtatagtgccacaaaccaagtcaaaggccatgcctatgtctagggtcagtactgtaaccaagtctgaagtcaaggttgttgctgtcattgaggcaaatattaggtcctatgccaagtcacatgataaggccaatactgggtccagacctgacagaagggaagagaccagcattgggatgaaatccagtgatgaggatgaagaaaatatatgctcctggttctggactggagaagagcctagtgtagggtcctggttctggcctgaagaagagacctctcttcaagtttataagcccctacctaagatccaggaaaagcccaagcccacacacaaacccacacttactataaaacaaaaggtaatagcatggtcaagggccaggtatattgtcctagttccagttgaaggaggggagcaatccttgcctccagaaggaaactggaccctggttgagaccttgattgaaactcctctggggattcgacctttgaccaagatcccaccttatcatgggccttattaccagaccttagctgagatcaaaaaacagattaggcaaagggaaaagtatgggcctaatccgaaggcctgccactgcaaatcacgtggctttagtttagagcctaaagagtttgataaacttgttgccctccttaagttaactaaggatcctttcattcatgaaatagctacaatgataatgggcatcagtcctgcttatccatttactcaagatataattcatgatgtaggtattactgttatgattgaaaacttggtcaataatcccaatgttaaagaacaccctggagctttaagtatggtggatgacagctctgagtcttccgaagaaccaaaatcaggggagtcatatatacatcaagtttgtaaaggcataatctcttgccccttgaactcccctgtgcagctggctggactgaaattactagggcacttgagtataaaatttgaagatcactatgtgattaccagttatattccagatttcctcaccttgttaaacaagggaagtgtcaaaaccaagttttatgttttaaaagtgttttcgtgtttgtctaaaaatcacgccaatacaagagaattgatcagtgccaaagtactgtcatcattggttgcaccctttaacaagaatgagtcaaaggccaatattcttaatattattgaaatatttgagaatataaattttcagttcaaaacaaaggcaaagctatttaccaaggaaaagttcactaaatctgagcttatttcaatattccaggaagcaaaacagtttggtcagaaactccaagacttagcagagcacagtgatcccgaagtgagagataaagtcatacgattaatactaaaactctgaatacccctctgttctcataaagcctcaaacagttttttggagttgcaatatgaaaccaatgcatattgtaattataaattcaatacttatgttttccatgttgattgagggaggcaattttatggataccaattaatcttgagatcctgaacatgtgctgatttttattgtgctatatagtatataaattgagatatttttggtatttctgcaacgtgacctgataatgaatctattcatcctgagtaagctatacttctgtgctttatattgatatgtgtattcttttgagattttatttacatgttgttaataaagttgcatgctaaaactggtgaaaaaattgtc

SEQ ID NO: 364308 - DNA, 3074 bp, Homo sapiens
ctggaaacccatgttgcatttcagttcaggaaagaatggtaggcttggtggggggagctcccgcaaaaggggaactaatacagaaacactctggtatttgtctgcctctcttgttccagcgccgttttccctatatccggaattcgtccctgcgcattccaatacctgaagcggccacagggtacaggacagggagccctccgacagaaaagagtcgcggcgctaaacaaagcctgatatcactccgcttccataagccggatccccataaactacgctctagctcctcccactgccgttgtgggtaacgcggacgtggaagaacctcgtctgcggaggaaaaggtagatgttaaatggtaactacgcgcgaggttctgaggagccctgggaacaggaaggagaaaagaataccaaaagtgacaacagtttgccaatcgcagtctttaatctgataaagcggttatctcgtcttgagtcccaggtgccgagtcaatccccatacacagccgccgccattgcctcgagtccttgtgtctgactgtctgttcctgctgctgtatgacacagcacctcgaggcaaggaaataagaaaactgcctctgatccaagcagagaaggcagagaaggtagatctgtccccaggtctgtggaactgtcagttgtgaagttttgtaaaatggtcacccaacttaaaactaggaaattacgaagaagagaaaattgccctgtatctgttaaggtctgcctgtagatctgctgtagggcttgtcaccattggaagcaaggtcctacttcagtggcagatctggtggccttggagtggctgaagaccaccaccctccacagggctgggcccatgcacagccatccttccctaccttgagtgagcttcctctgcatgttttctatatcactggcagagcctgtagttggaaaggggacagagtgactactggactttgtgtgaaaacaccaaccgggacaaaacttcagtcaaggctgagacgggtgggggtatataacttgtccttacgttaaacttggaacatggttgactctgggacagaagcaagggctagaggaaaggctgaggctggcctgcaagatggaatcagtggtcctgccactgctagagtgaatggtaaaacccaggccgaggcagtggctgaggcagaactgaaaacagaatcagtgacccaggccaaagctggtgatggagcaatgaccaggacacatacagtgacctacagggaggctatggctgtgacaagggaagtgatcaaggtggaagatacaactaagactagagtcatggttgagactaagacaaaacccctggcagaacgcagtatagtgccacaaaccaagtcaaaggccatgcctatgtctagggtcagtactgtaaccaagtctgaagtcaaggttgttgctgtcattgaggcaaatattaggtcctatgccaagtcacatgataaggccaatactgggtccagacctgacagaagggaagagaccagcattgggatgaaatccagtgatgaggatgaagaaaatatatgctcctggttctggactggagaagagcctagtgtagggtcctggttctggcctgaagaagagacctctcttcaagtttataagcccctacctaagatccaggaaaagcccaagcccacacacaaacccacacttactataaaacaaaaggtaatagcatggtcaagggccaggtatattgtcctagttccagttgaaggaggggagcaatccttgcctccagaaggaaactggaccctggttgagaccttgattgaaactcctctggggattcgacctttgaccaagatcccaccttatcatgggccttattaccagaccttagctgagatcaaaaaacagattaggcaaagggaaaagtatgggcctaatccgaaggcctgccactgcaaatcacgtggctttagtttagagcctaaagagtttgataaacttgttgccctccttaagttaactaaggatcctttcattcatgaaatagctacaatgataatgggcatcagtcctgcttatccatttactcaagatataattcatgatgtaggtattactgttatgattgaaaacttggtcaataatcccaatgttaaagaacaccctggagctttaagtatggtggatgacagctctgagtcttccgaagaaccaaaatcaggggagtcatatatacatcaagtttgtaaaggcataatctcttgccccttgaactcccctgtgcagctggctggactgaaattactagggcacttgagtataaaatttgaagatcactatgtgattaccagttatattccagatttcctcaccttgttaaacaagggaagtgtcaaaaccaagttttatgttttaaaagtgttttcgtgtttgtctaaaaatcacgccaatacaagagaattgatcagtgccaaagtactgtcatcattggttgcaccctttaacaagaatgagtcaaaggccaatattcttaatattattgaaatatttgagaatataaattttcagttcaaaacaaaggcaaagctatttaccaaggaaaagttcactaaatctgagcttatttcaatattccaggaagcaaaacagtttggtcagaaactccaagacttagcagagcacagtgatcccgaagtgagagataaagtcatacgattaatactaaaactctgaatacccctctgttctcataaagcctcaaacagttttttggagttgcaatatgaaaccaatgcatattgtaattataaattcaatacttatgttttccatgttgattgagggaggcaattttatggataccaattaatcttgagatcctgaacatgtgctgatttttattgtgctatatagtatataaattgagatatttttggtatttctgcaacgtgacctgataatgaatctattcatcctgagtaagctatacttctgtgctttatattgatatgtgtattcttttgagattttatttacatgttgttaataaagttgcatgctaaaactggtgaaaaaattgtc

SEQ ID NO: 364309 - DNA, 2995 bp, Homo sapiens
ctggaaacccatgttgcatttcagttcaggaaagaatggtaggcttggtggggggagctcccgcaaaaggggaactaatacagaaacactctggtatttgtctgcctctcttgttccagcgccgttttccctatatccggaattcgtccctgcgcattccaatacctgaagcggccacagggtacaggacagggagccctccgacagaaaagagtcgcggcgctaaacaaagcctgatatcactccgcttccataagccggatccccataaactacgctctagctcctcccactgccgttgtgggtaacgcggacgtggaagaacctcgtctgcggaggaaaaggtagatgttaaatggtaactacgcgcgaggttctgaggagccctgggaacaggaaggagaaaagaataccaaaagtgacaacagtttgccaatcgcagtctttaatctgataaagcggttatctcgtcttgagtcccaggtgccgagtcaatccccatacacagccgccgccattgcctcgagtccttgtgtctgactgtctgttcctgctgctgtatgacacagcacctcgaggcaaggaaataagaaaactgcctctgatccaagcagagaaggcagagaaggtctgcctgtagatctgctgtagggcttgtcaccattggaagcaaggtaaggaggagaaagttactccagatcagtgcaggtcctacttcagtggcagatctggtggccttggagtggctgaagaccaccaccctccacagggctgggcccatgcacagccatccttccctaccttgagtgagcttcctctgcatgttttctatatcactggcagagcctgtagttggaaaggggacagagtgactactggactttgtgtgaaaacaccaaccgggacaaaacttcagtcaaggctgagacgggtgggggtatataacttgtccttacgttaaacttggaacatggttgactctgggacagaagcaagggctagaggaaaggctgaggctggcctgcaagatggaatcagtggtcctgccactgctagagtgaatggtaaaacccaggccgaggcagtggctgaggcagaactgaaaacagaatcagtgacccaggccaaagctggtgatggagcaatgaccaggacacatacagtgacctacagggaggctatggctgtgacaagggaagtgatcaaggtggaagatacaactaagactagagtcatggttgagactaagacaaaacccctggcagaacgcagtatagtgccacaaaccaagtcaaaggccatgcctatgtctagggtcagtactgtaaccaagtctgaagtcaaggttgttgctgtcattgaggcaaatattaggtcctatgccaagtcacatgataaggccaatactgggtccagacctgacagaagggaagagaccagcattgggatgaaatccagtgatgaggatgaagaaaatatatgctcctggttctggactggagaagagcctagtgtagggtcctggttctggcctgaagaagagacctctcttcaagtttataagcccctacctaagatccaggaaaagcccaagcccacacacaaacccacacttactataaaacaaaaggtaatagcatggtcaagggccaggtatattgtcctagttccagttgaaggaggggagcaatccttgcctccagaaggaaactggaccctggttgagaccttgattgaaactcctctggggattcgacctttgaccaagatcccaccttatcatgggccttattaccagaccttagctgagatcaaaaaacagattaggcaaagggaaaagtatgggcctaatccgaaggcctgccactgcaaatcacgtggctttagtttagagcctaaagagtttgataaacttgttgccctccttaagttaactaaggatcctttcattcatgaaatagctacaatgataatgggcatcagtcctgcttatccatttactcaagatataattcatgatgtaggtattactgttatgattgaaaacttggtcaataatcccaatgttaaagaacaccctggagctttaagtatggtggatgacagctctgagtcttccgaagaaccaaaatcaggggagtcatatatacatcaagtttgtaaaggcataatctcttgccccttgaactcccctgtgcagctggctggactgaaattactagggcacttgagtataaaatttgaagatcactatgtgattaccagttatattccagatttcctcaccttgttaaacaagggaagtgtcaaaaccaagttttatgttttaaaagtgttttcgtgtttgtctaaaaatcacgccaatacaagagaattgatcagtgccaaagtactgtcatcattggttgcaccctttaacaagaatgagtcaaaggccaatattcttaatattattgaaatatttgagaatataaattttcagttcaaaacaaaggcaaagctatttaccaaggaaaagttcactaaatctgagcttatttcaatattccaggaagcaaaacagtttggtcagaaactccaagacttagcagagcacagtgatcccgaagtgagagataaagtcatacgattaatactaaaactctgaatacccctctgttctcataaagcctcaaacagttttttggagttgcaatatgaaaccaatgcatattgtaattataaattcaatacttatgttttccatgttgattgagggaggcaattttatggataccaattaatcttgagatcctgaacatgtgctgatttttattgtgctatatagtatataaattgagatatttttggtatttctgcaacgtgacctgataatgaatctattcatcctgagtaagctatacttctgtgctttatattgatatgtgtattcttttgagattttatttacatgttgttaataaagttgcatgctaaaactggtgaaaaaattgtc

SEQ ID NO: 364310 - DNA, 1277 bp, Homo sapiens
ctggaaacccatgttgcatttcagttcaggaaagaatggtaggcttggtggggggagctcccgcaaaaggggaactaatacagaaacactctggtatttgtctgcctctcttgttccagcgccgttttccctatatccggaattcgtccctgcgcattccaatacctgaagcggccacagggtacaggacagggagccctccgacagaaaagagtcgcggcgctaaacaaagcctgatatcactccgcttccataagccggatccccataaactacgctctagctcctcccactgccgttgtgggtaacgcggacgtggaagaacctcgtctgcggaggaaaaggtagatgttaaatggtaactacgcgcgaggttctgaggagccctgggaacaggaaggagaaaagaataccaaaagtgacaacagtttgccaatcgcagtctttaatctgataaagcggttatctcgtcttgagtcccaggtgccgagtcaatccccatacacagccgccgccattgcctcgagtccttgtgtctgactgtctgttcctgctgctgtatgacacagcacctcgaggcaaggaaataagaaaactgcctctgatccaagcagagaaggcagagaaggtctgcctgtagatctgctgtagggcttgtcaccattggaagcaaggtcctacttcagtggcagatctggtggccttggagtggctgaagaccaccaccctccacagggctgggcccatgcacagccatccttccctaccttgaaactcctgtagcctgtaataccagctgtgggtactactctcagtgttggagatcatcaaaatacaattggaccagaccctttggaaataattctgtgtctcaaatgccctgtggagcacacacttaatcagttgatggctatggaattttccaacatcagctaaagagaagggatagagtggtgacttccaagcttcatgcagaaccggacaacagaaattgagagggaaatttctatgacagaagagagaaagaagaaaattgctggaataatgaccttgaatagaggaaatgggatatcatctggttctggagacagcctgtatttcttggatcttggcttccttccatcttcaaagccaacgatgaccagtgtagactttctatgctgcttcaatctgacatggagtccctgccttccacatctaaagtacccttgcaattacattggccaagataacccagaataatcttaaattaaactcagctgaatagcaatcttaaa

SEQ ID NO: 364311 - DNA, 2786 bp, Homo sapiens
  misc_feature (2030)..(2030): n is a, c, g, or t
ctggaaacccatgttgcatttcagttcaggaaagaatggtaggcttggtggggggagctcccgcaaaaggggaactaatacagaaacactctggtatttgtctgcctctcttgttccagcgccgttttccctatatccggaattcgtccctgcgcattccaatacctgaagcggccacagggtacaggacagggagccctccgacagaaaagagtcgcggcgctaaacaaagcctgatatcactccgcttccataagccggatccccataaactacgctctagctcctcccactgccgttgtgggtaacgcggacgtggaagaacctcgtctgcggaggaaaagtcccaggtgccgagtcaatccccatacacagccgccgccattgcctcgagtccttgtgtctgactgtctgttcctgctgctgtatgacacagcacctcgaggcaaggaaataagaaaactgcctctgatccaagcagagaaggcagagaaggtctgcctgtagatctgctgtagggcttgtcaccattggaagcaaggtcctacttcagtggcagatctggtggccttggagtggctgaagaccaccaccctccacagggctgggcccatgcacagccatccttccctaccttgaaactcctgtagcctgtaataccagctgtgggtactactctcagtgttggagatcatcaaaatacaattggaccagaccctttggaaataattctgtgtctcaaatgccctgtggagcacacacttaatcagttgatggctatggaattttccaacatcagctaaagagaagggatagagtggtgacttccaagcttcatgcagaaccggacaacagaaattgagagggaaatttctatgacagaagagagaaagaagaaaattgctggaataatgaccttgaatagaggaaatgggatatcatctggtaagcaaatagagaagctggctttagataagagcctggacaattcattcatagaatagcagaaaaggcagaatttatgtccatagatgcaagtggtatagtagatatagtgatgggagtttgtaaaagttaccttctaattgctattttttttaatgaaataagaaacaaagtcatcaactcaaagtgagtaatatgtaggaggtgattattgtttgaggagagaggagaatgtgtgatatcttttgttaattatggtaaaatataacacaaaatttgccattttaaccattttaagtggacaattaagtgtcattaattacattcacactgttgtacatctgccaccactatcttcttctaaaactttttatcacctcttatagtttaaattgtgcccccacagaagatatgttggagtcctatcccttaatattaatgtgaccttatttggagataggatctttataaaggtattcaaattaacatgagatcattagggtggaatcctaatccaatatgattagtgtccttataaaaaggggaaatttggacacagaggcaagcacacagggagagtgccaagtgaagatgaagaaaaagatcagagtgatacaaagaagtcaaagaacaccaaagattgccaacaaaccaccagaagctaggagaaaggcctgaaacatatccttcccgcatgccttcagagggagcgtgggcctgcagacactttgatctcagacttctaccctatggaactgtgcaaaaataaatgtctgttgtttaagccattcagtttgtgttacagcacaaatgtattctatttagaatacatcattctaaatagaaattttttaataattaagtattttcctctccttggagcacttggtaacttctaattctactttctatctctattaatttgcctattctagatatatcaaatgagtgaaataatacaatagttgtctttttgtgtctggcttcttttactttgcataatgttttcaaggttcattcatgttgtagcatgtatctgaacttcattctttttctggctgaaaattttattatatgtatgtatnacattttgtgtctctattcatcacttgatggatatttggatagatttaagtcatttgtcttttgtgaatagtgctattaatattatgaacacttgagtacaagtttttgtttaaatacctcttttcttttttcttggatgtattatctaggtgaagaatggcaagatcatatggtaattctatttagctttttgaggaactgccaaacctttccacaatgactgcacaattatacatttccagtagggttccagtttatccatattctcaccaatgcttttatttttctgttttttaaaattatactgatcataggaggtgtaaagcagtatttcagtttggttttgatttgcatttccctaatgattaatgatgttgagaatcctttcacatgcttattgaccatttttatgtcattttgggaaaatatttattcacatttttgcccattttttagttgggttgtctttttttgctgttgagttgtaggagttctttatattttctggatattaaaccctcatcagataaattatttgcaaatgttttcttccattctgttaattttcttaatgttgtcttttgatgcacattgtaaaaatttttaaaatcaatttccattttcttatttttttattattatgctttaagttctgggatacatgtgcagagcgtgcaggtttgttacataggtatatacgtgccatggtggtttgctgcacccatcaacccatcatctacattaggcgtttctcc

SEQ ID NO: 364312 - DNA, 2825 bp, Homo sapiens
  misc_feature (2069)..(2069): n is a, c, g, or t
ctggaaacccatgttgcatttcagttcaggaaagaatggtaggcttggtggggggagctcccgcaaaaggggaactaatacagaaacactctggtatttgtctgcctctcttgttccagcgccgttttccctatatccggaattcgtccctgcgcattccaatacctgaagcggccacagggtacaggacagggagccctccgacagaaaagagtcgcggcgctaaacaaagcctgatatcactccgcttccataagccggatccccataaactacgctctagctcctcccactgccgttgtgggtaacgcggacgtggaagaacctcgtctgcggaggaaaaggtagatgttaaatggtaactacgcgcgaggttctgaggagccctgggaacaggaaggagaaaagaataccaaaagtgacaacagtttgccaatcgcagtctttaatctgataaagcggttatctcgtcttgagtcccaggtgccgagtcaatccccatacacagccgccgccattgcctcgagtccttgtgtctgactgtctgttcctgctgctgtatgacacagcacctcgaggcaaggaaataagaaaactgcctctgatccaagcagagaaggcagagaagaactcctgtagcctgtaataccagctgtgggtactactctcagtgttggagatcatcaaaatacaattggaccagaccctttggaaataattctgtgtctcaaatgccctgtggagcacacacttaatcagttgatggctatggaattttccaacatcagctaaagagaaggcaatgaatgacacttcctgttgcctcatatcctcaccagtatttggcactgatagagtggtgacttccaagcttcatgcagaaccggacaacagaaattgagagggaaatttctatgacagaagagagaaagaagaaaattgctggaataatgaccttgaatagaggaaatgggatatcatctggtaagcaaatagagaagctggctttagataagagcctggacaattcattcatagaatagcagaaaaggcagaatttatgtccatagatgcaagtggtatagtagatatagtgatgggagtttgtaaaagttaccttctaattgctattttttttaatgaaataagaaacaaagtcatcaactcaaagtgagtaatatgtaggaggtgattattgtttgaggagagaggagaatgtgtgatatcttttgttaattatggtaaaatataacacaaaatttgccattttaaccattttaagtggacaattaagtgtcattaattacattcacactgttgtacatctgccaccactatcttcttctaaaactttttatcacctcttatagtttaaattgtgcccccacagaagatatgttggagtcctatcccttaatattaatgtgaccttatttggagataggatctttataaaggtattcaaattaacatgagatcattagggtggaatcctaatccaatatgattagtgtccttataaaaaggggaaatttggacacagaggcaagcacacagggagagtgccaagtgaagatgaagaaaaagatcagagtgatacaaagaagtcaaagaacaccaaagattgccaacaaaccaccagaagctaggagaaaggcctgaaacatatccttcccgcatgccttcagagggagcgtgggcctgcagacactttgatctcagacttctaccctatggaactgtgcaaaaataaatgtctgttgtttaagccattcagtttgtgttacagcacaaatgtattctatttagaatacatcattctaaatagaaattttttaataattaagtattttcctctccttggagcacttggtaacttctaattctactttctatctctattaatttgcctattctagatatatcaaatgagtgaaataatacaatagttgtctttttgtgtctggcttcttttactttgcataatgttttcaaggttcattcatgttgtagcatgtatctgaacttcattctttttctggctgaaaattttattatatgtatgtatnacattttgtgtctctattcatcacttgatggatatttggatagatttaagtcatttgtcttttgtgaatagtgctattaatattatgaacacttgagtacaagtttttgtttaaatacctcttttcttttttcttggatgtattatctaggtgaagaatggcaagatcatatggtaattctatttagctttttgaggaactgccaaacctttccacaatgactgcacaattatacatttccagtagggttccagtttatccatattctcaccaatgcttttatttttctgttttttaaaattatactgatcataggaggtgtaaagcagtatttcagtttggttttgatttgcatttccctaatgattaatgatgttgagaatcctttcacatgcttattgaccatttttatgtcattttgggaaaatatttattcacatttttgcccattttttagttgggttgtctttttttgctgttgagttgtaggagttctttatattttctggatattaaaccctcatcagataaattatttgcaaatgttttcttccattctgttaattttcttaatgttgtcttttgatgcacattgtaaaaatttttaaaatcaatttccattttcttatttttttattattatgctttaagttctgggatacatgtgcagagcgtgcaggtttgttacataggtatatacgtgccatggtggtttgctgcacccatcaacccatcatctacattaggcgtttctcc

SEQ ID NO: 364313 - DNA, 1158 bp, Homo sapiens
ctggaaacccatgttgcatttcagttcaggaaagaatggtaggcttggtggggggagctcccgcaaaaggggaactaatacagaaacactctggtatttgtctgcctctcttgttccagcgccgttttccctatatccggaattcgtccctgcgcattccaatacctgaagcggccacagggtacaggacagggagccctccgacagaaaagagtcgcggcgctaaacaaagcctgatatcactccgcttccataagccggatccccataaactacgctctagctcctcccactgccgttgtgggtaacgcggacgtggaagaacctcgtctgcggaggaaaaggtagatgttaaatggtaactacgcgcgaggttctgaggagccctgggaacaggaaggagaaaagaataccaaaagtgacaacagtttgccaatcgcagtctttaatctgataaagcggttatctcgtcttgagtcccaggtgccgagtcaatccccatacacagccgccgccattgcctcgagtccttgtgtctgactgtctgttcctgctgctgtatgacacagcacctcgaggcaaggaaataagaaaactgcctctgatccaagcagagaaggcagagaaggtagatctgtccccaggtctgtggaactgtcagttgtgaagttttgtaaaatggtcacccaacttaaaactaggaaattacgaagaagagaaaattgccctgtatctgttaaggtctgcctgtagatctgctgtagggcttgtcaccattggaagcaagaactcctgtagcctgtaataccagctgtgggtactactctcagtgttggagatcatcaaaatacaattggaccagaccctttggaaataattctgtgtctcaaatgccctgtggagcacacacttaatcagttgatggctatggaattttccaacatcagctaaagagaagggttctggagacagcctgtatttcttggatcttggcttccttccatcttcaaagccaacgatgaccagtgtagactttctatgctgcttcaatctgacatggagtccctgccttccacatctaaagtacccttgcaattacattggccaagataacccagaataatcttaaattaaactcagctgaatagcaatcttaaa

SEQ ID NO: 364314 - DNA, 619 bp, Homo sapiens
ttcccgacaccctcgcggcgagcgggttttcttgccgcatcctgcgcagcccctgcctactttggtgcagaggcgtggggggcgggacgcgtctttcccgttcggatcgcggggaaagcagtggctccaagtgagccagaggagagctgaggagaggagggggaggccgacgacctgggccctgggcctctgaaggcaagtgcgggtgcatgaggtgggggtccgggttgcgggggtggtctggcagggtggaccagcaggcagcctgccccgcggaccctgacagcctggcaacgaggagacgatccggtcggagccaggcgcttgagagaggtgcgcagtgcccgagacccctggcgatggggaggcggtgaccggagcgggcctggccaagggctgaggggctggctcgggaggcaccgccagatcgtttggaggagaaccgcgctgaccgcttcccagccagctttgcaggcgcccgcgccccgccctcgacggtgtctgtgcccggagagggctgtgggggaggctcctgcgggagaaatggcggagcgggagccgctgtgggggcgcccgggaaggccgttggggggcgcccggcgaggccggcgggggtcgg

SEQ ID NO: 364315 - DNA, 758 bp, Homo sapiens
  misc_feature (9)..(9): n is a, c, g, or t
  misc_feature (142)..(142): n is a, c, g, or t
  misc_feature (148)..(148): n is a, c, g, or t
tgacttcgnccgttactcttgcgccgctttgcgctgccgcgttgttcccgccgggccgtgtgccccggccgttttctgttttccccgtgttttgcgtgtttgtgctccccctgccgcgcgccctcgcccgcgccttgctgcngttgcncccgtcgctgtcatcattggttgcaccctttaacaagaatgagtcaaaggccaatattcttaatattattgaaatatttgagaatataaattttcagttcaaaacaaaggcaaagctatttaccaaggaaaagttcactaaatctgagcttatttcaatattccaggaagcaaaacagtttggtcagaaactccaagacttagcagagcacagtgatcccgaagtgagagataaagtcatacgattaatactaaaactctgaatacccctctgttctcataaagcctcaaacagttttttggagttgcaatatgaaaccaatgcatattgtaattataaattcaatacttatgttttccatgttgattgagggaggcaattttatggataccaattaatcttgagatcctgaacatgtgctgatttttattgtgctatatagtatataaattgagatatttttggtatttctgcaacgtgacctgataatgaatctattcatcctgagtaagctatacttctgtgctttatattgatatgtgtattcttttgagattttatttacatgttgttaataaagttgcatgctaaaactggtgaaaaaattgtc

SEQ ID NO: 364316 - DNA, 3505 bp, Homo sapiens
ctggaaacccatgttgcatttcagttcaggaaagaatggtaggcttggtggggggagctcccgcaaaaggggaactaatacagaaacactctggtatttgtctgcctctcttgttccagcgccgttttccctatatccggaattcgtccctgcgcattccaatacctgaagcggccacagggtacaggacagggagccctccgacagaaaagagtcgcggcgctaaacaaagcctgatatcactccgcttccataagccggatccccataaactacgctctagctcctcccactgccgttgtgggtaacgcggacgtggaagaacctcgtctgcggaggaaaaggtagatgttaaatggtaactacgcgcgaggttctgaggagccctgggaacaggaaggagaaaagaataccaaaagtgacaacagtttgccaatcgcagtctttaatctgataaagcggttatctcgtcttgagtcccaggtgccgagtcaatccccatacacagccgccgccattgcctcgagtccttgtgtctgactgtctgttcctgctgctgtatgacacagcacctcgaggcaaggaaataagaaaactgcctctgatccaagcagagaaggcagagaaggtagatctgtccccaggtctgtggaactgtcagttgtgaagttttgtaaaatggtcacccaacttaaaactaggaaattacgaagaagagaaaattgccctgtatctgttaaggttggtgtaaaggtacagggacaggggggcaacttcgactagagaattccatctcttctgttttgtcattttaccaattattcccatctgccccaccccctgctgctgctgatttagttgggagtcttggtaagttgtgggggtacagaatgctaagctgcctttcccactctccactgcttgtcctgctctcacgcttgaacctagtctaatctgaacgagggacattctagggcaatcactgaagaggaagatggtgggcaataggaaggaggaggaggagtagccctgaaacaaagcagtgggggagaggggataggaggagggaaacactagacaaaatctggaaaggcaagaataagggcaagggaccaaggtctgtcaccaggagatcagtttccacattctcctgtttgtttatttgtccataggtctgcctgtagatctgctgtagggcttgtcaccattggaagcaaggtcctacttcagtggcagatctggtggccttggagtggctgaagaccaccaccctccacagggctgggcccatgcacagccatccttccctaccttgagtgagcttcctctgcatgttttctatatcactggcagagcctgtagttggaaaggggacagagtgactactggactttgtgtgaaaacaccaaccgggacaaaacttcagtcaaggctgagacgggtgggggtatataacttgtccttacgttaaacttggaacatggttgactctgggacagaagcaagggctagaggaaaggctgaggctggcctgcaagatggaatcagtggtcctgccactgctagagtgaatggtaaaacccaggccgaggcagtggctgaggcagaactgaaaacagaatcagtgacccaggccaaagctggtgatggagcaatgaccaggacacatacagtgacctacagggaggctatggctgtgacaagggaagtgatcaaggtggaagatacaactaagactagagtcatggttgagactaagacaaaacccctggcagaacgcagtatagtgccacaaaccaagtcaaaggccatgcctatgtctagggtcagtactgtaaccaagtctgaagtcaaggttgttgctgtcattgaggcaaatattaggtcctatgccaagtcacatgataaggccaatactgggtccagacctgacagaagggaagagaccagcattgggatgaaatccagtgatgaggatgaagaaaatatatgctcctggttctggactggagaagagcctagtgtagggtcctggttctggcctgaagaagagacctctcttcaagtttataagcccctacctaagatccaggaaaagcccaagcccacacacaaacccacacttactataaaacaaaaggtaatagcatggtcaagggccaggtatattgtcctagttccagttgaaggaggggagcaatccttgcctccagaaggaaactggaccctggttgagaccttgattgaaactcctctggggattcgacctttgaccaagatcccaccttatcatgggccttattaccagaccttagctgagatcaaaaaacagattaggcaaagggaaaagtatgggcctaatccgaaggcctgccactgcaaatcacgtggctttagtttagagcctaaagagtttgataaacttgttgccctccttaagttaactaaggatcctttcattcatgaaatagctacaatgataatgggcatcagtcctgcttatccatttactcaagatataattcatgatgtaggtattactgttatgattgaaaacttggtcaataatcccaatgttaaagaacaccctggagctttaagtatggtggatgacagctctgagtcttccgaagaaccaaaatcaggggagtcatatatacatcaagtttgtaaaggcataatctcttgccccttgaactcccctgtgcagctggctggactgaaattactagggcacttgagtataaaatttgaagatcactatgtgattaccagttatattccagatttcctcaccttgttaaacaagggaagtgtcaaaaccaagttttatgttttaaaagtgttttcgtgtttgtctaaaaatcacgccaatacaagagaattgatcagtgccaaagtactgtcatcattggttgcaccctttaacaagaatgagtcaaaggccaatattcttaatattattgaaatatttgagaatataaattttcagttcaaaacaaaggcaaagctatttaccaaggaaaagttcactaaatctgagcttatttcaatattccaggaagcaaaacagtttggtcagaaactccaagacttagcagagcacagtgatcccgaagtgagagataaagtcatacgattaatactaaaactctgaatacccctctgttctcataaagcctcaaacagttttttggagttgcaatatgaaaccaatgcatattgtaattataaattcaatacttatgttttccatgttgattgagggaggcaattttatggataccaattaatcttgagatcctgaacatgtgctgatttttattgtgctatatagtatataaattgagatatttttggtatttctgcaacgtgacctgataatgaatctattcatcctgagtaagctatacttctgtgctttatattgatatgtgtattcttttgagattttatttacatgttgttaataaagttgcatgctaaaactggtgaaaaaattgtc

SEQ ID NO: 364317 - DNA, 4189 bp, Homo sapiens
ctggaaacccatgttgcatttcagttcaggaaagaatggtaggcttggtggggggagctcccgcaaaaggggaactaatacagaaacactctggtatttgtctgcctctcttgttccagcgccgttttccctatatccggaattcgtccctgcgcattccaatacctgaagcggccacagggtacaggacagggagccctccgacagaaaagagtcgcggcgctaaacaaagcctgatatcactccgcttccataagccggatccccataaactacgctctagctcctcccactgccgttgtgggtaacgcggacgtggaagaacctcgtctgcggaggaaaaggtagatgttaaatggtaactacgcgcgaggttctgaggagccctgggaacaggaaggagaaaagaataccaaaagtgacaacagtttgccaatcgcagtctttaatctgataaagcggttatctcgtcttgagtcccaggtgccgagtcaatccccatacacagccgccgccattgcctcgagtccttgtgtctgactgtctgttcctgctgctgtatgacacagcacctcgaggcaaggaaataagaaaactgcctctgatccaagcagagaaggcagagaaggtctgcctgtagatctgctgtagggcttgtcaccattggaagcaagaactcctgtagcctgtaataccagctgtgggtactactctcagtgttggagatcatcaaaatacaattggaccagaccctttggaaataattctgtgtctcaaatgccctgtggagcacacacttaatcagttgatggctatggaattttccaacatcagctaaagagaagggcctactttaaggctggccaattctgcaagaaaggcaaggaggaggagactggctcacagctctggaggacccccttctgtcagctgtggggcttgacaccacttgaacaagaaaaggagggggaaactgcaccacatcagtgaagatccacctccagtggctgctctgctggtggtggagttgctgctgacaaccaccctcaacgggtctgcacccatccaggaaatatctgtcttcctttagcttggttgtacctgttctcactctatctgtattattgaattattgactgagactgtgtttgggaaggaggctgagtgactactggactggatattgactctaactcttattcccaagcttatatccttaatcacctaaagatcagagtgtgaagaaacaaacctgtgacagatctgtggttgaggtttagactacgggaggagtatattacctgactttctttgtaacttgtaccatgactggggcagagattgagcctagtgcccaggccaagcctgaaaagaaggctggggaagaggttatcgctgggcctgagagagagaatgatgtccctctggtggtcagacccaaggttaggacccaggcaactactggggcaaggcccaaaactgagaccaagtctgtgcctgcggcaaggcccaaaactgaggcccaagcaatgtctggggcaaggcccaaaactgaggtccaagtaatgggtggtgcaagacccaaaacggaggctcaaggaatcacaggggccaggcccaaaaccgatgccagggcagtaggtggcgctcgttctaaaactgatgccaaggcaatccctggagcaaggcccaaggatgaggcccaggcatgggcccagagtgaatttgggactgaagcagtgtcacaggcagaaggagtgtcccagactaatgccgttgcttggccactggccactgctgagtctggatcagttactaaatctaagggcctgtctatggatagagaactagtcaatgtggatgctgaaacctttcctggcacccagggtcagaaaggaatccagccctggtttggaccaggggaggagactaatatggggtcttggtgctattccaggcccagggccagagaggaggcctctaatgagtctgggttctggtcagcagatgagacctctacagcgtcttctttctggactggagaagagacaagtgtcagatcatggcccagggaagagtccaataccaggtccaggcacagggctaaacatcagactaatcccaggtccaggcccagatccaagcaagaagcctatgttgattcctggtctggatctgaggatgaggccagcaacccattctccttctgggttggagaaaataccaataacttgttcaggcccagagtcagggaggaggcaaatatcaggtccaagctcaggacaaatagagaagattgttttgaatctgagtctgaagatgagttctataagcagtcctgggttttgcctggagaagaggccaatagtagattcaggcacagagacaaagaagatcctaatactgccttgaaactcagggcccagaaagatgttgacagtgatagggtcaaacaagaacccaggtttgaggaggaagtcattattgggtcctggttctgggcagaaaaagaggccagtttggagggtggagcttcagcaatctgtgaatctgagccaggaactgaggagggggccattggcggatccgcgtactgggctgaggaaaagtccagtttgggggctgtggccagagaagaggccaagccggagtctgaagaagaggccatatttgggtcctggttctgggacagagatgaggcctgctttgacctaaatccctgtcctgtgtacaaggtcagtgataggttcagagatgcagctgaggagcttaatgcatcctccaggccccaaacctgggacgaggtcactgttgaattcaaacctggtctttttcatggggttggcttccgatccacaagcccctttggaattcccgaagaggcttctgaaatgcttgaggcaaagcccaagaacctggaacttagcccagaaggagaagagcaggaatctttgcttcagcctgatcagcctagtcctgagttcacatttcagtatgatccttcctaccggtcagtccgggaaattcgagagcatcttagggccagggagagtgcagagtctgagagttggtcctgcagctgcatacaatgtgagctgaaaattggttctgaagagtttgaagaattccttttattaatggacaaaattcgggatccttttattcatgaaatatctaaaattgcaatgggtatgagaagtgcttctcaatttacccgagatttcattcgagattcaggtgttgtctcacttattgaaaccttgcttaattatccatcctctagagttaggacaagttttttggaaaatatgattcacatggctccaccttatccaaatctaaacatgattgagacattcatatgtcaagtgtgtgaggaaacccttgcacatagtgtggattcccttgagcagctgactggaataaggatgcttagacacctcactatgactattgactatcacacactgattgccaactatatgtccgggtttctctccttattaaccacagccaatgcgagaacgaagtttcacgttctgaaaatgctattgaatttgtctgaaaatcctgctgtggcaaaaaaactattcagtgccaaagctctttcaatatttgtgggtctctttaacatagaagagacaaatgataatattcaaattgttattaaaatgtttcagaatatcagtaacattataaaaagtggaaagatgtccttaattgatgatgatttcagtcttgagccgcttatttctgcatttcgtgaatttgaggagttagctaagcaactacaagcccaaatagacaaccaaaatgatcctgaggtgggacaacaaagttaatatgattaaccacctgccgctgatcagccttatgttcccaaagagccctgagtagtgctttggtgttcacagtctgtttttttgttgtaacttatattttttaatgctgatgttaactttgtcaaactcttgttttgagctggatcattttgtggatgccaaatgaatatcaaaactgaaaacacatttgttgatatttgtcttgctgtccagattgcggtatttttcagtattaagttttcaatgaactgtgtcacctaagtaagctaccctgctattcgttgtttaaatatatggttctctatttgagtctgtgttttcaataaagttctatgttaaaattggca

SEQ ID NO: 364318 - DNA, 3645 bp, Homo sapiens
agcgggttttcttgccgcatcctgcgcagcccctgcctactttggtgcagaggcgtggggggcgggacgcgtctttcccgttcggatcgcggggaaagcagtggctccaagtgagccagaggagagctgaggagaggagggggaggccgacgacctgggccctgggcctctgaaggctccaggttgatgtcaaagtcttgtgtctgtgcggtaggtctggcgtattctgacaggacacagtgagcgtctgtagaggagaggcttgaaataaaggagcacgaatattgcctggatttctggaggcctactttaaggctggccaattctgcaagaaaggcaaggaggaggagactggctcacagctctggaggacccccttctgtcagctgtggggcttgacaccacttgaacaagaaaaggagggggaaactgcaccacatcagtgaagatccacctccagtggctgctctgctggtggtggagttgctgctgacaaccaccctcaacgggtctgcacccatccaggaaatatctgtcttcctttagcttggttgtacctgttctcactctatctgtattattgaattattgactgagactgtgtttgggaaggaggctgagtgactactggactggatattgactctaactcttattcccaagcttatatccttaatcacctaaagatcagagtgtgaagaaacaaacctgtgacagatctgtggttgaggtttagactacgggaggagtatattacctgactttctttgtaacttgtaccatgactggggcagagattgagcctagtgcccaggccaagcctgaaaagaaggctggggaagaggttatcgctgggcctgagagagagaatgatgtccctctggtggtcagacccaaggttaggacccaggcaactactggggcaaggcccaaaactgagaccaagtctgtgcctgcggcaaggcccaaaactgaggcccaagcaatgtctggggcaaggcccaaaactgaggtccaagtaatgggtggtgcaagacccaaaacggaggctcaaggaatcacaggggccaggcccaaaaccgatgccagggcagtaggtggcgctcgttctaaaactgatgccaaggcaatccctggagcaaggcccaaggatgaggcccaggcatgggcccagagtgaatttgggactgaagcagtgtcacaggcagaaggagtgtcccagactaatgccgttgcttggccactggccactgctgagtctggatcagttactaaatctaagggcctgtctatggatagagaactagtcaatgtggatgctgaaacctttcctggcacccagggtcagaaaggaatccagccctggtttggaccaggggaggagactaatatggggtcttggtgctattccaggcccagggccagagaggaggcctctaatgagtctgggttctggtcagcagatgagacctctacagcgtcttctttctggactggagaagagacaagtgtcagatcatggcccagggaagagtccaataccaggtccaggcacagggctaaacatcagactaatcccaggtccaggcccagatccaagcaagaagcctatgttgattcctggtctggatctgaggatgaggccagcaacccattctccttctgggttggagaaaataccaataacttgttcaggcccagagtcagggaggaggcaaatatcaggtccaagctcaggacaaatagagaagattgttttgaatctgagtctgaagatgagttctataagcagtcctgggttttgcctggagaagaggccaatagtagattcaggcacagagacaaagaagatcctaatactgccttgaaactcagggcccagaaagatgttgacagtgatagggtcaaacaagaacccaggtttgaggaggaagtcattattgggtcctggttctgggcagaaaaagaggccagtttggagggtggagcttcagcaatctgtgaatctgagccaggaactgaggagggggccattggcggatccgcgtactgggctgaggaaaagtccagtttgggggctgtggccagagaagaggccaagccggagtctgaagaagaggccatatttgggtcctggttctgggacagagatgaggcctgctttgacctaaatccctgtcctgtgtacaaggtcagtgataggttcagagatgcagctgaggagcttaatgcatcctccaggccccaaacctgggacgaggtcactgttgaattcaaacctggtctttttcatggggttggcttccgatccacaagcccctttggaattcccgaagaggcttctgaaatgcttgaggcaaagcccaagaacctggaacttagcccagaaggagaagagcaggaatctttgcttcagcctgatcagcctagtcctgagttcacatttcagtatgatccttcctaccggtcagtccgggaaattcgagagcatcttagggccagggagagtgcagagtctgagagttggtcctgcagctgcatacaatgtgagctgaaaattggttctgaagagtttgaagaattccttttattaatggacaaaattcgggatccttttattcatgaaatatctaaaattgcaatgggtatgagaagtgcttctcaatttacccgagatttcattcgagattcaggtgttgtctcacttattgaaaccttgcttaattatccatcctctagagttaggacaagttttttggaaaatatgattcacatggctccaccttatccaaatctaaacatgattgagacattcatatgtcaagtgtgtgaggaaacccttgcacatagtgtggattcccttgagcagctgactggaataaggatgcttagacacctcactatgactattgactatcacacactgattgccaactatatgtccgggtttctctccttattaaccacagccaatgcgagaacgaagtttcacgttctgaaaatgctattgaatttgtctgaaaatcctgctgtggcaaaaaaactattcagtgccaaagctctttcaatatttgtgggtctctttaacatagaagagacaaatgataatattcaaattgttattaaaatgtttcagaatatcagtaacattataaaaagtggaaagatgtccttaattgatgatgatttcagtcttgagccgcttatttctgcatttcgtgaatttgaggagttagctaagcaactacaagcccaaatagacaaccaaaatgatcctgaggtgggacaacaaagttaatatgattaaccacctgccgctgatcagccttatgttcccaaagagccctgagtagtgctttggtgttcacagtctgtttttttgttgtaacttatattttttaatgctgatgttaactttgtcaaactcttgttttgagctggatcattttgtggatgccaaatgaatatcaaaactgaaaacacatttgttgatatttgtcttgctgtccagattgcggtatttttcagtattaagttttcaatgaactgtgtcacctaagtaagctaccctgctattcgttgtttaaatatatggttctctatttgagtctgtgttttcaataaagttctatgttaaaattggca

SEQ ID NO: 364319 - DNA, 4158 bp, Homo sapiens
  misc_feature (17)..(17): n is a, c, g, or t
agtgaggaagagtcttncctggagggaacatggccctgccaacaccttggttcaggacttctggcctccaatactgagagaatacatttctgttattgtaacccacccagtttctggttgctccatgcatccctcaactacagacaaacagagagccaaatcatgaatgaactcccattcacaattgctgcaaagagaataaaatacctaggaataaagctaacaaggaaagtgaaggacctcttcaaggagaactacaaaccactgctcaagggaataagagaggacacaaacaaatggaaaaacagtccatcctcggggataggaagaatcaatatcatgaaaatggccacactacccaaagtaatttataaattcagtgctattcccatcaaactaccattgacattcttcacagaattagaaaaaaactagttttaatttcatatggaacaaaaaaagagccctatagcgaagacaatcctaagcaaaaagaaaaaaagttggaagagactcaaagccccatttccttcctccacccctaggtcctacttcagtggcagatctggtggccttggagtggctgaagaccaccaccctccacagggctgggcccatgcacagccatccttccctaccttgaaactcctgtagcctgtaataccagctgtgggtactactctcagtgttggagatcatcaaaatacaattggaccagaccctttggaaataattctgtgtctcaaatgccctgtggagcacacacttaatcagttgatggctatggaattttccaacatcagctaaagagaagggcctactttaaggctggccaattctgcaagaaaggcaaggaggaggagactggctcacagctctggaggacccccttctgtcagctgtggggcttgacaccacttgaacaagaaaaggagggggaaactgcaccacatcagtgaagatccacctccagtggctgctctgctggtggtggagttgctgctgacaaccaccctcaacgggtctgcacccatccaggaaatatctgtcttcctttagcttggttgtacctgttctcactctatctgtattattgaattattgactgagactgtgtttgggaaggaggctgagtgactactggactggatattgactctaactcttattcccaagcttatatccttaatcacctaaagatcagagtgtgaagaaacaaacctgtgacagatctgtggttgaggtttagactacgggaggagtatattacctgactttctttgtaacttgtaccatgactggggcagagattgagcctagtgcccaggccaagcctgaaaagaaggctggggaagaggttatcgctgggcctgagagagagaatgatgtccctctggtggtcagacccaaggttaggacccaggcaactactggggcaaggcccaaaactgagaccaagtctgtgcctgcggcaaggcccaaaactgaggcccaagcaatgtctggggcaaggcccaaaactgaggtccaagtaatgggtggtgcaagacccaaaacggaggctcaaggaatcacaggggccaggcccaaaaccgatgccagggcagtaggtggcgctcgttctaaaactgatgccaaggcaatccctggagcaaggcccaaggatgaggcccaggcatgggcccagagtgaatttgggactgaagcagtgtcacaggcagaaggagtgtcccagactaatgccgttgcttggccactggccactgctgagtctggatcagttactaaatctaagggcctgtctatggatagagaactagtcaatgtggatgctgaaacctttcctggcacccagggtcagaaaggaatccagccctggtttggaccaggggaggagactaatatggggtcttggtgctattccaggcccagggccagagaggaggcctctaatgagtctgggttctggtcagcagatgagacctctacagcgtcttctttctggactggagaagagacaagtgtcagatcatggcccagggaagagtccaataccaggtccaggcacagggctaaacatcagactaatcccaggtccaggcccagatccaagcaagaagcctatgttgattcctggtctggatctgaggatgaggccagcaacccattctccttctgggttggagaaaataccaataacttgttcaggcccagagtcagggaggaggcaaatatcaggtccaagctcaggacaaatagagaagattgttttgaatctgagtctgaagatgagttctataagcagtcctgggttttgcctggagaagaggccaatagtagattcaggcacagagacaaagaagatcctaatactgccttgaaactcagggcccagaaagatgttgacagtgatagggtcaaacaagaacccaggtttgaggaggaagtcattattgggtcctggttctgggcagaaaaagaggccagtttggagggtggagcttcagcaatctgtgaatctgagccaggaactgaggagggggccattggcggatccgcgtactgggctgaggaaaagtccagtttgggggctgtggccagagaagaggccaagccggagtctgaagaagaggccatatttgggtcctggttctgggacagagatgaggcctgctttgacctaaatccctgtcctgtgtacaaggtcagtgataggttcagagatgcagctgaggagcttaatgcatcctccaggccccaaacctgggacgaggtcactgttgaattcaaacctggtctttttcatggggttggcttccgatccacaagcccctttggaattcccgaagaggcttctgaaatgcttgaggcaaagcccaagaacctggaacttagcccagaaggagaagagcaggaatctttgcttcagcctgatcagcctagtcctgagttcacatttcagtatgatccttcctaccggtcagtccgggaaattcgagagcatcttagggccagggagagtgcagagtctgagagttggtcctgcagctgcatacaatgtgagctgaaaattggttctgaagagtttgaagaattccttttattaatggacaaaattcgggatccttttattcatgaaatatctaaaattgcaatgggtatgagaagtgcttctcaatttacccgagatttcattcgagattcaggtgttgtctcacttattgaaaccttgcttaattatccatcctctagagttaggacaagttttttggaaaatatgattcacatggctccaccttatccaaatctaaacatgattgagacattcatatgtcaagtgtgtgaggaaacccttgcacatagtgtggattcccttgagcagctgactggaataaggatgcttagacacctcactatgactattgactatcacacactgattgccaactatatgtccgggtttctctccttattaaccacagccaatgcgagaacgaagtttcacgttctgaaaatgctattgaatttgtctgaaaatcctgctgtggcaaaaaaactattcagtgccaaagctctttcaatatttgtgggtctctttaacatagaagagacaaatgataatattcaaattgttattaaaatgtttcagaatatcagtaacattataaaaagtggaaagatgtccttaattgatgatgatttcagtcttgagccgcttatttctgcatttcgtgaatttgaggagttagctaagcaactacaagcccaaatagacaaccaaaatgatcctgaggtgggacaacaaagttaatatgattaaccacctgccgctgatcagccttatgttcccaaagagccctgagtagtgctttggtgttcacagtctgtttttttgttgtaacttatattttttaatgctgatgttaactttgtcaaactcttgttttgagctggatcattttgtggatgccaaatgaatatcaaaactgaaaacacatttgttgatatttgtcttgctgtccagattgcggtatttttcagtattaagttttcaatgaactgtgtcacctaagtaagctaccctgctattcgttgtttaaatatatggttctctatttgagtctgtgttttcaataaagttctatgttaaaattggca

SEQ ID NO: 364320 - DNA, 2860 bp, Homo sapiens
ctggaaacccatgttgcatttcagttcaggaaagaatgcgccgttttccctatatccggaattcgtccctgcgcattccaatacctgaagcggccacagggtacaggacagggagccctccgacagaaaagagtcgcggcgctaaacaaagcctgatatcactccgcttccataagccggatccccataaactacgctctagctcctcccactgccgttgtgggtaacgcggacgtggaagaacctcgtctgcggaggaaaagtcccaggtgccgagtcaatccccatacacagccgccgccattgcctcgagtccttgtgtctgactgtctgttcctgctgctgtatgacacagcacctcgaggcaaggaaataagaaaactgcctctgatccaagcagagaaggcagagaaggtagatctgtccccaggtctgtggaactgtcagttgtgaagttttgtaaaatggtcacccaacttaaaactaggaaattacgaagaagagaaaattgccctgtatctgttaaggtctgcctgtagatctgctgtagggcttgtcaccattggaagcaaggtcctacttcagtggcagatctggtggccttggagtggctgaagaccaccaccctccacagggctgggcccatgcacagccatccttccctaccttgagtgagcttcctctgcatgttttctatatcactggcagagcctgtagttggaaaggggacagagtgactactggactttgtgtgaaaacaccaaccgggacaaaacttcagtcaaggctgagacgggtgggggtatataacttgtccttacgttaaacttggaacatggttgactctgggacagaagcaagggctagaggaaaggctgaggctggcctgcaagatggaatcagtggtcctgccactgctagagtgaatggtaaaacccaggccgaggcagtggctgaggcagaactgaaaacagaatcagtgacccaggccaaagctggtgatggagcaatgaccaggacacatacagtgacctacagggaggctatggctgtgacaagggaagtgatcaaggtggaagatacaactaagactagagtcatggttgagactaagacaaaacccctggcagaacgcagtatagtgccacaaaccaagtcaaaggccatgcctatgtctagggtcagtactgtaaccaagtctgaagtcaaggttgttgctgtcattgaggcaaatattaggtcctatgccaagtcacatgataaggccaatactgggtccagacctgacagaagggaagagaccagcattgggatgaaatccagtgatgaggatgaagaaaatatatgctcctggttctggactggagaagagcctagtgtagggtcctggttctggcctgaagaagagacctctcttcaagtttataagcccctacctaagatccaggaaaagcccaagcccacacacaaacccacacttactataaaacaaaaggtaatagcatggtcaagggccaggtatattgtcctagttccagttgaaggaggggagcaatccttgcctccagaaggaaactggaccctggttgagaccttgattgaaactcctctggggattcgacctttgaccaagatcccaccttatcatgggccttattaccagaccttagctgagatcaaaaaacagattaggcaaagggaaaagtatgggcctaatccgaaggcctgccactgcaaatcacgtggctttagtttagagcctaaagagtttgataaacttgttgccctccttaagttaactaaggatcctttcattcatgaaatagctacaatgataatgggcatcagtcctgcttatccatttactcaagatataattcatgatgtaggtattactgttatgattgaaaacttggtcaataatcccaatgttaaagaacaccctggagctttaagtatggtggatgacagctctgagtcttccgaagaaccaaaatcaggggagtcatatatacatcaagtttgtaaaggcataatctcttgccccttgaactcccctgtgcagctggctggactgaaattactagggcacttgagtataaaatttgaagatcactatgtgattaccagttatattccagatttcctcaccttgttaaacaagggaagtgtcaaaaccaagttttatgttttaaaagtgttttcgtgtttgtctaaaaatcacgccaatacaagagaattgatcagtgccaaagtactgtcatcattggttgcaccctttaacaagaatgagtcaaaggccaatattcttaatattattgaaatatttgagaatataaattttcagttcaaaacaaaggcaaagctatttaccaaggaaaagttcactaaatctgagcttatttcaatattccaggaagcaaaacagtttggtcagaaactccaagacttagcagagcacagtgatcccgaagtgagagataaagtcatacgattaatactaaaactctgaatacccctctgttctcataaagcctcaaacagttttttggagttgcaatatgaaaccaatgcatattgtaattataaattcaatacttatgttttccatgttgattgagggaggcaattttatggataccaattaatcttgagatcctgaacatgtgctgatttttattgtgctatatagtatataaattgagatatttttggtatttctgcaacgtgacctgataatgaatctattcatcctgagtaagctatacttctgtgctttatattgatatgtgtattcttttgagattttatttacatgttgttaataaagttgcatgctaaaactggtgaaaaaattgtc

SEQ ID NO: 364321 - DNA, 3220 bp, Homo sapiens
agcgggttttcttgccgcatcctgcgcagcccctgcctactttggtgcagaggcgtggggggcgggacgcgtctttcccgttcggatcgcggggaaagcagtggctccaagtgagccagaggagagctgaggagaggagggggaggccgacgacctgggccctgggcctctgaaggtctggcgtattctgacaggacacagtgagcgtctgtagaggagaggcttgaaataaaggagcacgaatattgcctggatttctggaggcctactttaaggctggccaattctgcaagaaaggcaaggaggaggagactggctcacagctctggaggacccccttctgtcagctgtggggcttgacaccacttgaacaagaaaaggagggggaaactgcaccacatcagtgaagatccacctccagtggctgctctgctggtggtggagttgctgctgacaaccaccctcaacgggtctgcacccatccaggaaatatctgtcttcctttagcttggttgtacctgttctcactctatctgtattattgaattattgactgagactgtgtttgggaaggaggctgagtgactactggactggatattgactctaactcttattcccaagcttatatccttaatcacctaaagatcagagtgtgaagaaacaaacctgtgacagatctgtggttgaggtttagactacgggaggagtatattacctgactttctttgtaacttgtaccatgactggggcagagattgagcctagtgcccaggccaagcctgaaaagaaggctggggaagaggttatcgctgggcctgagagagagaatgatgtccctctggtggtcagacccaaggttaggacccaggcaactactggggcaaggcccaaaactgagaccaagtctgtgcctgcggcaaggcccaaaactgaggcccaagcaatgtctggggcaaggcccaaaactgaggtccaagtaatgggtggtgcaagacccaaaacggaggctcaaggaatcacaggggccaggcccaaaaccgatgccagggcagtaggtggcgctcgttctaaaactgatgccaaggcaatccctggagcaaggcccaaggatgaggcccaggcatgggcccagagtgaatttgggactgaagcagtgtcacaggcagaaggagtgtcccagactaatgccgttgcttggccactggccactgctgagtctggatcagttactaaatctaagggcctgtctatggatagagaactagtcaatgtggatgctgaaacctttcctggcacccagggtcagaaaggaatccagccctggtttggaccaggggaggagactaatatggggtcttggtgctattccaggcccagggccagagaggaggcctctaatgagtctgggttctggtcagcagatgagacctctacagcgtcttctttctggactggagaagagacaagtgtcagatcatggcccagggaagagtccaataccaggtccaggcacagggctaaacatcagactaatcccaggtccaggcccagatccaagcaagaagcctatgttgattcctggtctggatctgaggatgaggccagcaacccattctccttctgggttggagaaaataccaataacttgttcaggcccagagtcagggaggaggcaaatatcaggtccaagctcaggacaaatagagaagattgttttgaatctgagtctgaagatgagttctataagcagtcctgggttttgcctggagaagaggccaatagtagattcaggcacagagacaaagaagatcctaatactgccttgaaactcagggcccagaaagatgttgacagtgatagggtcaaacaagaacccaggtttgaggaggaagtcattattgggtcctggttctgggcagaaaaagaggccagtttggagggtggagcttcagcaatctgtgaatctgagccaggaatctttgcttcagcctgatcagcctagtcctgagttcacatttcagtatgatccttcctaccggtcagtccgggaaattcgagagcatcttagggccagggagagtgcagagtctgagagttggtcctgcagctgcatacaatgtgagctgaaaattggttctgaagagtttgaagaattccttttattaatggacaaaattcgggatccttttattcatgaaatatctaaaattgcaatgggtatgagaagtgcttctcaatttacccgagatttcattcgagattcaggtgttgtctcacttattgaaaccttgcttaattatccatcctctagagttaggacaagttttttggaaaatatgattcacatggctccaccttatccaaatctaaacatgattgagacattcatatgtcaagtgtgtgaggaaacccttgcacatagtgtggattcccttgagcagctgactggaataaggatgcttagacacctcactatgactattgactatcacacactgattgccaactatatgtccgggtttctctccttattaaccacagccaatgcgagaacgaagtttcacgttctgaaaatgctattgaatttgtctgaaaatcctgctgtggcaaaaaaactattcagtgccaaagctctttcaatatttgtgggtctctttaacatagaagagacaaatgataatattcaaattgttattaaaatgtttcagaatatcagtaacattataaaaagtggaaagatgtccttaattgatgatgatttcagtcttgagccgcttatttctgcatttcgtgaatttgaggagttagctaagcaactacaagcccaaatagacaaccaaaatgatcctgaggtgggacaacaaagttaatatgattaaccacctgccgctgatcagccttatgttcccaaagagccctgagtagtgctttggtgttcacagtctgtttttttgttgtaacttatattttttaatgctgatgttaactttgtcaaactcttgttttgagctggatcattttgtggatgccaaatgaatatcaaaactgaaaacacatttgttgatatttgtcttgctgtccagattgcggtatttttcagtattaagttttcaatgaactgtgtcacctaagtaagctaccctgctattcgttgtttaaatatatggttctctatttgagtctgtgttttcaataaagttctatgttaaaattggca

SEQ ID NO: 364322 - DNA, 2821 bp, Homo sapiens
  misc_feature (2065)..(2065): n is a, c, g, or t
ctggaaacccatgttgcatttcagttcaggaaagaatggtaggcttggtggggggagctcccgcaaaaggggaactaatacagaaacactctggtatttgtctgcctctcttgttccagcgccgttttccctatatccggaattcgtccctgcgcattccaatacctgaagcggccacagggtacaggacagggagccctccgacagaaaagagtcgcggcgctaaacaaagcctgatatcactccgcttccataagccggatccccataaactacgctctagctcctcccactgccgttgtgggtaacgcggacgtggaagaacctcgtctgcggaggaaaaggtagatgttaaatggtaactacgcgcgaggttctgaggagccctgggaacaggaaggagaaaagaataccaaaagtgacaacagtttgccaatcgcagtctttaatctgataaagcggttatctcgtcttgagtcccaggtgccgagtcaatccccatacacagccgccgccattgcctcgagtccttgtgtctgactgtctgttcctgctgctgtatgacacagcacctcgaggcaaggaaataagaaaactgcctctgatccaagcagagaaggcagagaaggtctgcctgtagatctgctgtagggcttgtcaccattggaagcaagaactcctgtagcctgtaataccagctgtgggtactactctcagtgttggagatcatcaaaatacaattggaccagaccctttggaaataattctgtgtctcaaatgccctgtggagcacacacttaatcagttgatggctatggaattttccaacatcagctaaagagaagggatagagtggtgacttccaagcttcatgcagaaccggacaacagaaattgagagggaaatttctatgacagaagagagaaagaagaaaattgctggaataatgaccttgaatagaggaaatgggatatcatctggtaagcaaatagagaagctggctttagataagagcctggacaattcattcatagaatagcagaaaaggcagaatttatgtccatagatgcaagtggtatagtagatatagtgatgggagtttgtaaaagttaccttctaattgctattttttttaatgaaataagaaacaaagtcatcaactcaaagtgagtaatatgtaggaggtgattattgtttgaggagagaggagaatgtgtgatatcttttgttaattatggtaaaatataacacaaaatttgccattttaaccattttaagtggacaattaagtgtcattaattacattcacactgttgtacatctgccaccactatcttcttctaaaactttttatcacctcttatagtttaaattgtgcccccacagaagatatgttggagtcctatcccttaatattaatgtgaccttatttggagataggatctttataaaggtattcaaattaacatgagatcattagggtggaatcctaatccaatatgattagtgtccttataaaaaggggaaatttggacacagaggcaagcacacagggagagtgccaagtgaagatgaagaaaaagatcagagtgatacaaagaagtcaaagaacaccaaagattgccaacaaaccaccagaagctaggagaaaggcctgaaacatatccttcccgcatgccttcagagggagcgtgggcctgcagacactttgatctcagacttctaccctatggaactgtgcaaaaataaatgtctgttgtttaagccattcagtttgtgttacagcacaaatgtattctatttagaatacatcattctaaatagaaattttttaataattaagtattttcctctccttggagcacttggtaacttctaattctactttctatctctattaatttgcctattctagatatatcaaatgagtgaaataatacaatagttgtctttttgtgtctggcttcttttactttgcataatgttttcaaggttcattcatgttgtagcatgtatctgaacttcattctttttctggctgaaaattttattatatgtatgtatnacattttgtgtctctattcatcacttgatggatatttggatagatttaagtcatttgtcttttgtgaatagtgctattaatattatgaacacttgagtacaagtttttgtttaaatacctcttttcttttttcttggatgtattatctaggtgaagaatggcaagatcatatggtaattctatttagctttttgaggaactgccaaacctttccacaatgactgcacaattatacatttccagtagggttccagtttatccatattctcaccaatgcttttatttttctgttttttaaaattatactgatcataggaggtgtaaagcagtatttcagtttggttttgatttgcatttccctaatgattaatgatgttgagaatcctttcacatgcttattgaccatttttatgtcattttgggaaaatatttattcacatttttgcccattttttagttgggttgtctttttttgctgttgagttgtaggagttctttatattttctggatattaaaccctcatcagataaattatttgcaaatgttttcttccattctgttaattttcttaatgttgtcttttgatgcacattgtaaaaatttttaaaatcaatttccattttcttatttttttattattatgctttaagttctgggatacatgtgcagagcgtgcaggtttgttacataggtatatacgtgccatggtggtttgctgcacccatcaacccatcatctacattaggcgtttctcc

SEQ ID NO: 364323 - DNA, 1143 bp, Homo sapiens
ctggaaacccatgttgcatttcagttcaggaaagaatggtaggcttggtggggggagctcccgcaaaaggggaactaatacagaaacactctggtatttgtctgcctctcttgttccagcgccgttttccctatatccggaattcgtccctgcgcattccaatacctgaagcggccacagggtacaggacagggagccctccgacagaaaagagtcgcggcgctaaacaaagcctgatatcactccgcttccataagccggatccccataaactacgctctagctcctcccactgccgttgtgggtaacgcggacgtggaagaacctcgtctgcggaggaaaaggtagatgttaaatggtaactacgcgcgaggttctgaggagccctgggaacaggaaggagaaaagaataccaaaagtgacaacagtttgccaatcgcagtctttaatctgataaagcggttatctcgtcttgagtcccaggtgccgagtcaatccccatacacagccgccgccattgcctcgagtccttgtgtctgactgtctgttcctgctgctgtatgacacagcacctcgaggcaaggaaataagaaaactgcctctgatccaagcagagaaggcagagaaggtctgcctgtagatctgctgtagggcttgtcaccattggaagcaaggtcctacttcagtggcagatctggtggccttggagtggctgaagaccaccaccctccacagggctgggcccatgcacagccatccttccctaccttgaaactcctgtagcctgtaataccagctgtgggtactactctcagtgttggagatcatcaaaatacaattggaccagaccctttggaaataattctgtgtctcaaatgccctgtggagcacacacttaatcagttgatggctatggaattttccaacatcagctaaagagaagggttctggagacagcctgtatttcttggatcttggcttccttccatcttcaaagccaacgatgaccagtgtagactttctatgctgcttcaatctgacatggagtccctgccttccacatctaaagtacccttgcaattacattggccaagataacccagaataatcttaaattaaactcagctgaatagcaatcttaaa

SEQ ID NO: 364324 - DNA, 2027 bp, Homo sapiens
cagctctcaggtccgacacccgctggaagccggcgcgggcgcaggcgcgcagcgaaaaggcggccgggagtaaggcggagctgaaggaggagcttgatggaagcgtgcgagaaggggcgtaactgatttggaaaccagaggaaaggcgctgttttcaccgaattagaatcgcgggaaaatagagaagagtttgtttgaaggtctcgcgagatcgagtgagtacggctcgccaagttggagcgctctcgcgatagacacagcaactattcagctgcgaggggacgggagaggtggtgagcactctcgcgagatttgaaggagcggcggaggccagagggaggagaggaccggaagtccttcatctcaagcatccaatgctgaaagcggcctgattttctctaccggaagcccttttccagaggctgggaacacggcccacctagcaggaagtcccacctccttgagctccgccacccttcccgaagtttttctgtcacctgtgttaggctccgtcccctttccgcgttttatccccgtaccagaaaaggatacatttagtgcctcccacccagctccactaaacgggttggatatctcattctttgagttggtgttccttccccggcgcccccatgtagctgggaagtgggacctgggggtggttggacccctgggatcctaaaggaggggcagggagggcgcagaactccgcttctgctccttgctaccaggacgcgcggcctcctcagcctctttcctcccgctgccatgcaccctgcagccttcccgcttcctgtggttgtggccgctgtgctgtggggagcggccccgacccgggggctcattcgagcgacctcggaccacaatgccagcatggactttgcagaccttccagctctgtttggggctaccttgagccaggagggcctccaggggttccttgtggaggctcacccagacaatgcctgcagccccattgccccaccacccccagccccggtcaatgggtcagtctttattgcgctgcttcgaagattcgactgcaactttgacctcaaggtcctaaatgcccagaaggctggatatggtgccgctgtagtacacaatgtgaattccaatgaacttctgaacatggtgtggaatagtgaggaaatccagcagcagatctggatcccgtctgtatttattggggagagaagctccgagtacctgcgtgccctctttgtctacgagaagggggctcgggtgcttctggttccagacaataccttccccttgggctattacctcatccctttcacagggattgtgggactgctggttttggccatgggagcagtaatgatagctcgttgtatccagcaccggaaacggctccagcggaatcgacttaccaaagagcaactgaaacagattcctacacatgactatcagaagggagaccagtatgatgtctgtgccatttgcctggatgaatatgaggatggggacaagctgcgggtactcccctgtgctcatgcctaccacagccgctgcgtggacccctggctcactcagacccggaagacctgccccatttgcaagcagcctgttcatcggggtcctggggacgaagaccaagaggaagaaactcaagggcaagaggagggtgatgaaggggagccaagggaccaccctgcctcagaaaggaccccacttttgggttctagccccactcttcccacctcctttggttccttagccccagctccccttgtttttcctgggccttcaacagatcccccactgtcccctccctcttcccctgttatcctggtctaataaccccccacacatacacctctggtgacctatttgcacagaccgtcgtcttccctccagtcttctgagggataggggacattccatcccaagcttctcccttacccacacctatccttttgaggggctttggggtggggctggggcaagcagagggactgggtcttcacttcttgggctaataaaattgtttctttgtggactaa

SEQ ID NO: 364325 - DNA, 1897 bp, Homo sapiens
cagctctcaggtccgacacccgctggaagccggcgcgggcgcaggcgcgcagcgaaaaggcggccgggagtaaggcggagctgaaggaggagcttgatggaagcgtgcgagaaggggcgtaactgatttggaaaccagaggaaaggcgctgttttcaccgaattagaatcgcgggaaaatagagaagagtttgtttgaaggtctcgcgagatcgagaccggaagtccttcatctcaagcatccaatgctgaaagcggcctgattttctctaccggaagcccttttccagaggctgggaacacggcccacctagcaggaagtcccacctccttgagctccgccacccttcccgaagtttttctgtcacctgtgttaggctccgtcccctttccgcgttttatccccgtaccagaaaaggatacatttagtgcctcccacccagctccactaaacgggttggatatctcattctttgagttggtgttccttccccggcgcccccatgtagctgggaagtgggacctgggggtggttggacccctgggatcctaaaggaggggcagggagggcgcagaactccgcttctgctccttgctaccaggacgcgcggcctcctcagcctctttcctcccgctgccatgcaccctgcagccttcccgcttcctgtggttgtggccgctgtgctgtggggagcggccccgacccgggggctcattcgagcgacctcggaccacaatgccagcatggactttgcagaccttccagctctgtttggggctaccttgagccaggagggcctccaggggttccttgtggaggctcacccagacaatgcctgcagccccattgccccaccacccccagccccggtcaatgggtcagtctttattgcgctgcttcgaagattcgactgcaactttgacctcaaggtcctaaatgcccagaaggctggatatggtgccgctgtagtacacaatgtgaattccaatgaacttctgaacatggtgtggaatagtgaggaaatccagcagcagatctggatcccgtctgtatttattggggagagaagctccgagtacctgcgtgccctctttgtctacgagaagggggctcgggtgcttctggttccagacaataccttccccttgggctattacctcatccctttcacagggattgtgggactgctggttttggccatgggagcagtaatgatagctcgttgtatccagcaccggaaacggctccagcggaatcgacttaccaaagagcaactgaaacagattcctacacatgactatcagaagggagaccagtatgatgtctgtgccatttgcctggatgaatatgaggatggggacaagctgcgggtactcccctgtgctcatgcctaccacagccgctgcgtggacccctggctcactcagacccggaagacctgccccatttgcaagcagcctgttcatcggggtcctggggacgaagaccaagaggaagaaactcaagggcaagaggagggtgatgaaggggagccaagggaccaccctgcctcagaaaggaccccacttttgggttctagccccactcttcccacctcctttggttccttagccccagctccccttgtttttcctgggccttcaacagatcccccactgtcccctccctcttcccctgttatcctggtctaataaccccccacacatacacctctggtgacctatttgcacagaccgtcgtcttccctccagtcttctgagggataggggacattccatcccaagcttctcccttacccacacctatccttttgaggggctttggggtggggctggggcaagcagagggactgggtcttcacttcttgggctaataaaattgtttctttgtggactaa

SEQ ID NO: 364326 - DNA, 2203 bp, Homo sapiens
cagctctcaggtccgacacccgctggaagccggcgcgggcgcaggcgcgcagcgaaaaggcggccgggagtaaggcggagctgaaggaggagcttgatggaagcgtgcgagaaggggcgtaactgatttggaaaccagaggaaaggcgctgttttcaccgaattagaatcgcgggaaaatagagaagagtttgtttgaaggtctcgcgagatcgagtgagtacggctcgccaagttggagcgctctcgcgatagacacagcaactattcagctgcgaggggacgggagaggtggtgagcactctcgcgagatttgaaggagcggcggaggccagagggaggagaggaccggaagtccttcatctcaagcatccaatgctgaaagcggcctgattttctctaccggaagcccttttccagaggctgggaacacggcccacctagcaggaagtcccacctccttgagctccgccacccttcccgaagtttttctgtcacctgtgttaggctccgtcccctttccgcgttttatccccgtaccagaaaaggatacatttagtgcctcccacccagctccactaaacgggttggatatctcattctttgagttggtgttccttccccggcgcccccatgtagctgggaagtgggacctgggggtggttggacccctgggatcctaaaggaggggcagggagggcgcagaactccgcttctgctccttgctaccaggacgcgcggcctcctcagcctctttcctcccgctgccatgcaccctgcagccttcccgcttcctgtggttgtggccgctgtgctgtggggagcggccccgacccgggggctcattcgagcgacctcggaccacaatgccagcatggactttgcagaccttccagctctgtttggggctaccttgagccaggagggcctccaggggttccttgtggaggctcacccagacaatgcctgcagccccattgccccaccacccccagccccggtcaatgggtcagtctttattgcgctgcttcgaagattcgactgcaactttgacctcaaggtcctaaatgcccagaaggctggatatggtgccgctgtagtacacaatgtgaattccaatgaacttctgaacatggtgtggaatagtgaggaaatccagcagcagatctggatcccgtctgtatttattggggagagaagctccgagtacctgcgtgccctctttgtctacgagaagggggctcgggtgcttctggttccagacaataccttccccttgggctattacctcatccctttcacagggattgtgggactgctggttttggccatgggagcagtaatgatagctcgttgtatccagcaccggaaacggctccagcggaatcgacttaccaaagagcaactgaaacagattcctacacatgactatcagaagggagaccagtatgatgtctgtgccatttgcctggatgaatatgaggatggggacaagctgcgggtactcccctgtgctcatgcctaccacagccgctgcgtggacccctggctcactcagacccggaagacctgccccatttgcaagcagcctgttcatcggggtcctggggacgaagaccaagaggaagaaactcaagggcaagaggagggtgatgaaggggagccaagggaccaccctgcctcagaaaggaccccacttttgggttctagccccactcttcccacctcctttggttccttagccccagctccccttgtttttcctgggccttcaacagatcccccactgtcccctccctcttcccctgttatcctggtctaataaccccccacacatacacctctggtgacctatttgcacagaccgtcgtcttccctccagtcttctgagggataggggacattccatcccaagcttctcccttacccacacctatccttttgaggggctttggggtggggctggggcaagcagagggactgggtcttcacttcttgggctaataaaattgtttctttgtggactaaaaaaaaaaaaaaaaaaaaaaaaaaaagggggggagcgaacaaaaagatttcccctgggaggggccaaaagttaaggggtaaccagagttttttggtcaaaggggggccccatatagggagggcgtattaaaagcaagaggaaagggcggagttttaaaaaggttgtggacggggaa

SEQ ID NO: 364327 - DNA, 2168 bp, Homo sapiens
cagctctcaggtccgacacccgctggaagccggcgcgggcgcaggcgcgcagcgaaaaggcggccgggagtaaggcggagctgaaggaggagcttgatggaagcgtgcgagaaggggcgtaactgatttggaaaccagaggaaaggcgctgttttcaccgaattagaatcgcgggaaaatagagaagagtttgtttgaaggtctcgcgagatcgagtgagtacggctcgccaagttggagcgctctcgcgatagacacagcaactattcagctgcgaggggacgggagaggtggtgagcactctcgcgagatttgaaggagcggcggaggccagagggaggagaggaccggaagtccttcatctcaagcatccaatgctgaaagcggcctgattttctctaccggaagcccttttccagaggctgggaacacggcccacctagcaggaagtcccacctccttgagctccgccacccttcccgaagtttttctgtcacctgtgttaggctccgtcccctttccgcgttttatccccgtaccagaaaaggatacatttagtgcctcccacccagctccactaaacgggttggatatctcattctttgagttggtgttccttccccggcgcccccatgtagctgggaagtgggacctgggggtggttggacccctgggatcctaaaggaggggcagggagggcgcagaactccgcttctgctccttgctaccaggacgcgcggcctcctcagcctctttcctcccgctgccatgcaccctgcagccttcccgcttcctgtggttgtggccgctgtgctgtggggagcggccccgacccgggggctcattcgagcgacctcggaccacaatgccagcatggactttgcagaccttccagctctgtttggggctaccttgagccaggagggcctccaggggttccttgtggaggctcacccagacaatgcctgcagccccattgccccaccacccccagccccggtcaatgggtcagtctttattgcgctgcttcgaagattcgactgcaactttgacctcaaggtcctaaatgcccagaaggctggatatggtgccgctgtagtacacaatgtgaattccaatgaacttctgaacatggtgtggaatagtgaggaaatccagcagcagatctggatcccgtctgtatttattggggagagaagctccgagtacctgcgtgccctctttgtctacgagaagggggctcgggtgcttctggttccagacaataccttccccttgggctattacctcatccctttcacagggattgtgggactgctggttttggccatgggagcagtaatgatagctcgttgtatccagcaccggaaacggctccagcggaatcgacttaccaaagagcaactgaaacagattcctacacatgactatcagaagggagaccagtatgatgtctgtgccatttgcctggatgaatatgaggatggggacaagctgcgggtactcccctgtgctcatgcctaccacagccgctgcgtggacccctggctcactcagacccggaagacctgccccatttgcaagcagcctgttcatcggggtcctggggacgaagaccaagaggaagaaactcaagggcaagaggagggtgatgaaggggagccaagggaccaccctgcctcagaaaggaccccacttttgggttctagccccactcttcccacctcctttggttccttagccccagctccccttgtttttcctgggccttcaacagatcccccactgtcccctccctcttcccctgttatcctggtctaataaccccccacacatacacctctggtgacctatttgcacagaccgtcgtcttccctccagtcttctgagggataggggacattccatcccaagcttctcccttacccacacctatccttttgaggggctttggggtggggctggggcaagcagagggactgggtcttcacttcttgggctaataaaattgtttctttgtggactaaaaaaaaaaaaaaaaaaaaaaaaaaaccccggaggcactccaatgcggggcggcggcaaaagcagggcacgcgatagggcccgggcccaagcggttcccggacccagttttttggtcccgggggtaaacggcgggcccccaa

SEQ ID NO: 364328 - DNA, 2389 bp, Homo sapiens
cagctctcaggtccgacacccgctggaagccggcgcgggcgcaggcgcgcagcgaaaaggcggccgggagtaaggcggagctgaaggaggagcttgatggaagcgtgcgagaaggggcgtaactgatttggaaaccagaggaaaggcgctgttttcaccgaattagaatcgcgggaaaatagagaagagtttgtttgaaggtctcgcgagatcgagtgagtacggctcgccaagttggagcgctctcgcgatagacacagcaactattcagctgcgaggggacgggagaggtggtgagcactctcgcgagatttgaaggagcggcggaggccagagggaggagaggaccggaagtccttcatctcaagcatccaatgctgaaagcggcctgattttctctaccggaagcccttttccagaggctgggaacacggcccacctagcaggaagtcccacctccttgagctccgccacccttcccgaagtttttctgtcacctgtgttaggctccgtcccctttccgcgttttatccccgtaccagaaaaggatacatttagtgcctcccacccagctccactaaacgggttggatatctcattctttgagttggtgttccttccccggcgcccccatgtagctgggaagtgggacctgggggtggttggacccctgggatcctaaaggaggggcagggagggcgcagaactccgcttctgctccttgctaccaggacgcgcggcctcctcagcctctttcctcccgctgccatgcaccctgcagccttcccgcttcctgtggttgtggccgctgtgctgtggggagcggccccgacccgggggctcattcgagcgacctcggaccacaatgccagcatggactttgcagaccttccagctctgtttggggctaccttgagccaggagggcctccaggggttccttgtggaggctcacccagacaatgcctgcagccccattgccccaccacccccagccccggtcaatgggtcagtctttattgcgctgcttcgaagattcgactgcaactttgacctcaaggtcctaaatgcccagaaggctggatatggtgccgctgtagtacacaatgtgaattccaatgaacttctgaacatggtgtggaatagtgaggaaatccagcagcagatctggatcccgtctgtatttattggggagagaagctccgagtacctgcgtgccctctttgtctacgagaagggggctcgggtgcttctggttccagacaataccttccccttgggctattacctcatccctttcacagggattgtgggactgctggttttggccatgggagcagtaatgatagctcgttgtatccagcaccggaaacggctccagcggaatcgacttaccaaagagcaactgaaacagattcctacacatgactatcagaagggagaccagtatgatgtctgtgccatttgcctggatgaatatgaggatggggacaagctgcgggtactcccctgtgctcatgcctaccacagccgctgcgtggacccctggctcactcagacccggaagacctgccccatttgcaagcagcctgttcatcggggtcctggggacgaagaccaagaggaagaaactcaagggcaagaggagggtgatgaaggggagccaagggaccaccctgcctcagaaaggaccccacttttgggttctagccccactcttcccacctcctttggttccttagccccagctccccttgtttttcctgggccttcaacagatcccccactgtcccctccctcttcccctgttatcctggtctaataaccccccacacatacacctctggtgacctatttgcacagaccgtcgtcttccctccagtcttctgagggataggggacattccatcccaagcttctcccttacccacacctatccttttgaggggctttggggtggggctggggcaagcagagggactgggtcttcacttcttgggctaataaaattgtttctttgtggactaaaaaaaaaaaaacaataacaaatacaaggaaaaaaacacaaacaacagaaccaaagaacaccaaaaaacccaaaccaaaccaaaacaaaaaaggaaggggggcccgccccaaaaacataggtacccgcagagaggaggggcaccgaagttagtgaccacacccggagttttgtggatacaaacggagagggccacccacgaagaagagagagcgaacataattaaacagcgcaaggcagaggcagcacgagcagttatcaaccacgcacgttggcacgggcgacacacaccgggcccggagcaacactggtagagcagacaccaactgcgggggggaccaacaggggcacaaacacccgcggt

SEQ ID NO: 364329 - DNA, 1829 bp, Homo sapiens
cagctctcaggtccgacacccgctggaagccggcgcgggcgcaggcgcgcagcgaaaaggcggccgggagtaaggcggagctgaaggaggagcttgatggaagcgtgcgagaaggggcgtaactgatttggaaaccagaggaaaggcgctgttttcaccgaattagaatcgcgggaaaatagagaagagtttgtttgaaggtctcgcgagatcgagtgagtacggctcgccaagttggagcgctctcgcgatagacacagcaactattcagctgcgaggggacgggagaggtggtgagcactctcgcgagatttgaaggagcggcggaggccagagggaggagaggaccggaagtccttcatctcaagcatccaatgctgaaagcggcctgattttctctaccggaagcccttttccagaggctgggaacacggcccacctagcaggaagtcccacctccttgagctccgccacccttcccgaagtttttctgtcacctgtgttaggctccgtcccctttccgcgttttatccccgtaccagaaaaggatacatttagtgcctcccacccagctccactaaacggttcccgcttcctgtggttgtggccgctgtgctgtggggagcggccccgacccgggggctcattcgagcgacctcggaccacaatgccagcatggactttgcagaccttccagctctgtttggggctaccttgagccaggagggcctccaggggttccttgtggaggctcacccagacaatgcctgcagccccattgccccaccacccccagccccggtcaatgggtcagtctttattgcgctgcttcgaagattcgactgcaactttgacctcaaggtcctaaatgcccagaaggctggatatggtgccgctgtagtacacaatgtgaattccaatgaacttctgaacatggtgtggaatagtgaggaaatccagcagcagatctggatcccgtctgtatttattggggagagaagctccgagtacctgcgtgccctctttgtctacgagaagggggctcgggtgcttctggttccagacaataccttccccttgggctattacctcatccctttcacagggattgtgggactgctggttttggccatgggagcagtaatgatagctcgttgtatccagcaccggaaacggctccagcggaatcgacttaccaaagagcaactgaaacagattcctacacatgactatcagaagggagaccagtatgatgtctgtgccatttgcctggatgaatatgaggatggggacaagctgcgggtactcccctgtgctcatgcctaccacagccgctgcgtggacccctggctcactcagacccggaagacctgccccatttgcaagcagcctgttcatcggggtcctggggacgaagaccaagaggaagaaactcaagggcaagaggagggtgatgaaggggagccaagggaccaccctgcctcagaaaggaccccacttttgggttctagccccactcttcccacctcctttggttccttagccccagctccccttgtttttcctgggccttcaacagatcccccactgtcccctccctcttcccctgttatcctggtctaataaccccccacacatacacctctggtgacctatttgcacagaccgtcgtcttccctccagtcttctgagggataggggacattccatcccaagcttctcccttacccacacctatccttttgaggggctttggggtggggctggggcaagcagagggactgggtcttcacttcttgggctaataaaattgtttctttgtggactaa

SEQ ID NO: 364330 - DNA, 1752 bp, Homo sapiens
cagctctcaggtccgacacccgctggaagccggcgcgggcgcaggcgcgcagcgaaaaggcggccgggagtaaggcggagctgaaggaggagcttgatggaagcgtgcgagaaggggcgtaactgatttggaaaccagaggaaaggcgctgttttcaccgaattagaatcgcgggaaaatagagaagagtttgtttgaaggtctcgcgagatcgagaccggaagtccttcatctcaagcatccaatgctgaaagcggcctgattttctctaccggaagcccttttccagaggctgggaacacggcccacctagcaggaagtcccacctccttgagctccgccacccttcccgaagtttttctgtcacctgtgttaggctccgtcccctttccgcgttttatccccgtaccagaaaaggatacatttagtgcctcccacccagctccactaaacggggacgcgcggcctcctcagcctctttcctcccgctgccatgcaccctgcagccttcccgcttcctgtggttgtggccgctgtgctgtggggagcggccccgacccgggggctcattcgagcgacctcggaccacaatgccagcatggactttgcagaccttccagctctgtttggggctaccttgagccaggagggcctccaggggttccttgtggaggctcacccagacaatgcctgcagccccattgccccaccacccccagccccggtcaatgggtcagtctttattgcgctgcttcgaagattcgactgcaactttgacctcaaggtcctaaatgcccagaaggctggatatggtgccgctgtagtacacaatgtgaattccaatgaacttctgaacatggtgtggaatagtgaggaaatccagcagcagatctggatcccgtctgtatttattggggagagaagctccgagtacctgcgtgccctctttgtctacgagaagggggctcgggtgcttctggttccagacaataccttccccttgggctattacctcatccctttcacagggattgtgggactgctggttttggccatgggagcagtaatgatagctcgttgtatccagcaccggaaacggctccagcggaatcgacttaccaaagagcaactgaaacagattcctacacatgactatcagaagggagaccagtatgatgtctgtgccatttgcctggatgaatatgaggatggggacaagctgcgggtactcccctgtgctcatgcctaccacagccgctgcgtggacccctggctcactcagacccggaagacctgccccatttgcaagcagcctgttcatcggggtcctggggacgaagaccaagaggaagaaactcaagggcaagaggagggtgatgaaggggagccaagggaccaccctgcctcagaaaggaccccacttttgggttctagccccactcttcccacctcctttggttccttagccccagctccccttgtttttcctgggccttcaacagatcccccactgtcccctccctcttcccctgttatcctggtctaataaccccccacacatacacctctggtgacctatttgcacagaccgtcgtcttccctccagtcttctgagggataggggacattccatcccaagcttctcccttacccacacctatccttttgaggggctttggggtggggctggggcaagcagagggactgggtcttcacttcttgggctaataaaattgtttctttgtggactaa

SEQ ID NO: 364331 - DNA, 1642 bp, Homo sapiens
cagctctcaggtccgacacccgctggaagccggcgcgggcgcaggcgcgcagcgaaaaggcggccgggagtaaggcggagctgaaggaggagcttgatggaagcgtgcgagaaggggcgtaactgatttggaaaccagaggaaaggcgctgttttcaccgaattagaatcgcgggaaaatagagaagagtttgtttgaaggtctcgcgagatcgagtgagtacggctcgccaagttggagcgctctcgcgatagacacagcaactattcagctgcgaggggacgggagaggtggtgagcactctcgcgagatttgaaggagcggcggaggccagagggaggagagggacgcgcggcctcctcagcctctttcctcccgctgccatgcaccctgcagccttcccgcttcctgtggttgtggccgctgtgctgtggggagcggccccgacccgggggctcattcgagcgacctcggaccacaatgccagcatggactttgcagaccttccagctctgtttggggctaccttgagccaggagggcctccaggggttccttgtggaggctcacccagacaatgcctgcagccccattgccccaccacccccagccccggtcaatgggtcagtctttattgcgctgcttcgaagattcgactgcaactttgacctcaaggtcctaaatgcccagaaggctggatatggtgccgctgtagtacacaatgtgaattccaatgaacttctgaacatggtgtggaatagtgaggaaatccagcagcagatctggatcccgtctgtatttattggggagagaagctccgagtacctgcgtgccctctttgtctacgagaagggggctcgggtgcttctggttccagacaataccttccccttgggctattacctcatccctttcacagggattgtgggactgctggttttggccatgggagcagtaatgatagctcgttgtatccagcaccggaaacggctccagcggaatcgacttaccaaagagcaactgaaacagattcctacacatgactatcagaagggagaccagtatgatgtctgtgccatttgcctggatgaatatgaggatggggacaagctgcgggtactcccctgtgctcatgcctaccacagccgctgcgtggacccctggctcactcagacccggaagacctgccccatttgcaagcagcctgttcatcggggtcctggggacgaagaccaagaggaagaaactcaagggcaagaggagggtgatgaaggggagccaagggaccaccctgcctcagaaaggaccccacttttgggttctagccccactcttcccacctcctttggttccttagccccagctccccttgtttttcctgggccttcaacagatcccccactgtcccctccctcttcccctgttatcctggtctaataaccccccacacatacacctctggtgacctatttgcacagaccgtcgtcttccctccagtcttctgagggataggggacattccatcccaagcttctcccttacccacacctatccttttgaggggctttggggtggggctggggcaagcagagggactgggtcttcacttcttgggctaataaaattgtttctttgtggactaa

SEQ ID NO: 364332 - DNA, 2071 bp, Homo sapiens
cagctctcaggtccgacacccgctggaagccggcgcgggcgcaggcgcgcagcgaaaaggcggccgggagtaaggcggagctgaaggaggagcttgatggaagcgtgcgagaaggggcgtaactgatttggaaaccagaggaaaggcgctgttttcaccgaattagaatcgcgggaaaatagagaagagtttgtttgaaggtctcgcgagatcgagtgagtacggctcgccaagttggagcgctctcgcgatagacacagcaactattcagctgcgaggggacgggagaggtggtgagcactctcgcgagatttgaaggagcggcggaggccagagggaggagaggaccggaagtccttcatctcaagcatccaatgctgaaagcggcctgattttctctaccggaagcccttttccagaggctgggaacacggcccacctagcaggaagtcccacctccttgagctccgccacccttcccgaagtttttctgtcacctgtgttaggctccgtcccctttccgcgttttatccccgtaccagaaaaggatacatttagtgcctcccacccagctccactaaacgggttggatatctcattctttgagttggtgttccttccccggcgcccccatgtagctgggaagtgggacctgggggtggttggacccctgggatcctaaaggaggggcagggagggcgcagaactccgcttctgctccttgctaccaggacgcgcggcctcctcagcctctttcctcccgctgccatgcaccctgcagccttcccgcttcctgtggttgtggccgctgtgctgtggggagcggccccgacccgggggctcattcgagcgacctcggaccacaatgccagcatggactttgcagaccttccagctctgtttggggctaccttgagccaggagggcctccaggggttccttgtggaggctcacccagacaatgcctgcagccccattgccccaccacccccagccccggtcaatgggtcagtctttattgcgctgcttcgaagattcgactgcaactttgacctcaaggtcctaaatgcccagaaggctggatatggtgccgctgtagtacacaatgtgaattccaatgaacttctgaacatggtgtggaatagtgaggaaatccagcagcagatctggatcccgtctgtatttattggggagagaagctccgagtacctgcgtgccctctttgtctacgagaagggggctcgggtgcttctggttccagacaataccttccccttgggctattacctcatccctttcacagggattgtgggactgctggttttggccatgggagcagtaatgatagctcgttgtatccagcaccggaaacggctccagcggaatcgacttaccaaagagcaactgaaacagattcctacacatgactatcagaagggtgagggggttaggggagaagagggcttttcccacagtttacctggttctgaaggactttgagcccagaagatagggtatacaaagatggcagtggccgggcacagtggctcacgtaatcccaagtgcctctaatcccagtactttgggaggccaaggtgggcaggtcacttgagcccaggagtttgagaccagcctgggtgacatgataaaacagaaaagtcccagcactttaggaggctgaggcaagtggatcccttgaccccgggagttcaggccagcctgggcaatgtggtgagaccccatctctataaaaaaataaaattagctgggcatggtggtgtgcacttgtagtcccagctaattgggagactgagacaggagaatcacttgaaccaggaaggcggaggttgtcgggggctgagattgcaccactgtgctccagcctgggcgacagagggagtccctttctcaaaaaaataataataaaaataaagatggcagtaggaaggtttcagcttgagatgctgtcttttcttctgtttttatgcataaatacaacgaagacgggagaggagatggaaagcaaagatgattaagtgaaataattgtgggaaacaatagagggatagac

SEQ ID NO: 364333 - DNA, 1771 bp, Homo sapiens
cagctctcaggtccgacacccgctggaagccggcgcgggcgcaggcgcgcagcgaaaaggcggccgggagtaaggcggagctgaaggaggagcttgatggaagcgtgcgagaaggggcgtaactgatttggaaaccagaggaaaggcgctgttttcaccgaattagaatcgcgggaaaatagagaagagtttgtttgaaggtctcgcgagatcgagaccggaagtccttcatctcaagcatccaatgctgaaagcggcctgattttctctaccggaagcccttttccagaggctgggaacacggcccacctagcaggaagtcccacctccttgagctccgccacccttcccgaagtttttctgtcacctgtgttaggctccgtcccctttccgcgttttatccccgtaccagaaaaggatacatttagtgcctcccacccagctccactaaacgggttggatatctcattctttgagttggtgttccttccccggcgcccccatgtagctgggaagtgggacctgggggtggttggacccctgggatcctaaaggaggggcagggagggcgcagaactccgcttctgctccttgctaccaggacgcgcggcctcctcagcctctttcctcccgctgccatgcaccctgcagccttcccgcttcctgtggttgtggccgctgtgctgtggggagcggccccgacccgggggctcattcgagcgacctcggaccacaatgccagcatggactttgcagaccttccagctctgtttggggctaccttgagccaggagggcctccaggtcctaaatgcccagaaggctggatatggtgccgctgtagtacacaatgtgaattccaatgaacttctgaacatggtgtggaatagtgaggaaatccagcagcagatctggatcccgtctgtatttattggggagagaagctccgagtacctgcgtgccctctttgtctacgagaagggggctcgggtgcttctggttccagacaataccttccccttgggctattacctcatccctttcacagggattgtgggactgctggttttggccatgggagcagtaatgatagctcgttgtatccagcaccggaaacggctccagcggaatcgacttaccaaagagcaactgaaacagattcctacacatgactatcagaagggagaccagtatgatgtctgtgccatttgcctggatgaatatgaggatggggacaagctgcgggtactcccctgtgctcatgcctaccacagccgctgcgtggacccctggctcactcagacccggaagacctgccccatttgcaagcagcctgttcatcggggtcctggggacgaagaccaagaggaagaaactcaagggcaagaggagggtgatgaaggggagccaagggaccaccctgcctcagaaaggaccccacttttgggttctagccccactcttcccacctcctttggttccttagccccagctccccttgtttttcctgggccttcaacagatcccccactgtcccctccctcttcccctgttatcctggtctaataaccccccacacatacacctctggtgacctatttgcacagaccgtcgtcttccctccagtcttctgagggataggggacattccatcccaagcttctcccttacccacacctatccttttgaggggctttggggtggggctggggcaagcagagggactgggtcttcacttcttgggctaataaaattgtttctttgtggactaa

SEQ ID NO: 364334 - DNA, 1520 bp, Homo sapiens
cagctctcaggtccgacacccgctggaagccggcgcgggcgcaggcgcgcagcgaaaaggcggccgggagtaaggcggagctgaaggaggagcttgatggaagcgtgcgagaaggggcgtaactgatttggaaaccagaggaaaggcgctgttttcaccgaattagaatcgcgggaaaatagagaagagtttgtttgaaggtctcgcgagatcgagtgagtacggctcgccaagttggagcgctctcgcgatagacacagcaactattcagctgcgaggggacgggagaggtggtgagcactctcgcgagatttgaaggagcggcggaggccagagggaggagagacctcggaccacaatgccagcatggactttgcagaccttccagctctgtttggggctaccttgagccaggagggcctccaggggttccttgtggaggctcacccagacaatgcctgcagccccattgccccaccacccccagccccggtcaatgggtcagtctttattgcgctgcttcgaagattcgactgcaactttgacctcaaggtcctaaatgcccagaaggctggatatggtgccgctgtagtacacaatgtgaattccaatgaacttctgaacatggtgtggaatagtgaggaaatccagcagcagatctggatcccgtctgtatttattggggagagaagctccgagtacctgcgtgccctctttgtctacgagaagggggctcgggtgcttctggttccagacaataccttccccttgggctattacctcatccctttcacagggattgtgggactgctggttttggccatgggagcagtaatgatagctcgttgtatccagcaccggaaacggctccagcggaatcgacttaccaaagagcaactgaaacagattcctacacatgactatcagaagggagaccagtatgatgtctgtgccatttgcctggatgaatatgaggatggggacaagctgcgggtactcccctgtgctcatgcctaccacagccgctgcgtggacccctggctcactcagacccggaagacctgccccatttgcaagcagcctgttcatcggggtcctggggacgaagaccaagaggaagaaactcaagggcaagaggagggtgatgaaggggagccaagggaccaccctgcctcagaaaggaccccacttttgggttctagccccactcttcccacctcctttggttccttagccccagctccccttgtttttcctgggccttcaacagatcccccactgtcccctccctcttcccctgttatcctggtctaataaccccccacacatacacctctggtgacctatttgcacagaccgtcgtcttccctccagtcttctgagggataggggacattccatcccaagcttctcccttacccacacctatccttttgaggggctttggggtggggctggggcaagcagagggactgggtcttcacttcttgggctaataaaattgtttctttgtggactaa

SEQ ID NO: 364335 - DNA, 1337 bp, Homo sapiens
cagctctcaggtccgacacccgctggaagccggcgcgggcgcaggcgcgcagcgaaaaggcggccgggagtaaggcggagctgaaggaggagcttgatggaagcgtgcgagaaggggcgtaactgatttggaaaccagaggaaaggcgctgttttcaccgaattagaatcgcgggaaaatagagaagagtttgtttgaaggtctcgcgagatcgagtgagtacggctcgccaagttggagcgctctcgcgatagacacagcaactattcagctgcgaggggacgggagaggtggtgagcactctcgcgagatttgaaggagcggcggaggccagagggaggagaggaccggaagtccttcatctcaagcatccaatgctgaaagcggcctgattttctctaccggaagcccttttccagaggctgggaacacggcccacctagcaggaagtcccacctccttgagctccgccacccttcccgaagtttttctgtcacctgtgttaggctccgtcccctttccgcgttttatccccgtaccagaaaaggatacatttagtgcctcccacccagctccactaaacgggttggatatctcattctttgagttggtgttccttccccggcgcccccatgtagctgggaagtgggacctgggggtggttggacccctgggatcctaaaggaggggcagggagggcgcagaactccgcttctgctccttgctaccaggacgcgcggcctcctcagcctctttcctcccgctgccatgcaccctgcagccttcccgcttcctgtggttgtggccgctgtgctgtggggagcggccccgacccgggggctcattcgagcgacctcggaccacaatgccagcatggactttgcagaccttccagctctgtttggggctaccttgagccaggagggcctccaggggttccttgtggaggctcacccagacaatgcctgcagccccattgccccaccacccccagccccggtcaatgggtcagtctttattgcgctgcttcgaagattcgactgcaactttgacctcaaggtcctaaatgcccagaaggctggatatggtgccgctgtagtacacaatgtgaattccaatgaacttctgaacatggtgtggaatagtgaggaaatccagcagcagatctggatcccgtcgtcttccctccagtcttctgagggataggggacattccatcccaagcttctcccttacccacacctatccttttgaggggctttggggtggggctggggcaagcagagggactgggtcttcacttcttgggctaataaaattgtttctttgtggactaa

SEQ ID NO: 364336 - DNA, 767 bp, Homo sapiens
tgcttgtccttactagccctaaattcttccatgttctgccctgaccttatcctgcctacctgtcttatctcttccactggctttgtaggtgaggggaaatttttgcaaggctttaaaagccttagccctgggtcattgtggctcagtgaaggactagattattttctttctgtcccaggagaccagtatgatgtctgtgccatttgcctggatgaatatgaggatggggacaagctgcgggtactcccctgtgctcatgcctaccacagccgctgcgtggacccctggctcactcagacccggaagacctgccccatttgcaagcagcctgttcatcggggtcctggggacgaagaccaagaggaagaaactcaagggcaagaggagggtgatgaaggggagccaagggaccaccctgcctcagaaaggaccccacttttgggttctagccccactcttcccacctcctttggttccttagccccagctccccttgtttttcctgggccttcaacagatcccccactgtcccctccctcttcccctgttatcctggtctaataaccccccacacatacacctctggtgacctatttgcacagaccgtcgtcttccctccagtcttctgagggataggggacattccatcccaagcttctcccttacccacacctatccttttgaggggctttggggtggggctggggcaagcagagggactgggtcttcacttcttgggctaataaaattgtttctttgtggactaa

SEQ ID NO: 364337 - DNA, 869 bp, Homo sapiens
cagctctcaggtccgacacccgctggaagccggcgcgggcgcaggcgcgcagcgaaaaggcggccgggagtaaggcggagctgaaggaggagcttgatggaagcgtgcgagaaggggcgtaactgatttggaaaccagaggaaaggcgctgttttcaccgaattagaatcgcgggaaaatagagaagagtttgtttgaaggtctcgcgagatcgagtgagtacggctcgccaagttggagcgctctcgcgatagacacagcaactattcagctgcgaggggacgggagaggtggtgagcactctcgcgagatttgaaggagcggcggaggccagagggaggagaggaccggaagtccttcatctcaagcatccaatgctgaaagcggcctgattttctctaccggaagcccttttccagaggctgggaacacggcccacctagcaggaagtcccacctccttgagctccgccacccttcccgaagtttttctgtcacctgtgttaggctccgtcccctttccgcgttttatccccgtaccagaaaaggatacatttagtgcctcccacccagctccactaaacgggttggatatctcattctttgagttggtgttccttccccggcgcccccatgtagctgggaagtgggacctgggggtggttggacccctgggatcctaaaggaggggcagggagggcgcagaactccgcttctgctccttgctaccaggacgcgcggcctcctcagcctctttcctcccgctgccatgcaccctgcagccagtattagaggcaccgcctgcccagtgacacatgttttacgggcgcggtcccctacccgtgcaaagtagcataatcacttgttcct

SEQ ID NO: 364338 - DNA, 290 bp, Homo sapiens
  misc_feature (12)..(12): n is a, c, g, or t
  misc_feature (14)..(14): n is a, c, g, or t
  misc_feature (33)..(33): n is a, c, g, or t
  misc_feature (40)..(40): n is a, c, g, or t
  misc_feature (80)..(80): n is a, c, g, or t
taggcctagggngnaaagacggtaatttattanaatttcnccttttttagtacatgcacagaaagcctgacagccaagtntacacgaacatacacacatacacctctggtgacctatttgcacagaccgtcgtcttccctccagtcttctgagggataggggacattccatcccaagcttctcccttacccacacctatccttttgaggggctttggggtggggctggggcaagcagagggactgggtcttcacttcttgggctaataaaattgtttctttgtggactaa

SEQ ID NO: 364339 - DNA, 1001 bp, Homo sapiens
gctcgacactggtcatccttttcccagggctcgggtgcttctggttccagacaataccttccccttgggctattacctcatccctttcacagggattgtgggactgctggttttggccatgggagcagtaatggtgagtagctgagggaacatgatgggaagcactgaggcctgtgaggccagactggatctggagttgggagatgggagtggcttgtcctagattgtctagttttgttcctaagccttgtccatccacccccgcttcccccagatagctcgttgtatccagcaccggaaacggctccagcggaatcgacttaccaaagagcaactgaaacagattcctacacatgactatcagaagggtgagggggttaggggagaagagggcttttcccacagtttacctggttctgaaggactttgagcccagaagatagggtatacaaagatggcagtggccgggcacagtggctcacgtaatcccaagtgcctctaatcccagtactttgggaggccaaggtgggcaggtcacttgagcccaggagtttgagaccagcctgggtgacatgataaaacagaaaagtcccagcactttaggaggctgaggcaagtggatcccttgaccccgggagttcaggccagcctgggcaatgtggtgagaccccatctctataaaaaaataaaattagctgggcatggtggtgtgcacttgtagtcccagctaattgggagactgagacaggagaatcacttgaaccaggaaggcggaggttgtcgggggctgagattgcaccactgtgctccagcctgggcgacagagggagtccctttctcaaaaaaataataataaaaataaagatggcagtaggaaggtttcagcttgagatgctgtcttttcttctgtttttatgcataaatacaacgaagacgggagaggagatggaaagcaaagatgattaagtgaaataattgtgggaaacaatagagggatagac

SEQ ID NO: 364340 - DNA, 694 bp, Homo sapiens
tgcttgtccttactagccctaaattcttccatgttctgccctgaccttatcctgcctacctgtcttatctcttccactggctttgtaggtgaggggaaatttttgcaaggctttaaaagccttagccctgggtcattgtggctcagtgaaggactagattattttctttctgtcccaggagaccagtatgatgtctgtgccatttgcctggatgaatatgaggatggggacaagctgcgggtactcccctgtgctcatgcctaccacagccgctgcgtggacccctggctcactcagacccggaagacctgccccatttgcaagcagcctgttcatcggggtcctggggacgaagaccaagaggaagaaactcaagggcaagaggagggtgatgaaggggagccaagggaccaccctgcctcagaaaggaccccacttttgggttctagccccactcccctccctcttcccctgttatcctggtctaataaccccccacacatacacctctggtgacctatttgcacagaccgtcgtcttccctccagtcttctgagggataggggacattccatcccaagcttctcccttacccacacctatccttttgaggggctttggggtggggctggggcaagcagagggactgggtcttcacttcttgggctaataaaattgtttctttgtggactaa

SEQ ID NO: 364341 - DNA, 2153 bp, Homo sapiens
cagctctcaggtccgacacccgctggaagccggcgcgggcgcaggcgcgcagcgaaaaggcggccgggagtaaggcggagctgaaggaggagcttgatggaagcgtgcgagaaggggcgtaactgatttggaaaccagaggaaaggcgctgttttcaccgaattagaatcgcgggaaaatagagaagagtttgtttgaaggtctcgcgagatcgagtgagtacggctcgccaagttggagcgctctcgcgatagacacagcaactattcagctgcgaggggacgggagaggtggtgagcactctcgcgagatttgaaggagcggcggaggccagagggaggagaggtttgtaaactaggaggctccgggtttccgggcacttttattaggtcgtcttctgggccaccagtgccccttccatctccacaggcagtccctccatcgctaacctttttttaaccggccttttaggaccggaagtccttcatctcaagcatccaatgctgaaagcggcctgattttctctaccggaagcccttttccagaggctgggaacacggcccacctagcaggaagtcccacctccttgagctccgccacccttcccgaagtttttctgtcacctgtgttaggctccgtcccctttccgcgttttatccccgtaccagaaaaggatacatttagtgcctcccacccagctccactaaacgggttggatatctcattctttgagttggtgttccttccccggcgcccccatgtagctgggaagtgggacctgggggtggttggacccctgggatcctaaaggaggggcagggagggcgcagaactccgcttctgctccttgctaccaggacgcgcggcctcctcagcctctttcctcccgctgccatgcaccctgcagccttcccgcttcctgtggttgtggccgctgtgctgtggggagcggccccgacccgggggctcattcgagcgacctcggaccacaatgccagcatggactttgcagaccttccagctctgtttggggctaccttgagccaggagggcctccaggggttccttgtggaggctcacccagacaatgcctgcagccccattgccccaccacccccagccccggtcaatgggtcagtctttattgcgctgcttcgaagattcgactgcaactttgacctcaaggtcctaaatgcccagaaggctggatatggtgccgctgtagtacacaatgtgaattccaatgaacttctgaacatggtgtggaatagtgaggaaatccagcagcagatctggatcccgtctgtatttattggggagagaagctccgagtacctgcgtgccctctttgtctacgagaagggggctcgggtgcttctggttccagacaataccttccccttgggctattacctcatccctttcacagggattgtgggactgctggttttggccatgggagcagtaatgatagctcgttgtatccagcaccggaaacggctccagcggaatcgacttaccaaagagcaactgaaacagattcctacacatgactatcagaagggagaccagtatgatgtctgtgccatttgcctggatgaatatgaggatggggacaagctgcgggtactcccctgtgctcatgcctaccacagccgctgcgtggacccctggctcactcagacccggaagacctgccccatttgcaagcagcctgttcatcggggtcctggggacgaagaccaagaggaagaaactcaagggcaagaggagggtgatgaaggggagccaagggaccaccctgcctcagaaaggaccccacttttgggttctagccccactcttcccacctcctttggttccttagccccagctccccttgtttttcctgggccttcaacagatcccccactgtcccctccctcttcccctgttatcctggtctaataaccccccacacatacacctctggtgacctatttgcacagaccgtcgtcttccctccagtcttctgagggataggggacattccatcccaagcttctcccttacccacacctatccttttgaggggctttggggtggggctggggcaagcagagggactgggtcttcacttcttgggctaataaaattgtttctttgtggactaa

SEQ ID NO: 364342 - DNA, 2527 bp, Homo sapiens
cagctctcaggtccgacacccgctggaagccggcgcgggcgcaggcgcgcagcgaaaaggcggccgggagtaaggcggagctgaaggaggagcttgatggaagcgtgcgagaaggggcgtaactgatttggaaaccagaggaaaggcgctgttttcaccgaattagaatcgcgggaaaatagagaagagtttgtttgaaggtctcgcgagatcgagtgagtacggctcgccaagttggagcgctctcgcgatagacacagcaactattcagctgcgaggggacgggagaggtggtgagcactctcgcgagatttgaaggagcggcggaggccagagggaggagaggaccggaagtccttcatctcaagcatccaatgctgaaagcggcctgattttctctaccggaagcccttttccagaggctgggaacacggcccacctagcaggaagtcccacctccttgagctccgccacccttcccgaagtttttctgtcacctgtgttaggctccgtcccctttccgcgttttatccccgtaccagaaaaggatacatttagtgcctcccacccagctccactaaacgggttggatatctcattctttgagttggtgttccttccccggcgcccccatgtagctgggaagtgggacctgggggtggttggacccctgggatcctaaaggaggggcagggagggcgcagaactccgcttctgctccttgctaccaggacgcgcggcctcctcagcctctttcctcccgctgccatgcaccctgcagccttcccgcttcctgtggttgtggccgctgtgctgtggggagcggccccgacccgggggctcattcgagcgacctcggaccacaatgccagcatggactttgcagaccttccagctctgtttggggctaccttgagccaggagggcctccaggggttccttgtggaggctcacccagacaatgcctgcagccccattgccccaccacccccagccccggtcaatgggtcagtctttattgcgctgcttcgaagattcgactgcaactttgacctcaaggtcctaaatgcccagaaggctggatatggtgccgctgtagtacacaatgtgaattccaatgaacttctgaacatggtgtggaatagtgaggaaatccagcagcagatctggatcccgtctgtatttattggggagagaagctccgagtacctgcgtgccctctttgtctacgagaagggggctcgggtgcttctggttccagacaataccttccccttgggctattacctcatccctttcacagggattgtgggactgctggttttggccatgggagcagtaatgatagctcgttgtatccagcaccggaaacggctccagcggaatcgacttaccaaagagcaactgaaacagattcctacacatgactatcagaagggagaccagtatgatgtctgtgccatttgcctggatgaatatgaggatggggacaagctgcgggtactcccctgtgctcatgcctaccacagccgctgcgtggacccctggctcactcagacccggaagacctgccccatttgcaagcagcctgttcatcggggtcctggggacgaagaccaagaggaagaaactcaagggcaagaggagggtgatgaaggggagccaagggaccaccctgcctcagaaaggaccccacttttgggttctagccccactcttcccacctcctttggttccttagccccagctccccttgtttttcctgggccttcaacagatcccccactgtcccctccctcttcccctgttatcctggtctaataaccccccacacatacacctctggtgacctatttgcacagaccgtcgtcttccctccagtcttctgagggataggggacattccatcccaagcttctcccttacccacacctatccttttgaggggctttggggtggggctggggcaagcagagggactgggtcttcacttcttgggctaataaaattgtttctttgtggactaaaaaaaaaaaaaaaaaaaaaaaaaaaaaaaaaaaaaaaaaagggggggccaaacaaaaaaataccccaaaaaggggcacacaaatataagagaaaaaccagaaaataattgaaaaagaagggggcaccacaaaagaaaagacgaaaataaaacaaaagaaaacagaagacagagaaatataaaacagatcagaaaacgagaaaacaaaggaaacgaaggaaaacactgagaaaacaaaaaaccaaccaacatccgcggggaggaaacacacaaaaacaaagtcggtaccaacaaatcaaccatcaaaagaagaagaattataaagacccatacctagaaagaggaaaaaattaatacagaaaattattaaaaagaagctaaaaaggcgagcggtaacaaaactaagaagctaaaatataagtaacatgacaataatataaaaaaaatatagagtcaacacatcagcaaaaatcatcaatatacaaaaaaaatattataaca

SEQ ID NO: 364343 - DNA, 2103 bp, Homo sapiens
cagctctcaggtccgacacccgctggaagccggcgcgggcgcaggcgcgcagcgaaaaggcggccgggagtaaggcggagctgaaggaggagcttgatggaagcgtgcgagaaggggcgtaactgatttggaaaccagaggaaaggcgctgttttcaccgaattagaatcgcgggaaaatagagaagagtttgtttgaaggtctcgcgagatcgagtgagtacggctcgccaagttggagcgctctcgcgatagacacagcaactattcagctgcgaggggacgggagaggtggtgagcactctcgcgagatttgaaggagcggcggaggccagagggaggagaggaccggaagtccttcatctcaagcatccaatgctgaaagcggcctgattttctctaccggaagcccttttccagaggctgggaacacggcccacctagcaggaagtcccacctccttgagctccgccacccttcccgaagtttttctgtcacctgtgttaggctccgtcccctttccgcgttttatccccgtaccagaaaaggatacatttagtgcctcccacccagctccactaaacgggttggatatctcattctttgagttggtgttccttccccggcgcccccatgtagctgggaagtgggacctgggggtggttggacccctgggatcctaaaggaggggcagggagggcgcagaactccgcttctgctccttgctaccaggacgcgcggcctcctcagcctctttcctcccgctgccatgcaccctgcagccttcccgcttcctgtggttgtggccgctgtgctgtggggagcggccccgacccgggggctcattcgagcgacctcggaccacaatgccagcatggactttgcagaccttccagctctgtttggggctaccttgagccaggagggcctccaggggttccttgtggaggctcacccagacaatgcctgcagccccattgccccaccacccccagccccggtcaatgggtcagtctttattgcgctgcttcgaagattcgactgcaactttgacctcaaggtcctaaatgcccagaaggctggatatggtgccgctgtagtacacaatgtgaattccaatgaacttctgaacatggtgtggaatagtgaggaaatccagcagcagatctggatcccgtctgtatttattggggagagaagctccgagtacctgcgtgccctctttgtctacgagaagggggctcgggtgcttctggttccagacaataccttccccttgggctattacctcatccctttcacagggattgtgggactgctggttttggccatgggagcagtaatgatagctcgttgtatccagcaccggaaacggctccagcggaatcgacttaccaaagagcaactgaaacagattcctacacatgactatcagaagggagaccagtatgatgtctgtgccatttgcctggatgaatatgaggatggggacaagctgcgggtactcccctgtgctcatggtgaggccctcactgcctgcccatgcccctctgccaccagcagccaccaggtgcttcaccttgttcctctctgcagcctaccacagccgctgcgtggacccctggctcactcagacccggaagacctgccccatttgcaagcagcctgttcatcggggtcctggggacgaagaccaagaggaagaaactcaagggcaagaggagggtgatgaaggggagccaagggaccaccctgcctcagaaaggaccccacttttgggttctagccccactcttcccacctcctttggttccttagccccagctccccttgtttttcctgggccttcaacagatcccccactgtcccctccctcttcccctgttatcctggtctaataaccccccacacatacacctctggtgacctatttgcacagaccgtcgtcttccctccagtcttctgagggataggggacattccatcccaagcttctcccttacccacacctatccttttgaggggctttggggtggggctggggcaagcagagggactgggtcttcacttcttgggctaataaaattgtttctttgtggactaa

SEQ ID NO: 364344 - DNA, 2168 bp, Homo sapiens
cagctctcaggtccgacacccgctggaagccggcgcgggcgcaggcgcgcagcgaaaaggcggccgggagtaaggcggagctgaaggaggagcttgatggaagcgtgcgagaaggggcgtaactgatttggaaaccagaggaaaggcgctgttttcaccgaattagaatcgcgggaaaatagagaagagtttgtttgaaggtctcgcgagatcgagtgagtacggctcgccaagttggagcgctctcgcgatagacacagcaactattcagctgcgaggggacgggagaggtggtgagcactctcgcgagatttgaaggagcggcggaggccagagggaggagaggaccggaagtccttcatctcaagcatccaatgctgaaagcggcctgattttctctaccggaagcccttttccagaggctgggaacacggcccacctagcaggaagtcccacctccttgagctccgccacccttcccgaagtttttctgtcacctgtgttaggctccgtcccctttccgcgttttatccccgtaccagaaaaggatacatttagtgcctcccacccagctccactaaacgggttggatatctcattctttgagttggtgttccttccccggcgcccccatgtagctgggaagtgggacctgggggtggttggacccctgggatcctaaaggaggggcagggagggcgcagaactccgcttctgctccttgctaccaggacgcgcggcctcctcagcctctttcctcccgctgccatgcaccctgcagccttcccgcttcctgtggttgtggccgctgtgctgtggggagcggccccgacccgggggctcattcgagcgacctcggaccacaatgccagcatggactttgcagaccttccagctctgtttggggctaccttgagccaggagggcctccaggggttccttgtggaggctcacccagacaatgcctgcagccccattgccccaccacccccagccccggtcaatgggtcagtctttattgcgctgcttcgaagattcgactgcaactttgacctcaaggtcctaaatgcccagaaggctggatatggtgccgctgtagtacacaatgtgaattccaatgaacttctgaacatggtgtggaatagtgaggaaatccagcagcagatctggatcccgtctgtatttattggggagagaagctccgagtacctgcgtgccctctttgtctacgagaagggggctcgggtgcttctggttccagacaataccttccccttgggctattacctcatccctttcacagggattgtgggactgctggttttggccatgggagcagtaatggtgagtagctgagggaacatgatgggaagcactgaggcctgtgaggccagactggatctggagttgggagatgggagtggcttgtcctagattgtctagttttgttcctaagccttgtccatccacccccgcttcccccagatagctcgttgtatccagcaccggaaacggctccagcggaatcgacttaccaaagagcaactgaaacagattcctacacatgactatcagaagggagaccagtatgatgtctgtgccatttgcctggatgaatatgaggatggggacaagctgcgggtactcccctgtgctcatgcctaccacagccgctgcgtggacccctggctcactcagacccggaagacctgccccatttgcaagcagcctgttcatcggggtcctggggacgaagaccaagaggaagaaactcaagggcaagaggagggtgatgaaggggagccaagggaccaccctgcctcagaaaggaccccacttttgggttctagccccactcttcccacctcctttggttccttagccccagctccccttgtttttcctgggccttcaacagatcccccactgtcccctccctcttcccctgttatcctggtctaataaccccccacacatacacctctggtgacctatttgcacagaccgtcgtcttccctccagtcttctgagggataggggacattccatcccaagcttctcccttacccacacctatccttttgaggggctttggggtggggctggggcaagcagagggactgggtcttcacttcttgggctaataaaattgtttctttgtggactaa

SEQ ID NO: 364345 - DNA, 2603 bp, Homo sapiens
cagctctcaggtccgacacccgctggaagccggcgcgggcgcaggcgcgcagcgaaaaggcggccgggagtaaggcggagctgaaggaggagcttgatggaagcgtgcgagaaggggcgtaactgatttggaaaccagaggaaaggcgctgttttcaccgaattagaatcgcgggaaaatagagaagagtttgtttgaaggtctcgcgagatcgagtgagtacggctcgccaagttggagcgctctcgcgatagacacagcaactattcagctgcgaggggacgggagaggtggtgagcactctcgcgagatttgaaggagcggcggaggccagagggaggagaggaccggaagtccttcatctcaagcatccaatgctgaaagcggcctgattttctctaccggaagcccttttccagaggctgggaacacggcccacctagcaggaagtcccacctccttgagctccgccacccttcccgaagtttttctgtcacctgtgttaggctccgtcccctttccgcgttttatccccgtaccagaaaaggatacatttagtgcctcccacccagctccactaaacgggttggatatctcattctttgagttggtgttccttccccggcgcccccatgtagctgggaagtgggacctgggggtggttggacccctgggatcctaaaggaggggcagggagggcgcagaactccgcttctgctccttgctaccaggacgcgcggcctcctcagcctctttcctcccgctgccatgcaccctgcagccttcccgcttcctgtggttgtggccgctgtgctgtggggagcggccccgacccgggggctcattcgagcgacctcggaccacaatgccagcatggactttgcagaccttccagctctgtttggggctaccttgagccaggagggcctccaggggttccttgtggaggctcacccagacaatgcctgcagccccattgccccaccacccccagccccggtcaatgggtcagtctttattgcgctgcttcgaagattcgactgcaactttgacctcaaggtcctaaatgcccagaaggctggatatggtgccgctgtagtacacaatgtgaattccaatgaacttctgaacatggtgtggaatagtgaggaaatccagcagcagatctggatcccgtctgtatttattggggagagaagctccgagtacctgcgtgccctctttgtctacgagaagggggctcgggtgcttctggttccagacaataccttccccttgggctattacctcatccctttcacagggattgtgggactgctggttttggccatgggagcagtaatgatagctcgttgtatccagcaccggaaacggctccagcggaatcgacttaccaaagagcaactgaaacagattcctacacatgactatcagaagggagaccagtatgatgtctgtgccatttgcctggatgaatatgaggatggggacaagctgcgggtactcccctgtgctcatggtgaggccctcactgcctgcccatgcccctctgccaccagcagccaccaggtgcttcaccttgttcctctctgcagcctaccacagccgctgcgtggacccctggctcactcagacccggaagacctgccccatttgcaagcagcctgttcatcggggtcctggggacgaagaccaagaggaagaaactcaagggcaagaggagggtgatgaaggggagccaagggaccaccctgcctcagaaaggaccccacttttgggttctagccccactcttcccacctcctttggttccttagccccagctccccttgtttttcctgggccttcaacagatcccccactgtcccctccctcttcccctgttatcctggtctaataaccccccacacatacacctctggtgacctatttgcacagaccgtcgtcttccctccagtcttctgagggataggggacattccatcccaagcttctcccttacccacacctatccttttgaggggctttggggtggggctggggcaagcagagggactgggtcttcacttcttgggctaataaaattgtttctttgtggactaaaaaaaaaaaaaaaaaaaaaaaaaaaaaaaaaaaaaaaaaagggggggccaaacaaaaaaataccccaaaaaggggcacacaaatataagagaaaaaccagaaaataattgaaaaagaagggggcaccacaaaagaaaagacgaaaataaaacaaaagaaaacagaagacagagaaatataaaacagatcagaaaacgagaaaacaaaggaaacgaaggaaaacactgagaaaacaaaaaaccaaccaacatccgcggggaggaaacacacaaaaacaaagtcggtaccaacaaatcaaccatcaaaagaagaagaattataaagacccatacctagaaagaggaaaaaattaatacagaaaattattaaaaagaagctaaaaaggcgagcggtaacaaaactaagaagctaaaatataagtaacatgacaataatataaaaaaaatatagagtcaacacatcagcaaaaatcatcaatatacaaaaaaaatattataaca

SEQ ID NO: 364346 - DNA, 1954 bp, Homo sapiens
cagctctcaggtccgacacccgctggaagccggcgcgggcgcaggcgcgcagcgaaaaggcggccgggagtaaggcggagctgaaggaggagcttgatggaagcgtgcgagaaggggcgtaactgatttggaaaccagaggaaaggcgctgttttcaccgaattagaatcgcgggaaaatagagaagagtttgtttgaaggtctcgcgagatcgagtgagtacggctcgccaagttggagcgctctcgcgatagacacagcaactattcagctgcgaggggacgggagaggtggtgagcactctcgcgagatttgaaggagcggcggaggccagagggaggagaggaccggaagtccttcatctcaagcatccaatgctgaaagcggcctgattttctctaccggaagcccttttccagaggctgggaacacggcccacctagcaggaagtcccacctccttgagctccgccacccttcccgaagtttttctgtcacctgtgttaggctccgtcccctttccgcgttttatccccgtaccagaaaaggatacatttagtgcctcccacccagctccactaaacgggttggatatctcattctttgagttggtgttccttccccggcgcccccatgtagctgggaagtgggacctgggggtggttggacccctgggatcctaaaggaggggcagggagggcgcagaactccgcttctgctccttgctaccaggacgcgcggcctcctcagcctctttcctcccgctgccatgcaccctgcagccttcccgcttcctgtggttgtggccgctgtgctgtggggagcggccccgacccgggggctcattcgagcgacctcggaccacaatgccagcatggactttgcagaccttccagctctgtttggggctaccttgagccaggagggcctccaggggttccttgtggaggctcacccagacaatgcctgcagccccattgccccaccacccccagccccggtcaatgggtcagtctttattgcgctgcttcgaagattcgactgcaactttgacctcaaggtcctaaatgcccagaaggctggatatggtgccgctgtagtacacaatgtgaattccaatgaacttctgaacatggtgtggaatagtgaggaaatccagcagcagatctggatcccgtctgtatttattggggagagaagctccgagtacctgcgtgccctctttgtctacgagaagggggctcgggtgcttctggttccagacaataccttccccttgggctattacctcatccctttcacagggattgtgggactgctggttttggccatgggagcagtaatgatagctcgttgtatccagcaccggaaacggctccagcggaatcgacttaccaaagagcaactgaaacagattcctacacatgactatcagaagggagaccagtatgatgtctgtgccatttgcctggatgaatatgaggatggggacaagctgcgggtactcccctgtgctcatgcctaccacagccgctgcgtggacccctggctcactcagacccggaagacctgccccatttgcaagcagcctgttcatcggggtcctggggacgaagaccaagaggaagaaactcaagggcaagaggagggtgatgaaggggagccaagggaccaccctgcctcagaaaggaccccacttttgggttctagccccactcccctccctcttcccctgttatcctggtctaataaccccccacacatacacctctggtgacctatttgcacagaccgtcgtcttccctccagtcttctgagggataggggacattccatcccaagcttctcccttacccacacctatccttttgaggggctttggggtggggctggggcaagcagagggactgggtcttcacttcttgggctaataaaattgtttctttgtggactaa

SEQ ID NO: 364347 - DNA, 1882 bp, Homo sapiens
cagctctcaggtccgacacccgctggaagccggcgcgggcgcaggcgcgcagcgaaaaggcggccgggagtaaggcggagctgaaggaggagcttgatggaagcgtgcgagaaggggcgtaactgatttggaaaccagaggaaaggcgctgttttcaccgaattagaatcgcgggaaaatagagaagagtttgtttgaaggtctcgcgagatcgagtgagtacggctcgccaagttggagcgctctcgcgatagacacagcaactattcagctgcgaggggacgggagaggtggtgagcactctcgcgagatttgaaggagcggcggaggccagagggaggagaggaccggaagtccttcatctcaagcatccaatgctgaaagcggcctgattttctctaccggaagcccttttccagaggctgggaacacggcccacctagcaggaagtcccacctccttgagctccgccacccttcccgaagtttttctgtcacctgtgttaggctccgtcccctttccgcgttttatccccgtaccagaaaaggatacatttagtgcctcccacccagctccactaaacggggacgcgcggcctcctcagcctctttcctcccgctgccatgcaccctgcagccttcccgcttcctgtggttgtggccgctgtgctgtggggagcggccccgacccgggggctcattcgagcgacctcggaccacaatgccagcatggactttgcagaccttccagctctgtttggggctaccttgagccaggagggcctccaggggttccttgtggaggctcacccagacaatgcctgcagccccattgccccaccacccccagccccggtcaatgggtcagtctttattgcgctgcttcgaagattcgactgcaactttgacctcaaggtcctaaatgcccagaaggctggatatggtgccgctgtagtacacaatgtgaattccaatgaacttctgaacatggtgtggaatagtgaggaaatccagcagcagatctggatcccgtctgtatttattggggagagaagctccgagtacctgcgtgccctctttgtctacgagaagggggctcgggtgcttctggttccagacaataccttccccttgggctattacctcatccctttcacagggattgtgggactgctggttttggccatgggagcagtaatgatagctcgttgtatccagcaccggaaacggctccagcggaatcgacttaccaaagagcaactgaaacagattcctacacatgactatcagaagggagaccagtatgatgtctgtgccatttgcctggatgaatatgaggatggggacaagctgcgggtactcccctgtgctcatgcctaccacagccgctgcgtggacccctggctcactcagacccggaagacctgccccatttgcaagcagcctgttcatcggggtcctggggacgaagaccaagaggaagaaactcaagggcaagaggagggtgatgaaggggagccaagggaccaccctgcctcagaaaggaccccacttttgggttctagccccactcttcccacctcctttggttccttagccccagctccccttgtttttcctgggccttcaacagatcccccactgtcccctccctcttcccctgttatcctggtctaataaccccccacacatacacctctggtgacctatttgcacagaccgtcgtcttccctccagtcttctgagggataggggacattccatcccaagcttctcccttacccacacctatccttttgaggggctttggggtggggctggggcaagcagagggactgggtcttcacttcttgggctaataaaattgtttctttgtggactaa

SEQ ID NO: 364348 - DNA, 2010 bp, Homo sapiens
cagctctcaggtccgacacccgctggaagccggcgcgggcgcaggcgcgcagcgaaaaggcggccgggagtaaggcggagctgaaggaggagcttgatggaagcgtgcgagaaggggcgtaactgatttggaaaccagaggaaaggcgctgttttcaccgaattagaatcgcgggaaaatagagaagagtttgtttgaaggtctcgcgagatcgagtgagtacggctcgccaagttggagcgctctcgcgatagacacagcaactattcagctgcgaggggacgggagaggtggtgagcactctcgcgagatttgaaggagcggcggaggccagagggaggagaggaccggaagtccttcatctcaagcatccaatgctgaaagcggcctgattttctctaccggaagcccttttccagaggctgggaacacggcccacctagcaggaagtcccacctccttgagctccgccacccttcccgaagtttttctgtcacctgtgttaggctccgtcccctttccgcgttttatccccgtaccagaaaaggatacatttagtgcctcccacccagctccactaaacgggttggatatctcattctttgagttggtgttccttccccggcgcccccatgtagctgggaagtggacccctgggatcctaaaggaggggcagggagggcgcagaactccgcttctgctccttgctaccaggacgcgcggcctcctcagcctctttcctcccgctgccatgcaccctgcagccttcccgcttcctgtggttgtggccgctgtgctgtggggagcggccccgacccgggggctcattcgagcgacctcggaccacaatgccagcatggactttgcagaccttccagctctgtttggggctaccttgagccaggagggcctccaggggttccttgtggaggctcacccagacaatgcctgcagccccattgccccaccacccccagccccggtcaatgggtcagtctttattgcgctgcttcgaagattcgactgcaactttgacctcaaggtcctaaatgcccagaaggctggatatggtgccgctgtagtacacaatgtgaattccaatgaacttctgaacatggtgtggaatagtgaggaaatccagcagcagatctggatcccgtctgtatttattggggagagaagctccgagtacctgcgtgccctctttgtctacgagaagggggctcgggtgcttctggttccagacaataccttccccttgggctattacctcatccctttcacagggattgtgggactgctggttttggccatgggagcagtaatgatagctcgttgtatccagcaccggaaacggctccagcggaatcgacttaccaaagagcaactgaaacagattcctacacatgactatcagaagggagaccagtatgatgtctgtgccatttgcctggatgaatatgaggatggggacaagctgcgggtactcccctgtgctcatgcctaccacagccgctgcgtggacccctggctcactcagacccggaagacctgccccatttgcaagcagcctgttcatcggggtcctggggacgaagaccaagaggaagaaactcaagggcaagaggagggtgatgaaggggagccaagggaccaccctgcctcagaaaggaccccacttttgggttctagccccactcttcccacctcctttggttccttagccccagctccccttgtttttcctgggccttcaacagatcccccactgtcccctccctcttcccctgttatcctggtctaataaccccccacacatacacctctggtgacctatttgcacagaccgtcgtcttccctccagtcttctgagggataggggacattccatcccaagcttctcccttacccacacctatccttttgaggggctttggggtggggctggggcaagcagagggactgggtcttcacttcttgggctaataaaattgtttctttgtggactaa

SEQ ID NO: 364349 - DNA, 1705 bp, Homo sapiens
cagctctcaggtccgacacccgctggaagccggcgcgggcgcaggcgcgcagcgaaaaggcggccgggagtaaggcggagctgaaggaggagcttgatggaagcgtgcgagaaggggcgtaactgatttggaaaccagaggaaaggcgctgttttcaccgaattagaatcgcgggaaaatagagaagagtttgtttgaaggtctcgcgagatcgagtgagtacggctcgccaagttggagcgctctcgcgatagacacagcaactattcagctgcgaggggacgggagaggtggtgagcactctcgcgagatttgaaggagcggcggaggccagagggaggagaggaccggaagtccttcatctcaagcatccaatgctgaaagcggcctgattttctctaccggaagcccttttccagaggctgggaacacggcccacctagcaggaagtcccacctccttgagctccgccacccttcccgaagtttttctgtcacctgtgttaggctccgtcccctttccgcgttttatccccgtaccagaaaaggatacatttagtgcctcccacccagctccactaaacgggttggatatctcattctttgagttggtgttccttccccggcgcccccatgtagctgggaagtgggacctgggggtggttggacccctgggatcctaaaggaggggcagggagggcgcagaactccgcttctgctccttgctaccaggacgcgcggcctcctcagcctctttcctcccgctgccatgcaccctgcagccttcccgcttcctgtggttgtggccgctgtgctgtggggagcggccccgacccgggggctcattcgagcgacctcggaccacaatgccagcatggactttgcagaccttccagctctgtttggggctaccttgagccaggagggcctccaggggttccttgtggaggctcacccagacaatgcctgcagccccattgccccaccacccccagccccggtcaatgggtcagtctttattgcgctgcttcgaagattcgactgcaactttgacctcaaggtcctaaatgcccagaaggctggatatggtgccgctgtagtacacaatgtgaattccaatgaacttctgaacatggtgtggaatagtgaggaaatccagcagcagatctggatcccgtctgtatttattggggagagaagctccgagtacctgcgtgccctctttgtctacgagaagggggctcgggtgcttctggttccagacaataccttccccttgggctattacctcatccctttcacagggattgtgggactgctggttttggccatgggagcagtaatgatagctcgttgtatccagcaccggaaacggctccagcggaatcgacttaccaaagagcaactgaaacagattcctacacatgactatcagaagggagaccagtatgatgtctgtgccatttgccccctccctcttcccctgttatcctggtctaataaccccccacacatacacctctggtgacctatttgcacagaccgtcgtcttccctccagtcttctgagggataggggacattccatcccaagcttctcccttacccacacctatccttttgaggggctttggggtggggctggggcaagcagagggactgggtcttcacttcttgggctaataaaattgtttctttgtggactaa

SEQ ID NO: 364350 - DNA, 1668 bp, Homo sapiens
cagctctcaggtccgacacccgctggaagccggcgcgggcgcaggcgcgcagcgaaaaggcggccgggagtaaggcggagctgaaggaggagcttgatggaagcgtgcgagaaggggcgtaactgatttggaaaccagaggaaaggcgctgttttcaccgaattagaatcgcgggaaaatagagaagagtttgtttgaaggtctcgcgagatcgagaccggaagtccttcatctcaagcatccaatgctgaaagcggcctgattttctctaccggaagcccttttccagaggctgggaacacggcccacctagcaggaagtcccacctccttgagctccgccacccttcccgaagtttttctgtcacctgtggacgcgcggcctcctcagcctctttcctcccgctgccatgcaccctgcagccttcccgcttcctgtggttgtggccgctgtgctgtggggagcggccccgacccgggggctcattcgagcgacctcggaccacaatgccagcatggactttgcagaccttccagctctgtttggggctaccttgagccaggagggcctccaggggttccttgtggaggctcacccagacaatgcctgcagccccattgccccaccacccccagccccggtcaatgggtcagtctttattgcgctgcttcgaagattcgactgcaactttgacctcaaggtcctaaatgcccagaaggctggatatggtgccgctgtagtacacaatgtgaattccaatgaacttctgaacatggtgtggaatagtgaggaaatccagcagcagatctggatcccgtctgtatttattggggagagaagctccgagtacctgcgtgccctctttgtctacgagaagggggctcgggtgcttctggttccagacaataccttccccttgggctattacctcatccctttcacagggattgtgggactgctggttttggccatgggagcagtaatgatagctcgttgtatccagcaccggaaacggctccagcggaatcgacttaccaaagagcaactgaaacagattcctacacatgactatcagaagggagaccagtatgatgtctgtgccatttgcctggatgaatatgaggatggggacaagctgcgggtactcccctgtgctcatgcctaccacagccgctgcgtggacccctggctcactcagacccggaagacctgccccatttgcaagcagcctgttcatcggggtcctggggacgaagaccaagaggaagaaactcaagggcaagaggagggtgatgaaggggagccaagggaccaccctgcctcagaaaggaccccacttttgggttctagccccactcttcccacctcctttggttccttagccccagctccccttgtttttcctgggccttcaacagatcccccactgtcccctccctcttcccctgttatcctggtctaataaccccccacacatacacctctggtgacctatttgcacagaccgtcgtcttccctccagtcttctgagggataggggacattccatcccaagcttctcccttacccacacctatccttttgaggggctttggggtggggctggggcaagcagagggactgggtcttcacttcttgggctaataaaattgtttctttgtggactaa

SEQ ID NO: 364351 - DNA, 1459 bp, Homo sapiens
cagctctcaggtccgacacccgctggaagccggcgcgggcgcaggcgcgcagcgaaaaggcggccgggagtaaggcggagctgaaggaggagcttgatggaagcgtgcgagaaggggcgtaactgatttggaaaccagaggaaaggcgctgttttcaccgaattagaatcgcgggaaaatagagaagagtttgtttgaaggtctcgcgagatcgattcccgcttcctgtggttgtggccgctgtgctgtggggagcggccccgacccgggggctcattcgagcgacctcggaccacaatgccagcatggactttgcagaccttccagctctgtttggggctaccttgagccaggagggcctccaggggttccttgtggaggctcacccagacaatgcctgcagccccattgccccaccacccccagccccggtcaatgggtcagtctttattgcgctgcttcgaagattcgactgcaactttgacctcaaggtcctaaatgcccagaaggctggatatggtgccgctgtagtacacaatgtgaattccaatgaacttctgaacatggtgtggaatagtgaggaaatccagcagcagatctggatcccgtctgtatttattggggagagaagctccgagtacctgcgtgccctctttgtctacgagaagggggctcgggtgcttctggttccagacaataccttccccttgggctattacctcatccctttcacagggattgtgggactgctggttttggccatgggagcagtaatgatagctcgttgtatccagcaccggaaacggctccagcggaatcgacttaccaaagagcaactgaaacagattcctacacatgactatcagaagggagaccagtatgatgtctgtgccatttgcctggatgaatatgaggatggggacaagctgcgggtactcccctgtgctcatgcctaccacagccgctgcgtggacccctggctcactcagacccggaagacctgccccatttgcaagcagcctgttcatcggggtcctggggacgaagaccaagaggaagaaactcaagggcaagaggagggtgatgaaggggagccaagggaccaccctgcctcagaaaggaccccacttttgggttctagccccactcttcccacctcctttggttccttagccccagctccccttgtttttcctgggccttcaacagatcccccactgtcccctccctcttcccctgttatcctggtctaataaccccccacacatacacctctggtgacctatttgcacagaccgtcgtcttccctccagtcttctgagggataggggacattccatcccaagcttctcccttacccacacctatccttttgaggggctttggggtggggctggggcaagcagagggactgggtcttcacttcttgggctaataaaattgtttctttgtggactaa

SEQ ID NO: 364352 - DNA, 1743 bp, Homo sapiens
cagctctcaggtccgacacccgctggaagccggcgcgggcgcaggcgcgcagcgaaaaggcggccgggagtaaggcggagctgaaggaggagcttgatggaagcgtgcgagaaggggcgtaactgatttggaaaccagaggaaaggcgctgttttcaccgaattagaatcgcgggaaaatagagaagagtttgtttgaaggtctcgcgagatcgagtgagtacggctcgccaagttggagcgctctcgcgatagacacagcaactattcagctgcgaggggacgggagaggtggtgagcactctcgcgagatttgaaggagcggcggaggccagagggaggagaggaccggaagtccttcatctcaagcatccaatgctgaaagcggcctgattttctctaccggaagcccttttccagaggctgggaacacggcccacctagcaggaagtcccacctccttgagctccgccacccttcccgaagtttttctgtcacctgtgttaggctccgtcccctttccgcgttttatccccgtaccagaaaaggatacatttagtgcctcccacccagctccactaaacgggttggatatctcattctttgagttggtgttccttccccggcgcccccatgtagctgggaagtgggacctgggggtggttggacccctgggatcctaaaggaggggcagggagggcgcagaactccgcttctgctccttgctaccaggacgcgcggcctcctcagcctctttcctcccgctgccatgcaccctgcagccttcccgcttcctgtggttgtggccgctgtgctgtggggagcggccccgacccgggggctcattcgagcgacctcggaccacaatgccagcatggactttgcagaccttccagctctgtttggggctaccttgagccaggagggcctccaggggttccttgtggaggctcacccagacaatgcctgcagccccattgccccaccacccccagccccggtcaatgggtcagtctttattgcgctgcttcgaagattcgactgcaactttgacctcaaggtcctaaatgcccagaaggctggatatggtgccgctgtagtacacaatgtgaattccaatgaacttctgaacatggtgtggaatagtgaggaaatccagcagcagatctggatcccgtctgtatttattggggagagaagctccgagtacctgcgtgccctctttgtctacgagaagggggctcgggtgcttctggttccagacaataccttccccttgggctattacctcatccctttcacagggattgtgggactgctggttttggccatgggagcagtaatgatagctcgttgtatccagcaccggaaacggctccagcggaatcgacttaccaaagagcaactgaaacagattcctacacatgactatcagaagggtgagggggttaggggagaagagggcttttcccacagtttacctggttctgaaggactttgagcccagaagatagggtatacaaagatggcagtggccgggcacagtggctcacgtaatcccaagtgcctctaatcccagtactttgggaggccaaggtgggcaggtcacttgagcccaggagtttgagaccagcctgggtgacatgataaaacagaaaagtcccagcacatgttgcccaggctggtctcgaactcctggactcaaaggatccacctgcctcagcctctcaaagtgctgggatta

SEQ ID NO: 364353 - DNA, 1901 bp, Homo sapiens
cagctctcaggtccgacacccgctggaagccggcgcgggcgcaggcgcgcagcgaaaaggcggccgggagtaaggcggagctgaaggaggagcttgatggaagcgtgcgagaaggggcgtaactgatttggaaaccagaggaaaggcgctgttttcaccgaattagaatcgcgggaaaatagagaagagtttgtttgaaggtctcgcgagatcgagtgagtacggctcgccaagttggagcgctctcgcgatagacacagcaactattcagctgcgaggggacgggagaggtggtgagcactctcgcgagatttgaaggagcggcggaggccagagggaggagaggaccggaagtccttcatctcaagcatccaatgctgaaagcggcctgattttctctaccggaagcccttttccagaggctgggaacacggcccacctagcaggaagtcccacctccttgagctccgccacccttcccgaagtttttctgtcacctgtgttaggctccgtcccctttccgcgttttatccccgtaccagaaaaggatacatttagtgcctcccacccagctccactaaacgggttggatatctcattctttgagttggtgttccttccccggcgcccccatgtagctgggaagtgggacctgggggtggttggacccctgggatcctaaaggaggggcagggagggcgcagaactccgcttctgctccttgctaccaggacgcgcggcctcctcagcctctttcctcccgctgccatgcaccctgcagccttcccgcttcctgtggttgtggccgctgtgctgtggggagcggccccgacccgggggctcattcgagcgacctcggaccacaatgccagcatggactttgcagaccttccagctctgtttggggctaccttgagccaggagggcctccaggtcctaaatgcccagaaggctggatatggtgccgctgtagtacacaatgtgaattccaatgaacttctgaacatggtgtggaatagtgaggaaatccagcagcagatctggatcccgtctgtatttattggggagagaagctccgagtacctgcgtgccctctttgtctacgagaagggggctcgggtgcttctggttccagacaataccttccccttgggctattacctcatccctttcacagggattgtgggactgctggttttggccatgggagcagtaatgatagctcgttgtatccagcaccggaaacggctccagcggaatcgacttaccaaagagcaactgaaacagattcctacacatgactatcagaagggagaccagtatgatgtctgtgccatttgcctggatgaatatgaggatggggacaagctgcgggtactcccctgtgctcatgcctaccacagccgctgcgtggacccctggctcactcagacccggaagacctgccccatttgcaagcagcctgttcatcggggtcctggggacgaagaccaagaggaagaaactcaagggcaagaggagggtgatgaaggggagccaagggaccaccctgcctcagaaaggaccccacttttgggttctagccccactcttcccacctcctttggttccttagccccagctccccttgtttttcctgggccttcaacagatcccccactgtcccctccctcttcccctgttatcctggtctaataaccccccacacatacacctctggtgacctatttgcacagaccgtcgtcttccctccagtcttctgagggataggggacattccatcccaagcttctcccttacccacacctatccttttgaggggctttggggtggggctggggcaagcagagggactgggtcttcacttcttgggctaataaaattgtttctttgtggactaa

SEQ ID NO: 364354 - DNA, 1404 bp, Homo sapiens
  misc_feature (1402)..(1402): n is a, c, g, or t
cagctctcaggtccgacacccgctggaagccggcgcgggcgcaggcgcgcagcgaaaaggcggccgggagtaaggcggagctgaaggaggagcttgatggaagcgtgcgagaaggggcgtaactgatttggaaaccagaggaaaggcgctgttttcaccgaattagaatcgcgggaaaatagagaagagtttgtttgaaggtctcgcgagatcgagtgagtacggctcgccaagttggagcgctctcgcgatagacacagcaactattcagctgcgaggggacgggagaggtggtgagcactctcgcgagatttgaaggagcggcggaggccagagggaggagaggaccggaagtccttcatctcaagcatccaatgctgaaagcggcctgattttctctaccggaagcccttttccagaggctgggaacacggcccacctagcaggaagtcccacctccttgagctccgccacccttcccgaagtttttctgtcacctgtgttaggctccgtcccctttccgcgttttatccccgtaccagaaaaggatacatttagtgcctcccacccagctccactaaacgggttggatatctcattctttgagttggtgttccttccccggcgcccccatgtagctgggaagtgggacctgggggtggttggacccctgggatcctaaaggaggggcagggagggcgcagaactccgcttctgctccttgctaccaggacgcgcggcctcctcagcctctttcctcccgctgccatgcaccctgcagccttcccgcttcctgtggttgtggccgctgtgctgtggggagcggccccgacccgggggctcattcgagcgacctcggaccacaatgccagcatggactttgcagaccttccagctctgtttggggctaccttgagccaggagggcctccaggggttccttgtggaggctcacccagacaatgcctgcagccccattgccccaccacccccagccccggtcaatgggtcagtctttattgcgctgcttcgaagattcgactgcaactttgacctcaaggtcctaaatgcccagaaggctggatatggtgccgctgtagtacacaatgtgaattccaatgaacttctgaacatggtgtggaatagtgaggaaatccagcagcagatctggatcccgtctgtatttattggggagagaagctccgagtacctgcgtgccctctttgtctacgagaagggggctcgggtgcttctggttccagacaataccttccccttgggctattacctcatccctttcacagggattgtgggactgctggttttggccatgggagcagtaatgatagctcgttgtatccagcaccggaaacgactacagcgtgctatacgggaccgagctnga

SEQ ID NO: 364355 - DNA, 816 bp, Homo sapiens
gctcgacactggtcatccttttcccagggctcgggtgcttctggttccagacaataccttccccttgggctattacctcatccctttcacagggattgtgggactgctggttttggccatgggagcagtaatgatagctcgttgtatccagcaccggaaacggctccagcggaatcgacttaccaaagagcaactgaaacagattcctacacatgactatcagaagggagaccagtatgatgtctgtgccatttgcctggatgaatatgaggatggggacaagctgcgggtactcccctgtgctcatgcctaccacagccgctgcgtggacccctggctcactcagacccggaagacctgccccatttgcaagcagcctgttcatcggggtcctggggacgaagaccaagaggaagaaactcaagggcaagaggagggtgatgaaggggagccaagggaccaccctgcctcagaaaggaccccacttttgggttctagccccactcttcccacctcctttggttccttagccccagctccccttgtttttcctgggccttcaacagatcccccactgtcccctccctcttcccctgttatcctggtctaataaccccccacacatacacctctggtgacctatttgcacagaccgtcgtcttccctccagtcttctgagggataggggacattccatcccaagcttctcccttacccacacctatccttttgaggggctttggggtggggctggggcaagcagagggactgggtcttcacttcttgggctaataaaattgtttctttgtggactaa

SEQ ID NO: 364356 - DNA, 1232 bp, Homo sapiens
cagctctcaggtccgacacccgctggaagccggcgcgggcgcaggcgcgcagcgaaaaggcggccgggagtaaggcggagctgaaggaggagcttgatggaagcgtgcgagaaggggcgtaactgatttggaaaccagaggaaaggcgctgttttcaccgaattagaatcgcgggaaaatagagaagagtttgtttgaaggtctcgcgagatcgagtgagtacggctcgccaagttggagcgctctcgcgatagacacagcaactattcagctgcgaggggacgggagaggtggtgagcactctcgcgagatttgaaggagcggcggaggccagagggaggagaggaccggaagtccttcatctcaagcatccaatgctgaaagcggcctgattttctctaccggaagcccttttccagaggctgggaacacggcccacctagcaggaagtcccacctccttgagctccgccacccttcccgaagtttttctgtcacctgtgttaggctccgtcccctttccgcgttttatccccgtaccagaaaaggatacatttagtgcctcccacccagctccactaaacgggttggatatctcattctttgagttggtgttccttccccggcgcccccatgtagctgggaagtgggacctgggggtggttggacccctgggatcctaaaggaggggcagggagggcgcagaactccgcttctgctccttgctaccaggacgcgcggcctcctcagcctctttcctcccgctgccatgcaccctgcagccttcccgcttcctgtggttgtggccgctgtgctgtggggagcggccccgacccgggggctcattcgagcgacctcggaccacaatgccagcatggactttgcagaccttccagctctgtttggggctaccttgagccaggagggcctccaggggttccttgtggaggctcacccagacaatgcctgcagccccattgccccaccacccccagccccggtcaatgggtcagtctttattgcgctgcttcgaagattcgactgcaactttgacctcaaggtcctaaatgcccagaaggctggatatggtgccgctgtagtacacaatgtgaatcccaagcttctcccttacccacacctatccttttgaggggctttggggtggggctggggcaagcagagggactgggtcttcacttcttgggctaataaaattgtttctttgtggactaa

SEQ ID NO: 364357 - DNA, 660 bp, Homo sapiens
ggacgcgtgggtcgacccacgcgtccgcggacgcgtgggctgaaacagattcctacacatgactatcagaagagaccagtatgatgtctgtgccatttgcctggatgaatatgaggatggggacaagctgcgggtactcccctgtgctcatgcctaccacagccgctgcgtggacccctggctcactcagacccggaagacctgccccatttgcaagcagcctgttcatcggggtcctggggacgaagaccaagaggaagaaactcaagggcaagaggagggtgatgaaggggagccaagggaccaccctgcctcagaaaggaccccacttttgggttctagccccactcttcccacctcctttggttccttagccccagctccccttgtttttcctgggccttcaacagatcccccactgtcccctccctcttcccctgttatcctggtctaataaccccccacacatacacctctggtgacctatttgcacagaccgtcgtcttccctccagtcttctgagggataggggacattccatcccaagcttctcccttacccacacctatccttttgaggggctttggggtggggctggggcaagcagagggactgggtcttcacttcttgggctaataaaattgtttctttgtggactaa

SEQ ID NO: 364358 - DNA, 414 bp, Homo sapiens
cagccaaaatgtttaaaaacactcagtttctggtcccaaagaatggtttctcagggcagtgagaccacccagccaaattgcttctcaaccctagacaaagcctttggccaagagggaggtgctgttagttgggcagcccttctgggtttcagagaccggtgttggctctagactggtctcatctccattgccttaatgccaggtggcccaggagtacccatagcacatgacaccgacagctgcccagcctgttcacatgctggggaccagcacagcacctgaagccatgtgggacagttgggctttgttcattctagccacggggatgaaagggatcttttgcattgcagagattttatatatattttgtttgtaatgagccattctcaataaacattattctcactgcaaaat

SEQ ID NO: 364359 - DNA, 3685 bp, Homo sapiens
accagtacgatagttccggcaccggaaaagagggctgatgactgggcccgggggccgccgcaacgacccttggggccggcaaagagccagagagggtgctcacacttccaagcaccccacaccaaggacaggctggacggcaaggcggagacgcggggcttgggccctcagaccggggacagcaggaggttgggccaagggccaggacttcccgtcacaatttcatttgttgatcccggcaccgccagccgccgcctcccgttctcccctccgcagcggcggcggtggcggagaaggaactcgacacgcaccgaccgccctcccgccccagccgaagcggaagctgtagcccgctctgggccggggccatgggcgccccgcgccgcccgggtcatgaggacggaggcggaggcagcggggccgccgctcgagcccggggactttgtgcaactgcctgtgcccgtcatccagcagctctaccactgggactgtggcctggcctgctccaggatggtgctgcggtacctgggccagctggacgacagtgagtttgagagagccctgcagaagctgcagctgaccaggagcatctggaccatcgacctggcctacctgatgcaccactttggcgtgaggcaccgcttctgtacccagaccctgggtgtcgacaagggctacaagaaccagtccttctacaggaagcactttgacacagaagagacccgggtgaatcagctgtttgcacaagcaaaggcctgcaaggtgctggtggagaaatgcacagtgagtgtgaaggacatccaggcgcacctggctcagggccatgtggccatcgtgctggtgaactcgggggtgctgcactgtgacctgtgctccagccctgtcaagtactgctgcttcacccccagtggccaccactgcttctgccgcactcctgactaccagggccacttcatcgtgctgcgtggctacaaccgggccactggctgcatcttctacaacaacccagcctatgccgacccaggaatgtgcagcaccagcatcagtaactttgaggaggccagaaccagctatggcacagatgaggacatcctctttgtctacttggacagctgacagcaggagcctggtgcgcctaggccctcggaccccatccccaccccagccgggcccgctcaggacgccctggcccaggcttggggctgctggggttggaatgtggaactgcagcctcagcccatctggcagagtcccaggaactcggagactggcacagctgctttgtctgccagtgccgtgtgttgtcatgtcactcaccccaagcacctgctggctgctggaagcataccccaagaccccaagccttgactccagctgcgcccacaggaagtccagtcccgacagtgcccttgttgcctttgagccagatccatggcaatggtctccccacagaccgcaggactgagcctggagagagaagttgcttgacggatgccacttgtcaggacagtatgtgagtgtctggagacagcatagctgaccccaatcccccagggctgaggacccctccaggcccctctctcctggaagtgctgcatatgcccctgtgcccagtggttgatgataccaccaccacctgcctacccatgggcccaagtttctgtggctcattacagggcatctgacccctgccacccagcatagacacacctcacagctgccctgccatgcagagccctggccgctggagactcttaaaccccccacagccctccaggtcctccagctctgtcagatggagggctctcgggcctagatcccactggtaggcctcgtggctggcagcagtgctctgggaataaacagctgccctagccccagagggatccctgcacccaggaggcctcctgacaccagccaaaatcctgacagcagggtctgccctcttgagtgtggggagcccctagtcctttaaggttggctgctaaggcctgtgctccaaagcaacgggctggggcagcctgcagctgcccacccaacctggtcttcacaccagattgcacaggatactgggtcttgtctatcttgatggagaagaggggttcctgcccaggatcttacaacacagcaagtagcatagagctctttccttcctcttttttggggaggttggggtcaggggttgtttctttgagatttaagttttcatttttgaggggtaatcaccttcaagtaaaacagtaatagcaagagtgaaggtactttggaaccactaacacctctgcacagggcagttagccagctcaagttctttttcagagaaagggacttggccagtggtttaagtacctgccccttcacctctcagacgaggcagctgacgaggcagctggcccagtcttgggagtctgctcaggacagtggtggagctgggtcttgaaccccagtctgcacctaaaaaactaaaggaaatggatttttttttttttttttgagacggagactcactctgttgcccagactggagtgcagtggcacgatcttggcttactacaacctccgcctcctgggttcaagcgatcctcctgcctcagccccccaccagctgggactacaggcacatgccaccatgcccggctaatttttttgtatttttagtagagaccaggcttcgccatgttggccaggctggtctcgaacccctgagctcaggtgatccacctgcctcggcctcccaaagtgggaaatgggtcattttcaaaggggcaacagtgataccatccctgcactcctgggtcctgctcttccaatgcccaaggcatggcatggtggcagctgtgcccccgcccattgctttggagcacagatgactctgggggcagaggtgggctctgtttaggagggcagtgagaccacccagccaaattgcttctcaaccctagacaaagcctttggccaagagggaggtgctgttagttgggcagcccttctgggtttcagagaccggtgttggctctagactggtctcatctccattgccttaatgccaggtggcccaggagtacccatgcacagcagctgtggggtgtgggcatcttcaggtggtgttctggtaaaatcgttagaatagctgtatgaaggaaaccagtgggaggaaatgaagttttcaggatggtgggatgtgatttagacagtgcacatgctgttagggctgtcactagggagtggccttcatggagggtggtaacagcacctcagtccagccaaaatgtttagaaacactcagtctctggtcccagaggatggcttctcagggcatgccacaagttaaaggtcaccttcctgaaagatgaatgagaaagctgcccattctcaagactcatctgcctagggagggtcacagaggcaggatgtaagacacactgtgttgcattcttgcacaagtcatgaaaatggagccagagagcctggacatcagggacttttgcccacagcacatgacaccgacagctgcccagcctgttcacatgctggggaccagcacagcacctgaagccatgtgggacagttgggctttgttcattctagccacggggatgaaagggatcttttgcattgcagagattttatatatattttgtttgtaatgagccattctcaataaacattattctcactgcaaaat

SEQ ID NO: 364360 - DNA, 3618 bp, Homo sapiens
tgcgcgaggattgggcgagagggtggggccactcaacgctgaggcggcgaatggccggagcagacttaaatcaagaggctggggacctctaagatcaaagtttggggcggggcctaaggagggggcggggcctccagattcgagacctggaagggctggggcggcgcttggggcggcccagccgccgcctcccgttctcccctccgcagcggcggcggtggcggagaaggaactcgacacgcaccgaccgccctcccgccccagccgaagcggaagctgtagcccgctctgggccggggccatgggcgccccgcgccgcccgggtcatgaggacggaggcggaggcagcggggccgccgctcgagcccggggactttgtgcaactgcctgtgcccgtcatccagcagctctaccactgggactgtggcctggcctgctccaggatggtgctgcggtacctgggccagctggacgacagtgagtttgagagagccctgcagaagctgcagctgaccaggagcatctggaccatcgacctggcctacctgatgcaccactttggcgtgaggcaccgcttctgtacccagaccctgggtgtcgacaagggctacaagaaccagtccttctacaggaagcactttgacacagaagagacccgggtgaatcagctgtttgcacaagcaaaggcctgcaaggtgctggtggagaaatgcacagtgagtgtgaaggacatccaggcgcacctggctcagggccatgtggccatcgtgctggtgaactcgggggtgctgcactgtgacctgtgctccagccctgtcaagtactgctgcttcacccccagtggccaccactgcttctgccgcactcctgactaccagggccacttcatcgtgctgcgtggctacaaccgggccactggctgcatcttctacaacaacccagcctatgccgacccaggaatgtgcagcaccagcatcagtaactttgaggaggccagaaccagctatggcacagatgaggacatcctctttgtctacttggacagctgacagcaggagcctggtgcgcctaggccctcggaccccatccccaccccagccgggcccgctcaggacgccctggcccaggcttggggctgctggggttggaatgtggaactgcagcctcagcccatctggcagagtcccaggaactcggagactggcacagctgctttgtctgccagtgccgtgtgttgtcatgtcactcaccccaagcacctgctggctgctggaagcataccccaagaccccaagccttgactccagctgcgcccacaggaagtccagtcccgacagtgcccttgttgcctttgagccagatccatggcaatggtctccccacagaccgcaggactgagcctggagagagaagttgcttgacggatgccacttgtcaggacagtatgtgagtgtctggagacagcatagctgaccccaatcccccagggctgaggacccctccaggcccctctctcctggaagtgctgcatatgcccctgtgcccagtggttgatgataccaccaccacctgcctacccatgggcccaagtttctgtggctcattacagggcatctgacccctgccacccagcatagacacacctcacagctgccctgccatgcagagccctggccgctggagactcttaaaccccccacagccctccaggtcctccagctctgtcagatggagggctctcgggcctagatcccactggtaggcctcgtggctggcagcagtgctctgggaataaacagctgccctagccccagagggatccctgcacccaggaggcctcctgacaccagccaaaatcctgacagcagggtctgccctcttgagtgtggggagcccctagtcctttaaggttggctgctaaggcctgtgctccaaagcaacgggctggggcagcctgcagctgcccacccaacctggtcttcacaccagattgcacaggatactgggtcttgtctatcttgatggagaagaggggttcctgcccaggatcttacaacacagcaagtagcatagagctctttccttcctcttttttggggaggttggggtcaggggttgtttctttgagatttaagttttcatttttgaggggtaatcaccttcaagtaaaacagtaatagcaagagtgaaggtactttggaaccactaacacctctgcacagggcagttagccagctcaagttctttttcagagaaagggacttggccagtggtttaagtacctgccccttcacctctcagacgaggcagctgacgaggcagctggcccagtcttgggagtctgctcaggacagtggtggagctgggtcttgaaccccagtctgcacctaaaaaactaaaggaaatggatttttttttttttttttgagacggagactcactctgttgcccagactggagtgcagtggcacgatcttggcttactacaacctccgcctcctgggttcaagcgatcctcctgcctcagccccccaccagctgggactacaggcacatgccaccatgcccggctaatttttttgtatttttagtagagaccaggcttcgccatgttggccaggctggtctcgaacccctgagctcaggtgatccacctgcctcggcctcccaaagtgggaaatgggtcattttcaaaggggcaacagtgataccatccctgcactcctgggtcctgctcttccaatgcccaaggcatggcatggtggcagctgtgcccccgcccattgctttggagcacagatgactctgggggcagaggtgggctctgtttaggagggcagtgagaccacccagccaaattgcttctcaaccctagacaaagcctttggccaagagggaggtgctgttagttgggcagcccttctgggtttcagagaccggtgttggctctagactggtctcatctccattgccttaatgccaggtggcccaggagtacccatgcacagcagctgtggggtgtgggcatcttcaggtggtgttctggtaaaatcgttagaatagctgtatgaaggaaaccagtgggaggaaatgaagttttcaggatggtgggatgtgatttagacagtgcacatgctgttagggctgtcactagggagtggccttcatggagggtggtaacagcacctcagtccagccaaaatgtttagaaacactcagtctctggtcccagaggatggcttctcagggcatgccacaagttaaaggtcaccttcctgaaagatgaatgagaaagctgcccattctcaagactcatctgcctagggagggtcacagaggcaggatgtaagacacactgtgttgcattcttgcacaagtcatgaaaatggagccagagagcctggacatcagggacttttgcccacagcacatgacaccgacagctgcccagcctgttcacatgctggggaccagcacagcacctgaagccatgtgggacagttgggctttgttcattctagccacggggatgaaagggatcttttgcattgcagagattttatatatattttgtttgtaatgagccattctcaataaacattattctcactgcaaaat

SEQ ID NO: 364361 - DNA, 3454 bp, Homo sapiens
  misc_feature (17)..(17): n is a, c, g, or t
gagatatttccttggtnctgtgtgcctgggattgttgaatttcgtcacggatggggtagctcgatcacgcaccgatacgtctcgtccctgtgcccatgcctgaattcggaagctgtagcccgctctgggccggggccatgggcgccccgcgccgcccgggtcatgaggacggaggcggaggcagcggggccgccgctcgagcccggggactttgtgcaactgcctgtgcccgtcatccagcagctctaccactgggactgtggcctggcctgctccaggatggtgctgcggtacctgggccagctggacgacagtgagtttgagagagccctgcagaagctgcagctgaccaggagcatctggaccatcgacctggcctacctgatgcaccactttggcgtgaggcaccgcttctgtacccagaccctgggtgtcgacaagggctacaagaaccagtccttctacaggaagcactttgacacagaagagacccgggtgaatcagctgtttgcacaagcaaaggcctgcaaggtgctggtggagaaatgcacagtgagtgtgaaggacatccaggcgcacctggctcagggccatgtggccatcgtgctggtgaactcgggggtgctgcactgtgacctgtgctccagccctgtcaagtactgctgcttcacccccagtggccaccactgcttctgccgcactcctgactaccagggccacttcatcgtgctgcgtggctacaaccgggccactggctgcatcttctacaacaacccagcctatgccgacccaggaatgtgcagcaccagcatcagtaactttgaggaggccagaaccagctatggcacagatgaggacatcctctttgtctacttggacagctgacagcaggagcctggtgcgcctaggccctcggaccccatccccaccccagccgggcccgctcaggacgccctggcccaggcttggggctgctggggttggaatgtggaactgcagcctcagcccatctggcagagtcccaggaactcggagactggcacagctgctttgtctgccagtgccgtgtgttgtcatgtcactcaccccaagcacctgctggctgctggaagcataccccaagaccccaagccttgactccagctgcgcccacaggaagtccagtcccgacagtgcccttgttgcctttgagccagatccatggcaatggtctccccacagaccgcaggactgagcctggagagagaagttgcttgacggatgccacttgtcaggacagtatgtgagtgtctggagacagcatagctgaccccaatcccccagggctgaggacccctccaggcccctctctcctggaagtgctgcatatgcccctgtgcccagtggttgatgataccaccaccacctgcctacccatgggcccaagtttctgtggctcattacagggcatctgacccctgccacccagcatagacacacctcacagctgccctgccatgcagagccctggccgctggagactcttaaaccccccacagccctccaggtcctccagctctgtcagatggagggctctcgggcctagatcccactggtaggcctcgtggctggcagcagtgctctgggaataaacagctgccctagccccagagggatccctgcacccaggaggcctcctgacaccagccaaaatcctgacagcagggtctgccctcttgagtgtggggagcccctagtcctttaaggttggctgctaaggcctgtgctccaaagcaacgggctggggcagcctgcagctgcccacccaacctggtcttcacaccagattgcacaggatactgggtcttgtctatcttgatggagaagaggggttcctgcccaggatcttacaacacagcaagtagcatagagctctttccttcctcttttttggggaggttggggtcaggggttgtttctttgagatttaagttttcatttttgaggggtaatcaccttcaagtaaaacagtaatagcaagagtgaaggtactttggaaccactaacacctctgcacagggcagttagccagctcaagttctttttcagagaaagggacttggccagtggtttaagtacctgccccttcacctctcagacgaggcagctgacgaggcagctggcccagtcttgggagtctgctcaggacagtggtggagctgggtcttgaaccccagtctgcacctaaaaaactaaaggaaatggatttttttttttttttttgagacggagactcactctgttgcccagactggagtgcagtggcacgatcttggcttactacaacctccgcctcctgggttcaagcgatcctcctgcctcagccccccaccagctgggactacaggcacatgccaccatgcccggctaatttttttgtatttttagtagagaccaggcttcgccatgttggccaggctggtctcgaacccctgagctcaggtgatccacctgcctcggcctcccaaagtgggaaatgggtcattttcaaaggggcaacagtgataccatccctgcactcctgggtcctgctcttccaatgcccaaggcatggcatggtggcagctgtgcccccgcccattgctttggagcacagatgactctgggggcagaggtgggctctgtttaggagggcagtgagaccacccagccaaattgcttctcaaccctagacaaagcctttggccaagagggaggtgctgttagttgggcagcccttctgggtttcagagaccggtgttggctctagactggtctcatctccattgccttaatgccaggtggcccaggagtacccatgcacagcagctgtggggtgtgggcatcttcaggtggtgttctggtaaaatcgttagaatagctgtatgaaggaaaccagtgggaggaaatgaagttttcaggatggtgggatgtgatttagacagtgcacatgctgttagggctgtcactagggagtggccttcatggagggtggtaacagcacctcagtccagccaaaatgtttagaaacactcagtctctggtcccagaggatggcttctcagggcatgccacaagttaaaggtcaccttcctgaaagatgaatgagaaagctgcccattctcaagactcatctgcctagggagggtcacagaggcaggatgtaagacacactgtgttgcattcttgcacaagtcatgaaaatggagccagagagcctggacatcagggacttttgcccacagcacatgacaccgacagctgcccagcctgttcacatgctggggaccagcacagcacctgaagccatgtgggacagttgggctttgttcattctagccacggggatgaaagggatcttttgcattgcagagattttatatatattttgtttgtaatgagccattctcaataaacattattctcactgcaaaat

SEQ ID NO: 364362 - DNA, 3497 bp, Homo sapiens
accagtacgatagttccggcaccggaaaagagggctgatgactgggcccgggggccgccgcaacgacccttggggccggcaaagagccagagagggtgctcacacttccaagcaccccacaccaaggacaggctggacggcaaggcggagacgcggggcttgggccctcagaccggggacagcaggaggttgggccaagggccaggacttcccgtcacaatttcatttgttgatcccggcaccgccaggggactttgtgcaactgcctgtgcccgtcatccagcagctctaccactgggactgtggcctggcctgctccaggatggtgctgcggtacctgggccagctggacgacagtgagtttgagagagccctgcagaagctgcagctgaccaggagcatctggaccatcgacctggcctacctgatgcaccactttggcgtgaggcaccgcttctgtacccagaccctgggtgtcgacaagggctacaagaaccagtccttctacaggaagcactttgacacagaagagacccgggtgaatcagctgtttgcacaagcaaaggcctgcaaggtgctggtggagaaatgcacagtgagtgtgaaggacatccaggcgcacctggctcagggccatgtggccatcgtgctggtgaactcgggggtgctgcactgtgacctgtgctccagccctgtcaagtactgctgcttcacccccagtggccaccactgcttctgccgcactcctgactaccagggccacttcatcgtgctgcgtggctacaaccgggccactggctgcatcttctacaacaacccagcctatgccgacccaggaatgtgcagcaccagcatcagtaactttgaggaggccagaaccagctatggcacagatgaggacatcctctttgtctacttggacagctgacagcaggagcctggtgcgcctaggccctcggaccccatccccaccccagccgggcccgctcaggacgccctggcccaggcttggggctgctggggttggaatgtggaactgcagcctcagcccatctggcagagtcccaggaactcggagactggcacagctgctttgtctgccagtgccgtgtgttgtcatgtcactcaccccaagcacctgctggctgctggaagcataccccaagaccccaagccttgactccagctgcgcccacaggaagtccagtcccgacagtgcccttgttgcctttgagccagatccatggcaatggtctccccacagaccgcaggactgagcctggagagagaagttgcttgacggatgccacttgtcaggacagtatgtgagtgtctggagacagcatagctgaccccaatcccccagggctgaggacccctccaggcccctctctcctggaagtgctgcatatgcccctgtgcccagtggttgatgataccaccaccacctgcctacccatgggcccaagtttctgtggctcattacagggcatctgacccctgccacccagcatagacacacctcacagctgccctgccatgcagagccctggccgctggagactcttaaaccccccacagccctccaggtcctccagctctgtcagatggagggctctcgggcctagatcccactggtaggcctcgtggctggcagcagtgctctgggaataaacagctgccctagccccagagggatccctgcacccaggaggcctcctgacaccagccaaaatcctgacagcagggtctgccctcttgagtgtggggagcccctagtcctttaaggttggctgctaaggcctgtgctccaaagcaacgggctggggcagcctgcagctgcccacccaacctggtcttcacaccagattgcacaggatactgggtcttgtctatcttgatggagaagaggggttcctgcccaggatcttacaacacagcaagtagcatagagctctttccttcctcttttttggggaggttggggtcaggggttgtttctttgagatttaagttttcatttttgaggggtaatcaccttcaagtaaaacagtaatagcaagagtgaaggtactttggaaccactaacacctctgcacagggcagttagccagctcaagttctttttcagagaaagggacttggccagtggtttaagtacctgccccttcacctctcagacgaggcagctgacgaggcagctggcccagtcttgggagtctgctcaggacagtggtggagctgggtcttgaaccccagtctgcacctaaaaaactaaaggaaatggatttttttttttttttttgagacggagactcactctgttgcccagactggagtgcagtggcacgatcttggcttactacaacctccgcctcctgggttcaagcgatcctcctgcctcagccccccaccagctgggactacaggcacatgccaccatgcccggctaatttttttgtatttttagtagagaccaggcttcgccatgttggccaggctggtctcgaacccctgagctcaggtgatccacctgcctcggcctcccaaagtgggaaatgggtcattttcaaaggggcaacagtgataccatccctgcactcctgggtcctgctcttccaatgcccaaggcatggcatggtggcagctgtgcccccgcccattgctttggagcacagatgactctgggggcagaggtgggctctgtttaggagggcagtgagaccacccagccaaattgcttctcaaccctagacaaagcctttggccaagagggaggtgctgttagttgggcagcccttctgggtttcagagaccggtgttggctctagactggtctcatctccattgccttaatgccaggtggcccaggagtacccatgcacagcagctgtggggtgtgggcatcttcaggtggtgttctggtaaaatcgttagaatagctgtatgaaggaaaccagtgggaggaaatgaagttttcaggatggtgggatgtgatttagacagtgcacatgctgttagggctgtcactagggagtggccttcatggagggtggtaacagcacctcagtccagccaaaatgtttagaaacactcagtctctggtcccagaggatggcttctcagggcatgccacaagttaaaggtcaccttcctgaaagatgaatgagaaagctgcccattctcaagactcatctgcctagggagggtcacagaggcaggatgtaagacacactgtgttgcattcttgcacaagtcatgaaaatggagccagagagcctggacatcagggacttttgcccacagcacatgacaccgacagctgcccagcctgttcacatgctggggaccagcacagcacctgaagccatgtgggacagttgggctttgttcattctagccacggggatgaaagggatcttttgcattgcagagattttatatatattttgtttgtaatgagccattctcaataaacattattctcactgcaaaat

SEQ ID NO: 364363 - DNA, 3255 bp, Homo sapiens
accagtacgatagttccggcaccggaaaagagggctgatgactgggcccgggggccgccgcaacgacccttggggccggcaaagagccagagagggtgctcacacttccaagcaccccacaccaaggacaggctggacggcaaggcggagacgcggggcttgggccctcagaccggggacagcaggaggttgggccaagggccaggacttcccgtcacaatttcatttgttgatcccggcaccgccaggggactttgtgcaactgcctgtgcccgtcatccagcagctctaccactgggactgtggcctggcctgctccaggatggtgctgcggtacctgggccagctggacgacagtgagtttgagagagccctgcagaagctgcagctgaccaggagcatctggaccatcgacctggcctacctgatgcaccactttggcgtgaggcaccgcttctgtacccagaccctgggtgtcgacaagggctacaagaaccagtccttctacaggaagcactttgacacagaagagacccgggtgaatcagctgtttgcacaagcaaaggcctgcaaggtgctggtggagaaatgcaggaatgtgcagcaccagcatcagtaactttgaggaggccagaaccagctatggcacagatgaggacatcctctttgtctacttggacagctgacagcaggagcctggtgcgcctaggccctcggaccccatccccaccccagccgggcccgctcaggacgccctggcccaggcttggggctgctggggttggaatgtggaactgcagcctcagcccatctggcagagtcccaggaactcggagactggcacagctgctttgtctgccagtgccgtgtgttgtcatgtcactcaccccaagcacctgctggctgctggaagcataccccaagaccccaagccttgactccagctgcgcccacaggaagtccagtcccgacagtgcccttgttgcctttgagccagatccatggcaatggtctccccacagaccgcaggactgagcctggagagagaagttgcttgacggatgccacttgtcaggacagtatgtgagtgtctggagacagcatagctgaccccaatcccccagggctgaggacccctccaggcccctctctcctggaagtgctgcatatgcccctgtgcccagtggttgatgataccaccaccacctgcctacccatgggcccaagtttctgtggctcattacagggcatctgacccctgccacccagcatagacacacctcacagctgccctgccatgcagagccctggccgctggagactcttaaaccccccacagccctccaggtcctccagctctgtcagatggagggctctcgggcctagatcccactggtaggcctcgtggctggcagcagtgctctgggaataaacagctgccctagccccagagggatccctgcacccaggaggcctcctgacaccagccaaaatcctgacagcagggtctgccctcttgagtgtggggagcccctagtcctttaaggttggctgctaaggcctgtgctccaaagcaacgggctggggcagcctgcagctgcccacccaacctggtcttcacaccagattgcacaggatactgggtcttgtctatcttgatggagaagaggggttcctgcccaggatcttacaacacagcaagtagcatagagctctttccttcctcttttttggggaggttggggtcaggggttgtttctttgagatttaagttttcatttttgaggggtaatcaccttcaagtaaaacagtaatagcaagagtgaaggtactttggaaccactaacacctctgcacagggcagttagccagctcaagttctttttcagagaaagggacttggccagtggtttaagtacctgccccttcacctctcagacgaggcagctgacgaggcagctggcccagtcttgggagtctgctcaggacagtggtggagctgggtcttgaaccccagtctgcacctaaaaaactaaaggaaatggatttttttttttttttttgagacggagactcactctgttgcccagactggagtgcagtggcacgatcttggcttactacaacctccgcctcctgggttcaagcgatcctcctgcctcagccccccaccagctgggactacaggcacatgccaccatgcccggctaatttttttgtatttttagtagagaccaggcttcgccatgttggccaggctggtctcgaacccctgagctcaggtgatccacctgcctcggcctcccaaagtgggaaatgggtcattttcaaaggggcaacagtgataccatccctgcactcctgggtcctgctcttccaatgcccaaggcatggcatggtggcagctgtgcccccgcccattgctttggagcacagatgactctgggggcagaggtgggctctgtttaggagggcagtgagaccacccagccaaattgcttctcaaccctagacaaagcctttggccaagagggaggtgctgttagttgggcagcccttctgggtttcagagaccggtgttggctctagactggtctcatctccattgccttaatgccaggtggcccaggagtacccatgcacagcagctgtggggtgtgggcatcttcaggtggtgttctggtaaaatcgttagaatagctgtatgaaggaaaccagtgggaggaaatgaagttttcaggatggtgggatgtgatttagacagtgcacatgctgttagggctgtcactagggagtggccttcatggagggtggtaacagcacctcagtccagccaaaatgtttagaaacactcagtctctggtcccagaggatggcttctcagggcatgccacaagttaaaggtcaccttcctgaaagatgaatgagaaagctgcccattctcaagactcatctgcctagggagggtcacagaggcaggatgtaagacacactgtgttgcattcttgcacaagtcatgaaaatggagccagagagcctggacatcagggacttttgcccacagcacatgacaccgacagctgcccagcctgttcacatgctggggaccagcacagcacctgaagccatgtgggacagttgggctttgttcattctagccacggggatgaaagggatcttttgcattgcagagattttatatatattttgtttgtaatgagccattctcaataaacattattctcactgcaaaat

SEQ ID NO: 364364 - DNA, 3443 bp, Homo sapiens
accagtacgatagttccggcaccggaaaagagggctgatgactgggcccgggggccgccgcaacgacccttggggccggcaaagagccagagagggtgctcacacttccaagcaccccacaccaaggacaggctggacggcaaggcggagacgcggggcttgggccctcagaccggggacagcaggaggttgggccaagggccaggacttcccgtcacaatttcatttgttgatcccggcaccgccagccgccgcctcccgttctcccctccgcagcggcggcggtggcggagaaggaactcgacacgcaccgaccgccctcccgccccagccgaagcggaagctgtagcccgctctgggccggggccatgggcgccccgcgccgcccgggtcatgaggacggaggcggaggcagcggggccgccgctcgagcccggggactttgtgcaactgcctgtgcccgtcatccagcagctctaccactgggactgtggcctggcctgctccaggatggtgctgcggtacctgggccagctggacgacagtgagtttgagagagccctgcagaagctgcagctgaccaggagcatctggaccatcgacctggcctacctgatgcaccactttggcgtgaggcaccgcttctgtacccagaccctgggtgtcgacaagggctacaagaaccagtccttctacaggaagcactttgacacagaagagacccgggtgaatcagctgtttgcacaagcaaaggcctgcaaggtgctggtggagaaatgcaggaatgtgcagcaccagcatcagtaactttgaggaggccagaaccagctatggcacagatgaggacatcctctttgtctacttggacagctgacagcaggagcctggtgcgcctaggccctcggaccccatccccaccccagccgggcccgctcaggacgccctggcccaggcttggggctgctggggttggaatgtggaactgcagcctcagcccatctggcagagtcccaggaactcggagactggcacagctgctttgtctgccagtgccgtgtgttgtcatgtcactcaccccaagcacctgctggctgctggaagcataccccaagaccccaagccttgactccagctgcgcccacaggaagtccagtcccgacagtgcccttgttgcctttgagccagatccatggcaatggtctccccacagaccgcaggactgagcctggagagagaagttgcttgacggatgccacttgtcaggacagtatgtgagtgtctggagacagcatagctgaccccaatcccccagggctgaggacccctccaggcccctctctcctggaagtgctgcatatgcccctgtgcccagtggttgatgataccaccaccacctgcctacccatgggcccaagtttctgtggctcattacagggcatctgacccctgccacccagcatagacacacctcacagctgccctgccatgcagagccctggccgctggagactcttaaaccccccacagccctccaggtcctccagctctgtcagatggagggctctcgggcctagatcccactggtaggcctcgtggctggcagcagtgctctgggaataaacagctgccctagccccagagggatccctgcacccaggaggcctcctgacaccagccaaaatcctgacagcagggtctgccctcttgagtgtggggagcccctagtcctttaaggttggctgctaaggcctgtgctccaaagcaacgggctggggcagcctgcagctgcccacccaacctggtcttcacaccagattgcacaggatactgggtcttgtctatcttgatggagaagaggggttcctgcccaggatcttacaacacagcaagtagcatagagctctttccttcctcttttttggggaggttggggtcaggggttgtttctttgagatttaagttttcatttttgaggggtaatcaccttcaagtaaaacagtaatagcaagagtgaaggtactttggaaccactaacacctctgcacagggcagttagccagctcaagttctttttcagagaaagggacttggccagtggtttaagtacctgccccttcacctctcagacgaggcagctgacgaggcagctggcccagtcttgggagtctgctcaggacagtggtggagctgggtcttgaaccccagtctgcacctaaaaaactaaaggaaatggatttttttttttttttttgagacggagactcactctgttgcccagactggagtgcagtggcacgatcttggcttactacaacctccgcctcctgggttcaagcgatcctcctgcctcagccccccaccagctgggactacaggcacatgccaccatgcccggctaatttttttgtatttttagtagagaccaggcttcgccatgttggccaggctggtctcgaacccctgagctcaggtgatccacctgcctcggcctcccaaagtgggaaatgggtcattttcaaaggggcaacagtgataccatccctgcactcctgggtcctgctcttccaatgcccaaggcatggcatggtggcagctgtgcccccgcccattgctttggagcacagatgactctgggggcagaggtgggctctgtttaggagggcagtgagaccacccagccaaattgcttctcaaccctagacaaagcctttggccaagagggaggtgctgttagttgggcagcccttctgggtttcagagaccggtgttggctctagactggtctcatctccattgccttaatgccaggtggcccaggagtacccatgcacagcagctgtggggtgtgggcatcttcaggtggtgttctggtaaaatcgttagaatagctgtatgaaggaaaccagtgggaggaaatgaagttttcaggatggtgggatgtgatttagacagtgcacatgctgttagggctgtcactagggagtggccttcatggagggtggtaacagcacctcagtccagccaaaatgtttagaaacactcagtctctggtcccagaggatggcttctcagggcatgccacaagttaaaggtcaccttcctgaaagatgaatgagaaagctgcccattctcaagactcatctgcctagggagggtcacagaggcaggatgtaagacacactgtgttgcattcttgcacaagtcatgaaaatggagccagagagcctggacatcagggacttttgcccacagcacatgacaccgacagctgcccagcctgttcacatgctggggaccagcacagcacctgaagccatgtgggacagttgggctttgttcattctagccacggggatgaaagggatcttttgcattgcagagattttatatatattttgtttgtaatgagccattctcaataaacattattctcactgcaaaat

SEQ ID NO: 364365 - DNA, 3459 bp, Homo sapiens
accagtacgatagttccggcaccggaaaagagggctgatgactgggcccgggggccgccgcaacgacccttggggccggcaaagagccagagagggtgctcacacttccaagcaccccacaccaaggacaggctggacggcaaggcggagacgcggggcttgggccctcagaccggggacagcaggaggttgggccaagggccaggacttcccgtcacaatttcatttgttgatcccggcaccgccagccgccgcctcccgttctcccctccgcagcggcggcggtggcggagaaggaactcgacacgcaccgaccgccctcccgccccagccgaagcggaagctgtagcccgctctgggccggggccatgggcgccccgcgccgcccgggtcatgaggacggaggcggaggcagcggggccgccgctcgagcccggggactttgtgcaactgcctgtgcccgtcatccagcagctctaccactgggactgtggcctggcctgctccaggatggtgctgcggtacctgggccagctggacgacagtgagtttgagagagccctgcagaagctgcagctgaccaggagcatctggaccatcgacctggcctacctgatgcaccactttggcgtgaggcaccgcttctgtacccagaccctgggtgtcgacaagggctacaagaaccagtccttctacaggaagcactttgacacagaagagacccgggtgaatcagctgtttgcacaagcaaaggcctgcaaggtgctggtggagaaatgcacagtgagtgtgaaggacatccaggcgcacctggctcagggccatgtggccatcgtgctggtgaactcgggggtgctgcactgtgacctgtgctccagccctgtcaagtactgctgcttcacccccagtggccaccactgcttctgccgcactcctgactaccagggccacttcatcgtgctgcgtggctacaaccgggccactggctgcatcttctacaacaacccagcctatgccgacccaggaatgtgcagcaccagcatcagtaactttgaggaggccagaaccagctatggcacagatgaggacatcctctttgtctacttggacagctgacagcaggagcctggtgcgcctaggccctcggaccccatccccaccccagccgggcccgctcaggacgccctggcccaggcttggggctgctggggttggaatgtggaactgcagcctcagcccatctggcagagtcccaggaactcggagactggcacagctgctttgtctgccagtgccgtgtgttgtcatgtcactcaccccaagcacctgctggctgctggaagcataccccaagaccccaagccttgactccagctgcgcccacaggaagtccagtcccgacagtgcccttgttgcctttgagccagatccatggcaatggtctccccacagaccgcaggactgagcctggagagagaagttgcttgacggatgccacttgtcaggacagtatgtgagtgtctggagacagcatagctgaccccaatcccccagggctgaggacccctccaggcccctctctcctggaagtgctgcatatgcccctgtgcccagtggttgatgataccaccaccacctgcctacccatgggcccaagtttctgtggctcattacagggcatctgacccctgccacccagcatagacacacctcacagctgccctgccatgcagagccctggccgctggagactcttaaaccccccacagccctccaggtcctccagctctgtcagatggagggctctcgggcctagatcccactggtaggcctcgtggctggcagcagtgctctgggaataaacagctgccctagccccagagggatccctgcacccaggaggcctcctgacaccagccaaaatcctgacagcagggtctgccctcttgagtgtggggagcccctagtcctttaaggttggctgctaaggcctgtgctccaaagcaacgggctggggcagcctgcagctgcccacccaacctggtcttcacaccagattgcacaggatactgggtcttgtctatcttgatggagaagaggggttcctgcccaggatcttacaacacagcaagtagcatagagctctttccttcctcttttttggggaggttggggtcaggggttgtttctttgagatttaagttttcatttttgaggggtaatcaccttcaagtaaaacagtaatagcaagagtgaaggtactttggaaccactaacacctctgcacagggcagttagccagctcaagttctttttcagagaaagggacttggccagtggtttaagtacctgccccttcacctctcagacgaggcagctgacgaggcagctggcccagtcttgggagtctgctcaggacagtggtggagctgggtcttgaaccccagtctgcacctaaaaaactaaaggaaatggatttttttttttttttttgagacggagactcactctgttgcccagactggagtgcagtggcacgatcttggcttactacaacctccgctcctgggtcctgctcttccaatgcccaaggcatggcatggtggcagctgtgcccccgcccattgctttggagcacagatgactctgggggcagaggtgggctctgtttaggagggcagtgagaccacccagccaaattgcttctcaaccctagacaaagcctttggccaagagggaggtgctgttagttgggcagcccttctgggtttcagagaccggtgttggctctagactggtctcatctccattgccttaatgccaggtggcccaggagtacccatgcacagcagctgtggggtgtgggcatcttcaggtggtgttctggtaaaatcgttagaatagctgtatgaaggaaaccagtgggaggaaatgaagttttcaggatggtgggatgtgatttagacagtgcacatgctgttagggctgtcactagggagtggccttcatggagggtggtaacagcacctcagtccagccaaaatgtttagaaacactcagtctctggtcccagaggatggcttctcagggcatgccacaagttaaaggtcaccttcctgaaagatgaatgagaaagctgcccattctcaagactcatctgcctagggagggtcacagaggcaggatgtaagacacactgtgttgcattcttgcacaagtcatgaaaatggagccagagagcctggacatcagggacttttgcccacagcacatgacaccgacagctgcccagcctgttcacatgctggggaccagcacagcacctgaagccatgtgggacagttgggctttgttcattctagccacggggatgaaagggatcttttgcattgcagagattttatatatattttgtttgtaatgagccattctcaataaacattattctcactgcaaaat

SEQ ID NO: 364366 - DNA, 4061 bp, Homo sapiens
  misc_feature (4060)..(4061): n is a, c, g, or t
accagtacgatagttccggcaccggaaaagagggctgatgactgggcccgggggccgccgcaacgacccttggggccggcaaagagccagagagggtgctcacacttccaagcaccccacaccaaggacaggctggacggcaaggcggagacgcggggcttgggccctcagaccggggacagcaggaggttgggccaagggccaggacttcccgtcacaatttcatttgttgatcccggcaccgccagccgccgcctcccgttctcccctccgcagcggcggcggtggcggagaaggaactcgacacgcaccgaccgccctcccgccccagccgaagcggaagctgtagcccgctctgggccggggccatgggcgccccgcgccgcccgggtcatgaggacggaggcggaggcagcggggccgccgctcgagcccggggactttgtgcaactgcctgtgcccgtcatccagcagctctaccactgggactgtggcctggcctgctccaggatggtgctgcggtacctgggccagctggacgacagtgagtttgagagagccctgcagaagctgcagctgaccaggagcatctggaccatcgacctggcctacctgatgcaccactttggcgtgaggcaccgcttctgtacccagaccctgggtgtcgacaagggctacaagaaccagtccttctacaggaagcactttgacacagaagagacccgggtgaatcagctgtttgcacaagcaaaggcctgcaaggtgctggtggagaaatgcacagtgagtgtgaaggacatccaggcgcacctggctcagggccatgtggccatcgtgctggtgaactcgggggtgctgcactgtgacctgtgctccagccctgtcaagtactgctgcttcacccccagtggccaccactgcttctgccgcactcctgactaccagggccacttcatcgtgctgcgtggctacaaccgggccactggctgcatcttctacaacaacccagcctatgccgacccaggaatgtgcagcaccagcatcagtaactttgaggaggccagaaccagctatggcacagatgaggacatcctctttgtctacttggacagctgacagcaggagcctggtgcgcctaggccctcggaccccatccccaccccagccgggcccgctcaggacgccctggcccaggcttggggctgctggggttggaatgtggaactgcagcctcagcccatctggcagagtcccaggaactcggagactggcacagctgctttgtctgccagtgccgtgtgttgtcatgtcactcaccccaagcacctgctggctgctggaagcataccccaagaccccaagccttgactccagctgcgcccacaggaagtccagtcccgacagtgcccttgttgcctttgagccagatccatggcaatggtctccccacagaccgcaggactgagcctggagagagaagttgcttgacggatgccacttgtcaggacagtatgtgagtgtctggagacagcatagctgaccccaatcccccagggctgaggacccctccaggcccctctctcctggaagtgctgcatatgcccctgtgcccagtggttgatgataccaccaccacctgcctacccatgggcccaagtttctgtggctcattacagggcatctgacccctgccacccagcatagacacacctcacagctgccctgccatgcagagccctggccgctggagactcttaaaccccccacagccctccaggtcctccagctctgtcagatggagggctctcgggcctagatcccactggtaggcctcgtggctggcagcagtgctctgggaataaacagctgccctagccccagagggatccctgcacccaggaggcctcctgacaccagccaaaatcctgacagcagggtctgccctcttgagtgtggggagcccctagtcctttaaggttggctgctaaggcctgtgctccaaagcaacgggctggggcagcctgcagctgcccacccaacctggtcttcacaccagattgcacaggatactgggtcttgtctatcttgatggagaagaggggttcctgcccaggatcttacaacacagcaagtagcatagagctctttccttcctcttttttggggaggttggggtcaggggttgtttctttgagatttaagttttcatttttgaggggtaatcaccttcaagtaaaacagtaatagcaagagtgaaggtactttggaaccactaacacctctgcacagggcagttagccagctcaagttctttttcagagaaagggacttggccagtggtttaagtacctgccccttcacctctcagacgaggcagctgacgaggcagctggcccagtcttgggagtctgctcaggacagtggtggagctgggtcttgaaccccagtctgcacctaaaaaactaaaggaaatggatttttttttttttttttgagacggagactcactctgttgcccagactggagtgcagtggcacgatcttggcttactacaacctccgcctcctgggttcaagcgatcctcctgcctcagccccccaccagctgggactacaggcacatgccaccatgcccggctaatttttttgtatttttagtagagaccaggcttcgccatgttggccaggctggtctcgaacccctgagctcaggtgatccacctgcctcggcctcccaaagtgggaaatgggtcattttcaaaggggcaacagtgataccatccctgcactcctgggtcctgctcttccaatgcccaaggcatggcatggtggcagctgtgcccccgcccattgctttggagcacagatgactctgggggcagaggtgggctctgtttaggagggcagtgagaccacccagccaaattgcttctcaaccctagacaaagcctttggccaagagggaggtgctgttagttgggcagcccttctgggtttcagagaccggtgttggctctagactggtctcatctccattgccttaatgccaggtggcccaggagtacccatgcacagcagctgtggggtgtgggcatcttcaggtggtgttctggtaaaatcgttagaatagctgtatgaaggaaaccagtgggaggaaatgaagttttcaggatggtgggatgtgatttagacagtgcacatgctgttagggctgtcactagggagtggccttcatggagggtggtaacagcacctcagtccagccaaaatgtttagaaacactcagtctctggtcccagaggatggcttctcagggcatgccacaagttaaaggtcaccttcctgaaagatgaatgagaaagctgcccattctcaagactcatctgcctagggagggtcacagaggcaggatgtaagacacactgtgttgcattcttgcacaagtcatgaaaatggagccagagagcctggacatcagggacttttgcccacagcacatgacaccgacagctgcccagcctgttcacatgctggggaccagcacagcacctgaagccatgtgggacagttgggctttgttcattctagccacggggatgaaagggatcttttgcattgcagagattttatatatattttgtttgtaatgagccattctcaataaacattattctcactgcaaaatggtggtagcccctggctggcctttatgaagctgtgttgatctgcagaattcctgtcccttctcaagttctcagcatgagcacatgggaacccaggtccttgtcttgccatacccagtttagctgggactggaatcctgttttctgttttctagggccatatccatcccgttcaggcctggatgcttgtgcctgtcctggacaggcagtactagaggtagaagggcctcggggctcagctcaagtgaactgcaacaaatgcaactacaggagacacaacagaatgagggagatgttgaagcaggagagacgaaagtgggtgggatggtgagtgctgggtggagctggctgctcagcatgcagagttggggttgagnn

SEQ ID NO: 364367 - DNA, 3734 bp, Homo sapiens
  misc_feature (3686)..(3686): n is a, c, g, or t
accagtacgatagttccggcaccggaaaagagggctgatgactgggcccgggggccgccgcaacgacccttggggccggcaaagagccagagagggtgctcacacttccaagcaccccacaccaaggacaggctggacggcaaggcggagacgcggggcttgggccctcagaccggggacagcaggaggttgggccaagggccaggacttcccgtcacaatttcatttgttgatcccggcaccgccagccgccgcctcccgttctcccctccgcagcggcggcggtggcggagaaggaactcgacacgcaccgaccgccctcccgccccagccgaagcggaagctgtagcccgctctgggccggggccatgggcgccccgcgccgcccgggtcatgaggacggaggcggaggcagcggggccgccgctcgagcccggggactttgtgcaactgcctgtgcccgtcatccagcagctctaccactgggactgtggcctggcctgctccaggatggtgctgcggtacctgggccagctggacgacagtgagtttgagagagccctgcagaagctgcagctgaccaggagcatctggaccatcgacctggcctacctgatgcaccactttggcgtgaggcaccgcttctgtacccagaccctgggtgtcgacaagggctacaagaaccagtccttctacaggaagcactttgacacagaagagacccgggtgaatcagctgtttgcacaagcaaaggcctgcaaggtgctggtggagaaatgcacagtgagtgtgaaggacatccaggcgcacctggctcagggccatgtggccatcgtgctggtgaactcgggggtgctgcactgtgacctgtgctccagccctgtcaagtactgctgcttcacccccagtggccaccactgcttctgccgcactcctgactaccagggccacttcatcgtgctgcgtggctacaaccgggccactggctgcatcttctacaacaacccagcctatgccgacccaggaatgtgcagcaccagcatcagtaactttgaggaggccagaaccagctatggcacagatgaggacatcctctttgtctacttggacagctgacagcaggagcctggtgcgcctaggccctcggaccccatccccaccccagccgggcccgctcaggacgccctggcccaggcttggggctgctggggttggaatgtggaactgcagcctcagcccatctggcagagtcccaggaactcggagactggcacagctgctttgtctgccagtgccgtgtgttgtcatgtcactcaccccaagcacctgctggctgctggaagcataccccaagaccccaagccttgactccagctgcgcccacaggaagtccagtcccgacagtgcccttgttgcctttgagccagatccatggcaatggtctccccacagaccgcaggactgagcctggagagagaagttgcttgacggatgccacttgtcaggacagtatgtgagtgtctggagacagcatagctgaccccaatcccccagggctgaggacccctccaggcccctctctcctggaagtgctgcatatgcccctgtgcccagtggttgatgataccaccaccacctgcctacccatgggcccaagtttctgtggctcattacagggcatctgacccctgccacccagcatagacacacctcacagctgccctgccatgcagagccctggccgctggagactcttaaaccccccacagccctccaggtcctccagctctgtcagatggagggctctcgggcctagatcccactggtaggcctcgtggctggcagcagtgctctgggaataaacagctgccctagccccagagggatccctgcacccaggaggcctcctgacaccagccaaaatcctgacagcagggtctgccctcttgagtgtggggagcccctagtcctttaaggttggctgctaaggcctgtgctccaaagcaacgggctggggcagcctgcagctgcccacccaacctggtcttcacaccagattgcacaggatactgggtcttgtctatcttgatggagaagaggggttcctgcccaggatcttacaacacagcaagtagcatagagctctttccttcctcttttttggggaggttggggtcaggggttgtttctttgagatttaagttttcatttttgaggggtaatcaccttcaagtaaaacagtaatagcaagagtgaaggtactttggaaccactaacacctctgcacagggcagttagccagctcaagttctttttcagagaaagggacttggccagtggtttaagtacctgccccttcacctctcagacgaggcagctgacgaggcagctggcccagtcttgggagtctgctcaggacagtggtggagctgggtcttgaaccccagtctgcacctaaaaaactaaaggaaatggatttttttttttttttttgagacggagactcactctgttgcccagactggagtgcagtggcacgatcttggcttactacaacctccgcctcctgggttcaagcgatcctcctgcctcagccccccaccagctgggactacaggcacatgccaccatgcccggctaatttttttgtatttttagtagagaccaggcttcgccatgttggccaggctggtctcgaacccctgagctcaggtgatccacctgcctcggcctcccaaagtgggaaatgggtcattttcaaaggggcaacagtgataccatccctgcactcctgggtcctgctcttccaatgcccaaggcatggcatggtggcagctgtgcccccgcccattgctttggagcacagatgactctgggggcagaggtgggctctgtttaggagggcagtgagaccacccagccaaattgcttctcaaccctagacaaagcctttggccaagagggaggtgctgttagttgggcagcccttctgggtttcagagaccggtgttggctctagactggtctcatctccattgccttaatgccaggtggcccaggagtacccatgcacagcagctgtggggtgtgggcatcttcaggtggtgttctggtaaaatcgttagaatagctgtatgaaggaaaccagtgggaggaaatgaagttttcaggatggtgggatgtgatttagacagtgcacatgctgttagggctgtcactagggagtggccttcatggagggtggtaacagcacctcagtccagccaaaatgtttagaaacactcagtctctggtcccagaggatggcttctcagggcatgccacaagttaaaggtcaccttcctgaaagatgaatgagaaagctgcccattctcaagactcatctgcctagggagggtcacagaggcaggatgtaagacacactgtgttgcattcttgcacaagtcatgaaaatggagccagagagcctggacatcagggacttttgcccacagcacatgacaccgacagctgcccagcctgttcacatgctggggaccagcacagcacctgaagccatgtgggacagttgggctttgttcattctagccacggggatgaaagggatcttttgcattgcagagattttatatatattttgtttgtaatgagccattctcaataaacattattctcactgcaaaatnaaaaacacacaaaacaaacgaaagcaaatagaaagaacaaaaaaaagg

SEQ ID NO: 364368 - DNA, 3565 bp, Homo sapiens
accagtacgatagttccggcaccggaaaagagggctgatgactgggcccgggggccgccgcaacgacccttggggccggcaaagagccagagagggtgctcacacttccaagcaccccacaccaaggacaggctggacggcaaggcggagacgcggggcttgggccctcagaccggggacagcaggaggttgggccaagggccaggacttcccgtcacaatttcatttgttgatcccggcaccgccagccgccgcctcccgttctcccctccgcagcggcggcggtggcggagaaggaactcgacacgcaccgaccgccctcccgccccagccgaagcggaagctgtagcccgctctgggccggggccatgggcgccccgcgccgcccgggtcatgaggacggaggcggaggcagcggggccgccgctcgagcccggggactttgtgcaactgcctgtgcccgtcatccagcagctctaccactgggactgtggcctggcctgctccaggatggtgctgcggtacctgggccagctggacgacagtgagtttgagagagccctgcagaagctgcagctgaccaggagcatctggaccatcgacctggcctacctgatgcaccactttggcgtgaggcaccgcttctgtacccagaccctgggtgtcgacaagggctacaagaaccagtccttctacaggaagcactttgacacagaagagacccgggtgaatcagctgtttgcacaagcaaaggcctgcaaggtgctggtggagaaatgcacagtgagtgtgaaggacatccaggcgcacctggctcagggccatgtggccatcgtgctggtgaactcgggggtgctgcactgtgacctgtgctccagccctgtcaagtactgctgcttcacccccagtggccaccactgcttctgccgcactcctgactaccagggccacttcatcgtgctgcgtggctacaaccgggccactggctgcatcttctacaacaacccagcctatgccgacccaggaatgtgcagcaccagcatcagtaactttgaggaggccagaaccagctatggcacagatgaggacatcctctttgtctacttggacagctgacagcaggagcctggtgcgcctaggccctcggaccccatccccaccccagccgggcccgctcaggacgccctggcccaggcttggggctgctggggttggaatgtggaactgcagcctcagcccatctggcagagtcccaggaactcggagactggcacagctgctttgtctgccagtgccgtgtgttgtcatgtcactcaccccaagcacctgctggctgctggaagcataccccaagaccccaagccttgactccagctgcgcccacaggaagtccagtcccgacagtgcccttgttgcctttgagccagatccatggcaatggtctccccacagaccgcaggactgagcctggagagagaagttgcttgacggatgccacttgtcaggacagtatgtgagtgtctggagacagcatagctgaccccaatcccccagggctgaggacccctccaggcccctctctcctggaagtgctgcatatgcccctgtgcccagtggttgatgataccaccaccacctgcctacccatgggcccaagtttctgtggctcattacagggcatctgacccctgccacccagcatagacacacctcacagctgccctgccatgcagagccctggccgctggagactcttaaaccccccacagccctccaggtcctccagctctgtcagatggagggctctcgggcctagatcccactggtaggcctcgtggctggcagcagtgctctgggaataaacagctgccctagccccagagggatccctgcacccaggaggcctcctgacaccagccaaaatcctgacagcagggtctgccctcttgagtgtggggagcccctagtcctttaaggttggctgctaaggcctgtgctccaaagcaacgggctggggcagcctgcagctgcccacccaacctggtcttcacaccagattgcacaggatactgggtcttgtctatcttgatggagaagaggggttcctgcccaggatcttacaacacagcaagtagcatagagctctttccttcctcttttttggggaggttggggtcaggggttgtttctttgagatttaagttttcatttttgaggggtaatcaccttcaagtaaaacagtaatagcaagagtgaaggtactttggaaccactaacacctctgcacagggcagttagccagctcaagttctttttcagagaaagggacttggccagtggtttaagtacctgccccttcacctctcagacgaggcagctgacgaggcagctggcccagtcttgggagtctgctcaggacagtggtggagctgggtcttgaaccccagtctgcacctaaaaaactaaaggaaatggatttttttttttttttttgagacggagactcactctgttgcccagactggagtgcagtggcacgatcttggcttactacaacctccgcctcctgggttcaagcgatcctcctgcctcagccccccaccagctgggactacaggcacatgccaccatgcccggctaatttttttgtatttttagtagagaccaggcttcgccatgttggccaggctggtctcgaacccctgagctcaggtgatccacctgcctcggcctcccaaagtgggaaatgggtcattttcaaaggggcaacagtgataccatccctgcactcctgggtcctgctcttccaatgcccaaggcatggcatggtggcagctgtgcccccgcccattgctttggagcacagatgactctgggggcagaggtgggctctgtttaggagggcagtgagaccacccagccaaattgcttctcaaccctagacaaagcctttggccaagagggaggtgctgttagttgggcagcccttctgggtttcagagaccggtgttggctctagactggtctcatctccattgccttaatgccaggtggcccaggagtacccatgcacagcagctgtggggtgtgggcatcttcaggtggtgttctggtaaaatcgttagaatagctgtatgaaggaaaccagtgggaggaaatgaagttttcaggatggtgggatgtgatttagacagtgcacatgctgttagggctgtcaccttcctgaaagatgaatgagaaagctgcccattctcaagactcatctgcctagggagggtcacagaggcaggatgtaagacacactgtgttgcattcttgcacaagtcatgaaaatggagccagagagcctggacatcagggacttttgcccacagcacatgacaccgacagctgcccagcctgttcacatgctggggaccagcacagcacctgaagccatgtgggacagttgggctttgttcattctagccacggggatgaaagggatcttttgcattgcagagattttatatatattttgtttgtaatgagccattctcaataaacattattctcactgcaaaat

SEQ ID NO: 364369 - DNA, 1934 bp, Homo sapiens
accagtacgatagttccggcaccggaaaagagggctgatgactgggcccgggggccgccgcaacgacccttggggccggcaaagagccagagagggtgctcacacttccaagcaccccacaccaaggacaggctggacggcaaggcggagacgcggggcttgggccctcagaccggggacagcaggaggttgggccaagggccaggacttcccgtcacaatttcatttgttgatcccggcaccgccagccgccgcctcccgttctcccctccgcagcggcggcggtggcggagaaggaactcgacacgcaccgaccgccctcccgccccagccgaagcggaagctgtagcccgctctgggccggggccatgggcgccccgcgccgcccgggtcatgaggacggaggcggaggcagcggggccgccgctcgagcccggggactttgtgcaactgcctgtgcccgtcatccagcagctctaccactgggactgtggcctggcctgctccaggatggtgctgcggtacctgggccagctggacgacagtgagtttgagagagccctgcagaagctgcagctgaccaggagcatctggaccatcgacctggcctacctgatgcaccactttggcgtgaggcaccgcttctgtacccagaccctgggtgtcgacaagggctacaagaaccagtccttctacaggaagcactttgacacagaagagacccgggtgaatcagctgtttgcacaagcaaaggcctgcaaggtgctggtggagaaatgcacagtgagtgtgaaggacatccaggcgcacctggctcagggccatgtggccatcgtgctggtgaactcgggggtgctgcactgtgacctgtgctccagccctgtcaagtactgctgcttcacccccagtggccaccactgcttctgccgcactcctgactaccagggccacttcatcgtgctgcgtggctacaaccgggccactggctgcatcttctacaacaacccagcctatgccgacccaggaatgtgcagcaccagcatcagtaactttgaggaggccagaaccagctatggcacagatgaggacatcctctttgtctacttggacagctgacagcaggagcctggtgcgcctaggccctcggaccccatccccaccccagccgggcccgctcaggacgccctggcccaggcttggggctgctggggttggaatgtggaactgcagcctcagcccatctggcagagtcccaggaactcggagactggcacagctgctttgtctgccagtgccgtgtgttgtcatgtcactcaccccaagcacctgctggctgctggaagcataccccaagaccccaagccttgactccagctgcgcccacaggaagtccagtcccgacagtgcccttgttgcctttgagccagatccatggcaatggtctccccacagaccgcaggactgagcctggagagagaagttgcttgacggatgccacttgtcaggacagtatgtgagtgtctggagacagcatagctgaccccaatcccccagggctgaggacccctccaggcccctctctcctggaagtgctgcatatgcccctgtgcccagtggttgatgataccaccaccacctgcctacccatgggcccaagtttctgtggctcattacagggcatctgacccctgccacccagcatagacacacctcacagctgccctgccatgcagagccctggccgctggagactcttaaactgcccagcctgttcacatgctggggaccagcacagcacctgaagccatgtgggacagttgggctttgttcattctagccacggggatgaaagggatcttttgcattgcagagattttatatatattttgtttgtaatgagccattctcaataaacattattctcactgcaaaat

SEQ ID NO: 364370 - DNA, 673 bp, Homo sapiens
  misc_feature (672)..(673): n is a, c, g, or t
caattccctctgggaccagagactgagtctttctaaacattttggctggactgaggtgctgttaccaccctccatgaaggccactacctagtgacagccctaacagcacatgacaccgacagctgcccagcctgttcacatgctggggaccagcacagcacctgaagccatgtgggacagttgggctttgttcattctagccacggggatgaaagggatcttttgcattgcagagattttatatatattttgtttgtaatgagccattctcaataaacattattctcactgcaaaatggtggtagcccctggctggcctttatgaagctgtgttgatctgcagaattcctgtcccttctcaagttctcagcatgagcacatgggaacccaggtccttgtcttgccatacccagtttagctgggactggaatcctgttttctgttttctagggccatatccatcccgttcaggcctggatgcttgtgcctgtcctggacaggcagtactagaggtagaagggcctcggggctcagctcaagtgaactgcaacaaatgcaactacaggagacacaacagaatgagggagatgttgaagcaggagagacgaaagtgggtgggatggtgagtgctgggtggagctggctgctcagcatgcagagttggggttgagnn

SEQ ID NO: 364371 - DNA, 452 bp, Homo sapiens
catgtggccatcgtgctggtgaactcgggggtgctgcactgtgacctgtgctccagccctgtcaagtactgctgcttcacccccagtggccaccactgcttctgccgcactcctgactaccagggccacttcatcgtgctgcgtggctacaaccgggccactggctgcatcttctacaacaacccagcctatgccgaccgtgagtgctgggtggggtgggtgaggcagagtggtccacattcactgttctgtatgcccagtgcccacagttcccacccattcaatctagtgtggccagggcctccctccctaccttttccccaaagcccctgctcctcctgggctcttgtcactgtggccacccctcaggccatgcaggcaaacctgccgcaaactgtgccagcctcctctacaccctggccacccctccctctcacaccacaggccccacg

SEQ ID NO: 364372 - DNA, 3556 bp, Homo sapiens
accagtacgatagttccggcaccggaaaagagggctgatgactgggcccgggggccgccgcaacgacccttggggccggcaaagagccagagagggtgctcacacttccaagcaccccacaccaaggacaggctggacggcaaggcggagacgcggggcttgggccctcagaccggggacagcaggaggttgggccaagggccaggacttcccgtcacaatttcatttgttgatcccggcaccgccagccgccgcctcccgttctcccctccgcagcggcggcggtggcggagaaggaactcgacacgcaccgaccgccctcccgccccagccgaagcggaagctgtagcccgctctgggccggggccatgggcgccccgcgccgcccgggtcatgaggacggaggcggaggcagcggggccgccgctcgagcccggggactttgtgcaactgcctgtgcccgtcatccagcagctctaccactgggactgtggcctggcctgctccaggatggtgctgcggtacctgggccagctggacgacagtgagtttgagagagccctgcagaagctgcagctgaccaggagcatctggaccatcgacctggcctacctgatgcaccactttggcgtgaggcaccgcttctgtacccagaccctgggtgtcgacaagggctacaagaaccagtccttctacaggaagcactttgacacagaagagacccgggtgaatcagctgtttgcacaagcaaaggcctgcaaggtgctggtggagaaatgtggccaccactgcttctgccgcactcctgactaccagggccacttcatcgtgctgcgtggctacaaccgggccactggctgcatcttctacaacaacccagcctatgccgacccaggaatgtgcagcaccagcatcagtaactttgaggaggccagaaccagctatggcacagatgaggacatcctctttgtctacttggacagctgacagcaggagcctggtgcgcctaggccctcggaccccatccccaccccagccgggcccgctcaggacgccctggcccaggcttggggctgctggggttggaatgtggaactgcagcctcagcccatctggcagagtcccaggaactcggagactggcacagctgctttgtctgccagtgccgtgtgttgtcatgtcactcaccccaagcacctgctggctgctggaagcataccccaagaccccaagccttgactccagctgcgcccacaggaagtccagtcccgacagtgcccttgttgcctttgagccagatccatggcaatggtctccccacagaccgcaggactgagcctggagagagaagttgcttgacggatgccacttgtcaggacagtatgtgagtgtctggagacagcatagctgaccccaatcccccagggctgaggacccctccaggcccctctctcctggaagtgctgcatatgcccctgtgcccagtggttgatgataccaccaccacctgcctacccatgggcccaagtttctgtggctcattacagggcatctgacccctgccacccagcatagacacacctcacagctgccctgccatgcagagccctggccgctggagactcttaaaccccccacagccctccaggtcctccagctctgtcagatggagggctctcgggcctagatcccactggtaggcctcgtggctggcagcagtgctctgggaataaacagctgccctagccccagagggatccctgcacccaggaggcctcctgacaccagccaaaatcctgacagcagggtctgccctcttgagtgtggggagcccctagtcctttaaggttggctgctaaggcctgtgctccaaagcaacgggctggggcagcctgcagctgcccacccaacctggtcttcacaccagattgcacaggatactgggtcttgtctatcttgatggagaagaggggttcctgcccaggatcttacaacacagcaagtagcatagagctctttccttcctcttttttggggaggttggggtcaggggttgtttctttgagatttaagttttcatttttgaggggtaatcaccttcaagtaaaacagtaatagcaagagtgaaggtactttggaaccactaacacctctgcacagggcagttagccagctcaagttctttttcagagaaagggacttggccagtggtttaagtacctgccccttcacctctcagacgaggcagctgacgaggcagctggcccagtcttgggagtctgctcaggacagtggtggagctgggtcttgaaccccagtctgcacctaaaaaactaaaggaaatggatttttttttttttttttgagacggagactcactctgttgcccagactggagtgcagtggcacgatcttggcttactacaacctccgcctcctgggttcaagcgatcctcctgcctcagccccccaccagctgggactacaggcacatgccaccatgcccggctaatttttttgtatttttagtagagaccaggcttcgccatgttggccaggctggtctcgaacccctgagctcaggtgatccacctgcctcggcctcccaaagtgggaaatgggtcattttcaaaggggcaacagtgataccatccctgcactcctgggtcctgctcttccaatgcccaaggcatggcatggtggcagctgtgcccccgcccattgctttggagcacagatgactctgggggcagaggtgggctctgtttaggagggcagtgagaccacccagccaaattgcttctcaaccctagacaaagcctttggccaagagggaggtgctgttagttgggcagcccttctgggtttcagagaccggtgttggctctagactggtctcatctccattgccttaatgccaggtggcccaggagtacccatgcacagcagctgtggggtgtgggcatcttcaggtggtgttctggtaaaatcgttagaatagctgtatgaaggaaaccagtgggaggaaatgaagttttcaggatggtgggatgtgatttagacagtgcacatgctgttagggctgtcactagggagtggccttcatggagggtggtaacagcacctcagtccagccaaaatgtttagaaacactcagtctctggtcccagaggatggcttctcagggcatgccacaagttaaaggtcaccttcctgaaagatgaatgagaaagctgcccattctcaagactcatctgcctagggagggtcacagaggcaggatgtaagacacactgtgttgcattcttgcacaagtcatgaaaatggagccagagagcctggacatcagggacttttgcccacagcacatgacaccgacagctgcccagcctgttcacatgctggggaccagcacagcacctgaagccatgtgggacagttgggctttgttcattctagccacggggatgaaagggatcttttgcattgcagagattttatatatattttgtttgtaatgagccattctcaataaacattattctcactgcaaaat

SEQ ID NO: 364373 - DNA, 4029 bp, Homo sapiens
accagtacgatagttccggcaccggaaaagagggctgatgactgggcccgggggccgccgcaacgacccttggggccggcaaagagccagagagggtgctcacacttccaagcaccccacaccaaggacaggctggacggcaaggcggagacgcggggcttgggccctcagaccggggacagcaggaggttgggccaagggccaggacttcccgtcacaatttcatttgttgatcccggcaccgccagccgccgcctcccgttctcccctccgcagcggcggcggtggcggagaaggaactcgacacgcaccgaccgccctcccgccccagccgaagcggaagctgtagcccgctctgggccggggccatgggcgccccgcgccgcccgggtcatgaggacggaggcggaggcagcggggccgccgctcgagcccggggactttgtgcaactgcctgtgcccgtcatccagcagctctaccactgggactgtggcctggcctgctccaggatggtgctgcggtacctgggccagctggacgacagtgagtttgagagagccctgcagaagctgcagctgaccaggagcatctggaccatcgacctggcctacctgatgcaccactttggcgtgaggcaccgcttctgtacccagaccctgggtgtcgacaagggctacaagaaccagtccttctacaggaagcactttgacacagaagagacccgggtgaatcagctgtttgcacaagcaaaggcctgcaaggtgctggtggagaaatgcacagtgagtgtgaaggacatccaggcgcacctggctcagggccatgtggccatcgtgctggtgaactcgggggtgctgcactgtgacctgtgctccagccctgtcaagtactgctgcttcacccccagtggccaccactgcttctgccgcactcctgactaccagggccacttcatcgtgctgcgtggctacaaccgggccactggctgcatcttctacaacaacccagcctatgccgacccaggaatgtgcagcaccagcatcagtaactttgaggaggccagaaccagctatggcacagatgaggacatcctctttgtctacttggacagctgacagcaggagcctggtgcgcctaggccctcggaccccatccccaccccagccgggcccgctcaggacgccctggcccaggcttggggctgctggggttggaatgtggaactgcagcctcagcccatctggcagagtcccaggaactcggagactggcacagctgctttgtctgccagtgccgtgtgttgtcatgtcactcaccccaagcacctgctggctgctggaagcataccccaagaccccaagccttgactccagctgcgcccacaggaagtccagtcccgacagtgcccttgttgcctttgagccagatccatggcaatggtctccccacagaccgcaggactgagcctggagagagaagttgcttgacggatgccacttgtcaggacagtatgtgagtgtctggagacagcatagctgaccccaatcccccagggctgaggacccctccaggcccctctctcctggaagtgctgcatatgcccctgtgcccagtggttgatgataccaccaccacctgcctacccatgggcccaagtttctgtggctcattacagggcatctgacccctgccacccagcatagacacacctcacagctgccctgccatgcagagccctggccgctggagactcttaaaccccccacagccctccaggtcctccagctctgtcagatggagggctctcgggcctagatcccactggtaggcctcgtggctggcagcagtgctctgggaataaacagctgccctagccccagagggatccctgcacccaggaggcctcctgacaccagccaaaatcctgacagcagggtctgccctcttgagtgtggggagcccctagtcctttaaggttggctgctaaggcctgtgctccaaagcaacgggctggggcagcctgcagctgcccacccaacctggtcttcacaccagattgcacaggatactgggtcttgtctatcttgatggagaagaggggttcctgcccaggatcttacaacacagcaagtagcatagagctctttccttcctcttttttggggaggttggggtcaggggttgtttctttgagatttaagttttcatttttgaggggtaatcaccttcaagtaaaacagtaatagcaagagtgaaggtactttggaaccactaacacctctgcacagggcagttagccagctcaagttctttttcagagaaagggacttggccagtggtttaagtacctgccccttcacctctcagacgaggcagctgacgaggcagctggcccagtcttgggagtctgctcaggacagtggtggagctgggtcttgaaccccagtctgcacctaaaaaactaaaggaaatggatttttttttttttttttgagacggagactcactctgttgcccagactggagtgcagtggcacgatcttggcttactacaacctccgcctcctgggttcaagcgatcctcctgcctcagccccccaccagctgggactacaggcacatgccaccatgcccggctaatttttttgtatttttagtagagaccaggcttcgccatgttggccaggctggtctcgaacccctgagctcaggtgatccacctgcctcggcctcccaaagtgggaaatgggtcattttcaaaggggcaacagtgataccatccctgcactcctgggtcctgctcttccaatgcccaaggcatggcatggtggcagctgtgcccccgcccattgctttggagcacagatgactctgggggcagaggtgggctctgtttaggagggcagtgagaccacccagccaaattgcttctcaaccctagacaaagcctttggccaagagggaggtgctgttagttgggcagcccttctgggtttcagagaccggtgttggctctagactggtctcatctccattgccttaatgccaggtggcccaggagtacccatgcacagcagctgtggggtgtgggcatcttcaggtggtgttctggtaaaatcgttagaatagctgtatgaaggaaaccagtgggaggaaatgaagttttcaggatggtgggatgtgatttagacagtgcacatgctgttagggctgtcactagggagtggccttcatggagggtggtaacagcacctcagtccagccaaaatgtttagaaacactcagtctctggtcccagaggatggcttctcagggcatgccacaagttaaaggtcaccttcctgaaagatgaatgagaaagctgcccattctcaagactcatctgcctagggagggtcacagaggcaggatgtaagacacactgtgttgcattcttgcacaagtcatgaaaatggagccagagagcctggacatcagggacttttgcccacagcacatgacaccgacagctgcccagcctgttcacatgctggggaccagcacagcacctgaagccatgtgggacagttgggctttgttcattctagccacggggatgaaagggatcttttgcattgcagagattttatatatattttgtttgtaatgagccattctcaataaacattattctcactgcaaaataaaaaaaaaaaaaaaaaaaaaaaaaaaagggggggggggtaaaaatatccccgggggggccaaaattagggggtcccgagttttttggaaaacaggggggcccacaagagggggacgcgataaaaaacaccagggcaggggaccgcagtaaaacaacggccgaacgagggaaacaccgcgcagacggggaccctgtgggaggggacccaaacgcgggggggcacacagggacaacatacctgaggaaattacgcatcagggacaagttaacctcgcgggggactaggggacaccaacggctaagcgggcggaggaaattggcacggggtcgtctagaaattacg

SEQ ID NO: 364374 - DNA, 603 bp, Homo sapiens
  misc_feature (17)..(17): n is a, c, g, or t
gagatatttccttggtnctgtgtgcctgggattgttgaatttcgtcacggatggggtagctcgatcacgcaccgatacgtctcgtccctgtgcccatgcctgaattcggaagctgtagcccgctctgggccggggccatgggcgccccgcgccgcccgggtcatgaggacggaggcggaggcagcggggccgccgctcgagcccggggactttgtgcaactgcctgtgcccgtcatccagcagctctaccactgggactgtggcctggcctgctccaggatggtgctgcggtacctgggccagctggacgacagtgagtttgagagagccctgcagaagctgcagctgaccaggagcatctggaccatcgacctggcctacctgatgcaccactttggcgtgaggcaccgcttctgtacccagaccctgggtgtcgacaagggctacaagaaccaggtgagcgaccagccaccaggccttcccatgtggggccacacagaggtataaggccacctggttccagtagttggaagagggaacagtcaagggctagacacccaggtagatacccaggtgtgcagagaccagggagcagcagcagag

SEQ ID NO: 364375 - DNA, 325 bp, Homo sapiens
agatctgcagcgaataaccctgcccagcattaaccgcctcaggcacttcaccaatgacacaattctggatgtcttcttctacaatagtcccacctactgtcagactattgtggacacagttgcttctgaaatgaaccgaatatacacactttttctacagaggaaccctgatttcaaagggggtgtatccattgctggtcatagtttaggattcgctaaatattgtaatggatcaaggagatacacctacactagaggaagatttgaagaaacttcagctctctgaattctttgatatctttgagaaggagaaagtagataagga

SEQ ID NO: 364376 - DNA, 4553 bp, Homo sapiens
ctcaccttttcgcctggcatccgggcccgctactcgcccactgggagcgccgtggcgcctggtgttcggcgcgagcccggcggggctgcaggttccgccctgctccgccgcgccccgcccgggctggggtaaaggccgcggccgggccatgcagtgtcctcctcagggagggcaggagagcctgaggagtggcggggccgccagagagcgaaatgtcatcagtgcagtcacaacaggagcagttgtcccagtcagatccatctccgtcaccaaactcatgtagttcctttgagctaatagacatggatgctggcagcttgtatgaaccagtttctccccattggttttattgtaagataatagattctaaggagacatggattcctttcaactctgaggattcacagcagctggaagaggcatatagctctggaaaaggttgtaatgggagagttgttcctactgatgggggcagatatgatgttcatttgggggagaggatgcggtatgctgtatactgggatgaactggcatcggaagtgagacgatgtacgtggttttacaagggggacaaagacaataagtatgttccctactcggagagcttcagccaagttttagaggaaacttacatgcttgctgtaactttggatgaatggaaaaagaaactggaatctcccaacagagaaattattattttacacaatccaaagcttatggtgcattaccagccagttgcagggtctgatgattggggttcaacacccacggagcagggtcgaccaagaactgtgaagagaggagttgagaacatctctgttgacattcattgtggagaacctttacaaatagatcacttggtttttgtagtccatgggattggaccagcttgtgatctccgctttcgaagcattgtacagtgtgttaatgattttcgcagtgtttccttgaacttgctacagacacattttaagaaagcccaagaaaatcagcagattgggagggtagaatttcttccagtcaactggcacagtcctttgcattctactggtgtggatgtagatctgcagcgaataaccctgcccagcattaaccgcctcaggcacttcaccaatgacacaattctggatgtcttcttctacaatagtcccacctactgtcagactattgtggacacagttgcttctgaaatgaaccgaatatacacactttttctacagaggaaccctgatttcaaagggggtgtatccattgctggtcatagtttaggttcgcttatattgtttgatatcctaacaaatcagaaagattctttgggggatattgacagtgaaaaggattcgctaaatattgtaatggatcaaggagatacacctacactagaggaagatttgaagaaacttcagctctctgaattctttgatatctttgagaaggagaaagtagataaggaagctctggctttatgtacagaccgagatcttcaggaaataggaattcctttaggaccaagaaagaagatattaaactatttcagcaccagaaaaaactcaatgggtattaagagaccagccccgcagcctgcttcaggggcaaacatccccaaagaatctgagttctgcagtagcagtaatactagaaatggtgactatctggatgttggcattgggcaggtgtctgtgaaatacccccggctcatctataaaccagagatattctttgcctttggatctcccattggaatgttccttactgtccgaggactaaaaagaattgatcccaactacagatttccaacgtgcaaaggtttcttcaatatttatcacccttttgatcctgtggcctataggattgaaccaatggtggtcccaggagtggaatttgagccaatgctgatcccacatcataaaggcaggaagcggatgcacttagaactgagagagggcttgaccaggatgagtatggaccttaagaacaacttgctaggttcgctgcggatggcctggaagtcttttaccagagctccataccctgccttacaagcttcagaaacaccagaagaaactgaagcagaacctgaatcaacttcagagaagcctagtgatgttaacacagaagagacctctgtggcagttaaagaagaagtcctgcctatcaatgtggggatgctgaatggaggccaacgcattgactatgtgctacaggagaagcctattgaaagttttaatgagtatttatttgctttacaaagccatctatgctactgggagtctgaagatacagtattgctcgtcctcaaagagatctaccaaacccagggtatcttccttgatcagcctttacagtaaaaatgacccatctatggctgcttaatacggacattgagggatccttccccagaaaatccacctgtttgttgctgcaattttcctctcctcagctgcgtcatttcctgcatgttgcctgccacttactcaccactggggtctttggaagataatcttcctctttggaaatgaatggaaaagcaaaaggccctattacttttaaccactggcttcatataaacacttgccatttttttctgcatagctgggggtggtttgtgtctttaattctttgatgatagtttatagttgccacactttattgattagtacttgacagggtgtaaagcctattttgggtttgatttgttttgggtggggtagacatgtttttaaggaacttattgcttatctttagaaaatgttctagtttggaaacagattcttgagattcagaaggcattttggagtacacttatctcttgtttgtgttgaactgaaggctaagtctcagtggacatggaaaagacttttgggtgatttatttttgaacctgcatttctttcttatgtgtagtgtatgaagaaagactagaatgtagctttaaaaaagtgttgtttactctcttagaactgacagacttattgccagaaatcactgatgttcattgtttttgcaactgtttgagctgctgtaagagtctaaagttgacaagttagttcatgttaggtgcatctttataaagcaaagatgttgtatatcctaggcctcccttttatatttgatagaagttatttgctaatagcttctattcttacgttgaaaatagttgtaaaagctgatgaacctgaaattgtgtagcctctacaggctgctgaggttctaaataaaaccttttagtggtgcctttatggtgaaacagaatttgtcacctgccatttctacttgagctaaggtagtattgtgtatcctctttccttcttaggtatccataatccacaaagcatatttaaaaggctcttggcacgggcagcattggttgagcaggtaggtttggctagggggaaatgtttaacttgttctgaaagaaaaacttatgtctgtagggtccaagaaacagctattccagagtcagtgtcagctgagtctggaacatatgaagtgaggtttacttctaagaacacaagtgactgcacactaattttgtcaaggcatcttttcactactttgctgtagatttttcttcttcattggtcagtttgtcattgtctttgtagttctctttatgataatcctttatacttgctctcagattccacaggcctctgtttatagagtggcaaaggcaggcgagctgtggtttattgtttataaatttttttataaatgttatggtattcaaagccactgacatttaatatttactgaagccattccttagacagcagtggtctttatccctttctggaaagaaaaggaaaatgaagggtaattactgtcaccatggagattgtagaggtaaggttggggtataggtcaggcctggcctttctttgtcatctgcttatagtctagtgctaagtatgccactaagtttcagatatatggaatactttatttttttaaaggtatataaactctgagttattgagaattaagtattcactgtatattaaggggaagcttttgccaagttgtggtcttcaaatttatgtttactcttcctattggcagaataggtgctatttaagagtaaaccaaaggataagcagagggagtccctataaccaaagatggacagcatagccctggatagccagataaaccactctttgtattaagaaatgtttctttcctagtggtgaggggtgggtaactgtgaaagagctttatatcttgtctattcatggtattatagctgtatattcccaggatgataagcttgattgaaatcctgtatttagtcatatattatttgcgctgcttcatttgtatcatgtgcaatctctagaccaaccctatttttaaactctggtacagcatcattttgtacatattcccagctgcagaactagtatcacttatctcagcaaaagagattgtttgcatggaaagattaatagcactgattagatttctaatattttgcatttttgaaatgtttgttttctacgtgattatatttaaaactttagtaaatactaacatgaaaccataaaaaaaaat

SEQ ID NO: 364377 - DNA, 4401 bp, Homo sapiens
ctcaccttttcgcctggcatccgggcccgctactcgcccactgggagcgccgtggcgcctggtgttcggcgcgagcccggcggggctgcaggttccgccctgctccgccgcgccccgcccgggctggggtaaaggccgcggccgggccatgcagtgtcctcctcagggagggcaggagagcctgaggagtggcggggccgccagataatagattctaaggagacatggattcctttcaactctgaggattcacagcagctggaagaggcatatagctctggaaaaggttgtaatgggagagttgttcctactgatgggggcagatatgatgttcatttgggggagaggatgcggtatgctgtatactgggatgaactggcatcggaagtgagacgatgtacgtggttttacaagggggacaaagacaataagtatgttccctactcggagagcttcagccaagttttagaggaaacttacatgcttgctgtaactttggatgaatggaaaaagaaactggaatctcccaacagagaaattattattttacacaatccaaagcttatggtgcattaccagccagttgcagggtctgatgattggggttcaacacccacggagcagggtcgaccaagaactgtgaagagaggagttgagaacatctctgttgacattcattgtggagaacctttacaaatagatcacttggtttttgtagtccatgggattggaccagcttgtgatctccgctttcgaagcattgtacagtgtgttaatgattttcgcagtgtttccttgaacttgctacagacacattttaagaaagcccaagaaaatcagcagattgggagggtagaatttcttccagtcaactggcacagtcctttgcattctactggtgtggatgtagatctgcagcgaataaccctgcccagcattaaccgcctcaggcacttcaccaatgacacaattctggatgtcttcttctacaatagtcccacctactgtcagactattgtggacacagttgcttctgaaatgaaccgaatatacacactttttctacagaggaaccctgatttcaaagggggtgtatccattgctggtcatagtttaggttcgcttatattgtttgatatcctaacaaatcagaaagattctttgggggatattgacagtgaaaaggattcgctaaatattgtaatggatcaaggagatacacctacactagaggaagatttgaagaaacttcagctctctgaattctttgatatctttgagaaggagaaagtagataaggaagctctggctttatgtacagaccgagatcttcaggaaataggaattcctttaggaccaagaaagaagatattaaactatttcagcaccagaaaaaactcaatgggtattaagagaccagccccgcagcctgcttcaggggcaaacatccccaaagaatctgagttctgcagtagcagtaatactagaaatggtgactatctggatgttggcattgggcaggtgtctgtgaaatacccccggctcatctataaaccagagatattctttgcctttggatctcccattggaatgttccttactgtccgaggactaaaaagaattgatcccaactacagatttccaacgtgcaaaggtttcttcaatatttatcacccttttgatcctgtggcctataggattgaaccaatggtggtcccaggagtggaatttgagccaatgctgatcccacatcataaaggcaggaagcggatgcacttagaactgagagagggcttgaccaggatgagtatggaccttaagaacaacttgctaggttcgctgcggatggcctggaagtcttttaccagagctccataccctgccttacaagcttcagaaacaccagaagaaactgaagcagaacctgaatcaacttcagagaagcctagtgatgttaacacagaagagacctctgtggcagttaaagaagaagtcctgcctatcaatgtggggatgctgaatggaggccaacgcattgactatgtgctacaggagaagcctattgaaagttttaatgagtatttatttgctttacaaagccatctatgctactgggagtctgaagatacagtattgctcgtcctcaaagagatctaccaaacccagggtatcttccttgatcagcctttacagtaaaaatgacccatctatggctgcttaatacggacattgagggatccttccccagaaaatccacctgtttgttgctgcaattttcctctcctcagctgcgtcatttcctgcatgttgcctgccacttactcaccactggggtctttggaagataatcttcctctttggaaatgaatggaaaagcaaaaggccctattacttttaaccactggcttcatataaacacttgccatttttttctgcatagctgggggtggtttgtgtctttaattctttgatgatagtttatagttgccacactttattgattagtacttgacagggtgtaaagcctattttgggtttgatttgttttgggtggggtagacatgtttttaaggaacttattgcttatctttagaaaatgttctagtttggaaacagattcttgagattcagaaggcattttggagtacacttatctcttgtttgtgttgaactgaaggctaagtctcagtggacatggaaaagacttttgggtgatttatttttgaacctgcatttctttcttatgtgtagtgtatgaagaaagactagaatgtagctttaaaaaagtgttgtttactctcttagaactgacagacttattgccagaaatcactgatgttcattgtttttgcaactgtttgagctgctgtaagagtctaaagttgacaagttagttcatgttaggtgcatctttataaagcaaagatgttgtatatcctaggcctcccttttatatttgatagaagttatttgctaatagcttctattcttacgttgaaaatagttgtaaaagctgatgaacctgaaattgtgtagcctctacaggctgctgaggttctaaataaaaccttttagtggtgcctttatggtgaaacagaatttgtcacctgccatttctacttgagctaaggtagtattgtgtatcctctttccttcttaggtatccataatccacaaagcatatttaaaaggctcttggcacgggcagcattggttgagcaggtaggtttggctagggggaaatgtttaacttgttctgaaagaaaaacttatgtctgtagggtccaagaaacagctattccagagtcagtgtcagctgagtctggaacatatgaagtgaggtttacttctaagaacacaagtgactgcacactaattttgtcaaggcatcttttcactactttgctgtagatttttcttcttcattggtcagtttgtcattgtctttgtagttctctttatgataatcctttatacttgctctcagattccacaggcctctgtttatagagtggcaaaggcaggcgagctgtggtttattgtttataaatttttttataaatgttatggtattcaaagccactgacatttaatatttactgaagccattccttagacagcagtggtctttatccctttctggaaagaaaaggaaaatgaagggtaattactgtcaccatggagattgtagaggtaaggttggggtataggtcaggcctggcctttctttgtcatctgcttatagtctagtgctaagtatgccactaagtttcagatatatggaatactttatttttttaaaggtatataaactctgagttattgagaattaagtattcactgtatattaaggggaagcttttgccaagttgtggtcttcaaatttatgtttactcttcctattggcagaataggtgctatttaagagtaaaccaaaggataagcagagggagtccctataaccaaagatggacagcatagccctggatagccagataaaccactctttgtattaagaaatgtttctttcctagtggtgaggggtgggtaactgtgaaagagctttatatcttgtctattcatggtattatagctgtatattcccaggatgataagcttgattgaaatcctgtatttagtcatatattatttgcgctgcttcatttgtatcatgtgcaatctctagaccaaccctatttttaaactctggtacagcatcattttgtacatattcccagctgcagaactagtatcacttatctcagcaaaagagattgtttgcatggaaagattaatagcactgattagatttctaatattttgcatttttgaaatgtttgttttctacgtgattatatttaaaactttagtaaatactaacatgaaaccataaaaaaaaat

SEQ ID NO: 364378 - DNA, 4481 bp, Homo sapiens
ttgtctgtatttatttttgcttattgttgtttttttatctctccttatttataatttccgttgttttatctttttttcggcatttcaatttttttttctcactcttgtctacgcctctataagtgcttttttccctgtcttcgacgtgggtgcgtggttgtgtttccccactggttgtattgtctgtctacgctcgtcgcactaccgtaggggtatagaaagctaggtttgtttacgtcctgctgttctacatggcatgtcgccgcaacggttgcctcaacgctggttttttttggcttcagttgtctgcaccggtgctgtttgttgactggacatgtttgtcctttcttagattctaattagctcgtgttgatattttccgttggtgcttcctattttgtgttgttctcccttgtgtctattcttcttattttcttctggtgtagtttcttctttatttttttttttctctcttttttgtttttttttttttttttttccttttttttttttttttttttttttttttttttttttaatttggaacatacaggacaatttattgaagtcaatctcaagcaaaatctgaaatcagtggaatgtcattaaaaacctttccaaattaatcctcacggaagcaaaaaacacattggaattccaaagtatttgtaaaataaaaaaggcaacatctcagtaaatataatgtacaaaaattatatgttcctaccagcacacacatcagtaaagaagcttaaatattacaggcaaccctaaatacactataactagtcaacaataagctatctatatacaggttaaccaagctttacacgtttcacactatgcaataaaacataggccaatcaacaaaatcctcaaaatattatatatcttgaagtctatgtggcaacatcaagtcattatacagtaatgccctagtggaacacccccagggaaaattaacactaatcccttagtgtcaagagcttctagccaagtcacagaaactcaaaagagattgactttagtgaatattgatgctttgttattaaagactcaagtctcaagtgatttaggcaaagtaatggttcacaggatctacaaagtttattacagataaagtacagaaataaccaatctacaaagatcattatcataaagaacacgagaaaatgaaaacggagtctgtaggtatctgtgtttgttgtgcaatatcactcaaatgggtacaaatgagtttctcatatcaattccaaatatacacatacccttgtatataaaaaatgatattagccagttgtaatactcatttagcatcttgattattagtggcaatataattatcttaacatagggcatgtaacaggacaaatgagataaaataatgacaaccaagtaagttttatccagtccatttctaaactgacaagaataccttattcaataccttatataggtcatctgacagatacttgagggctgtttgcacacatcaagtgtgttggcaggcagggaggggagcagtaaaagctgagggtgctttctcactaactagcagatgcagtaatgccacataagaaaactaaggactgaataaatgactttggcatctattctattttccctttttacttacatgtaaattacttttacagcctactgaaggacaggcaattctcatccccctcccgcttcatacatacgtgccacaagcacccaaacttgtcacttatgcaatggactgaccaaaacaaaacaaaaaacagaaatgttttttgaaagacacggattacccacattttgggagtgtaacgtaagtgcaattttttgttttgtttttttccctacatagacatagtaaaaggaaagaagatgtgcttggggagagggttgacaaaatgacaaaataaagaatgtacataaaaagtatttgtaaaaatgctggtatctcatgcaggagtctcttcctcaaatgtgttcaatcaatctgagctatctactgtgaacactctcccatttgcagaacttcacctttaatccacgctaaagaggataagagactaggctatttattttcaaaacagtttacaaaacaatgctttctacttcataaatgtaaaaagaaactaaaataaggagaatctgaagagtttcaagtacttaaaaaacctgaattcaatgaggcagaggtctcaatgttaaagtgactatttcgtacctgtggtaaacattatccccccccttaccctttaccaggagaaagggggttccctttctcctggtaccccaccccaggtaaaagttggtgagatttcagtatatacacatttccaacttttcagtatttgttaattcattgcaaagctgtctaattatagtattccctagtccatctgaaaatggaagcaagttctactttttgttttacaaataaccagagaccaattctaggtggccctaggccaaaggaaagtgtttccattcatcaattcatgtctgcaccaacttggacaactgggggaggctggatgcatcagccttgtgaaaagtaactttagtctacgctgcccagaaataaagcaactttccaatgtcctttttctcatatggaagtatagaatgtcagcttcccagctgtgagggctccatagccactgttttcttatcttgttaagaggacatggcatgtggcagccaacaccttgacttcaaggtgaatgctaaaggaagagctttgtatttaaaatgaaatgaaagacaagcaacaagtcctgggcagtccagagattgtattctctacagatggcctgtttgcaaacagtaggtctgggtttgacctattggaatacaccatgcaagaaactactcaaaaaggaaattccacttcatgaaccaggaaagttgtccaatagcctgtcccatctgagggtcctttacatgattagatactcaatatctcagttccacaacgttatttacagacatgttttcaaatattttgtgtaaatggcagaagggagctgggagcagtccccctgcctccattacttttttagctttcacatatgttcttgacttgtacagaaaatcccaaattttaaatgattccccaactcagccagttctatagatgaggccagatcatttttgagaattaagataagagtgggaacttgttaaaacaaaaatgaaaataaaacccacctcactcctgtatctctccctgattagacattaaagaggtgaatcactgcctctggctgcttcagccttccaggaatgaagagccatccaccttgcccttctcagccagccacaggcagctcttctgattcttccctcgcagcagtggcggtccagcccctccctcccctgcacagtgcctgagaaagtttcccaggatttcatctttagctcttactgatccagtttctgaagctttaggctgattatcaaaaatcttatgttcacttcttccttcaacaaattaacatgtggttaaaaaaaataccaccattagcccatgctgctttaagttatttcattgttggacaagaataaaaaccagccacttacactctgaccacatatagatttaaaagttaacaaataccaacttcagactatgagtgagcaatgtcttttggaatatttcattggtgtatcacaggcacagtgcatgtatactcatgcacacataaaggacaattttctctttctgcatctataatctgcaacttaaaaatatatcaaataggtcaacattgacgctatggaggtgtgaggagaactccttggcaccagcatgactaaaaccgctttttagaccattaaagaacattcatggccaaagacttcagaactatggttaccttttttttttgagatggagtctcgctctgtcacccaggctggagtgcagtgatgtgatcttggctcactgcaacctctgcctcctgagaaactgggactacaggtatgtgccaccatgcccggctcctttttgtatttttagcagagacagggtttcaccatgttggtcaggctggtctcaaactcctgacctcatgatctgcccacctcggcctcccaaagtgctgggattacaggtgtgagccactgcacctggcagctattttgttttctactctgatttctgaaatggtgaaacaatcctattaatcataatttttttttaatttcagcagagctctgttacagatatgaaaacaaaatgtgacacaatgaagaagctgcataaaaatactgaaacctaagcaaaaacatttctttttcaagctgcaatggcactgaagcacaataaaaggcaagaaaagaccaagggaatttaaccctccacaaaagaatcccaaaccaaccaaatcaaacaaaaaccagacaccaccaactgcttctgcctgcatgaactggtttcccatttttgctttaataaggcagttccgatggcaaaggctgtaaaa

SEQ ID NO: 364379 - DNA, 3204 bp, Homo sapiens
actatataatcctttggctatacttttactatatagtagctccccatactttttttttaaatagagactatgttgcccacgttggacttgaactcttgggcttaaacaatcctacctacctacctacctcagggtcctgagtagctgggactacaggtgcatgccgtcatgcccagcttctccacataactattttttattctttagggtattaagagaccagccccgcagcctgcttcaggggcaaacatccccaaagaatctgagttctgcagtagcagtaatactagaaatggtgactatctggatgttggcattgggcaggtgtctgtgaaatacccccggctcatctataaaccagagatattctttgcctttggatctcccattggaatgttccttactgtccgaggactaaaaagaattgatcccaactacagatttccaacgtgcaaaggtttcttcaatatttatcacccttttgatcctgtggcctataggattgaaccaatggtggtcccaggagtggaatttgagccaatgctgatcccacatcataaaggcaggaagcggatgcacttagaactgagagagggcttgaccaggatgagtatggaccttaagaacaacttgctaggttcgctgcggatggcctggaagtcttttaccagagctccataccctgccttacaagcttcagaaacaccagaagaaactgaagcagaacctgaatcaacttcagagaagcctagtgatgttaacacagaagagacctctgtggcagttaaagaagaagtcctgcctatcaatgtggggatgctgaatggaggccaacgcattgactatgtgctacaggagaagcctattgaaagttttaatgagtatttatttgctttacaaagccatctatgctactgggagtctgaagatacagtattgctcgtcctcaaagagatctaccaaacccagggtatcttccttgatcagcctttacagtaaaaatgacccatctatggctgcttaatacggacattgagggatccttccccagaaaatccacctgtttgttgctgcaattttcctctcctcagctgcgtcatttcctgcatgttgcctgccacttactcaccactggggtctttggaagataatcttcctctttggaaatgaatggaaaagcaaaaggccctattacttttaaccactggcttcatataaacacttgccatttttttctgcatagctgggggtggtttgtgtctttaattctttgatgatagtttatagttgccacactttattgattagtacttgacagggtgtaaagcctattttgggtttgatttgttttgggtggggtagacatgtttttaaggaacttattgcttatctttagaaaatgttctagtttggaaacagattcttgagattcagaaggcattttggagtacacttatctcttgtttgtgttgaactgaaggctaagtctcagtggacatggaaaagacttttgggtgatttatttttgaacctgcatttctttcttatgtgtagtgtatgaagaaagactagaatgtagctttaaaaaagtgttgtttactctcttagaactgacagacttattgccagaaatcactgatgttcattgtttttgcaactgtttgagctgctgtaagagtctaaagttgacaagttagttcatgttaggtgcatctttataaagcaaagatgttgtatatcctaggcctcccttttatatttgatagaagttatttgctaatagcttctattcttacgttgaaaatagttgtaaaagctgatgaacctgaaattgtgtagcctctacaggctgctgaggttctaaataaaaccttttagtggtgcctttatggtgaaacagaatttgtcacctgccatttctacttgagctaaggtagtattgtgtatcctctttccttcttaggtatccataatccacaaagcatatttaaaaggctcttggcacgggcagcattggttgagcaggtaggtttggctagggggaaatgtttaacttgttctgaaagaaaaacttatgtctgtagggtccaagaaacagctattccagagtcagtgtcagctgagtctggaacatatgaagtgaggtttacttctaagaacacaagtgactgcacactaattttgtcaaggcatcttttcactactttgctgtagatttttcttcttcattggtcagtttgtcattgtctttgtagttctctttatgataatcctttatacttgctctcagattccacaggcctctgtttatagagtggcaaaggcaggcgagctgtggtttattgtttataaatttttttataaatgttatggtattcaaagccactgacatttaatatttactgaagccattccttagacagcagtggtctttatccctttctggaaagaaaaggaaaatgaagggtaattactgtcaccatggagattgtagaggtaaggttggggtataggtcaggcctggcctttctttgtcatctgcttatagtctagtgctaagtatgccactaagtttcagatatatggaatactttatttttttaaaggtatataaactctgagttattgagaattaagtattcactgtatattaaggggaagcttttgccaagttgtggtcttcaaatttatgtttactcttcctattggcagaataggtgctatttaagagtaaaccaaaggataagcagagggagtccctataaccaaagatggacagcatagccctggatagccagataaaccactctttgtattaagaaatgtttctttcctagtggtgaggggtgggtaactgtgaaagagctttatatcttgtctattcatggtattatagctgtatattcccaggatgataagcttgattgaaatcctgtatttagtcatatattatttgcgctgcttcatttgtatcatgtgcaatctctagaccaaccctatttttaaactctggtacagcatcattttgtacatattcccagctgcagaactagtatcacttatctcagcaaaagagattgtttgcatggaaagattaatagcactgattagatttctaatattttgcatttttgaaatgtttgttttctacgtgattatatttaaaactttagtaaatactaacatgaaaccataaaaaaaaat

SEQ ID NO: 364380 - DNA, 2660 bp, Homo sapiens
ctgcacactgatatagaggcgggacgcggatgcacttagaactgagagagggcttgaccaggatgagtatggaccttaagaacaacttgctaggttcgctgcggatggcctggaagtcttttaccagagctccataccctgccttacaagcttcagaaacaccagaagaaactgaagcagaacctgaatcaacttcagagaagcctagtgatgttaacacagaagagacctctgtggcagttaaagaagaagtcctgcctatcaatgtggggatgctgaatggaggccaacgcattgactatgtgctacaggagaagcctattgaaagttttaatgagtatttatttgctttacaaagccatctatgctactgggagtctgaagatacagtattgctcgtcctcaaagagatctaccaaacccagggtatcttccttgatcagcctttacagtaaaaatgacccatctatggctgcttaatacggacattgagggatccttccccagaaaatccacctgtttgttgctgcaattttcctctcctcagctgcgtcatttcctgcatgttgcctgccacttactcaccactggggtctttggaagataatcttcctctttggaaatgaatggaaaagcaaaaggccctattacttttaaccactggcttcatataaacacttgccatttttttctgcatagctgggggtggtttgtgtctttaattctttgatgatagtttatagttgccacactttattgattagtacttgacagggtgtaaagcctattttgggtttgatttgttttgggtggggtagacatgtttttaaggaacttattgcttatctttagaaaatgttctagtttggaaacagattcttgagattcagaaggcattttggagtacacttatctcttgtttgtgttgaactgaaggctaagtctcagtggacatggaaaagacttttgggtgatttatttttgaacctgcatttctttcttatgtgtagtgtatgaagaaagactagaatgtagctttaaaaaagtgttgtttactctcttagaactgacagacttattgccagaaatcactgatgttcattgtttttgcaactgtttgagctgctgtaagagtctaaagttgacaagttagttcatgttaggtgcatctttataaagcaaagatgttgtatatcctaggcctcccttttatatttgatagaagttatttgctaatagcttctattcttacgttgaaaatagttgtaaaagctgatgaacctgaaattgtgtagcctctacaggctgctgaggttctaaataaaaccttttagtggtgcctttatggtgaaacagaatttgtcacctgccatttctacttgagctaaggtagtattgtgtatcctctttccttcttaggtatccataatccacaaagcatatttaaaaggctcttggcacgggcagcattggttgagcaggtaggtttggctagggggaaatgtttaacttgttctgaaagaaaaacttatgtctgtagggtccaagaaacagctattccagagtcagtgtcagctgagtctggaacatatgaagtgaggtttacttctaagaacacaagtgactgcacactaattttgtcaaggcatcttttcactactttgctgtagatttttcttcttcattggtcagtttgtcattgtctttgtagttctctttatgataatcctttatacttgctctcagattccacaggcctctgtttatagagtggcaaaggcaggcgagctgtggtttattgtttataaatttttttataaatgttatggtattcaaagccactgacatttaatatttactgaagccattccttagacagcagtggtctttatccctttctggaaagaaaaggaaaatgaagggtaattactgtcaccatggagattgtagaggtaaggttggggtataggtcaggcctggcctttctttgtcatctgcttatagtctagtgctaagtatgccactaagtttcagatatatggaatactttatttttttaaaggtatataaactctgagttattgagaattaagtattcactgtatattaaggggaagcttttgccaagttgtggtcttcaaatttatgtttactcttcctattggcagaataggtgctatttaagagtaaaccaaaggataagcagagggagtccctataaccaaagatggacagcatagccctggatagccagataaaccactctttgtattaagaaatgtttctttcctagtggtgaggggtgggtaactgtgaaagagctttatatcttgtctattcatggtattatagctgtatattcccaggatgataagcttgattgaaatcctgtatttagtcatatattatttgcgctgcttcatttgtatcatgtgcaatctctagaccaaccctatttttaaactctggtacagcatcattttgtacatattcccagctgcagaactagtatcacttatctcagcaaaagagattgtttgcatggaaagattaatagcactgattagatttctaatattttgcatttttgaaatgtttgttttctacgtgattatatttaaaactttagtaaatactaacatgaaaccataaaaaaaaat

SEQ ID NO: 364381 - DNA, 2405 bp, Homo sapiens
atgacacctgtcattttttaggatctaaactcagagttttaatggttctgttatctaagagttactgtggcaacagttatgattttaattaccaaccacccatcctgagatttaaattactcagccttttagatgtgaaattacaaagtctgtgtattcgactctggcattctctgtggttgccttccagttgtgactgcagctcttctcccactttcttccctagacggacattgagggatccttccccagaaaatccacctgtttgttgctgcaattttcctctcctcagctgcgtcatttcctgcatgttgcctgccacttactcaccactggggtctttggaagataatcttcctctttggaaatgaatggaaaagcaaaaggccctattacttttaaccactggcttcatataaacacttgccatttttttctgcatagctgggggtggtttgtgtctttaattctttgatgatagtttatagttgccacactttattgattagtacttgacagggtgtaaagcctattttgggtttgatttgttttgggtggggtagacatgtttttaaggaacttattgcttatctttagaaaatgttctagtttggaaacagattcttgagattcagaaggcattttggagtacacttatctcttgtttgtgttgaactgaaggctaagtctcagtggacatggaaaagacttttgggtgatttatttttgaacctgcatttctttcttatgtgtagtgtatgaagaaagactagaatgtagctttaaaaaagtgttgtttactctcttagaactgacagacttattgccagaaatcactgatgttcattgtttttgcaactgtttgagctgctgtaagagtctaaagttgacaagttagttcatgttaggtgcatctttataaagcaaagatgttgtatatcctaggcctcccttttatatttgatagaagttatttgctaatagcttctattcttacgttgaaaatagttgtaaaagctgatgaacctgaaattgtgtagcctctacaggctgctgaggttctaaataaaaccttttagtggtgcctttatggtgaaacagaatttgtcacctgccatttctacttgagctaaggtagtattgtgtatcctctttccttcttaggtatccataatccacaaagcatatttaaaaggctcttggcacgggcagcattggttgagcaggtaggtttggctagggggaaatgtttaacttgttctgaaagaaaaacttatgtctgtagggtccaagaaacagctattccagagtcagtgtcagctgagtctggaacatatgaagtgaggtttacttctaagaacacaagtgactgcacactaattttgtcaaggcatcttttcactactttgctgtagatttttcttcttcattggtcagtttgtcattgtctttgtagttctctttatgataatcctttatacttgctctcagattccacaggcctctgtttatagagtggcaaaggcaggcgagctgtggtttattgtttataaatttttttataaatgttatggtattcaaagccactgacatttaatatttactgaagccattccttagacagcagtggtctttatccctttctggaaagaaaaggaaaatgaagggtaattactgtcaccatggagattgtagaggtaaggttggggtataggtcaggcctggcctttctttgtcatctgcttatagtctagtgctaagtatgccactaagtttcagatatatggaatactttatttttttaaaggtatataaactctgagttattgagaattaagtattcactgtatattaaggggaagcttttgccaagttgtggtcttcaaatttatgtttactcttcctattggcagaataggtgctatttaagagtaaaccaaaggataagcagagggagtccctataaccaaagatggacagcatagccctggatagccagataaaccactctttgtattaagaaatgtttctttcctagtggtgaggggtgggtaactgtgaaagagctttatatcttgtctattcatggtattatagctgtatattcccaggatgataagcttgattgaaatcctgtatttagtcatatattatttgcgctgcttcatttgtatcatgtgcaatctctagaccaaccctatttttaaactctggtacagcatcattttgtacatattcccagctgcagaactagtatcacttatctcagcaaaagagattgtttgcatggaaagattaatagcactgattagatttctaatattttgcatttttgaaatgtttgttttctacgtgattatatttaaaactttagtaaatactaacatgaaaccataaaaaaaaat

SEQ ID NO: 364382 - DNA, 3063 bp, Homo sapiens
ttgtctgtatttatttttgcttattgttgtttttttatctctccttatttataatttccgttgttttatctttttttcggcatttcaatttttttttctcactcttgtctacgcctctataagtgcttttttccctgtcttcgacgtgggtgcgtggttgtgtttccccactggttgtattgtctgtctacgctcgtcgcactaccgtaggggtatagaaagctaggtttgtttacgtcctgctgttctacatggcatgtcgccgcaacggttgcctcaacgctggttttttttggcttcagttgtctgcaccggtgctgtttgttgactggacatgtttgtcctttcttagattctaattagctcgtgttgatattttccgttggtgcttcctattttgtgttgttctcccttgtgtctattcttcttattttcttctggtgtagtttcttctttatttttttttttctctcttttttgtttttttttttttttttttccttttttttttttttttttttttttttttttttttttaatttggaacatacaggacaatttattgaagtcaatctcaagcaaaatctgaaatcagtggaatgtcattaaaaacctttccaaattaatcctcacggaagcaaaaaacacattggaattccaaagtatttgtaaaataaaaaaggcaacatctcagtaaatataatgtacaaaaattatatgttcctaccagcacacacatcagtaaagaagcttaaatattacaggcaaccctaaatacactataactagtcaacaataagctatctatatacaggttaaccaagctttacacgtttcacactatgcaataaaacataggccaatcaacaaaatcctcaaaatattatatatcttgaagtctatgtggcaacatcaagtcattatacagtaatgccctagtggaacacccccagggaaaattaacactaatcccttagtgtcaagagcttctagccaagtcacagaaactcaaaagagattgactttagtgaatattgatgctttgttattaaagactcaagtctcaagtgatttaggcaaagtaatggttcacaggatctacaaagtttattacagataaagtacagaaataaccaatctacaaagatcattatcataaagaacacgagaaaatgaaaacggagtctgtaggtatctgtgtttgttgtgcaatatcactcaaatgggtacaaatgagtttctcatatcaattccaaatatacacatacccttgtatataaaaaatgatattagccagttgtaatactcatttagcatcttgattattagtggcaatataattatcttaacatagggcatgtaacaggacaaatgagataaaataatgacaaccaagtaagttttatccagtccatttctaaactgacaagaataccttattcaataccttatataggtcatctgacagatacttgagggctgtttgcacacatcaagtgtgttggcaggcagggaggggagcagtaaaagctgagggtgctttctcactaactagcagatgcagtaatgccacataagaaaactaaggactgaataaatgactttggcatctattctattttccctttttacttacatgtaaattacttttacagcctactgaaggacaggcaattctcatccccctcccgcttcatacatacgtgccacaagcacccaaacttgtcacttatgcaatggactgaccaaaacaaaacaaaaaacagaaatgttttttgaaagacacggattacccacattttgggagtgtaacagagctctgttacagatatgaaaacaaaatgtgacacaatgaagaagctgcataaaaatactgaaacctaaggtatctgtagtatataggatgtaccctggcttaccatagaaaagtctttagatagtaaatagcactaagtctaaaagcaaggagataagatttcatgttggatactgtttcaagaactgtatttggaatattaaaggaaatccttatgttagtaagtttaaaaaaccaaacatcatatacaaaataaaattttagtatgataaaacctagcttttcttattttttaaaaggacatcaaactatataattgctcaagagcaaagtttagtgttttggtgagctgtatttcatgttacttgtagcaattatatttggtgacatggatcgcattttccattttgctctttcttttgggaccatatctaatcaacagaagtactggaagcccaatgagtcaccgcagaattaattgctggagtcaggcaaatggcagtttaggagcttcagtaaaagaattgtagtgttttttacaagagaaaatccagtataattgcacatttacatacaaaaaaaagaggcacaaaacagattttcaccctctttccatagaagagctctaaattgataagcaaatggaacactcaatacagctgaaggaatgtggtagagcatctaccctccctaccttcataaggttactaggtacttgagggaaaataaatgctaccaggtaccagcaattgtaagcagtcaaaattcacagagaaagttaacattcattcaagctaaccctagacttctacttagtacagtgttacaacaatgtctgacattactaattattttcatacaaggaatactggaatatacatattcctaagcattaaaagcaagtgagtttggtgagcagacatcttggtatactcgcatctataagagtcaagcatcaccatcaaccatttttgctaacactgactttcttgggagttttctccaagtgcttcctaagatgaagtgtgtttgtgtggctcttatgcaccctgtaaaagtagaagttcttccccttactcaatgggagcaatcttaagtactggataataatagaaattctttacatgtaacctggggatgcccctactactttcaccccccaaattaggaactcaaccaaaaagatctattcaaatacaattcaaactcacttgtgtggttttaccaggaaacatgactgaatggtc

SEQ ID NO: 364383 - DNA, 2482 bp, Homo sapiens
ctcaccttttcgcctggcatccgggcccgctactcgcccactgggagcgccgtggcgcctggtgttcggcgcgagcccggcggggctgcaggttccgccctgctccgccgcgccccgcccgggctggggtaaaggccgcggccgggccatgcagtgtcctcctcagggagggcaggagagcctgaggagtggcggggccgccagagagcgaaatgtcatcagtgcagtcacaacaggagcagttgtcccagtcagatccatctccgtcaccaaactcatgtagttcctttgagctaatagacatggatgctggcagcttgtatgaaccagtttctccccattggttttattgtaagataatagattctaaggagacatggattcctttcaactctgaggattcacagcagctggaagaggcatatagctctggaaaaggttgtaatgggagagttgttcctactgatgggggcagatatgatgttcatttgggggagaggatgcggtatgctgtatactgggatgaactggcatcggaagtgagacgatgtacgtggttttacaagggggacaaagacaataagtatgttccctactcggagagcttcagccaagttttagaggaaacttacatgcttgctgtaactttggatgaatggaaaaagaaactggaatctcccaacagagaaattattattttacacaatccaaagcttatggtgcattaccagccagttgcagggtctgatgattggggttcaacacccacggagcagggtcgaccaagaactgtgaagagaggagttgagaacatctctgttgacattcattgtggagaacctttacaaatagatcacttggtttttgtagtccatgggattggaccagcttgtgatctccgctttcgaagcattgtacagtgtgttaatgattttcgcagtgtttccttgaacttgctacagacacattttaagaaagcccaagaaaatcagcagattgggagggtagaatttcttccagtcaactggcacagtcctttgcattctactggtgtggatgtagatctgcagcgaataaccctgcccagcattaaccgcctcaggcacttcaccaatgacacaattctggatgtcttcttctacaatagtcccacctactgtcagactattgtggacacagttgcttctgaaatgaaccgaatatacacactttttctacagaggaaccctgatttcaaagggggtgtatccattgctggtcatagtttaggttcgcttatattgtttgatatcctaacaaatcagaaagattctttgggggatattgacagtgaaaaggattcgctaaatattgtaatggatcaaggagatacacctacactagaggaagatttgaagaaacttcagctctctgaattctttgatatctttgagaaggagaaagtagataaggaagctctggctttatgtacagaccgagatcttcaggaaataggaattcctttaggaccaagaaagaagatattaaactatttcagcaccagaaaaaactcaatgggtattaagagaccagccccgcagcctgcttcaggggcaaacatccccaaagaatctgagttctgcagtagcagtaatactagaaatggtgactatctggatgttggcattgggcaggtgtctgtgaaatacccccggctcatctataaaccagagatattctttgcctttggatctcccattggaatgttccttactgtccgaggactaaaaagaattgatcccaactacagatttccaacgtgcaaaggtttcttcaatatttatcacccttttgatcctgtggcctataggattgaaccaatggtggtcccaggagtggaatttgagccaatgctgatcccacatcataaaggcaggaagcggatgcacttagaactgagagagggcttgaccaggatgagtatggaccttaagaacaacttgctaggttcgctgcggatggcctggaagtcttttaccagagctccataccctgccttacaagcttcagaaacaccagaagaaactgaagcagaacctgaatcaacttcagagaagcctagtgatgttaacacagaagagacctctgtggcagttaaagaagaagtcctgcctatcaatgtggggatgctgaatggaggccaacgcattgactatgtgctacaggagaagcctattgaaagttttaatgagtatttatttgctttacaaagccatctatgctactgggagtctgaagatacagtattgctcgtcctcaaagagatctaccaaacccagggtatcttccttgatcagcctttacagtaaaaatgacccatctatggctgcttaatgtaagttttaaaatgtcatatatatagtgtaattcttacatattaacatgttataatgaactatggagcctcaagctctttttaaatatactagctgttgcctgtcaa

SEQ ID NO: 364384 - DNA, 2482 bp, Homo sapiens
ctcaccttttcgcctggcatccgggcccgctactcgcccactgggagcgccgtggcgcctggtgttcggcgcgagcccggcggggctgcaggttccgccctgctccgccgcgccccgcccgggctggggtaaaggccgcggccgggccatgcagtgtcctcctcagggagggcaggagagcctgaggagtggcggggccgccagagagcgaaatgtcatcagtgcagtcacaacaggagcagttgtcccagtcagatccatctccgtcaccaaactcatgtagttcctttgagctaatagacatggatgctggcagcttgtatgaaccagtttctccccattggttttattgtaagataatagattctaaggagacatggattcctttcaactctgaggattcacagcagctggaagaggcatatagctctggaaaaggttgtaatgggagagttgttcctactgatgggggcagatatgatgttcatttgggggagaggatgcggtatgctgtatactgggatgaactggcatcggaagtgagacgatgtacgtggttttacaagggggacaaagacaataagtatgttccctactcggagagcttcagccaagttttagaggaaacttacatgcttgctgtaactttggatgaatggaaaaagaaactggaatctcccaacagagaaattattattttacacaatccaaagcttatggtgcattaccagccagttgcagggtctgatgattggggttcaacacccacggagcagggtcgaccaagaactgtgaagagaggagttgagaacatctctgttgacattcattgtggagaacctttacaaatagatcacttggtttttgtagtccatgggattggaccagcttgtgatctccgctttcgaagcattgtacagtgtgttaatgattttcgcagtgtttccttgaacttgctacagacacattttaagaaagcccaagaaaatcagcagattgggagggtagaatttcttccagtcaactggcacagtcctttgcattctactggtgtggatgtagatctgcagcgaataaccctgcccagcattaaccgcctcaggcacttcaccaatgacacaattctggatgtcttcttctacaatagtcccacctactgtcagactattgtggacacagttgcttctgaaatgaaccgaatatacacactttttctacagaggaaccctgatttcaaagggggtgtatccattgctggtcatagtttaggttcgcttatattgtttgatatcctaacaaatcagaaagattctttgggggatattgacagtgaaaaggattcgctaaatattgtaatggatcaaggagatacacctacactagaggaagatttgaagaaacttcagctctctgaattctttgatatctttgagaaggagaaagtagataaggaagctctggctttatgtacagaccgagatcttcaggaaataggaattcctttaggaccaagaaagaagatattaaactatttcagcaccagaaaaaactcaatgggtattaagagaccagccccgcagcctgcttcaggggcaaacatccccaaagaatctgagttctgcagtagcagtaatactagaaatggtgactatctggatgttggcattgggcaggtgtctgtgaaatacccccggctcatctataaaccagagatattctttgcctttggatctcccattggaatgttccttactgtccgaggactaaaaagaattgatcccaactacagatttccaacgtgcaaaggtttcttcaatatttatcacccttttgatcctgtggcctataggattgaaccaatggtggtcccaggagtggaatttgagccaatgctgatcccacatcataaaggcaggaagcggatgcacttagaactgagagagggcttgaccaggatgagtatggaccttaagaacaacttgctaggttcgctgcggatggcctggaagtcttttaccagagctccataccctgccttacaagcttcagaaacaccagaagaaactgaagcagaacctgaatcaacttcagagaagcctagtgctattgaaagttttaatgagtatttatttgctttacaaagccatctatgctactgggagtctgaagatacagtattgctcgtcctcaaagagatctaccaaacccagggtatcttccttgatcagcctttacagtaaaaatgacccatctatggctgcttaatacggacattgagggatccttccccagaaaatccacctgtttgttgctgcaattttcctctcctcagctgcgtcatttcctgcatgttgcctgccacttactcaccactggggtctttggaagataatcttcctctttggaaatgaatggaaaagcaaaaggccctattacttttaaccactggcttcatataaacacttgccatttttttctgcat

SEQ ID NO: 364385 - DNA, 2011 bp, Homo sapiens
ctcaccttttcgcctggcatccgggcccgctactcgcccactgggagcgccgtggcgcctggtgttcggcgcgagcccggcggggctgcaggttccgccctgctccgccgcgccccgcccgggctggggtaaaggccgcggccgggccatgcagtgtcctcctcagggagggcaggagagcctgaggagtggcggggccgccagagagcgaaatgtcatcagtgcagtcacaacaggagcagttgtcccagtcagatccatctccgtcaccaaactcatgtagttcctttgagctaatagacatggatgctggcagcttgtatgaaccagtttctccccattggttttattgtaagataatagattctaaggagacatggattcctttcaactctgaggattcacagcagctggaagaggcatatagctctggaaaaggttgtaatgggagagttgttcctactgatgggggcagatatgatgttcatttgggggagaggatgcggtatgctgtatactgggatgaactggcatcggaagtgagacgatgtacgtggttttacaagggggacaaagacaataagtatgttccctactcggagagcttcagccaagttttagaggaaacttacatgcttgctgtaactttggatgaatggaaaaagaaactggaatctcccaacagagaaattattattttacacaatccaaagcttatggtgcattaccagccagttgcagggtctgatgattggggttcaacacccacggagcagggtcgaccaagaactgtgaagagaggagttgagaacatctctgttgacattcattgtggtaatgttaatcgtttattttttcttacctttggatgtatttgtttactccttaaattgtgacctttttctgtggatttagattacctcaaggcttaaaaatcatctttaatcatatgggtttattccaagttgagattagcatcacttcgtctactaagaatcttaatagatgtaaaaatatcttttaaaacatatggtaggatgggtaaaatttggcaatactatccaggaagtcactaagtacagatgaactgatttagtcctaattccaagaagtgtgattccacctacttgactagaaatttatacctggtaataactccttgtccttgaagattttcaactaaggaaaactgtttttcagcaggacctgattatgcactgctatctaggtagggtcacttatggttttataatatatttaattggattataatattccttttttcttgtctcttggacaaaatcctagctttactgtaatttaaaaagatgagtttaaaatttcaggctttaaaaacataccaaacattgataaaaatgaaatactagataaaagtattttatcaatgttcagttgcctggattcaataactgtattatggttatgtaagataatatacttaggaaatacacattatggtattaaagggttaaagaggtatggtgcatgcaacctgatgatgtatgtagtctgctttctaatgattcagaaaaataaatgtgtgtgtgtgtgtgtgtacacacacagagaatcataaagcaaatgtaattgttaaaaagttgaatctctgtaaaaagtatgtgggagtgtctgtactatgctttctagttttctgtacatttctagttatttagaaataaaaagttttaaaaacctggctgcacgtggtggctcatgcctgtaatcccagcacttggggaggccaaggtggaaggatcacttgagcccaggagttcgagaccagcctgggcaatatggcgaaaccctgtctgtacaaaaaatacaaaaattaactgggcatggtggcacacatctgtagtctcagctattttggaggctgaggcaggaggatcactcgagcccagaaggttgaggctggaatgagtgtttatcatgccactgcactccagcctaggcgacagagtgagactctgtctcaaaaaaaaaagtc

SEQ ID NO: 364386 - DNA, 1102 bp, Homo sapiens
ttgtctgtatttatttttgcttattgttgtttttttatctctccttatttataatttccgttgttttatctttttttcggcatttcaatttttttttctcactcttgtctacgcctctataagtgcttttttccctgtcttcgacgtgggtgcgtggttgtgtttccccactggttgtattgtctgtctacgctcgtcgcactaccgtaggggtatagaaagctaggtttgtttacgtcctgctgttctacatggcatgtcgccgcaacggttgcctcaacgctggttttttttggcttcagttgtctgcaccggtgctgtttgttgactggacatgtttgtcctttcttagattctaattagctcgtgttgatattttccgttggtgcttcctattttgtgttgttctcccttgtgtctattcttcttattttcttctggtgtagtttcttctttatttttttttttctctcttttttgtttttttttttttttttttccttttttttttttttttttttttttttttttttttttaatttggaacatacaggacaatttattgaagtcaatctcaagcaaaatctgaaatcagtggaatgtcattaaaaacctttccaaattaatcctcacggaagcaaaaaacacattggaattccaaagtatttgtaaaataaaaaaggcaacatctcagtaaatataatgtacaaaaattatatgttcctaccagcacacacatcagtaaagaagcttaaatattacaggcaaccctaaatacactataactagtcaacaataagctatctatatacaggttaaccaagctttacacgtttcacactatgcaataaaacataggccaatcaacctcgtgccgaattcggcacgagatcagcaaggaaatttttgcacctcttgatgaaaggatgctgggagctgtccaagtcaagaggaggacaaagagcctgtcagtgacaaacaagatacccacacaggcgtccatcacaaaggtcaaacagtttgaaggctccacatcatttgttccgagatcacagtggatgctcgagcagcttcgccaggttaatggtttcgatcctaatgg

SEQ ID NO: 364387 - DNA, 890 bp, Homo sapiens
ctcaccttttcgcctggcatccgggcccgctactcgcccactgggagcgccgtggcgcctggtgttcggcgcgagcccggcggggctgcaggttccgccctgctccgccgcgccccgcccgggctggggtaaaggccgcggccgggccatgcagtgtcctcctcagggagggcaggagagcctgaggagtggcggggccgccagagagcgaaatgtcatcagtgcagtcacaacaggagcagttgtcccagtcagatccatctccgtcaccaaactcatgtagttcctttgagctaatagacatggatgctggcagcttgtatgaaccagtttctccccattggttttattgtaagataatagattctaaggagacatggattcctttcaactctgaggattcacagcagctggaagaggcatatagctctggaaaaggttgtaatgggagagttgttcctactgatgggggcagatatgatgttcatttgggggagaggatgcggtatgctgtatactgggatgaactggcatcggaagtgagacgatgtacgtggttttacaagggggacaaagacaataagtatgttccctactcggagagcttcagccaagttttagaggaaacttacatgcttgctgtaactttggatgaatggaaaaagaaactggaatctcccaacagagaaattattattttacacaatccaaaggtaaaacaaagcatttctcttgtcgggataaaaagttaattgcgctattagggagaactcaattggtttcttttgctaagcactctgtgtaggataacctttgtcaaattttatattgaattcacagttatgaaacttaaaaacttgtagccactactgttatttacccaactcagc

SEQ ID NO: 364388 - DNA, 764 bp, Homo sapiens
cggacgcgtgggtcgacccacgcgtcggaaccaatggtggtcccaggagtggaatttgagccaatgctgatcccacatcataaaggcaggaagcggatgcacttagaactgagagagggcttgaccaggatgagtatggaccttaagaacaacttgctaggttcgctgcggatggcctggaagtcttttaccagagctccataccctgccttacaagcttcagaaacaccagaagaaactgaagcagaacctgaatcaacttcagagaagcctagtgatgttaacacagaagagacctctgtggcagttaaagaagaagtcctgcctatcaatgtggggatgctgaatggaggccaacgcattgactatgtgctacaggagaagcctattgaaagttttaatgagtatttatttgctttacaaagccatctatgctactgggagtctgaagatacagtattgctcgtcctcaaagagatctaccaaacccagggtatcttccttgatcagcctttacagtaaaaatgacccatctatggctgcttaatacggacattgagggatccttccccagaaaatccacctgtttgttgctgcaattttcctctcctcagctgcgtcatttcctgcatgttgcctgccacttactcaccactggggtctttggaagataatcttcctctttggaaatgaatggaaaagcaaaaggccctattacttttaaccactggcttcatataaacacttgccatttttttctgcat

SEQ ID NO: 364389 - DNA, 4382 bp, Homo sapiens
agcggggtcgcgcgccgcgctccccgccgccagagagcgaaatgtcatcagtgcagtcacaacaggagcagttgtcccagtcagatccatctccgtcaccaaactcatgtagttcctttgagctaatagacatggatgctggcagcttgtatgaaccagtttctccccattggttttattgtaagataatagattctaaggagacatggattcctttcaactctgaggattcacagcagctggaagaggcatatagctctggaaaaggttgtaatgggagagttgttcctactgatgggggcagatatgatgttcatttgggggagaggatgcggtatgctgtatactgggatgaactggcatcggaagtgagacgatgtacgtggttttacaagggggacaaagacaataagtatgttccctactcggagagcttcagccaagttttagaggaaacttacatgcttgctgtaactttggatgaatggaaaaagaaactggaatctcccaacagagaaattattattttacacaatccaaagcttatggtgcattaccagccagttgcagggtctgatgattggggttcaacacccacggagcagggtcgaccaagaactgtgaagagaggagttgagaacatctctgttgacattcattgtggagaacctttacaaatagatcacttggtttttgtagtccatgggattggaccagcttgtgatctccgctttcgaagcattgtacagtgtgttaatgattttcgcagtgtttccttgaacttgctacagacacattttaagaaagcccaagaaaatcagcagattgggagggtagaatttcttccagtcaactggcacagtcctttgcattctactggtgtggatgtagatctgcagcgaataaccctgcccagcattaaccgcctcaggcacttcaccaatgacacaattctggatgtcttcttctacaatagtcccacctactgtcagactattgtggacacagttgcttctgaaatgaaccgaatatacacactttttctacagaggaaccctgatttcaaagggggtgtatccattgctggtcatagtttaggttcgcttatattgtttgatatcctaacaaatcagaaagattctttgggggatattgacagtgaaaaggattcgctaaatattgtaatggatcaaggagatacacctacactagaggaagatttgaagaaacttcagctctctgaattctttgatatctttgagaaggagaaagtagataaggaagctctggctttatgtacagaccgagatcttcaggaaataggaattcctttaggaccaagaaagaagatattaaactatttcagcaccagaaaaaactcaatgggtattaagagaccagccccgcagcctgcttcaggggcaaacatccccaaagaatctgagttctgcagtagcagtaatactagaaatggtgactatctggatgttggcattgggcaggtgtctgtgaaatacccccggctcatctataaaccagagatattctttgcctttggatctcccattggaatgttccttactgtccgaggactaaaaagaattgatcccaactacagatttccaacgtgcaaaggtttcttcaatatttatcacccttttgatcctgtggcctataggattgaaccaatggtggtcccaggagtggaatttgagccaatgctgatcccacatcataaaggcaggaagcggatgcacttagaactgagagagggcttgaccaggatgagtatggaccttaagaacaacttgctaggttcgctgcggatggcctggaagtcttttaccagagctccataccctgccttacaagcttcagaaacaccagaagaaactgaagcagaacctgaatcaacttcagagaagcctagtgatgttaacacagaagagacctctgtggcagttaaagaagaagtcctgcctatcaatgtggggatgctgaatggaggccaacgcattgactatgtgctacaggagaagcctattgaaagttttaatgagtatttatttgctttacaaagccatctatgctactgggagtctgaagatacagtattgctcgtcctcaaagagatctaccaaacccagggtatcttccttgatcagcctttacagtaaaaatgacccatctatggctgcttaatacggacattgagggatccttccccagaaaatccacctgtttgttgctgcaattttcctctcctcagctgcgtcatttcctgcatgttgcctgccacttactcaccactggggtctttggaagataatcttcctctttggaaatgaatggaaaagcaaaaggccctattacttttaaccactggcttcatataaacacttgccatttttttctgcatagctgggggtggtttgtgtctttaattctttgatgatagtttatagttgccacactttattgattagtacttgacagggtgtaaagcctattttgggtttgatttgttttgggtggggtagacatgtttttaaggaacttattgcttatctttagaaaatgttctagtttggaaacagattcttgagattcagaaggcattttggagtacacttatctcttgtttgtgttgaactgaaggctaagtctcagtggacatggaaaagacttttgggtgatttatttttgaacctgcatttctttcttatgtgtagtgtatgaagaaagactagaatgtagctttaaaaaagtgttgtttactctcttagaactgacagacttattgccagaaatcactgatgttcattgtttttgcaactgtttgagctgctgtaagagtctaaagttgacaagttagttcatgttaggtgcatctttataaagcaaagatgttgtatatcctaggcctcccttttatatttgatagaagttatttgctaatagcttctattcttacgttgaaaatagttgtaaaagctgatgaacctgaaattgtgtagcctctacaggctgctgaggttctaaataaaaccttttagtggtgcctttatggtgaaacagaatttgtcacctgccatttctacttgagctaaggtagtattgtgtatcctctttccttcttaggtatccataatccacaaagcatatttaaaaggctcttggcacgggcagcattggttgagcaggtaggtttggctagggggaaatgtttaacttgttctgaaagaaaaacttatgtctgtagggtccaagaaacagctattccagagtcagtgtcagctgagtctggaacatatgaagtgaggtttacttctaagaacacaagtgactgcacactaattttgtcaaggcatcttttcactactttgctgtagatttttcttcttcattggtcagtttgtcattgtctttgtagttctctttatgataatcctttatacttgctctcagattccacaggcctctgtttatagagtggcaaaggcaggcgagctgtggtttattgtttataaatttttttataaatgttatggtattcaaagccactgacatttaatatttactgaagccattccttagacagcagtggtctttatccctttctggaaagaaaaggaaaatgaagggtaattactgtcaccatggagattgtagaggtaaggttggggtataggtcaggcctggcctttctttgtcatctgcttatagtctagtgctaagtatgccactaagtttcagatatatggaatactttatttttttaaaggtatataaactctgagttattgagaattaagtattcactgtatattaaggggaagcttttgccaagttgtggtcttcaaatttatgtttactcttcctattggcagaataggtgctatttaagagtaaaccaaaggataagcagagggagtccctataaccaaagatggacagcatagccctggatagccagataaaccactctttgtattaagaaatgtttctttcctagtggtgaggggtgggtaactgtgaaagagctttatatcttgtctattcatggtattatagctgtatattcccaggatgataagcttgattgaaatcctgtatttagtcatatattatttgcgctgcttcatttgtatcatgtgcaatctctagaccaaccctatttttaaactctggtacagcatcattttgtacatattcccagctgcagaactagtatcacttatctcagcaaaagagattgtttgcatggaaagattaatagcactgattagatttctaatattttgcatttttgaaatgtttgttttctacgtgattatatttaaaactttagtaaatactaacatgaaaccataaaaaaaaat

SEQ ID NO: 364390 - DNA, 5456 bp, Homo sapiens
ttgtctgtatttatttttgcttattgttgtttttttatctctccttatttataatttccgttgttttatctttttttcggcatttcaatttttttttctcactcttgtctacgcctctataagtgcttttttccctgtcttcgacgtgggtgcgtggttgtgtttccccactggttgtattgtctgtctacgctcgtcgcactaccgtaggggtatagaaagctaggtttgtttacgtcctgctgttctacatggcatgtcgccgcaacggttgcctcaacgctggttttttttggcttcagttgtctgcaccggtgctgtttgttgactggacatgtttgtcctttcttagattctaattagctcgtgttgatattttccgttggtgcttcctattttgtgttgttctcccttgtgtctattcttcttattttcttctggtgtagtttcttctttatttttttttttctctcttttttgtttttttttttttttttttccttttttttttttttttttttttttttttttttttttaatttggaacatacaggacaatttattgaagtcaatctcaagcaaaatctgaaatcagtggaatgtcattaaaaacctttccaaattaatcctcacggaagcaaaaaacacattggaattccaaagtatttgtaaaataaaaaaggcaacatctcagtaaatataatgtacaaaaattatatgttcctaccagcacacacatcagtaaagaagcttaaatattacaggcaaccctaaatacactataactagtcaacaataagctatctatatacaggttaaccaagctttacacgtttcacactatgcaataaaacataggccaatcaacaaaatcctcaaaatattatatatcttgaagtctatgtggcaacatcaagtcattatacagtaatgccctagtggaacacccccagggaaaattaacactaatcccttagtgtcaagagcttctagccaagtcacagaaactcaaaagagattgactttagtgaatattgatgctttgttattaaagactcaagtctcaagtgatttaggcaaagtaatggttcacaggatctacaaagtttattacagataaagtacagaaataaccaatctacaaagatcattatcataaagaacacgagaaaatgaaaacggagtctgtaggtatctgtgtttgttgtgcaatatcactcaaatgggtacaaatgagtttctcatatcaattccaaatatacacatacccttgtatataaaaaatgatattagccagttgtaatactcatttagcatcttgattattagtggcaatataattatcttaacatagggcatgtaacaggacaaatgagataaaataatgacaaccaagtaagttttatccagtccatttctaaactgacaagaataccttattcaataccttatataggtcatctgacagatacttgagggctgtttgcacacatcaagtgtgttggcaggcagggaggggagcagtaaaagctgagggtgctttctcactaactagcagatgcagtaatgccacataagaaaactaaggactgaataaatgactttggcatctattctattttccctttttacttacatgtaaattacttttacagcctactgaaggacaggcaattctcatccccctcccgcttcatacatacgtgccacaagcacccaaacttgtcacttatgcaatggactgaccaaaacaaaacaaaaaacagaaatgttttttgaaagacacggattacccacattttgggagtgtaacgtaagtgcaattttttgttttgtttttttccctacatagacatagtaaaaggaaagaagatgtgcttggggagagggttgacaaaatgacaaaataaagaatgtacataaaaagtatttgtaaaaatgctggtatctcatgcaggagtctcttcctcaaatgtgttcaatcaatctgagctatctactgtgaacactctcccatttgcagaacttcacctttaatccacgctaaagaggataagagactaggctatttattttcaaaacagtttacaaaacaatgctttctacttcataaatgtaaaaagaaactaaaataaggagaatctgaagagtttcaagtacttaaaaaacctgaattcaatgaggcagaggtctcaatgttaaagtgactatttcgtacctgtggtaaacattatccccccccttaccctttaccaggagaaagggggttccctttctcctggtaccccaccccaggtaaaagttggtgagatttcagtatatacacatttccaacttttcagtatttgttaattcattgcaaagctgtctaattatagtattccctagtccatctgaaaatggaagcaagttctactttttgttttacaaataaccagagaccaattctaggtggccctaggccaaaggaaagtgtttccattcatcaattcatgtctgcaccaacttggacaactgggggaggctggatgcatcagccttgtgaaaagtaactttagtctacgctgcccagaaataaagcaactttccaatgtcctttttctcatatggaagtatagaatgtcagcttcccagctgtgagggctccatagccactgttttcttatcttgttaagaggacatggcatgtggcagccaacaccttgacttcaaggtgaatgctaaaggaagagctttgtatttaaaatgaaatgaaagacaagcaacaagtcctgggcagtccagagattgtattctctacagatggcctgtttgcaaacagtaggtctgggtttgacctattggaatacaccatgcaagaaactactcaaaaaggaaattccacttcatgaaccaggaaagttgtccaatagcctgtcccatctgagggtcctttacatgattagatactcaatatctcagttccacaacgttatttacagacatgttttcaaatattttgtgtaaatggcagaagggagctgggagcagtccccctgcctccattacttttttagctttcacatatgttcttgacttgtacagaaaatcccaaattttaaatgattccccaactcagccagttctatagatgaggccagatcatttttgagaattaagataagagtgggaacttgttaaaacaaaaatgaaaataaaacccacctcactcctgtatctctccctgattagacattaaagaggtgaatcactgcctctggctgcttcagccttccaggaatgaagagccatccaccttgcccttctcagccagccacaggcagctcttctgattcttccctcgcagcagtggcggtccagcccctccctcccctgcacagtgcctgagaaagtttcccaggatttcatctttagctcttactgatccagtttctgaagctttaggctgattatcaaaaatcttatgttcacttcttccttcaacaaattaacatgtggttaaaaaaaataccaccattagcccatgctgctttaagttatttcattgttggacaagaataaaaaccagccacttacactctgaccacatatagatttaaaagttaacaaataccaacttcagactatgagtgagcaatgtcttttggaatatttcattggtgtatcacaggcacagtgcatgtatactcatgcacacataaaggacaattttctctttctgcatctataatctgcaacttaaaaatatatcaaataggtcaacattgacgctatggaggtgtgaggagaactccttggcaccagcatgactaaaaccgctttttagaccattaaagaacattcatggccaaagacttcagaactatggttaccttttttttttgagatggagtctcgctctgtcacccaggctggagtgcagtgatgtgatcttggctcactgcaacctctgcctcctgagaaactgggactacaggtatgtgccaccatgcccggctcctttttgtatttttagcagagacagggtttcaccatgttggtcaggctggtctcaaactcctgacctcatgatctgcccacctcggcctcccaaagtgctgggattacaggtgtgagccactgcacctggcagctattttgttttctactctgatttctgaaatggtgaaacaatcctattaatcataatttttttttaatttcagcagagctctgttacagatatgaaaacaaaatgtgacacaatgaagaagctgcataaaaatactgaaacctaaggtatctgtagtatataggatgtaccctggcttaccatagaaaagtctttagatagtaaatagcactaagtctaaaagcaaggagataagatttcatgttggatactgtttcaagaactgtatttggaatattaaaggaaatccttatgttagtaagtttaaaaaaccaaacatcatatacaaaataaaattttagtatgataaaacctagcttttcttattttttaaaaggacatcaaactatataattgctcaagagcaaagtttagtgttttggtgagctgtatttcatgttacttgtagcaattatatttggtgacatggatcgcattttccattttgctctttcttttgggaccatatctaatcaacagaagtactggaagcccaatgagtcaccgcagaattaattgctggagtcaggcaaatggcagtttaggagcttcagtaaaagaattgtagtgttttttacaagagaaaatccagtataattgcacatttacatacaaaaaaaagaggcacaaaacagattttcaccctctttccatagaagagctctaaattgataagcaaatggaacactcaatacagctgaaggaatgtggtagagcatctaccctccctaccttcataaggttactaggtacttgagggaaaataaatgctaccaggtaccagcaattgtaagcagtcaaaattcacagagaaagttaacattcattcaagctaaccctagacttctacttagtacagtgttacaacaatgtctgacattactaattattttcatacaaggaatactggaatatacatattcctaagcattaaaagcaagtgagtttggtgagcagacatcttggtatactcgcatctataagagtcaagcatcaccatcaaccatttttgctaacactgactttcttgggagttttctccaagtgcttcctaagatgaagtgtgtttgtgtggctcttatgcaccctgtaaaagtagaagttcttccccttactcaatgggagcaatcttaagtactggataataatagaaattctttacatgtaacctggggatgcccctactactttcaccccccaaattaggaactcaaccaaaaagatctattcaaatacaattcaaactcacttgtgtggttttaccaggaaacatgactgaatggtc

SEQ ID NO: 364391 - DNA, 2916 bp, Homo sapiens
tattaatgagagatgcttttattttcctcctttgaggtgtctgtgaaatacccccggctcatctataaaccagagatattctttgcctttggatctcccattggaatgttccttactgtccgaggactaaaaagaattgatcccaactacagatttccaacgtgcaaaggtttcttcaatatttatcacccttttgatcctgtggcctataggattgaaccaatggtggtcccaggagtggaatttgagccaatgctgatcccacatcataaaggcaggaagcggatgcacttagaactgagagagggcttgaccaggatgagtatggaccttaagaacaacttgctaggttcgctgcggatggcctggaagtcttttaccagagctccataccctgccttacaagcttcagaaacaccagaagaaactgaagcagaacctgaatcaacttcagagaagcctagtgatgttaacacagaagagacctctgtggcagttaaagaagaagtcctgcctatcaatgtggggatgctgaatggaggccaacgcattgactatgtgctacaggagaagcctattgaaagttttaatgagtatttatttgctttacaaagccatctatgctactgggagtctgaagatacagtattgctcgtcctcaaagagatctaccaaacccagggtatcttccttgatcagcctttacagtaaaaatgacccatctatggctgcttaatacggacattgagggatccttccccagaaaatccacctgtttgttgctgcaattttcctctcctcagctgcgtcatttcctgcatgttgcctgccacttactcaccactggggtctttggaagataatcttcctctttggaaatgaatggaaaagcaaaaggccctattacttttaaccactggcttcatataaacacttgccatttttttctgcatagctgggggtggtttgtgtctttaattctttgatgatagtttatagttgccacactttattgattagtacttgacagggtgtaaagcctattttgggtttgatttgttttgggtggggtagacatgtttttaaggaacttattgcttatctttagaaaatgttctagtttggaaacagattcttgagattcagaaggcattttggagtacacttatctcttgtttgtgttgaactgaaggctaagtctcagtggacatggaaaagacttttgggtgatttatttttgaacctgcatttctttcttatgtgtagtgtatgaagaaagactagaatgtagctttaaaaaagtgttgtttactctcttagaactgacagacttattgccagaaatcactgatgttcattgtttttgcaactgtttgagctgctgtaagagtctaaagttgacaagttagttcatgttaggtgcatctttataaagcaaagatgttgtatatcctaggcctcccttttatatttgatagaagttatttgctaatagcttctattcttacgttgaaaatagttgtaaaagctgatgaacctgaaattgtgtagcctctacaggctgctgaggttctaaataaaaccttttagtggtgcctttatggtgaaacagaatttgtcacctgccatttctacttgagctaaggtagtattgtgtatcctctttccttcttaggtatccataatccacaaagcatatttaaaaggctcttggcacgggcagcattggttgagcaggtaggtttggctagggggaaatgtttaacttgttctgaaagaaaaacttatgtctgtagggtccaagaaacagctattccagagtcagtgtcagctgagtctggaacatatgaagtgaggtttacttctaagaacacaagtgactgcacactaattttgtcaaggcatcttttcactactttgctgtagatttttcttcttcattggtcagtttgtcattgtctttgtagttctctttatgataatcctttatacttgctctcagattccacaggcctctgtttatagagtggcaaaggcaggcgagctgtggtttattgtttataaatttttttataaatgttatggtattcaaagccactgacatttaatatttactgaagccattccttagacagcagtggtctttatccctttctggaaagaaaaggaaaatgaagggtaattactgtcaccatggagattgtagaggtaaggttggggtataggtcaggcctggcctttctttgtcatctgcttatagtctagtgctaagtatgccactaagtttcagatatatggaatactttatttttttaaaggtatataaactctgagttattgagaattaagtattcactgtatattaaggggaagcttttgccaagttgtggtcttcaaatttatgtttactcttcctattggcagaataggtgctatttaagagtaaaccaaaggataagcagagggagtccctataaccaaagatggacagcatagccctggatagccagataaaccactctttgtattaagaaatgtttctttcctagtggtgaggggtgggtaactgtgaaagagctttatatcttgtctattcatggtattatagctgtatattcccaggatgataagcttgattgaaatcctgtatttagtcatatattatttgcgctgcttcatttgtatcatgtgcaatctctagaccaaccctatttttaaactctggtacagcatcattttgtacatattcccagctgcagaactagtatcacttatctcagcaaaagagattgtttgcatggaaagattaatagcactgattagatttctaatattttgcatttttgaaatgtttgttttctacgtgattatatttaaaactttagtaaatactaacatgaaaccataaaaaaaaat

SEQ ID NO: 364392 - DNA, 2590 bp, Homo sapiens
ctcaccttttcgcctggcatccgggcccgctactcgcccactgggagcgccgtggcgcctggtgttcggcgcgagcccggcggggctgcaggttccgccctgctccgccgcgccccgcccgggctggggtaaaggccgcggccgggccatgcagtgtcctcctcagggagggcaggagagcctgaggagtggcggggccgccagagagcgaaatgtcatcagtgcagtcacaacaggagcagttgtcccagtcagatccatctccgtcaccaaactcatgtagttcctttgagctaatagacatggatgctggcagcttgtatgaaccagtttctccccattggttttattgtaagataatagattctaaggagacatggattcctttcaactctgaggattcacagcagctggaagaggcatatagctctggaaaaggttgtaatgggagagttgttcctactgatgggggcagatatgatgttcatttgggggagaggatgcggtatgctgtatactgggatgaactggcatcggaagtgagacgatgtacgtggttttacaagggggacaaagacaataagtatgttccctactcggagagcttcagccaagttttagaggaaacttacatgcttgctgtaactttggatgaatggaaaaagaaactggaatctcccaacagagaaattattattttacacaatccaaagcttatggtgcattaccagccagttgcagggtctgatgattggggttcaacacccacggagcagggtcgaccaagaactgtgaagagaggagttgagaacatctctgttgacattcattgtggagaacctttacaaatagatcacttggtttttgtagtccatgggattggaccagcttgtgatctccgctttcgaagcattgtacagtgtgttaatgattttcgcagtgtttccttgaacttgctacagacacattttaagaaagcccaagaaaatcagcagattgggagggtagaatttcttccagtcaactggcacagtcctttgcattctactggtgtggatgtagatctgcagcgaataaccctgcccagcattaaccgcctcaggcacttcaccaatgacacaattctggatgtcttcttctacaatagtcccacctactgtcagactattgtggacacagttgcttctgaaatgaaccgaatatacacactttttctacagaggaaccctgatttcaaagggggtgtatccattgctggtcatagtttaggttcgcttatattgtttgatatcctaacaaatcagaaagattctttgggggatattgacagtgaaaaggattcgctaaatattgtaatggatcaaggagatacacctacactagaggaagatttgaagaaacttcagctctctgaattctttgatatctttgagaaggagaaagtagataaggaagctctggctttatgtacagaccgagatcttcaggaaataggaattcctttaggaccaagaaagaagatattaaactatttcagcaccagaaaaaactcaatgggtattaagagaccagccccgcagcctgcttcaggggcaaacatccccaaagaatctgagttctgcagtagcagtaatactagaaatggtgactatctggatgttggcattgggcaggtgtctgtgaaatacccccggctcatctataaaccagagatattctttgcctttggatctcccattggaatgttccttactgtccgaggactaaaaagaattgatcccaactacagatttccaacgtgcaaaggtttcttcaatatttatcacccttttgatcctgtggcctataggattgaaccaatggtggtcccaggagtggaatttgagccaatgctgatcccacatcataaaggcaggaagcggatgcacttagaactgagagagggcttgaccaggatgagtatggaccttaagaacaacttgctaggttcgctgcggatggcctggaagtcttttaccagagctccataccctgccttacaagcttcagaaacaccagaagaaactgaagcagaacctgaatcaacttcagagaagcctagtgatgttaacacagaagagacctctgtggcagttaaagaagaagtcctgcctatcaatgtggggatgctgaatggaggccaacgcattgactatgtgctacaggagaagcctattgaaagttttaatgagtatttatttgctttacaaagccatctatgctactgggagtctgaagatacagtattgctcgtcctcaaagagatctaccaaacccagggtatcttccttgatcagcctttacagtaaaaatgacccatctatggctgcttaatacggacattgagggatccttccccagaaaatccacctgtttgttgctgcaattttcctctcctcagctgcgtcatttcctgcatgttgcctgccacttactcaccactggggtctttggaagataatcttcctctttggaaatgaatggaaaagcaaaaggccctattacttttaaccactggcttcatataaacacttgccatttttttctgcat

SEQ ID NO: 364393 - DNA, 2711 bp, Homo sapiens
ctcaccttttcgcctggcatccgggcccgctactcgcccactgggagcgccgtggcgcctggtgttcggcgcgagcccggcggggctgcaggttccgccctgctccgccgcgccccgcccgggctggggtaaaggccgcggccgggccatgcagtgtcctcctcagggagggcaggagagcctgaggagtggcggggccgccagagagcgaaatgtcatcagtgcagtcacaacaggagcagttgtcccagtcagatccatctccgtcaccaaactcatgtagttcctttgagctaatagacatggatgctggcagcttgtatgaaccagtttctccccattggttttattgtaagataatagattctaaggagacatggattcctttcaactctgaggattcacagcagctggaagaggcatatagctctggaaaaggttgtaatgggagagttgttcctactgatgggggcagatatgatgttcatttgggggagaggatgcggtatgctgtatactgggatgaactggcatcggaagtgagacgatgtacgtggttttacaagggggacaaagacaataagtatgttccctactcggagagcttcagccaagttttagaggaaacttacatgcttgctgtaactttggatgaatggaaaaagaaactggaatctcccaacagagaaattattattttacacaatccaaagcttatggtgcattaccagccagttgcagggtctgatgattggggttcaacacccacggagcagggtcgaccaagaactgtgaagagaggagttgagaacatctctgttgacattcattgtggagaacctttacaaatagatcacttggtttttgtagtccatgggattggaccagcttgtgatctccgctttcgaagcattgtacagtgtgttaatgattttcgcagtgtttccttgaacttgctacagacacattttaagaaagcccaagaaaatcagcagattgggagggtagaatttcttccagtcaactggcacagtcctttgcattctactggtgtggatgtagatctgcagcgaataaccctgcccagcattaaccgcctcaggcacttcaccaatgacacaattctggatgtcttcttctacaatagtcccacctactgtcagactattgtggacacagttgcttctgaaatgaaccgaatatacacactttttctacagaggaaccctgatttcaaagggggtgtatccattgctggtcatagtttaggttcgcttatattgtttgatatcctaacaaatcagaaagattctttgggggatattgacagtgaaaaggattcgctaaatattgtaatggatcaaggagatacacctacactagaggaagatttgaagaaacttcagctctctgaattctttgatatctttgagaaggagaaagtagataaggaagctctggctttatgtacagaccgagatcttcaggaaataggaattcctttaggaccaagaaagaagatattaaactatttcagcaccagaaaaaactcaatgggtattaagagaccagccccgcagcctgcttcaggggcaaacatccccaaagaatctgagttctgcagtagcagtaatactagaaatggtgactatctggatgttggcattgggcaggtgtctgtgaaatacccccggctcatctataaaccagagatattctttgcctttggatctcccattggaatgttccttactgtccgaggactaaaaagaattgatcccaactacagatttccaacgtgcaaaggtttcttcaatatttatcacccttttgatcctgtggcctataggattgaaccaatggtggtcccaggagtggaatttgagccaatgctgatcccacatcataaaggcaggaagcggatgcacttagaactgagagagggcttgaccaggatgagtatggaccttaagaacaacttgctaggttcgctgcggatggcctggaagtcttttaccagagctccataccctgccttacaagcttcagaaacaccagaagaaactgaagcagaacctgaatcaacttcagagaagcctagtgatgttaacacagaagagacctctgtggcagttaaagaagaagtcctgcctatcaatgtggggatgctgaatggaggccaacgcattgactatgtgctacaggagaagcctattgaaagttttaatgagtatttatttgctttacaaagccatctatgctactgggagtctgaagatacagtattgctcgtcctcaaagagatctaccaaacccagggtatcttccttgatcagcctttacagtaaaaatgacccatctatggctgcttaatgtatccataatccacaaagcatatttaaaaggctcttggcacgggcagcattggttgagcagagagctctgttacagatatgaaaacaaaatgtgacacaatgaagaagctgcataaaaatactgaaacctaagcaaaaacatttctttttcaagctgcaatggcactgaagcacaataaaaggcaagaaaagaccaagggaatttaaccctccacaaaagaatcccaaaccaaccaaatcaaacaaaaaccagacaccaccaactgcttctgcctgcatgaactggtttcccatttttgctttaataaggcagttccgatggcaaaggctgtaaaa

SEQ ID NO: 364394 - DNA, 1777 bp, Homo sapiens
ctcaccttttcgcctggcatccgggcccgctactcgcccactgggagcgccgtggcgcctggtgttcggcgcgagcccggcggggctgcaggttccgccctgctccgccgcgccccgcccgggctggggtaaaggccgcggccgggccatgcagtgtcctcctcagggagggcaggagagcctgaggagtggcggggccgccagagagcgaaatgtcatcagtgcagtcacaacaggagcagttgtcccagtcagatccatctccgtcaccaaactcatgtagttcctttgagctaatagacatggatgctggcagcttgtatgaaccagtttctccccattggttttattgtaagataatagattctaaggagacatggattcctttcaactctgaggattcacagcagctggaagaggcatatagctctggaaaaggttgtaatgggagagttgttcctactgatgggggcagatatgatgttcatttgggggagaggatgcggtatgctgtatactgggatgaactggcatcggaagtgagacgatgtacgtggttttacaagggggacaaagacaataagtatgttccctactcggagagcttcagccaagttttagaggaaacttacatgcttgctgtaactttggatgaatggaaaaagaaactggaatctcccaacagagaaattattattttacacaatccaaagcttatggtgcattaccagccagttgcagggtctgatgattggggttcaacacccacggagcagggtcgaccaagaactgtgaagagaggagttgagaacatctctgttgacattcattgtggagaacctttacaaatagatcacttggtttttgtagtccatgggattggaccagcttgtgatctccgctttcgaagcattgtacagtgtgttaatgattttcgcagtgtttccttgaacttgctacagacacattttaagaaagcccaagaaaatcagcagattgggagggtagaatttcttccagtcaactggcacagtcctttgcattctactggtgtggatgtagatctgcagcgaataaccctgcccagcattaaccgcctcaggcacttcaccaatgacacaattctggatgtcttcttctacaatagtcccacctactgtcagactattgtggacacagttgcttctgaaatgaaccgaatatacacactttttctacagaggaaccctgatttcaaagggggtgtatccattgctggtcatagtttaggttcgcttatattgtttgatatcctaacaaatcagaaagattctttgggggatattgacagtgaaaaggattcgctaaatattgtaatggatcaaggagatacacctacactagaggaagatttgaagaaacttcagctctctgaattctttgatatctttgagaaggagaaagtagataaggaagctctggctttatgtacagaccgagatcttcaggaaataggaattcctttaggaccaagaaagaagatattaaactatttcagcaccagaaaaaactcaatggtatgtgcctaatacagcttgttggactaaacaattctttgatgtccatagtgtgtccttgtgctttgtgggatgtttactctggggagccaagcagttttttggtaattgatctttggctctttttttttgagacagggtctcgctctgtcactcaggctggagtgcagtggtgtgatcccagctcattgcaacctctgcctcccgggttcaagcgattc

SEQ ID NO: 364395 - DNA, 3801 bp, Homo sapiens
gggaaacagaggcccgaggggaggcccggcctacaagacccagaagccttagcgccggcaaggcggccagaagtagctctgctctctccgcgaagaccctcgggggattccgcctccaccctttcccggatagagcgctatgcatgcagggacttgtagtctcaggctccccagccggctgggctgggcagcactccgggcggagtcgacgagcgcaggatgtgagctcacagcttgggactgctgaggggcaggcggctgcaggctaggggcggctcggagtccgctggccacccagctgagaggagaggcgcccccggggacgcactgagattatgaggctctggcctccactggccactcactcgtgaccctttccaccacggcggagccttccaagcctacctcctgccgtgtggtgatctacctgcagcgggagatgtcgggggacacctgcctgtgcccagcctcaggggccaagcccaagctcagtggcttcaagggaggagggttgggcaacaagtatgtccagctcaacgtgggcggctctctgtactacaccactgtgcgggccctgacccgccacgacaccatgctcaaggccatgttcagtgggcgcatggaggtgctgaccgacaaagaaggctggatcctcatagaccgttgtggaaagcactttggcaccattttgaattacctccgagatgacaccatcaccctccctcagaaccggcaagaaatcaaggaattgatggctgaagcaaagtattacctcatccaggggctggtgaatatgtgccagagtgccctgcaggacaagaaggactcctaccagcctgtgtgcaacatccccatcatcacatccctaaaggaggaggagcggctcatcgaatcctccaccaagcccgtggtgaagctgctgtacaacagaagcaacaacaagtattcctacaccagcaactctgacgaccacctgctgaaaaacatcgagctgtttgacaagctctccctgcgcttcaacggccgcgtgctcttcatcaaggatgtcattggtgacgagatctgctgctggtccttttatggccagggccgtaagctggcagaggtgtgctgtacctccatcgtgtatgccacggagaagaagcagaccaaggtggaattcccagaggcccgaatctatgaggagacactcaacgtcctactctatgagactccccgcgtccccgacaactccttgttggaggccacaagccgtagccgcagccaggcttcccccagtgaagatgaggagacctttgaactgcgggaccgtgtccgccgcatccacgtcaagcgctacagcacttacgatgaccggcagctcggccaccagtctacccatcgcgactgaccagaccctcagggagtcagggcacgggaggccctatctcccatcctgtggaacccgccccattggccaccccatgctgctgctgcctgggtctctgctctagcacccagaggcatgacaggccctgctcagaggtcagagggtctgggcagaggagggaccacattcccctgccttgcccctgagcacttctggagactgcgtcctgtcctatctgctcaccatcacccttcctgcccgacggagctgcttctgctccctggggcatatggactgacccacctcctgctgagaaccttcccctaggccctgtgcagaagggctactgccccttaggcctcagctgggggaaaggcagttctggtgctgtagaggccctggtgcagaaagtgggacgtcttttttcctaaggtgtttaagcacaggcttgataagtttggtttttaaaaaataatctaggaaatgaataattctaaatctagtaatgaggaaactgagcatttcttttgccctccagggtgccaagaccctacatatgacagaacccttggcccttctccatgcctgtgggatctgtttctttaaagcactttgtactgttattcaggaggttgataatctccttgacccatgtctttctaccctaatccccacttccctgcagaatcaatctgagggaggggataaagaggaagcaataaaaaaaaaacatccgacagagcagctctggctttgccagcctggccagcagctcagagtgcaccgaggagggaaggatggctaagctgggaccggcagtcctcacagggtgcctgtgagaaaggacattttacccccacatcatagtcacatcactgactcctaggtctagcacgactgctctttgtgattctcttgagtacccttggcttccagccatgctgtcctcacatacggtaaagccaaagagctgtcacatgggccagaaacatgagccacggcaggaagaccgtggagcccgtgggcactgcatggtgttggctggcatgcccatcagctgaggacagcaaactcccagcagcccctacagaggtggcacatgcttggccacacatctactccctgcccacaccatctatgctcttggttggtgctggctgggatggcggttctgcccagtggtgtctctgagcgcgggatgacaggagcaaccgaagcaccctgaaggccttcactccttgttgggtaactcagccatggagatgccaagcactagccaggaggtgagttcctctttagggctttggttttcattcctttttgtttggcttggccaaaccagaattcagcttatctgaattattttccaaaggaatgctgtcagggagggactgttctgccagcctaacaaagcaacgtagccacgtatagtacccactttctgctctttggagagaacacaggttatcaagttcatctctcttgactactcttatgatagctgatgccacagagcctatgggcaaatgccagacccagggttagacacaaggacctgaagtgacatgacggcgggacaggggaaatgtgactttctaattaggcattttatgttagtcacagtcttgaatgtataaacagcactaagactctcaggtcaggtaccttggtgatcagctactagttcttccagccctcattgaggtaacaagataaagacaaatccacttctttggccaaattcaggctttggctttatgactttcccacagagactggaatgcgtcagcctgagaccactggcctattttctcagctgccctcttgaggtcctttaacactcaaattcccagctccccactgaggtgttgtgatgcttgccttttgacctccccatcccctttagtccctgcttactactttgacattcacatcctcagtgtctcagtcttttttgccgagaaagcacagtagtctgggactgggcatttatcttctctgactgaaaatctctccttggtcttaaggaaaatactaacattgaactcactgacatgatcttagcttctttaatcagactttgtgacttaaaagtttgggggttttctttgaaagtttccagccctattcagaaagcaactcttggctgtgtgcatttttcaactccaagcagcccaggggtaagtaaacaaagtatggatgaaggtcagattttcttgtcagtttctgagaaacctggcagcctgctgttaacaacacaggccagtattgggttttattgaatttggtatgtgaccaaggtcggcctaaaggatggcgcaggtcctgggcaggaaagaatttttcctttatcacataactgtaatatttggttgctcagcataagtgatggaagcaaacactaatttctaataaaattgtgttaaactcaa

SEQ ID NO: 364396 - DNA, 763 bp, Homo sapiens
agcggccgctcgcgatctagaactagggagaagaagcagaccaaggtggaattcccagaggcccgaatctatgaggagacactcaacgtcctactctatgagactccccgcgtccccgacaactccttgttggaggccacaagccgtagccgcagccaggcttcccccagtgaagatgaggagacctttgaactgcgggaccgtgtccgccgcatccacgtcaagcgctacagcacttacgatgaccggcagctcggccaccagtctacccatcgcgactgaccagaccctcagggagtcagggcacgggaggccctatctcccatcctgtggaacccgccccattggccaccccatgctgctgctgcctgggtctctgctctagcacccagaggcatgacaggccctgctcagaggtcagagggtctgggcagaggagggaccacattcccctgccttgcccctgagcacttctggagactgcgtcctgtcctatctgctcaccatcacccttcctgcccgacggagctgcttctgctccctggggcatatggactgacccacctcctgctgagaaccttcccctaggccctgtgcagaagggctactgccccttaggcctcagctgggggaaaggcagttctggtgctgtagaggccctggtgcagaaagtgggacgtcttttttcctaaggtgtttaagcacaggcttgataagtttggtttttaaaaaataatctaggaaatgaataattctaaatcta

SEQ ID NO: 364397 - DNA, 408 bp, Homo sapiens
cagactcagacccgggctgcatactatcctcctagccaaattgctcaactaagaccaagtcctcgctggactgctcagggtgccagacctcatccattccaaaatatgcccgcaactcttggctgtgtgcatttttcaactccaagcagcccaggggtaagtaaacaaagtatggatgaaggtcagattttcttgtcagtttctgagaaacctggcagcctgctgttaacaacacaggccagtattgggttttattgaatttggtatgtgaccaaggtcggcctaaaggatggcgcaggtcctgggcaggaaagaatttttcctttatcacataactgtaatatttggttgctcagcataagtgatggaagcaaacactaatttctaataaaattgtgttaaactcaa

SEQ ID NO: 364398 - DNA, 4011 bp, Homo sapiens
gggaaacagaggcccgaggggaggcccggcctacaagacccagaagccttagcgccggcaaggcggccagaagtagctctgctctctccgcgaagaccctcgggggattccgcctccaccctttcccggatagagcgctatgcatgcagggacttgtagtctcaggctccccagccggctgggctgggcagcactccgggcggagtcgacgagcgcaggatgtgagctcacagcttgggactgctgaggggcaggcggctgcaggctaggggcggctcggagtccgctggccacccagctgagaggagaggcgcccccggggacgcactgagattatgaggctctggcctccactggccactcactcgtgaccctttccaccacggcggagccttccaagcctacctcctgccgtgtggtgatctacctgcagcgggagatgtcgggggacacctgcctgtgcccagcctcaggggccaagcccaagctcagtggcttcaagggaggagggttgggcaacaagtatgtccagctcaacgtgggcggctctctgtactacaccactgtgcgggccctgacccgccacgacaccatgctcaaggccatgttcagtgggcgcatggaggtgctgaccgacaaagaaggctggatcctcatagaccgttgtggaaagcactttggcaccattttgaattacctccgagatgacaccatcaccctccctcagaaccggcaagaaatcaaggaattgatggctgaagcaaagtattacctcatccaggggctggtgaatatgtgccagagtgccctgcaggacaagaaggactcctaccagcctgtgtgcaacatccccatcatcacatccctaaaggaggaggagcggctcatcgaatcctccaccaagcccgtggtgaagctgctgtacaacagaagcaacaacaagtattcctacaccagcaactctgacgaccacctgctgaaaaacatcgagctgtttgacaagctctccctgcgcttcaacggccgcgtgctcttcatcaaggatgtcattggtgacgagatctgctgctggtccttttatggccagggccgtaagctggcagaggtgtgctgtacctccatcgtgtatgccacggagaagaagcagaccaaggtggaattcccagaggcccgaatctatgaggagacactcaacgtcctactctatgagactccccgcgtccccgacaactccttgttggaggccacaagccgtagccgcagccaggcttcccccagtgaagatgaggagacctttgaactgcgggaccgtgtccgccgcatccacgtcaagcgctacagcacttacgatgaccggcagctcggccaccagtctacccatcgcgactgaccagaccctcagggagtcagggcacgggaggccctatctcccatcctgtggaacccgccccattggccaccccatgctgctgctgcctgggtctctgctctagcacccagaggcatgacaggccctgctcagaggtcagagggtctgggcagaggagggaccacattcccctgccttgcccctgagcacttctggagactgcgtcctgtcctatctgctcaccatcacccttcctgcccgacggagctgcttctgctccctggggcatatggactgacccacctcctgctgagaaccttcccctaggccctgtgcagaagggctactgccccttaggcctcagctgggggaaaggcagttctggtgctgtagaggccctggtgcagaaagtgggacgtcttttttcctaaggtgtttaagcacaggcttgataagtttggtttttaaaaaataatctaggaaatgaataattctaaatctagtaatgaggaaactgagcatttcttttgccctccagggtgccaagaccctacatatgacagaacccttggcccttctccatgcctgtgggatctgtttctttaaagcactttgtactgttattcaggaggttgataatctccttgacccatgtctttctaccctaatccccacttccctgcagaatcaatctgagggaggggataaagaggaagcaataaaaaaaaaacatccgacagagcagctctggctttgccagcctggccagcagctcagagtgcaccgaggagggaaggatggctaagctgggaccggcagtcctcacagggtgcctgtgagaaaggacattttacccccacatcatagtcacatcactgactcctaggtctagcacgactgctctttgtgattctcttgagtacccttggcttccagccatgctgtcctcacatacggtaaagccaaagagctgtcacatgggccagaaacatgagccacggcaggaagaccgtggagcccgtgggcactgcatggtgttggctggcatgcccatcagctgaggacagcaaactcccagcagcccctacagaggtggcacatgcttggccacacatctactccctgcccacaccatctatgctcttggttggtgctggctgggatggcggttctgcccagtggtgtctctgagcgcgggatgacaggagcaaccgaagcaccctgaaggccttcactccttgttgggtaactcagccatggagatgccaagcactagccaggaggtgagttcctctttagggctttggttttcattcctttttgtttggcttggccaaaccagaattcagcttatctgaattattttccaaaggaatgctgtcagggagggactgttctgccagcctaacaaagcaacgtagccacgtatagtacccactttctgctctttggagagaacacaggttatcaagttcatctctcttgactactcttatgatagctgatgccacagagcctatgggcaaatgccagacccagggttagacacaaggacctgaagtgacatgacggcgggacaggggaaatgtgactttctaattaggcattttatgttagtcacagtcttgaatgtataaacagcactaagactctcaggtcaggtaccttggtgatcagctactagttcttccagccctcattgaggtaacaagataaagacaaatccacttctttggccaaattcaggctttggctttatgactttcccacagagactggaatgcgtcagcctgagaccactggcctattttctcagctgccctcttgaggtcctttaacactcaaattcccagctccccactgaggtgttgtgatgcttgccttttgacctccccatcccctttagtccctgcttactactttgacattcacatcctcagtgtctcagtcttttttgccgagaaagcacagtagtctgggactgggcatttatcttctctgactgaaaatctctccttggtcttaaggaaaatactaacattgaactcactgacatgatcttagcttctttaatcagactttgtgacttaaaagtttgggggttttctttgaaagtttccagccctattcagaaagcaactcttggctgtgtgcatttttcaactccaagcagcccaggggtaagtaaacaaagtatggatgaaggtcagattttcttgtcagtttctgagaaacctggcagcctgctgttaacaacacaggccagtattgggttttattgaatttggtatgtgaccaaggtcggcctaaaggatggcgcaggtcctgggcaggaaagaatttttcctttatcacataactgtaatatttggttgctcagcataagtgatggaagcaaacactaatttctaataaaattgtgttaaactcaaaaaaaaaaaaaaaggggcgctagagtatctcagggcagttacctaccgttttgccagtgccatgggcgttaaagcagccggcgcgttccctcctgctggaactgactggtctggaggctcttctggggcatgccccccagtagcagataattagtagtacccgctttggtggattgcgtgtattccccgctacatctccccaaacaaatt

SEQ ID NO: 364399 - DNA, 2693 bp, Homo sapiens
agcggccgctcgcgatctagaactagggagaagaagcagaccaaggtggaattcccagaggcccgaatctatgaggagacactcaacgtcctactctatgagactccccgcgtccccgacaactccttgttggaggccacaagccgtagccgcagccaggcttcccccagtgaagatgaggagacctttgaactgcgggaccgtgtccgccgcatccacgtcaagcgctacagcacttacgatgaccggcagctcggccaccagtctacccatcgcgactgaccagaccctcagggagtcagggcacgggaggccctatctcccatcctgtggaacccgccccattggccaccccatgctgctgctgcctgggtctctgctctagcacccagaggcatgacaggccctgctcagaggtcagagggtctgggcagaggagggaccacattcccctgccttgcccctgagcacttctggagactgcgtcctgtcctatctgctcaccatcacccttcctgcccgacggagctgcttctgctccctggggcatatggactgacccacctcctgctgagaaccttcccctaggccctgtgcagaagggctactgccccttaggcctcagctgggggaaaggcagttctggtgctgtagaggccctggtgcagaaagtgggacgtcttttttcctaaggtgtttaagcacaggcttgataagtttggtttttaaaaaataatctaggaaatgaataattctaaatctagtaatgaggaaactgagcatttcttttgccctccagggtgccaagaccctacatatgacagaacccttggcccttctccatgcctgtgggatctgtttctttaaagcactttgtactgttattcaggaggttgataatctccttgacccatgtctttctaccctaatccccacttccctgcagaatcaatctgagggaggggataaagaggaagcaataaaaaaaaaacatccgacagagcagctctggctttgccagcctggccagcagctcagagtgcaccgaggagggaaggatggctaagctgggaccggcagtcctcacagggtgcctgtgagaaaggacattttacccccacatcatagtcacatcactgactcctaggtctagcacgactgctctttgtgattctcttgagtacccttggcttccagccatgctgtcctcacatacggtaaagccaaagagctgtcacatgggccagaaacatgagccacggcaggaagaccgtggagcccgtgggcactgcatggtgttggctggcatgcccatcagctgaggacagcaaactcccagcagcccctacagaggtggcacatgcttggccacacatctactccctgcccacaccatctatgctcttggttggtgctggctgggatggcggttctgcccagtggtgtctctgagcgcgggatgacaggagcaaccgaagcaccctgaaggccttcactccttgttgggtaactcagccatggagatgccaagcactagccaggaggtgagttcctctttagggctttggttttcattcctttttgtttggcttggccaaaccagaattcagcttatctgaattattttccaaaggaatgctgtcagggagggactgttctgccagcctaacaaagcaacgtagccacgtatagtacccactttctgctctttggagagaacacaggttatcaagttcatctctcttgactactcttatgatagctgatgccacagagcctatgggcaaatgccagacccagggttagacacaaggacctgaagtgacatgacggcgggacaggggaaatgtgactttctaattaggcattttatgttagtcacagtcttgaatgtataaacagcactaagactctcaggtcaggtaccttggtgatcagctactagttcttccagccctcattgaggtaacaagataaagacaaatccacttctttggccaaattcaggctttggctttatgactttcccacagagactggaatgcgtcagcctgagaccactggcctattttctcagctgccctcttgaggtcctttaacactcaaattcccagctccccactgaggtgttgtgatgcttgccttttgacctccccatcccctttagtccctgcttactactttgacattcacatcctcagtgtctcagtcttttttgccgagaaagcacagtagtctgggactgggcatttatcttctctgactgaaaatctctccttggtcttaaggaaaatactaacattgaactcactgacatgatcttagcttctttaatcagactttgtgacttaaaagtttgggggttttctttgaaagtttccagccctattcagaaagcaactcttggctgtgtgcatttttcaactccaagcagcccaggggtaagtaaacaaagtatggatgaaggtcagattttcttgtcagtttctgagaaacctggcagcctgctgttaacaacacaggccagtattgggttttattgaatttggtatgtgaccaaggtcggcctaaaggatggcgcaggtcctgggcaggaaagaatttttcctttatcacataactgtaatatttggttgctcagcataagtgatggaagcaaacactaatttctaataaaattgtgttaaactcaa

SEQ ID NO: 364400 - DNA, 1871 bp, Homo sapiens
gggaaacagaggcccgaggggaggcccggcctacaagacccagaagccttagcgccggcaaggcggccagaagtagctctgctctctccgcgaagaccctcgggggattccgcctccaccctttcccggatagagcgctatgcatgcagggacttgtagtctcaggctccccagccggctgggctgggcagcactccgggcggagtcgacgagcgcaggatgtgagctcacagcttgggactgctgaggggcaggcggctgcaggctaggggcggctcggagtccgctggccacccagctgagaggagaggcgcccccggggacgcactgagattatgaggctctggcctccactggccactcactcgtgaccctttccaccacggcggagccttccaagcctacctcctgccgtgtggtgatctacctgcagcgggagatgtcgggggacacctgcctgtgcccagcctcaggggccaagcccaagctcagtggcttcaagggaggagggttgggcaacaagtatgtccagctcaacgtgggcggctctctgtactacaccactgtgcgggccctgacccgccacgacaccatgctcaaggccatgttcagtgggcgcatggaggtgctgaccgacaaagaaggctggatcctcatagaccgttgtggaaagcactttggcaccattttgaattacctccgagatgacaccatcaccctccctcagaaccggcaagaaatcaaggaattgatggctgaagcaaagtattacctcatccaggggctggtgaatatgtgccagagtgccctgcaggacaagaaggactcctaccagcctgtgtgcaacatccccatcatcacatccctaaaggaggaggagcggctcatcgaatcctccaccaagcccgtggtgaagctgctgtacaacagaagcaacaacaagtattcctacaccagcaactctgacgaccacctgctgaaaaacatcgagctgtttgacaagctctccctgcgcttcaacggccgcgtgctcttcatcaaggatgtcattggtgacgagatctgctgctggtccttttatggccagggccgtaagctggcagaggtgtgctgtacctccatcgtgtatgccacggagaagaagcagaccaaggtggaattcccagaggcccgaatctatgaggagacactcaacgtcctactctatgagactccccgcgtccccgacaactccttgttggaggccacaagccgtagccgcagccaggcttcccccagtgaagatgaggagacctttgaactgcgggaccgtgtccgccgcatccacgtcaagcgctacagcacttacgatgaccggcagctcggccaccagtctacccatcgcgactgaccagaccctcagggagtcagggcacgggaggccctatctcccatcctgtggaacccgccccattggccaccccatgctgctgctgcctgggtctctgctctagcacccagaggcatgacaggccctgctcagaggtcagagggtctgggcagaggagggaccacattcccctgccttgcccctgagcacttctggagactgcgtcctgtcctatctgctcaccatcacccttcctgcccgacggagctgcttctgctccctggggcatatggactgacccacctcctgctgagaaccttcccctaggccctgtgcagaagggctactgccccttaggcctcagctgggggaaaggcagttctggtgctgtagaggccctggtgcagaaagtgggacgtcttttttcctaaggtgtttaagcacaggcttgataagtttggtttttaaaaaataatctaggaaatgaataattctaaatcta

SEQ ID NO: 364401 - DNA, 1048 bp, Homo sapiens
gggaaacagaggcccgaggggaggcccggcctacaagacccagaagccttagcgccggcaaggcggccagaagtagctctgctctctccgcgaagaccctcgggggattccgcctccaccctttcccggatagagcgctatgcatgcagggacttgtagtctcaggctccccagccggctgggctgggcagcactccgggcggagtcgacgagcgcaggatgtgagctcacagcttgggactgctgaggggcaggcggctgcaggctaggggcggctcggagtccgctggccacccagctgagaggagaggcgcccccggggacgcactgagattatgaggctctggcctccactggccactcactcgtgaccctttccaccacggcggagccttccaagcctacctcctgccgtgtggtgatctacctgcagcgggagatgtcgggggacacctgcctgtgcccagcctcaggggccaagcccaagctcagtggcttcaagggaggagggttgggcaacaagtatgtccagctcaacgtgggcggctctctgtactacaccactgtgcgggccctgacccgccacgacaccatgctcaaggccatgttcagtgggcgcatggaggtgctgaccgacaaagaaggctggatcctcatagaccgttgtggaaagcactttggcaccattttgaattacctccgagatgacaccatcaccctccctcagaaccggcaagaaatcaaggaattgatggctgaagcaaagtattacctcatccaggggctggtgaatatgtgccagagtgccctgcaggacaagaaggactcctaccagcctgtgtgcaacatccccatcatcacatccctaaaggaggaggagcggctcatcgaatcctccaccaagcccgtggtgaagctgctgtacaacagaagcaacaacaagtattcctacaccagcaactctgacgaccacctgctgaaaaacatcgagcttgtgactgggacagtgaaaataaacgattggctcttatcaatcaaaaaaaaaaaa

SEQ ID NO: 364402 - DNA, 1068 bp, Homo sapiens
gggaaacagaggcccgaggggaggcccggcctacaagacccagaagccttagcgccggcaaggcggccagaagtagctctgctctctccgcgaagaccctcgggggattccgcctccaccctttcccggatagagcgctatgcatgcagggacttgtagtctcaggctccccagccggctgggctgggcagcactccgggcggagtcgacgagcgcaggatgtgagctcacagcttgggactgctgaggggcaggcggctgcaggctaggggcggctcggagtccgctggccacccagctgagaggagaggcgcccccggggacgcactgagattatgaggctctggcctccactggccactcactcgtgaccctttccaccacggcggagccttccaagcctacctcctgccgtgtggtgatctacctgcagcgggagatgtcgggggacacctgcctgtgcccagcctcaggggccaagcccaagctcagtggcttcaagggaggagggttgggcaacaagtatgtccagctcaacgtgggcggctctctgtactacaccactgtgcgggccctgacccgccacgacaccatgctcaaggccatgttcagtgggcgcatggaggtgctgaccgacaaagaaggctggatcctcatagaccgttgtggaaagcactttggcaccattttgaattacctccgagatgacaccatcaccctccctcagaaccggcaagaaatcaaggaattgatggctgaagcaaagtattaccaactcttggctgtgtgcatttttcaactccaagcagcccaggggtaagtaaacaaagtatggatgaaggtcagattttcttgtcagtttctgagaaacctggcagcctgctgttaacaacacaggccagtattgggttttattgaatttggtatgtgaccaaggtcggcctaaaggatggcgcaggtcctgggcaggaaagaatttttcctttatcacataactgtaatatttggttgctcagcataagtgatggaagcaaacactaatttctaataaaattgtgttaaactcaa

SEQ ID NO: 364403 - DNA, 2090 bp, Homo sapiens
gggaaacagaggcccgaggggaggcccggcctacaagacccagaagccttagcgccggcaaggcggccagaagtagctctgctctctccgcgaagaccctcgggggattccgcctccaccctttcccggatagagcgctatgcatgcagggacttgtagtctcaggctccccagccggctgggctgggcagcactccgggcggagtcgacgagcgcaggatgtgagctcacagcttgggactgctgaggggcaggcggctgcaggctaggggcggctcggagtccgctggccacccagctgagaggagaggcgcccccggggacgcactgagattatgaggctctggcctccactggccactcactcgtgaccctttccaccacggcggagccttccaagcctacctcctgccgtgtggtgatctacctgcagcgggagatgtcgggggacacctgcctgtgcccagcctcaggggccaagcccaagctcagtggcttcaagggaggagggttgggcaacaagtatgtccagctcaacgtgggcggctctctgtactacaccactgtgcgggccctgacccgccacgacaccatgctcaaggccatgttcagtgggcgcatggaggtgctgaccgacaaagaaggctggatcctcatagaccgttgtggaaagcactttggcaccattttgaattacctccgagatgacaccatcaccctccctcagaaccggcaagaaatcaaggaattgatggctgaagcaaagtattacctcatccaggggctggtgaatatgtgccagagtgccctgcaggacaagaaggactcctaccagcctgtgtgcaacatccccatcatcacatccctaaaggaggaggagcggctcatcgaatcctccaccaagcccgtggtgaagctgctgtacaacagaagcaacaacaagtattcctacaccagcaactctgacgaccacctgctgaaaaacatcgagctgtttgacaagctctccctgcgcttcaacggccgcgtgctcttcatcaaggatgtcattggtgacgagatctgctgctggtccttttatggccagggccgtaagctggcagaggtgtgctgtacctccatcgtgtatgccacggagaagaagcagaccaaggtggaattcccagaggcccgaatctatgaggagacactcaacgtcctactctatgagactccccgcgtccccgacaactccttgttggaggccacaagccgtagccgcagccaggcttcccccagtgaagatgaggagacctttgaactgcgggaccgtgtccgccgcatccacgtcaagcgctacagcacttacgatgaccggcagctcggccaccagtctacccatcgcgactgaccagaccctcagggagtcagggcacgggaggccctatctcccatcctgtggaacccgccccattggccaccccatgctgctgctgcctgggtctctgctctagcacccagaggcatgacaggccctgctcagaggtcagagggtctgggcagaggagggaccacattcccctgccttgcccctgagcacttctggagactgcgtcctgtcctatctgctcaccatcacccttcctgcccgacggagctgcttctgctccctggggcatatggactgacccacctcctgctgagaaccttcccctaggccctgtgcagaagggctactgccccttaggcctcagctgggggaaaggcagttctggtgctgtagaggccctggtgcagaaagtgggacgtcttttttcctaaggtgtttaagcacaggcttgataagtttggtttttaaaaaataatctaggaaatgaataattctaaatctagtaatgaggaaactgagcatttcttttgccctccagggtgccaagaccctacatatgacagaacccttggcccttctccatgcctgtgggatctgtttctttaaagcactttgtactgttattcaggaggttgataatctccttgacccatgtctttctaccctaatccccacttccctgcagaatcaatctgagggaggggataaagaggaagcaata

SEQ ID NO: 364404 - DNA, 3562 bp, Homo sapiens
aagaaatatttataggtcgttactcgtgtttttaatttcagttacgatgggctagccattctgagaagataggtggccctggcacacactgagattatgaggctctggcctccactggccactcactcgtgaccctttccaccacggcggagccttccaagcctacctcctgccgtgtggtgatctacctgcagcgggagatgtcgggggacacctgcctgtgcccagcctcaggggccaagcccaagctcagtggcttcaagggaggagggttgggcaacaagtatgtccagctcaacgtgggcggctctctgtactacaccactgtgcgggccctgacccgccacgacaccatgctcaaggccatgttcagtgggcgcatggaggtgctgaccgacaaagaaggctggatcctcatagaccgttgtggaaagcactttggcaccattttgaattacctccgagatgacaccatcaccctccctcagaaccggcaagaaatcaaggaattgatggctgaagcaaagtattacctcatccaggggctggtgaatatgtgccagagtgccctgcaggacaagaaggactcctaccagcctgtgtgcaacatccccatcatcacatccctaaaggaggaggagcggctcatcgaatcctccaccaagcccgtggtgaagctgctgtacaacagaagcaacaacaagtattcctacaccagcaactctgacgaccacctgctgaaaaacatcgagctgtttgacaagctctccctgcgcttcaacggccgcgtgctcttcatcaaggatgtcattggtgacgagatctgctgctggtccttttatggccagggccgtaagctggcagaggtgtgctgtacctccatcgtgtatgccacggagaagaagcagaccaaggtggaattcccagaggcccgaatctatgaggagacactcaacgtcctactctatgagactccccgcgtccccgacaactccttgttggaggccacaagccgtagccgcagccaggcttcccccagtgaagatgaggagacctttgaactgcgggaccgtgtccgccgcatccacgtcaagcgctacagcacttacgatgaccggcagctcggccaccagtctacccatcgcgactgaccagaccctcagggagtcagggcacgggaggccctatctcccatcctgtggaacccgccccattggccaccccatgctgctgctgcctgggtctctgctctagcacccagaggcatgacaggccctgctcagaggtcagagggtctgggcagaggagggaccacattcccctgccttgcccctgagcacttctggagactgcgtcctgtcctatctgctcaccatcacccttcctgcccgacggagctgcttctgctccctggggcatatggactgacccacctcctgctgagaaccttcccctaggccctgtgcagaagggctactgccccttaggcctcagctgggggaaaggcagttctggtgctgtagaggccctggtgcagaaagtgggacgtcttttttcctaaggtgtttaagcacaggcttgataagtttggtttttaaaaaataatctaggaaatgaataattctaaatctagtaatgaggaaactgagcatttcttttgccctccagggtgccaagaccctacatatgacagaacccttggcccttctccatgcctgtgggatctgtttctttaaagcactttgtactgttattcaggaggttgataatctccttgacccatgtctttctaccctaatccccacttccctgcagaatcaatctgagggaggggataaagaggaagcaataaaaaaaaaacatccgacagagcagctctggctttgccagcctggccagcagctcagagtgcaccgaggagggaaggatggctaagctgggaccggcagtcctcacagggtgcctgtgagaaaggacattttacccccacatcatagtcacatcactgactcctaggtctagcacgactgctctttgtgattctcttgagtacccttggcttccagccatgctgtcctcacatacggtaaagccaaagagctgtcacatgggccagaaacatgagccacggcaggaagaccgtggagcccgtgggcactgcatggtgttggctggcatgcccatcagctgaggacagcaaactcccagcagcccctacagaggtggcacatgcttggccacacatctactccctgcccacaccatctatgctcttggttggtgctggctgggatggcggttctgcccagtggtgtctctgagcgcgggatgacaggagcaaccgaagcaccctgaaggccttcactccttgttgggtaactcagccatggagatgccaagcactagccaggaggtgagttcctctttagggctttggttttcattcctttttgtttggcttggccaaaccagaattcagcttatctgaattattttccaaaggaatgctgtcagggagggactgttctgccagcctaacaaagcaacgtagccacgtatagtacccactttctgctctttggagagaacacaggttatcaagttcatctctcttgactactcttatgatagctgatgccacagagcctatgggcaaatgccagacccagggttagacacaaggacctgaagtgacatgacggcgggacaggggaaatgtgactttctaattaggcattttatgttagtcacagtcttgaatgtataaacagcactaagactctcaggtcaggtaccttggtgatcagctactagttcttccagccctcattgaggtaacaagataaagacaaatccacttctttggccaaattcaggctttggctttatgactttcccacagagactggaatgcgtcagcctgagaccactggcctattttctcagctgccctcttgaggtcctttaacactcaaattcccagctccccactgaggtgttgtgatgcttgccttttgacctccccatcccctttagtccctgcttactactttgacattcacatcctcagtgtctcagtcttttttgccgagaaagcacagtagtctgggactgggcatttatcttctctgactgaaaatctctccttggtcttaaggaaaatactaacattgaactcactgacatgatcttagcttctttaatcagactttgtgacttaaaagtttgggggttttctttgaaagtttccagccctattcagaaagcaactcttggctgtgtgcatttttcaactccaagcagcccaggggtaagtaaacaaagtatggatgaaggtcagattttcttgtcagtttctgagaaacctggcagcctgctgttaacaacacaggccagtattgggttttattgaatttggtatgtgaccaaggtcggcctaaaggatggcgcaggtcctgggcaggaaagaatttttcctttatcacataactgtaatatttggttgctcagcataagtgatggaagcaaacactaatttctaataaaattgtgttaaactcaa

SEQ ID NO: 364405 - DNA, 1493 bp, Homo sapiens
aagggttacggctaggtagcgaggccgggttttaatcggccgaggcagatcatgagccacggcaggaagaccgtggagcccgtgggcactgcatggtgttggctggcatgcccatcagctgaggacagcaaactcccagcagcccctacagaggtggcacatgcttggccacacatctactccctgcccacaccatctatgctcttggttggtgctggctgggatggcggttctgcccagtggtgtctctgagcgcgggatgacaggagcaaccgaagcaccctgaaggccttcactccttgttgggtaactcagccatggagatgccaagcactagccaggaggtgagttcctctttagggctttggttttcattcctttttgtttggcttggccaaaccagaattcagcttatctgaattattttccaaaggaatgctgtcagggagggactgttctgccagcctaacaaagcaacgtagccacgtatagtacccactttctgctctttggagagaacacaggttatcaagttcatctctcttgactactcttatgatagctgatgccacagagcctatgggcaaatgccagacccagggttagacacaaggacctgaagtgacatgacggcgggacaggggaaatgtgactttctaattaggcattttatgttagtcacagtcttgaatgtataaacagcactaagactctcaggtcaggtaccttggtgatcagctactagttcttccagccctcattgaggtaacaagataaagacaaatccacttctttggccaaattcaggctttggctttatgactttcccacagagactggaatgcgtcagcctgagaccactggcctattttctcagctgccctcttgaggtcctttaacactcaaattcccagctccccactgaggtgttgtgatgcttgccttttgacctccccatcccctttagtccctgcttactactttgacattcacatcctcagtgtctcagtcttttttgccgagaaagcacagtagtctgggactgggcatttatcttctctgactgaaaatctctccttggtcttaaggaaaatactaacattgaactcactgacatgatcttagcttctttaatcagactttgtgacttaaaagtttgggggttttctttgaaagtttccagccctattcagaaagcaactcttggctgtgtgcatttttcaactccaagcagcccaggggtaagtaaacaaagtatggatgaaggtcagattttcttgtcagtttctgagaaacctggcagcctgctgttaacaacacaggccagtattgggttttattgaatttggtatgtgaccaaggtcggcctaaaggatggcgcaggtcctgggcaggaaagaatttttcctttatcacataactgtaatatttggttgctcagcataagtgatggaagcaaacactaatttctaataaaattgtgttaaactcaa

SEQ ID NO: 364406 - DNA, 1253 bp, Homo sapiens
gggaaacagaggcccgaggggaggcccggcctacaagacccagaagccttagcgccggcaaggcggccagaagtagctctgctctctccgcgaagaccctcgggggattccgcctccaccctttcccggatagagcgctatgcatgcagggacttgtagtctcaggctccccagccggctgggctgggcagcactccgggcggagtcgacgagcgcaggatgtgagctcacagcttgggactgctgaggggcaggcggctgcaggctaggggcggctcggagtccgctggccacccagctgagaggagaggcgcccccggggacgcactgagattatgaggctctggcctccactggccactcactcgtgaccctttccaccacggcggagccttccaagcctacctcctgccgtgtggtgatctacctgcagcgggagatgtcgggggacacctgcctgtgcccagcctcaggggccaagcccaagctcagtggcttcaagggaggagggttgggcaacaagtatgtccagctcaacgtgggcggctctctgtactacaccactgtgcgggccctgacccgccacgacaccatgctcaaggccatgttcagtgggcgcatggaggtgctgaccgacaaagaaggctggatcctcatagaccgttgtggaaagcactttggcaccattttgaattacctccgagatgacaccatcaccctccctcagaaccggcaagaaatcaaggaattgatggctgaagcaaagtattacctcatccaggggctggtgaatatgtgccagagtgccctgcaggacaagaaggactcctaccagcctgtgtgcaacatccccatcatcacatccctaaaggaggaggagcggctcatcgaatcctccaccaagcccgtggtgaagctgctgtacaacagaagcaacaacaagtattcctacaccagcaactcttggctgtgtgcatttttcaactccaagcagcccaggggtaagtaaacaaagtatggatgaaggtcagattttcttgtcagtttctgagaaacctggcagcctgctgttaacaacacaggccagtattgggttttattgaatttggtatgtgaccaaggtcggcctaaaggatggcgcaggtcctgggcaggaaagaatttttcctttatcacataactgtaatatttggttgctcagcataagtgatggaagcaaacactaatttctaataaaattgtgttaaactcaa

SEQ ID NO: 364407 - DNA, 2155 bp, Homo sapiens
ccatcctgccattccccttggggctggaaaagaaaggtttctaacttgctttcaaagcgagttcctatcagccccgttgtgggcaaggtggggctgctacccgttctagagggcctgctcagtggagctggggccaagctgggcctctccagtcggctgcgggggcgcacccccgggcgctgggagtccaggcccggttttgcatcaggccctgccgaggtgtttcctcctcctccgtgtggggcagctgctggctgggctgcctgttgagtcagccttcttccctcacggctcttctcccggtccctgaaactcggctgccaggggagctggagccacctgcgaaggtgtcctcccatactggacccctacaggaagctccgtgtgcccagctggggcacagccccagctgatgccccagaggggccacccatcgcaagaggggctttgggctctgccctccctccccatggcgcatgggccaaagcctgagactgaaggactgttggacctcagcttcctgacagaggaggagcaggaggccattgctggcgtcctccaacgagatgcccgcctgcgccagctggaggaggggcgggtcagcaagctccgggcctcagtggcagaccctgggcagctgaagatcctgacaggggactggttccaggaagcacgctcccagcggcaccacaatgcccacttcggctctgaccttgtccgagcgtctatgcgcaggaagaagagcaccaggggagaccaggctccaggccacgacagggaggctgaggctgctgtgaaagagaaggaagaggggccagagcccaggctcaccattgatgaggcccctcaggagaggctcagggagactgaggcttcagatcctgaggaggcgtcccaggcccaggaagatcctggccaaggagaccaacaggtctgtgccgaggaggctgacccggagctggagcccgcgtcggggggagagcaggagccgcggccccagcaagcccagaccaaggccgcgtcccagatcctggagaatggggaggaggccccggggcccgacccctctctcgaccgcatgctcagcagcagctcctcggtgtccagccttaactcctccacgctgagcggcagccagatgagcctgtcaggcgacgcggaggcggtgcaggtccgcggctccgtgcacttcgcgctgcactacgagccgggcgccgccgagctgcgcgtgcacgtgatccagtgccagggcctggccgccgcccggcgccgccgctcggacccctacgtcaaaagctacctcctcccggataagcagagcaagcgcaagacggcggtgaagaaacggaatctgaatccggttttcaacgagactctccggtactccgtcccgcaggccgagcttcagggccgcgtgctgagcctgtctgtgtggcaccgcgaaagcctgggtcgcaacatctttctgggcgaagttgaagtgcccctggacacgtgggactggggctctgagcccacctggctccccctgcagccccgggtcccaccctctcccgacgaccttccgagccgcgggttactcgccctgtccctcaagtacgtccccgccggctccgagggcgcaggactgcccccgagcggggagctgcacttctgggtgaaggaggctcgggacctcctgccgctgcgggcaggatccctggacacttacgtacaatgcttcgtgctgcctgatgacagccgggccagccgccagcgtacaagggttgtgcgacgcagcctcagccctgtgttcaatcacaccatggtgtacgatggctttgggcctgctgacctgcgccaggcttgtgccgagctctccctctgggaccatggggccctggccaaccgccagctggggggcacacgcctcagcctgggcaccggcagcagctatgggctgcaggtgccctggatggattccacacctgaggagaagcagctgtggcaagccctcctggagcagccgtgcgagtgggtggatggccttctacccctcagaaccaacctggcccccaggacgtagccccaccaagcctctctctctggacccccatctcagggcctgcccttggctaaagtcaataaagtctattctaagagcaaaaaaaaaaaa

SEQ ID NO: 364408 - DNA, 438 bp, Homo sapiens
cctgagacaggccctgggacaggccctgggagatgggggctcagtgtgtggccctggatacctctctgtcctttcctgagctttgatatctactgagaactgagggtggtaacgggggacagtgcataatctgggaccaggcaggtgtttgggggccccaaggtgtccagtgtgatcatgccctcaacccctgcccacccacatccaggcagcagctatgggctgcaggtgccctggatggattccacacctgaggagaagcagctgtggcaagccctcctggagcagccgtgcgagtgggtggatggccttctacccctcagaaccaacctggcccccaggacgtagccccaccaagcctctctctctggacccccatctcagggcctgcccttggctaaagtcaataaagtctattctaagagcaaaaaaaaaaaa

SEQ ID NO: 364409 - DNA, 1932 bp, Homo sapiens
  misc_feature (17)..(17): n is a, c, g, or t
gcaggctgtaccggccnggggtaatggatcggctcttctcccggtccctgaaactcggctgccaggggagctggagccacctgcgaaggtgtcctcccatactggacccctacaggaagctccgtgtgcccagctggggcacagccccagctgatgccccagaggggccacccatcgcaagaggggctttgggctctgccctccctccccatggcgcatgggccaaagcctgagactgaaggactgttggacctcagcttcctgacagaggaggagcaggaggccattgctggcgtcctccaacgagatgcccgcctgcgccagctggaggaggggcgggtcagcaagctccgggcctcagtggcagaccctgggcagctgaagatcctgacaggggactggttccaggaagcacgctcccagcggcaccacaatgcccacttcggctctgaccttgtccgagcgtctatgcgcaggaagaagagcaccaggggagaccaggctccaggccacgacagggaggctgaggctgctgtgaaagagaaggaagaggggccagagcccaggctcaccattgatgaggcccctcaggagaggctcagggagactgagggacctgatttcccatcgccttctgtccccctaaaggcttcagatcctgaggaggcgtcccaggcccaggaagatcctggccaaggagaccaacaggtctgtgccgaggaggctgacccggagctggagcccgcgtcggggggagagcaggagccgcggccccagcaagcccagaccaaggccgcgtcccagatcctggagaatggggaggaggccccggggcccgacccctctctcgaccgcatgctcagcagcagctcctcggtgtccagccttaactcctccacgctgagcggcagccagatgagcctgtcaggcgacgcggaggcggtgcaggtccgcggctccgtgcacttcgcgctgcactacgagccgggcgccgccgagctgcgcgtgcacgtgatccagtgccagggcctggccgccgcccggcgccgccgctcggacccctacgtcaaaagctacctcctcccggataagcagagcaagcgcaagacggcggtgaagaaacggaatctgaatccggttttcaacgagactctccggtactccgtcccgcaggccgagcttcagggccgcgtgctgagcctgtctgtgtggcaccgcgaaagcctgggtcgcaacatctttctgggcgaagttgaagtgcccctggacacgtgggactggggctctgagcccacctggctccccctgcagccccgggtcccaccctctcccgacgaccttccgagccgcgggttactcgccctgtccctcaagtacgtccccgccggctccgagggcgcaggactgcccccgagcggggagctgcacttctgggtgaaggaggctcgggacctcctgccgctgcgggcaggatccctggacacttacgtacaatgcttcgtgctgcctgatgacagccgggccagccgccagcgtacaagggttgtgcgacgcagcctcagccctgtgttcaatcacaccatggtgtacgatggctttgggcctgctgacctgcgccaggcttgtgccgagctctccctctgggaccatggggccctggccaaccgccagctggggggcacacgcctcagcctgggcaccggcagcagctatgggctgcaggtgccctggatggattccacacctgaggagaagcagctgtggcaagccctcctggagcagccgtgcgagtgggtggatggccttctacccctcagaaccaacctggcccccaggacgtagccccaccaagcctctctctctggacccccatctcagggcctgcccttggctaaagtcaataaagtctattctaagagcaaaaaaaaaaaa

SEQ ID NO: 364410 - DNA, 1869 bp, Homo sapiens
gtctacatgcccctcagcgctgggcaaatgctttctttccggagtcactgtggaagctccgtgtgcccagctggggcacagccccagctgatgccccagaggggccacccatcgcaagaggggctttgggctctgccctccctccccatggcgcatgggccaaagcctgagactgaaggactgttggacctcagcttcctgacagaggaggagcaggaggccattgctggcgtcctccaacgagatgcccgcctgcgccagctggaggaggggcgggtcagcaagctccgggcctcagtggcagaccctgggcagctgaagatcctgacaggggactggttccaggaagcacgctcccagcggcaccacaatgcccacttcggctctgaccttgtccgagcgtctatgcgcaggaagaagagcaccaggggagaccaggctccaggccacgacagggaggctgaggctgctgtgaaagagaaggaagaggggccagagcccaggctcaccattgatgaggcccctcaggagaggctcagggagactgagggacctgatttcccatcgccttctgtccccctaaaggcttcagatcctgaggaggcgtcccaggcccaggaagatcctggccaaggagaccaacaggtctgtgccgaggaggctgacccggagctggagcccgcgtcggggggagagcaggagccgcggccccagcaagcccagaccaaggccgcgtcccagatcctggagaatggggaggaggccccggggcccgacccctctctcgaccgcatgctcagcagcagctcctcggtgtccagccttaactcctccacgctgagcggcagccagatgagcctgtcaggcgacgcggaggcggtgcaggtccgcggctccgtgcacttcgcgctgcactacgagccgggcgccgccgagctgcgcgtgcacgtgatccagtgccagggcctggccgccgcccggcgccgccgctcggacccctacgtcaaaagctacctcctcccggataagcagagcaagcgcaagacggcggtgaagaaacggaatctgaatccggttttcaacgagactctccggtactccgtcccgcaggccgagcttcagggccgcgtgctgagcctgtctgtgtggcaccgcgaaagcctgggtcgcaacatctttctgggcgaagttgaagtgcccctggacacgtgggactggggctctgagcccacctggctccccctgcagccccgggtcccaccctctcccgacgaccttccgagccgcgggttactcgccctgtccctcaagtacgtccccgccggctccgagggcgcaggactgcccccgagcggggagctgcacttctgggtgaaggaggctcgggacctcctgccgctgcgggcaggatccctggacacttacgtacaatgcttcgtgctgcctgatgacagccgggccagccgccagcgtacaagggttgtgcgacgcagcctcagccctgtgttcaatcacaccatggtgtacgatggctttgggcctgctgacctgcgccaggcttgtgccgagctctccctctgggaccatggggccctggccaaccgccagctggggggcacacgcctcagcctgggcaccggcagcagctatgggctgcaggtgccctggatggattccacacctgaggagaagcagctgtggcaagccctcctggagcagccgtgcgagtgggtggatggccttctacccctcagaaccaacctggcccccaggacgtagccccaccaagcctctctctctggacccccatctcagggcctgcccttggctaaagtcaataaagtctattctaagagcaaaaaaaaaaaa

SEQ ID NO: 364411 - DNA, 2496 bp, Homo sapiens
ccatcctgccattccccttggggctggaaaagaaaggtttctaacttgctttcaaagcgagttcctatcagccccgttgtgggcaaggtggggctgctacccgttctagagggcctgctcagtggagctggggccaagctgggcctctccagtcggctgcgggggcgcacccccgggcgctgggagtccaggcccggttttgcatcaggccctgccgaggtgtttcctcctcctccgtgtggggcagctgctggctgggctgcctgttgagtcagccttcttccctcacggctcttctcccggtccctgaaactcggctgccaggggagctggagccacctgcgaaggtgtcctcccatactggacccctacaggaagctccgtgtgcccagctggggcacagccccagctgatgccccagaggggccacccatcgcaagaggggctttgggctctgccctccctccccatggcgcatgggccaaagcctgagactgaaggactgttggacctcagcttcctgacagaggaggagcaggaggccattgctggcgtcctccaacgagatgcccgcctgcgccagctggaggaggggcgggtcagcaagctccgggcctcagtggcagaccctgggcagctgaagatcctgacaggggactggttccaggaagcacgctcccagcggcaccacaatgcccacttcggctctgaccttgtccgagcgtctatgcgcaggaagaagagcaccaggggagaccaggctccaggccacgacagggaggctgaggctgctgtgaaagagaaggaagaggggccagagcccaggctcaccattgatgaggcccctcaggagaggctcagggagactgagggacctgatttcccatcgccttctgtccccctaaaggcttcagatcctgaggaggcgtcccaggcccaggaagatcctggccaaggagaccaacaggtctgtgccgaggaggctgacccggagctggagcccgcgtcggggggagagcaggagccgcggccccagcaagcccagaccaaggccgcgtcccagatcctggagaatggggaggaggccccggggcccgacccctctctcgaccgcatgctcagcagcagctcctcggtgtccagccttaactcctccacgctgagcggcagccagatgagcctgtcaggcgacgcggaggcggtgcaggtccgcggctccgtgcacttcgcgctgcactacgagccgggcgccgccgagctgcgcgtgcacgtgatccagtgccagggcctggccgccgcccggcgccgccgctcggacccctacgtcaaaagctacctcctcccggataagcagagcaagcgcaagacggcggtgaagaaacggaatctgaatccggttttcaacgagactctccggtactccgtcccgcaggccgagcttcagggccgcgtgctgagcctgtctgtgtggcaccgcgaaagcctgggtcgcaacatctttctgggcgaagttgaagtgcccctggacacgtgggactggggctctgagcccacctggctccccctgcagccccgggtgaggcagccaggccgcgtggggagacctgcggcccgggtctcctgcatttaccccaccaggctctcccgcagccccctcacaccccgccttcgacagaacctcccctcaacctcttaacctcatggccccaggcgaagcccggccggccacggccccttccccgagggcgctaggacccctaggttctgcccctgcaggccccgccgtctcttctagccgcaccccatccgggtctgcagaccccaccctcctgaggcccctttccattagcccctgctccacgataagcccgcctctcgcaggtcccaccctctcccgacgaccttccgagccgcgggttactcgccctgtccctcaagtacgtccccgccggctccgagggcgcaggactgcccccgagcggggagctgcacttctgggtgaaggaggctcgggacctcctgccgctgcgggcaggatccctggacacttacgtacaatgcttcgtgctgcctgatgacagccgggccagccgccagcgtacaagggttgtgcgacgcagcctcagccctgtgttcaatcacaccatggtgtacgatggctttgggcctgctgacctgcgccaggcttgtgccgagctctccctctgggaccatggggccctggccaaccgccagctggggggcacacgcctcagcctgggcaccggcagcagctatgggctgcaggtgccctggatggattccacacctgaggagaagcagctgtggcaagccctcctggagcagccgtgcgagtgggtggatggccttctacccctcagaaccaacctggcccccaggacgtagccccaccaagcctctctctctggacccccatctcagggcctgcccttggctaaagtcaataaagtctattctaagagcaaaaaaaaaaaa

SEQ ID NO: 364412 - DNA, 3060 bp, Homo sapiens
ccatcctgccattccccttggggctggaaaagaaaggtttctaacttgctttcaaagcgagttcctatcagccccgttgtgggcaaggtggggctgctacccgttctagagggcctgctcagtggagctggggccaagctgggcctctccagtcggctgcgggggcgcacccccgggcgctgggagtccaggcccggttttgcatcaggccctgccgaggtgtttcctcctcctccgtgtggggcagctgctggctgggctgcctgttgagtcagccttcttccctcacggctcttctcccggtccctgaaactcggctgccaggggagctggagccacctgcgaaggtgtcctcccatactggacccctacaggaagctccgtgtgcccagctggggcacagccccagctgatgccccagaggggccacccatcgcaagaggggctttgggctctgccctccctccccatggcgcatgggccaaagcctgagactgaaggactgttggacctcagcttcctgacagaggaggagcaggaggccattgctggcgtcctccaacgagatgcccgcctgcgccagctggaggaggggcgggtcagcaagctccgggcctcagtggcagaccctgggcagctgaagatcctgacaggggactggttccaggaagcacgctcccagcggcaccacaatgcccacttcggctctgaccttgtccgagcgtctatgcgcaggaagaagagcaccaggggagaccaggctccaggccacgacagggaggctgaggctgctgtgaaagagaaggaagaggggccagagcccaggctcaccattgatgaggcccctcaggagaggctcagggagactgagggacctgatttcccatcgccttctgtccccctaaaggcttcagatcctgaggaggcgtcccaggcccaggaagatcctggccaaggagaccaacaggtctgtgccgaggaggctgacccggagctggagcccgcgtcggggggagagcaggagccgcggccccagcaagcccagaccaaggccgcgtcccagatcctggagaatggggaggaggccccggggcccgacccctctctcgaccgcatgctcagcagcagctcctcggtgtccagccttaactcctccacgctgagcggcagccagatgagcctgtcaggcgacgcggaggcggtgcaggtccgcggctccgtgcacttcgcgctgcactacgagccgggcgccgccgagctgcgcgtgcacgtgatccagtgccagggcctggccgccgcccggcgccgccgctcggacccgtgagtgccccgccggccaagcggggcgcggctgtcacagcccagcccaccattcacagggtctcggcctcctcgtcctcatcttcaaaatgggaacaacagcgttattgggaggcgtgcgattaagcgagacaatccctgtaaagcgcttagcacgaggcctggcacgtgttcgggatggtggctgggggagcccacaggcaggggagaaggctctgggagggcccctcctcacctcgggttctcacctccccagctacgtcaaaagctacctcctcccggataagcagagcaagcgcaagacggcggtgaagaaacggaatctgaatccggttttcaacgagactctccgggtgaggctgtgaccacgatgcggttccccgttaatgaactggacgcccccttcctgcggggctaggtggcaagggcagccagtaacgtcattgcccggaggatcggcggagggggcccattaactcgttatccagtgttgtcagcctcgtggtgggcgtggtgatagtgcaggtccccattaatgcccttaggggctccccagaattccatcatggtaggaacgcggtaggacctgcctcagccaactcgcgcagcatctacgcgggccaccagcagtgctccactaaagctcacctcctgtcctcagtactccgtcccgcaggccgagcttcagggccgcgtgctgagcctgtctgtgtggcaccgcgaaagcctgggtcgcaacatctttctgggcgaagttgaagtgcccctggacacgtgggactggggctctgagcccacctggctccccctgcagccccgggtgaggcagccaggccgcgtggggagacctgcggcccgggtctcctgcatttaccccaccaggctctcccgcagccccctcacaccccgccttcgacagaacctcccctcaacctcttaacctcatggccccaggcgaagcccggccggccacggccccttccccgagggcgctaggacccctaggttctgcccctgcaggccccgccgtctcttctagccgcaccccatccgggtctgcagaccccaccctcctgaggcccctttccattagcccctgctccacgataagcccgcctctcgcaggtcccaccctctcccgacgaccttccgagccgcgggttactcgccctgtccctcaagtacgtccccgccggctccgagggcgcaggactgcccccgagcggggagctgcacttctgggtgaaggaggctcgggacctcctgccgctgcgggcaggatccctggacacttacgtacaatgcttcgtgctgcctgatgacagccgggccagccgccagcgtacaagggttgtgcgacgcagcctcagccctgtgttcaatcacaccatggtgtacgatggctttgggcctgctgacctgcgccaggcttgtgccgagctctccctctgggaccatggggccctggccaaccgccagctggggggcacacgcctcagcctgggcaccggcagcagctatgggctgcaggtgccctggatggattccacacctgaggagaagcagctgtggcaagccctcctggagcagccgtgcgagtgggtggatggccttctacccctcagaaccaacctggcccccaggacgtagccccaccaagcctctctctctggacccccatctcagggcctgcccttggctaaagtcaataaagtctattctaagagcaaaaaaaaaaaa

SEQ ID NO: 364413 - DNA, 2447 bp, Homo sapiens
ccatcctgccattccccttggggctggaaaagaaaggtttctaacttgctttcaaagcgagttcctatcagccccgttgtgggcaaggtggggctgctacccgttctagagggcctgctcagtggagctggggccaagctgggcctctccagtcggctgcgggggcgcacccccgggcgctgggagtccaggcccggttttgcatcaggccctgccgaggtgtttcctcctcctccgtgtggggcagctgctggctgggctgcctgttgagtcagccttcttccctcacggctcttctcccggtccctgaaactcggctgccaggggagctggagccacctgcgaaggtgtcctcccatactggacccctacaggaagctccgtgtgcccagctggggcacagccccagctgatgccccagaggggccacccatcgcaagaggggctttgggctctgccctccctccccatggcgcatgggccaaagcctgagactgaaggactgttggacctcagcttcctgacagaggaggagcaggaggccattgctggcgtcctccaacgagatgcccgcctgcgccagctggaggaggggcgggtcagcaagctccgggcctcagtggcagaccctgggcagctgaagatcctgacaggggactggttccaggaagcacgctcccagcggcaccacaatgcccacttcggctctgaccttgtccgagcgtctatgcgcaggaagaagagcaccaggggagaccaggctccaggccacgacagggaggctgaggctgctgtgaaagagaaggaagaggggccagagcccaggctcaccattgatgaggcccctcaggagaggctcagggagactgagggacctgatttcccatcgccttctgtccccctaaaggcttcagatcctgaggaggcgtcccaggcccaggaagatcctggccaaggagaccaacaggtctgtgccgaggaggctgacccggagctggagcccgcgtcggggggagagcaggagccgcggccccagcaagcccagaccaaggccgcgtcccagatcctggagaatggggaggaggccccggggcccgacccctctctcgaccgcatgctcagcagcagctcctcggtgtccagccttaactcctccacgctgagcggcagccagatgagcctgtcaggcgacgcggaggcggtgcaggtccgcggctccgtgcacttcgcgctgcactacgagccgggcgccgccgagctgcgcgtgcacgtgatccagtgccagggcctggccgccgcccggcgccgccgctcggacccgtgagtgccccgccggccaagcggggcgcggctgtcacagcccagcccaccattcacagggtctcggcctcctcgtcctcatcttcaaaatgggaacaacagcgttattgggaggcgtgcgattaagcgagacaatccctgtaaagcgcttagcacgaggcctggcacgtgttcgggatggtggctgggggagcccacaggcaggggagaaggctctgggagggcccctcctcacctcgggttctcacctccccagctacgtcaaaagctacctcctcccggataagcagagcaagcgcaagacggcggtgaagaaacggaatctgaatccggttttcaacgagactctccggtactccgtcccgcaggccgagcttcagggccgcgtgctgagcctgtctgtgtggcaccgcgaaagcctgggtcgcaacatctttctgggcgaagttgaagtgcccctggacacgtgggactggggctctgagcccacctggctccccctgcagccccgggtcccaccctctcccgacgaccttccgagccgcgggttactcgccctgtccctcaagtacgtccccgccggctccgagggcgcaggactgcccccgagcggggagctgcacttctgggtgaaggaggctcgggacctcctgccgctgcgggcaggatccctggacacttacgtacaatgcttcgtgctgcctgatgacagccgggccagccgccagcgtacaagggttgtgcgacgcagcctcagccctgtgttcaatcacaccatggtgtacgatggctttgggcctgctgacctgcgccaggcttgtgccgagctctccctctgggaccatggggccctggccaaccgccagctggggggcacacgcctcagcctgggcaccggcagcagctatgggctgcaggtgccctggatggattccacacctgaggagaagcagctgtggcaagccctcctggagcagccgtgcgagtgggtggatggccttctacccctcagaaccaacctggcccccaggacgtagccccaccaagcctctctctctggacccccatctcagggcctgcccttggctaaagtcaataaagtctattctaagagcaaaaaaaaaaaa

SEQ ID NO: 364414 - DNA, 1467 bp, Homo sapiens
ctgtgctttgggacggcgctgtgcttgggacggcggtgaagaaacggaatctgaatccggttttcaacgagactctccgggtgaggctgtgaccacgatgcggttccccgttaatgaactggacgcccccttcctgcggggctaggtggcaagggcagccagtaacgtcattgcccggaggatcggcggagggggcccattaactcgttatccagtgttgtcagcctcgtggtgggcgtggtgatagtgcaggtccccattaatgcccttaggggctccccagaattccatcatggtaggaacgcggtaggacctgcctcagccaactcgcgcagcatctacgcgggccaccagcagtgctccactaaagctcacctcctgtcctcagtactccgtcccgcaggccgagcttcagggccgcgtgctgagcctgtctgtgtggcaccgcgaaagcctgggtcgcaacatctttctgggcgaagttgaagtgcccctggacacgtgggactggggctctgagcccacctggctccccctgcagccccgggtgaggcagccaggccgcgtggggagacctgcggcccgggtctcctgcatttaccccaccaggctctcccgcagccccctcacaccccgccttcgacagaacctcccctcaacctcttaacctcatggccccaggcgaagcccggccggccacggccccttccccgagggcgctaggacccctaggttctgcccctgcaggccccgccgtctcttctagccgcaccccatccgggtctgcagaccccaccctcctgaggcccctttccattagcccctgctccacgataagcccgcctctcgcaggtcccaccctctcccgacgaccttccgagccgcgggttactcgccctgtccctcaagtacgtccccgccggctccgagggcgcaggactgcccccgagcggggagctgcacttctgggtgaaggaggctcgggacctcctgccgctgcgggcaggatccctggacacttacgtacaatgcttcgtgctgcctgatgacagccgggccagccgccagcgtacaagggttgtgcgacgcagcctcagccctgtgttcaatcacaccatggtgtacgatggctttgggcctgctgacctgcgccaggcttgtgccgagctctccctctgggaccatggggccctggccaaccgccagctggggggcacacgcctcagcctgggcaccggcagcagctatgggctgcaggtgccctggatggattccacacctgaggagaagcagctgtggcaagccctcctggagcagccgtgcgagtgggtggatggccttctacccctcagaaccaacctggcccccaggacgtagccccaccaagcctctctctctggacccccatctcagggcctgcccttggctaaagtcaataaagtctattctaagagcaaaaaaaaaaaa

SEQ ID NO: 364415 - DNA, 769 bp, Homo sapiens
ggatgacactctgttcgtgaggttcgacatcgacgccacgagtccgaggaaggatccacgggcgccatggatagagcaggaggggccggagtattgggaccgggagacacagatctccaagtccaacacacagacttaccgagcacacagcccggtcccaccctctcccgacgaccttccgagccgcgggttactcgccctgtccctcaagtacgtccccgccggctccgagggcgcaggactgcccccgagcggggagctgcacttctgggtgaaggaggctcgggacctcctgccgctgcgggcaggatccctggacacttacgtacaatgcttcgtgctgcctgatgacagccgggccagccgccagcgtacaagggttgtgcgacgcagcctcagccctgtgttcaatcacaccatggtgtacgatggctttgggcctgctgacctgcgccaggcttgtgccgagctctccctctgggaccatggggccctggccaaccgccagctggggggcacacgcctcagcctgggcaccggcagcagctatgggctgcaggtgccctggatggattccacacctgaggagaagcagctgtggcaagccctcctggagcagccgtgcgagtgggtggatggccttctacccctcagaaccaacctggcccccaggacgtagccccaccaagcctctctctctggacccccatctcagggcctgcccttggctaaagtcaataaagtctattctaagagcaaaaaaaaaaaa

SEQ ID NO: 364416 - DNA, 217 bp, Homo sapiens
cagcagctatgggctgcaggtgccctggatggattccacacctgaggagaagcagctgtggcaagccctcctggagcagccgtgcgagtgggtggatggccttctacccctcagaaccaacctggcccccaggacgtagccccaccaagcctctctctctggacccccatctcagggcctgcccttggctaaagtcaataaagtctattctaagagc

SEQ ID NO: 364417 - DNA, 184 bp, Homo sapiens
cacgccctgaaaagcgggagactccagtccccgggtttgggggcggtggactccatccgtgtgcgggcctgagccgagcctctccgcaggcgcaggactgcccccgagcggggagctgcacttctgggtgaaggaggctcgggacctcctgccgctgcgggcaggatccctggacacttacgta

SEQ ID NO: 364418 - DNA, 2191 bp, Homo sapiens
ccatcctgccattccccttggggctggaaaagaaaggtttctaacttgctttcaaagcgagttcctatcagccccgttgtgggcaaggtggggctgctacccgttctagagggcctgctcagtggagctggggccaagctgggcctctccagtcggctgcgggggcgcacccccgggcgctgggagtccaggcccggttttgcatcaggccctgccgaggtgtttcctcctcctccgtgtggggcagctgctggctgggctgcctgttgagtcagccttcttccctcacggctcttctcccggtccctgaaactcggctgccaggggagctggagccacctgcgaaggtgtcctcccatactggacccctacaggaagctccgtgtgcccagctggggcacagccccagctgatgccccagaggggccacccatcgcaagaggggctttgggctctgccctccctccccatggcgcatgggccaaagcctgagactgaaggactgttggacctcagcttcctgacagaggaggagcaggaggccattgctggcgtcctccaacgagatgcccgcctgcgccagctggaggaggggcgggtcagcaagctccgggcctcagtggcagaccctgggcagctgaagatcctgacaggggactggttccaggaagcacgctcccagcggcaccacaatgcccacttcggctctgaccttgtccgagcgtctatgcgcaggaagaagagcaccaggggagaccaggctccaggccacgacagggaggctgaggctgctgtgaaagagaaggaagaggggccagagcccaggctcaccattgatgaggcccctcaggagaggctcagggagactgagggacctgatttcccatcgccttctgtccccctaaaggcttcagatcctgaggaggcgtcccaggcccaggaagatcctggccaaggagaccaacaggtctgtgccgaggaggctgacccggagctggagcccgcgtcggggggagagcaggagccgcggccccagcaagcccagaccaaggccgcgtcccagatcctggagaatggggaggaggccccggggcccgacccctctctcgaccgcatgctcagcagcagctcctcggtgtccagccttaactcctccacgctgagcggcagccagatgagcctgtcaggcgacgcggaggcggtgcaggtccgcggctccgtgcacttcgcgctgcactacgagccgggcgccgccgagctgcgcgtgcacgtgatccagtgccagggcctggccgccgcccggcgccgccgctcggacccctacgtcaaaagctacctcctcccggataagcagagcaagcgcaagacggcggtgaagaaacggaatctgaatccggttttcaacgagactctccggtactccgtcccgcaggccgagcttcagggccgcgtgctgagcctgtctgtgtggcaccgcgaaagcctgggtcgcaacatctttctgggcgaagttgaagtgcccctggacacgtgggactggggctctgagcccacctggctccccctgcagccccgggtcccaccctctcccgacgaccttccgagccgcgggttactcgccctgtccctcaagtacgtccccgccggctccgagggcgcaggactgcccccgagcggggagctgcacttctgggtgaaggaggctcgggacctcctgccgctgcgggcaggatccctggacacttacgtacaatgcttcgtgctgcctgatgacagccgggccagccgccagcgtacaagggttgtgcgacgcagcctcagccctgtgttcaatcacaccatggtgtacgatggctttgggcctgctgacctgcgccaggcttgtgccgagctctccctctgggaccatggggccctggccaaccgccagctggggggcacacgcctcagcctgggcaccggcagcagctatgggctgcaggtgccctggatggattccacacctgaggagaagcagctgtggcaagccctcctggagcagccgtgcgagtgggtggatggccttctacccctcagaaccaacctggcccccaggacgtagccccaccaagcctctctctctggacccccatctcagggcctgcccttggctaaagtcaataaagtctattctaagagcaaaaaaaaaaaa

SEQ ID NO: 364419 - DNA, 862 bp, Homo sapiens
  misc_feature (1)..(1): n is a, c, g, or t
  misc_feature (21)..(21): n is a, c, g, or t
  misc_feature (26)..(26): n is a, c, g, or t
  misc_feature (31)..(31): n is a, c, g, or t
  misc_feature (34)..(36): n is a, c, g, or t
naatatgcaggctggtactgncccgnagttntgnnntcggctgccaggggagctggagccacctgcgaaggtgtcctcccatactggacccctacaggaagctccgtgtgcccagctggggcacagccccagctgatgccccagaggggccacccatcgcaagaggggctttgggctctgccctccctccccatggcgcatgggccaaagcctgagactgaaggactgttggacctcagcttcctgacagaggaggagcaggaggccattgctggcgtcctccaacgagatgcccgcctgcgccagctggaggaggggcgggtcagcaagctccgggcctcagtggcagaccctgggcagctgaagatcctgacaggggactggttccaggaagcacgctcccagcggcaccacaatgcccacttcggctctgaccttgtccgagcgtctatgcgcaggaagaagagcaccaggggagaccaggctccaggccacgacagggaggctgaggctgctgtgaaagagaaggaagaggggccagagcccaggctcaccattgatgaggcccctcaggagaggctcagggagactgagggacctgatttcccatcgccttctgtccccctaaaggcttcagatcctgaggaggcgtcccaggcccaggaagatcctggccaaggagaccaacaggtctgtgccgaggaggctgacccggagctggagcccgcgtcggggggagagcaggagccgcggccccagcaagcccaggtaggcgggagtggcccgtggctgctctcaacatccggagcggactccgggcggggagcgctcctgcccagggctgcgagccgcccgcgaccca

SEQ ID NO: 364420 - DNA, 1914 bp, Homo sapiens
  misc_feature (1)..(1): n is a, c, g, or t
  misc_feature (21)..(21): n is a, c, g, or t
  misc_feature (26)..(26): n is a, c, g, or t
  misc_feature (31)..(31): n is a, c, g, or t
  misc_feature (34)..(36): n is a, c, g, or t
naatatgcaggctggtactgncccgnagttntgnnntcggctgccaggggagctggagccacctgcgaaggtgtcctcccatactggacccctacaggaagctccgtgtgcccagctggggcacagccccagctgatgccccagaggggccacccatcgcaagaggggctttgggctctgccctccctccccatggcgcatgggccaaagcctgagactgaaggactgttggacctcagcttcctgacagaggaggagcaggaggccattgctggcgtcctccaacgagatgcccgcctgcgccagctggaggaggggcgggtcagcaagctccgggcctcagtggcagaccctgggcagctgaagatcctgacaggggactggttccaggaagcacgctcccagcggcaccacaatgcccacttcggctctgaccttgtccgagcgtctatgcgcaggaagaagagcaccaggggagaccaggctccaggccacgacagggaggctgaggctgctgtgaaagagaaggaagaggggccagagcccaggctcaccattgatgaggcccctcaggagaggctcagggagactgagggacctgatttcccatcgccttctgtccccctaaaggcttcagatcctgaggaggcgtcccaggcccaggaagatcctggccaaggagaccaacaggtctgtgccgaggaggctgacccggagctggagcccgcgtcggggggagagcaggagccgcggccccagcaagcccagaccaaggccgcgtcccagatcctggagaatggggaggaggccccggggcccgacccctctctcgaccgcatgctcagcagcagctcctcggtgtccagccttaactcctccacgctgagcggcagccagatgagcctgtcaggcgacgcggaggcggtgcaggtccgcggctccgtgcacttcgcgctgcactacgagccgggcgccgccgagctgcgcgtgcacgtgatccagtgccagggcctggccgccgcccggcgccgccgctcggacccctacgtcaaaagctacctcctcccggataagcagagcaagcgcaagacggcggtgaagaaacggaatctgaatccggttttcaacgagactctccggtactccgtcccgcaggccgagcttcagggccgcgtgctgagcctgtctgtgtggcaccgcgaaagcctgggtcgcaacatctttctgggcgaagttgaagtgcccctggacacgtgggactggggctctgagcccacctggctccccctgcagccccgggtcccaccctctcccgacgaccttccgagccgcgggttactcgccctgtccctcaagtacgtccccgccggctccgagggcgcaggactgcccccgagcggggagctgcacttctgggtgaaggaggctcgggacctcctgccgctgcgggcaggatccctggacacttacgtacaatgcttcgtgctgcctgatgacagccgggccagccgccagcgtacaagggttgtgcgacgcagcctcagccctgtgttcaatcacaccatggtgtacgatggctttgggcctgctgacctgcgccaggcttgtgccgagctctccctctgggaccatggggccctggccaaccgccagctggggggcacacgcctcagcctgggcaccggcagcagctatgggctgcaggtgccctggatggattccacacctgaggagaagcagctgtggcaagccctcctggagcagccgtgcgagtgggtggatggccttctacccctcagaaccaacctggcccccaggacgtagccccaccaagcctctctctctggacccccatctcagggcctgcccttggctaaagtcaataaagtctattctaagagcaaaaaaaaaaaa

SEQ ID NO: 364421 - DNA, 2804 bp, Homo sapiens
ccatcctgccattccccttggggctggaaaagaaaggtttctaacttgctttcaaagcgagttcctatcagccccgttgtgggcaaggtggggctgctacccgttctagagggcctgctcagtggagctggggccaagctgggcctctccagtcggctgcgggggcgcacccccgggcgctgggagtccaggcccggttttgcatcaggccctgccgaggtgtttcctcctcctccgtgtggggcagctgctggctgggctgcctgttgagtcagccttcttccctcacggctcttctcccggtccctgaaactcggctgccaggggagctggagccacctgcgaaggtgtcctcccatactggacccctacaggaagctccgtgtgcccagctggggcacagccccagctgatgccccagaggggccacccatcgcaagaggggctttgggctctgccctccctccccatggcgcatgggccaaagcctgagactgaaggactgttggacctcagcttcctgacagaggaggagcaggaggccattgctggcgtcctccaacgagatgcccgcctgcgccagctggaggaggggcgggtcagcaagctccgggcctcagtggcagaccctgggcagctgaagatcctgacaggggactggttccaggaagcacgctcccagcggcaccacaatgcccacttcggctctgaccttgtccgagcgtctatgcgcaggaagaagagcaccaggggagaccaggctccaggccacgacagggaggctgaggctgctgtgaaagagaaggaagaggggccagagcccaggctcaccattgatgaggcccctcaggagaggctcagggagactgagggacctgatttcccatcgccttctgtccccctaaaggcttcagatcctgaggaggcgtcccaggcccaggaagatcctggccaaggagaccaacaggtctgtgccgaggaggctgacccggagctggagcccgcgtcggggggagagcaggagccgcggccccagcaagcccagaccaaggccgcgtcccagatcctggagaatggggaggaggccccggggcccgacccctctctcgaccgcatgctcagcagcagctcctcggtgtccagccttaactcctccacgctgagcggcagccagatgagcctgtcaggcgacgcggaggcggtgcaggtccgcggctccgtgcacttcgcgctgcactacgagccgggcgccgccgagctgcgcgtgcacgtgatccagtgccagggcctggccgccgcccggcgccgccgctcggacccctacgtcaaaagctacctcctcccggataagcagagcaagcgcaagacggcggtgaagaaacggaatctgaatccggttttcaacgagactctccgggtgaggctgtgaccacgatgcggttccccgttaatgaactggacgcccccttcctgcggggctaggtggcaagggcagccagtaacgtcattgcccggaggatcggcggagggggcccattaactcgttatccagtgttgtcagcctcgtggtgggcgtggtgatagtgcaggtccccattaatgcccttaggggctccccagaattccatcatggtaggaacgcggtaggacctgcctcagccaactcgcgcagcatctacgcgggccaccagcagtgctccactaaagctcacctcctgtcctcagtactccgtcccgcaggccgagcttcagggccgcgtgctgagcctgtctgtgtggcaccgcgaaagcctgggtcgcaacatctttctgggcgaagttgaagtgcccctggacacgtgggactggggctctgagcccacctggctccccctgcagccccgggtgaggcagccaggccgcgtggggagacctgcggcccgggtctcctgcatttaccccaccaggctctcccgcagccccctcacaccccgccttcgacagaacctcccctcaacctcttaacctcatggccccaggcgaagcccggccggccacggccccttccccgagggcgctaggacccctaggttctgcccctgcaggccccgccgtctcttctagccgcaccccatccgggtctgcagaccccaccctcctgaggcccctttccattagcccctgctccacgataagcccgcctctcgcaggtcccaccctctcccgacgaccttccgagccgcgggttactcgccctgtccctcaagtacgtccccgccggctccgagggcgcaggactgcccccgagcggggagctgcacttctgggtgaaggaggctcgggacctcctgccgctgcgggcaggatccctggacacttacgtacaatgcttcgtgctgcctgatgacagccgggccagccgccagcgtacaagggttgtgcgacgcagcctcagccctgtgttcaatcacaccatggtgtacgatggctttgggcctgctgacctgcgccaggcttgtgccgagctctccctctgggaccatggggccctggccaaccgccagctggggggcacacgcctcagcctgggcaccggcagcagctatgggctgcaggtgccctggatggattccacacctgaggagaagcagctgtggcaagccctcctggagcagccgtgcgagtgggtggatggccttctacccctcagaaccaacctggcccccaggacgtagccccaccaagcctctctctctggacccccatctcagggcctgcccttggctaaagtcaataaagtctattctaagagcaaaaaaaaaaaa

SEQ ID NO: 364422 - DNA, 2032 bp, Homo sapiens
ccatcctgccattccccttggggctggaaaagaaaggtttctaacttgctttcaaagcgagttcctatcagccccgttgtgggcaaggtggggctgctacccgttctagagggcctgctcagtggagctggggccaagctgggcctctccagtcggctgcgggggcgcacccccgggcgctgggagtccaggcccggttttgcatcaggccctgccgaggtgtttcctcctcctccgtgtggggcagctgctggctgggctgcctgttgagtcagccttcttccctcacggctcttctcccggtccctgaaactcggctgccaggggagctggagccacctgcgaaggtgtcctcccatactggacccctacaggaagctccgtgtgcccagctggggcacagccccagctgatgccccagaggggccacccatcgcaagaggggctttgggctctgccctccctccccatggcgcatgggccaaagcctgagactgaaggactgttggacctcagcttcctgacagaggaggagcaggaggccattgctggcgtcctccaacgagatgcccgcctgcgccagctggaggaggggcgggtcagcaagctccgggcctcagtggcagaccctgggcagctgaagatcctgacaggggactggttccaggaagcacgctcccagcggcaccacaatgcccacttcggctctgaccttgtccgagcgtctatgcgcaggaagaagagcaccaggggagaccaggctccaggccacgacagggaggctgaggctgctgtgaaagagaaggaagaggggccagagcccaggctcaccattgatgaggcccctcaggagaggctcagggagactgagggacctgatttcccatcgccttctgtccccctaaaggcttcagatcctgaggaggcgtcccaggcccaggaagatcctggccaaggagaccaacaggtctgtgccgaggaggctgacccggagctggagcccgcgtcggggggagagcaggagccgcggccccagcaagcccagaccaaggccgcgtcccagatcctggagaatggggaggaggccccggggcccgacccctctctcgaccgcatgctcagcagcagctcctcggtgtccagccttaactcctccacgctgagcggcagccagatgagcctgtcaggcgacgcggaggcggtgcaggtccgcggctccgtgcacttcgcgctgcactacgagccgggcgccgccgagctgcgcgtgcacgtgatccagtgccagggcctggccgccgcccggcgccgccgctcggacccctacgtcaaaagctacctcctcccggataagcagagcaagcgcaagacggcggtgaagaaacggaatctgaatccggttttcaacgagactctccgggtcccaccctctcccgacgaccttccgagccgcgggttactcgccctgtccctcaagtacgtccccgccggctccgagggcgcaggactgcccccgagcggggagctgcacttctgggtgaaggaggctcgggacctcctgccgctgcgggcaggatccctggacacttacgtacaatgcttcgtgctgcctgatgacagccgggccagccgccagcgtacaagggttgtgcgacgcagcctcagccctgtgttcaatcacaccatggtgtacgatggctttgggcctgctgacctgcgccaggcttgtgccgagctctccctctgggaccatggggccctggccaaccgccagctggggggcacacgcctcagcctgggcaccggcagcagctatgggctgcaggtgccctggatggattccacacctgaggagaagcagctgtggcaagccctcctggagcagccgtgcgagtgggtggatggccttctacccctcagaaccaacctggcccccaggacgtagccccaccaagcctctctctctggacccccatctcagggcctgcccttggctaaagtcaataaagtctattctaagagcaaaaaaaaaaaa

SEQ ID NO: 364423 - DNA, 2255 bp, Homo sapiens
cagctgggaggcacacgcctcagcctgggcaccggcagcagctatgggctgcaggtgccctggatggattccacacctgaggagaggctcagggagactgaggcttcagatcctgaggaggcgtcccaggcccaggaagatcctggccaaggagaccaacaggtctgtgccgaggaggctgacccggagctggagcccgcgtcggggggagagcaggagccgcggccccagcaagcccagaccaaggccgcgtcccagatcctggagaatggggaggaggccccggggcccgacccctctctcgaccgcatgctcagcagcagctcctcggtgtccagccttaactcctccacgctgagcggcagccagatgagcctgtcaggcgacgcggaggcggtgcaggtccgcggctccgtgcacttcgcgctgcactacgagccgggcgccgccgagctgcgcgtgcacgtgatccagtgccagggcctggccgccgcccggcgccgccgctcggacccgtgagtgccccgccggccaagcggggcgcggctgtcacagcccagcccaccattcacagggtctcggcctcctcgtcctcatcttcaaaatgggaacaacagcgttattgggaggcgtgcgattaagcgagacaatccctgtaaagcgcttagcacgaggcctggcacgtgttcgggatggtggctgggggagcccacaggcaggggagaaggctctgggagggcccctcctcacctcgggttctcacctccccagctacgtcaaaagctacctcctcccggataagcagagcaagcgcaagacggcggtgaagaaacggaatctgaatccggttttcaacgagactctccgggtgaggctgtgaccacgatgcggttccccgttaatgaactggacgcccccttcctgcggggctaggtggcaagggcagccagtaacgtcattgcccggaggatcggcggagggggcccattaactcgttatccagtgttgtcagcctcgtggtgggcgtggtgatagtgcaggtccccattaatgcccttaggggctccccagaattccatcatggtaggaacgcggtaggacctgcctcagccaactcgcgcagcatctacgcgggccaccagcagtgctccactaaagctcacctcctgtcctcagtactccgtcccgcaggccgagcttcagggccgcgtgctgagcctgtctgtgtggcaccgcgaaagcctgggtcgcaacatctttctgggcgaagttgaagtgcccctggacacgtgggactggggctctgagcccacctggctccccctgcagccccgggtgaggcagccaggccgcgtggggagacctgcggcccgggtctcctgcatttaccccaccaggctctcccgcagccccctcacaccccgccttcgacagaacctcccctcaacctcttaacctcatggccccaggcgaagcccggccggccacggccccttccccgagggcgctaggacccctaggttctgcccctgcaggccccgccgtctcttctagccgcaccccatccgggtctgcagaccccaccctcctgaggcccctttccattagcccctgctccacgataagcccgcctctcgcaggtcccaccctctcccgacgaccttccgagccgcgggttactcgccctgtccctcaagtacgtccccgccggctccgagggcgcaggactgcccccgagcggggagctgcacttctgggtgaaggaggctcgggacctcctgccgctgcgggcaggatccctggacacttacgtacaatgcttcgtgctgcctgatgacagccgggccagccgccagcgtacaagggttgtgcgacgcagcctcagccctgtgttcaatcacaccatggtgtacgatggctttgggcctgctgacctgcgccaggcttgtgccgagctctccctctgggaccatggggccctggccaaccgccagctggggggcacacgcctcagcctgggcaccggcagcagctatgggctgcaggtgccctggatggattccacacctgaggagaagcagctgtggcaagccctcctggagcagccgtgcgagtgggtggatggccttctacccctcagaaccaacctggcccccaggacgtagccccaccaagcctctctctctggacccccatctcagggcctgcccttggctaaagtcaataaagtctattctaagagcaaaaaaaaaaaa

SEQ ID NO: 364424 - DNA, 310 bp, Homo sapiens
gggcagtgagggtctaaggccaggcaggcaggagccaggggacatggacatatgtgagagagaatgagtgggacgtggtgactggatgactctagggagtgtgaggggggtcacctgatgccaggccacctcccgcacagcttcgtgctgcctgatgacagccgggccagccgccagcgtacaagggttgtgcgacgcagcctcagccctgtgttcaatcacaccatggtgtacgatggctttgggcctgctgacctgcgccaggcttgtgccgagctctccctctgggaccatggggccctggccaacc

SEQ ID NO: 364425 - DNA, 2799 bp, Homo sapiens
ggccggagaagaaggcggtgccagggcgtcctgcggaagggccgggggcggggctcgtgacgttgccgggacagccaatcacgcctggttttatcagtggccccgcccttttaccgcacatttcccctcccctagttcatttcgcacgacgcagcggttgggaacacagacattttcggagctggagccgccactgccgccgccattttgtgtctgtggagaaagaagcttctgtggcggctggaagtggacggagatcacccgcgagacggcggcgtttcatacccgaggttccccctgtgtcgtcccccatcccccctccgcggtcagcatgtggtgaagccggagccgcgagagagccggggagaggaagaggagtcggaagggaggcggggtatccagagcggcttcagcttcagctgcagcggacctcggaggggggccgcggcgcaatgtcagagcagacgccggccgaggccggtgctgcgggggcccgggaggacgcctgtcgggattatcagtcatcgctcgaagacctgaccttcaatagcaagccgcacatcaatatgctgaccattctagccgaggagaacctgcccttcgccaaggagatcgtctctctcatcgaggcccaaaccgccaaggctccttcctcagagaagcttcctgttatgtaccttatggattctattgtgaaaaacgttggaagagagtatctcactgcctttactaaaaatctagttgcaacatttatttgtgtgtttgaaaaggtggatgaaaatactaggaaaagtttatttaagttacgttctacatgggatgaaatattccctttgaagaaactttatgccctggatgtcagagtcaattcattagatcctgcttggcctattaaacctctaccccccaatgtgaatacgtctagcatccatgtgaatcctaaatttttaaataaatcgcccgaggagccttcaacacctggtacagtggtcagttcccctagcatctccactcctccaattgttcctgatatacaaaagaatcttacacaagaacaactaataaggcagcagttactggcaaagcaaaaacagttgttagaacttcagcagaaaaagctggagcttgagctagagcaagctaaggcacagttggcagtttctcttagtgttcagcaggaaacatccaatttaggtcctggatctgcaccatccaaattacatgtttcacagattccccctatggcagttaaagctcctcatcaggttcctgtgcaatctgagaaaagccgtccaggaccatccttacaaattcaggatttaaaaggaactaaccgggatcctcgtctgaacaggataagccaacattctcatggaaaagatcagagtcacaggaaagaatttctaatgaacacattaaaccagtctgatactaagacaagtaaaactataccctctgaaaaactaaattcatccaagcaagaaaaaagtaaatcaggtgaaaaaataaccaagaaagaacttgaccaattagattctaaatcgaaatcgaaatcgaaatcaccctcacctttgaaaaacaaattatctcacacaaaagacttgaaaaatcaagaatcggaaagtatgaggttgtctgatatgaacaagagagatccaagattaaaaaaacatcttcaggataagaccgatggcaaagatgatgatgtgaaagagaagagaaaaactgcagaaaaaaaggataaagatgagcacatgaagtcatccgaacacagactggctggaagtagaaataaaatcataaatggcattgtacaaaaacaggatacaataacagaagagtcagaaaaacaggggacaaaaccagggagatcgagtactagaaagcgatcaagatctcgatcacccaagtctaggtcaccaattatacattccccaaagagaagagataggcggtcacccaaacgaaggcaaagaagtatgtctccaacatcgacacctaaagctggaaagattcgccaatctggagctaagcagtcacatatggaagagtttacaccaccttctagggaagacagaaatgctaagagaagtactaaacaggatattcgggatccaaggcgaatgaaaaagactgaagaggagcgaccacaagaaactacaaatcagcattctacaaagtcaggcactgaaccaaaggagaatgtagaaaactggcaaagttccaagtctgccaaaagatggaaatctggttgggaagaaaataaaagcttacaacaggttgatgaacatagtaaacctcctcatctgaggcatagggagagctggtcaagcactaaaggaattttatcacctcgagccccaaagcagcaacagcatcgattaagtgtagatgccaatcttcagattcctaaagagttaactcttgcaagcaaaagagaattacttcaaaagacgagtgaacgtttagcatctggtgaaattacacaggatgacttccttgttgttgtgcatcaaattcgacagctatttcagtatcaagaaggtgtgcgagaagagcagagatctccattcaatgatcgttttccacttaagcgacctcgatatgaagattcagataaaccatttgtagatagtccagcatcaagattcgccggcctggatacaaatcagcgacttacagctttagctgaagacagaccgttatttgatggacctagtaggccatcagtagcaagagatggcccaacgaagatgatttttgaaggacccaataaattaagccctcgaattgatggac

SEQ ID NO: 364426 - DNA, 6144 bp, Homo sapiens
  misc_feature (6034)..(6034): n is a, c, g, or t
  misc_feature (6055)..(6055): n is a, c, g, or t
ggccggagaagaaggcggtgccagggcgtcctgcggaagggccgggggcggggctcgtgacgttgccgggacagccaatcacgcctggttttatcagtggccccgcccttttaccgcacatttcccctcccctagttcatttcgcacgacgcagcggttgggaacacagacattttcggagctggagccgccactgccgccgccattttgtgtctgtggagaaagaagcttctgtggcggctggaagtggacggagatcacccgcgagacggcggcgtttcatacccgaggttccccctgtgtcgtcccccatcccccctccgcggtcagcatgtggtgaagccggagccgcgagagagccggggagaggaagaggagtcggaagggaggcggggtatccagagcggcttcagcttcagctgcagcggacctcggaggggggccgcggcgcaatgtcagagcagacgccggccgaggccggtgctgcgggggcccgggaggacgcctgtcgggattatcagtcatcgctcgaagacctgaccttcaatagcaagccgcacatcaatatgctgaccattctagccgaggagaacctgcccttcgccaaggagatcgtctctctcatcgaggcccaaaccgccaaggctccttcctcagagaagcttcctgttatgtaccttatggattctattgtgaaaaacgttggaagagagtatctcactgcctttactaaaaatctagttgcaacatttatttgtgtgtttgaaaaggtggatgaaaatactaggaaaagtttatttaagttacgttctacatgggatgaaatattccctttgaagaaactttatgccctggatgtcagagtcaattcattagatcctgcttggcctattaaacctctaccccccaatgtgaatacgtctagcatccatgtgaatcctaaatttttaaataaatcgcccgaggagccttcaacacctggtacagtggtcagttcccctagcatctccactcctccaattgttcctgatatacaaaagaatcttacacaagaacaactaataaggcagcagttactggcaaagcaaaaacagttgttagaacttcagcagaaaaagctggagcttgagctagagcaagctaaggcacagttggcagtttctcttagtgttcagcaggaaacatccaatttaggtcctggatctgcaccatccaaattacatgtttcacagattccccctatggcagttaaagctcctcatcaggttcctgtgcaatctgagaaaagccgtccaggaccatccttacaaattcaggatttaaaaggaactaaccgggatcctcgtctgaacaggataagccaacattctcatggaaaagatcagagtcacaggaaagaatttctaatgaacacattaaaccagtctgatactaagacaagtaaaactataccctctgaaaaactaaattcatccaagcaagaaaaaagtaaatcaggtgaaaaaataaccaagaaagaacttgaccaattagattctaaatcgaaatcgaaatcgaaatcaccctcacctttgaaaaacaaattatctcacacaaaagacttgaaaaatcaagaatcggaaagtatgaggttgtctgatatgaacaagagagatccaagattaaaaaaacatcttcaggataagaccgatggcaaagatgatgatgtgaaagagaagagaaaaactgcagaaaaaaaggataaagatgagcacatgaagtcatccgaacacagactggctggaagtagaaataaaatcataaatggcattgtacaaaaacaggatacaataacagaagagtcagaaaaacaggggacaaaaccagggagatcgagtactagaaagcgatcaagatctcgatcacccaagtctaggtcaccaattatacattccccaaagagaagagataggcggtcacccaaacgaaggcaaagaagtatgtctccaacatcgacacctaaagctggaaagattcgccaatctggagctaagcagtcacatatggaagagtttacaccaccttctagggaagacagaaatgctaagagaagtactaaacaggatattcgggatccaaggcgaatgaaaaagactgaagaggagcgaccacaagaaactacaaatcagcattctacaaagtcaggcactgaaccaaaggagaatgtagaaaactggcaaagttccaagtctgccaaaagatggaaatctggttgggaagaaaataaaagcttacaacaggttgatgaacatagtaaacctcctcatctgaggcatagggagagctggtcaagcactaaaggaattttatcacctcgagccccaaagcagcaacagcatcgattaagtgtagatgccaatcttcagattcctaaagagttaactcttgcaagcaaaagagaattacttcaaaagacgagtgaacgtttagcatctggtgaaattacacaggatgacttccttgttgttgtgcatcaaattcgacagctatttcagtatcaagaaggtgtgcgagaagagcagagatctccattcaatgatcgttttccacttaagcgacctcgatatgaagattcagataaaccatttgtagatagtccagcatcaagattcgccggcctggatacaaatcagcgacttacagctttagctgaagacagaccgttatttgatggacctagtaggccatcagtagcaagagatggcccaacgaagatgatttttgaaggacccaataaattaagccctcgaattgatggacctcccacaccagcttctcttcggtttgatgggtcaccaggacaaatggggggaggaggccctttgagatttgaggggccacaaggtcagctaggaggtgggtgtcctttgagatttgaaggtcctccaggaccagtggggacacctctgcggtttgagggcccaattggtcaagcaggaggaggtggttttcggtttgaaggttcccctggtctgaggtttgagggatctccaggtggtttgagatttgagggaccaggaggccagcctgtgggtggtctgaggtttgagggacatcgtggtcaacctgtgggtggtctaaggtttgagggacctcatggtcagcctgtgggtggacttagatttgataatccccgaggtcagcctgtaggtggacttagatttgaggggggtcatggtccatcaggggctgcgattaggtttgatggacctcatggtcagccaggaggtggaatcagatttgagggccctttgctacagcaaggggttggaatgaggtttgagggcccccatggtcagtcagtagctggtctgagatttgagggacaacataatcaacttggtgggaaccttaggtttgagggtccacatggtcagccaggggttggtatcaggtttgaaggccctttagtccaacaaggaggtggaatgaggtttgagggtccttctgtaccaggaggtggcctgagaattgaagggcctctgggtcaaggtggtccaagatttgaaggttgtcatgctttaaggtttgatgggcagccaggtcagccgtcactcttgccaagatttgatggattacatggtcagccaggtcctagatttgaaaggactcctggtcagccaggccctcagaggtttgatggaccacctggacagcaggttcaacccagatttgacggtgtacctcaaagatttgatggtccacaacatcagcaagcatcaaggtttgatattcctcttggtcttcaaggcacaagatttgacaatcatccttcacaaaggcttgaatcagtatctttcaatcagactggtccatataatgatccacctggcaatgcttttaatgccccatcccaaggactacagttccaaagacatgaacaaatatttgattcacctcaaggaccaaattttaatggaccacatggccctggaaaccagagtttctctaatccacttaacagagcttctggacactattttgatgaaaaaaatcttcagagttctcaatttggaaactttggcaatatacctgctccaatgacagtaggaaatattcaggcatctcaacaggttctgagtggtgttgctcagccagtagcttttggtcaaggacaacagtttttaccagttcatccacaaaatcctggatttgttcagaatccttcaggagccctccctaaggcatatcctgataatcatctcagtcaggtggatgtaaatgaattgttttcaaaattgctaaaaacaggaattctcaaattgtcccaaactgattcagctacaacacaagtaagtgaagtaactgctcagcctccccctgaagaggaggaagatcaaaatgaagatcaagatgttccagatcttactaattttacagttgaagaattgaaacaacgttatgacagtgttataaatcgactgtacactggtattcagtgttactcttgtggaatgaggtttacaacatcacagacagatgtttatgcagatcatttggactggcattatcggcaaaatagaactgaaaaggatgttagccgaaaagtcactcatagacgttggtactacagtttaacagactggatagaatttgaggagatagctgatctggaagaacgggcaaagagccagttttttgaaaaggtgcatgaagaagttgtgctcaaaactcaagaggctgctaaagaaaaagagttccaaagtgtacctgctggaccagctggagcagttgagagttgtgaaatctgtcaagaacaatttgaacaatactgggatgaagaagaggaggaatggcatttgaaaaatgctattagagtagatggaaagatttatcatccatcatgttatgaagattatcaaaatacatcttcatttgattgtacaccatctcccagcaagacaccagttgaaaaccccttgaatattatgttgaacattgtcaaaaacgaattgcaggaaccctgtgacagtcccaaagttaaggaagaacgaattgatacaccaccagcttgtacagaggaaagcatagcaacaccctctgaaattaaaacagaaaatgacacagtcgagtcagtttaaataaaatgagaaaggtatgtttttcttttttaaaaaagctgctgttggatctagaaggtgaagaatttttttatgtatatatagacatatctatataaattgtctggctgaggcagggccttcagctatcatttggttaataaatacattttagtatttgcatttcctactgcctgcagagtttcaggtgcttgttgtgtgaaagttctgtagatgtgtgcaaatttaacgaaatgaaattgtatgtgtaaaaatgtacgatttttcactgtgcaactgtaaattataaataaaaaatatttttgctattcatggagtgtaatatttatgcacaccatcaaatagtttctgtactttttattgggtaaaaatggaattgaacagcaacctcaacataagattttttttctagtagcctcccactgattaaagaagcaagtttgaggtttcatccttcaaaagggggttccgagagagcaccgtagggcttttctcaaatagaaaagccagattttgaaaaaattttaaagataaaataggacatattttgcagatatatatatatatatacacaaacacatctccaggtatagagaaccatccagatgttcacttttgaaaatatctaatgatgcaaagttttattcttgaacttggacactgatgccatcaaacaattaacaaatatatttaagtactaaaggtgattttttttttaaagactttttcaaattgtcaaatgatttaatgcagatgaacatatttctattttaagtaacgggaatctgtaagaatgtttgcttgagatatggttaacttttttcttttgttggttttgacttagatggacaccatgagatgttaatattcatacatgtaataaatagaatgatgaagaaaaaaaaaaaagaaantttggggcgcggcccagaaantttaaacacttgtgggggggcgagggatggcagtgccaggtcaggaacgcgaagggggtcccaaaaacgggcggcctaacaagtggtcg

SEQ ID NO: 364427 - DNA, 6206 bp, Homo sapiens
ggccggagaagaaggcggtgccagggcgtcctgcggaagggccgggggcggggctcgtgacgttgccgggacagccaatcacgcctggttttatcagtggccccgcccttttaccgcacatttcccctcccctagttcatttcgcacgacgcagcggttgggaacacagacattttcggagctggagccgccactgccgccgccattttgtgtctgtggagaaagaagcttctgtggcggctggaagtggacggagatcacccgcgagacggcggcgtttcatacccgaggttccccctgtgtcgtcccccatcccccctccgcggtcagcatgtggtgaagccggagccgcgagagagccggggagaggaagaggagtcggaagggaggcggggtatccagagcggcttcagcttcagctgcagcggacctcggaggggggccgcggcgcaatgtcagagcagacgccggccgaggccggtgctgcgggggcccgggaggacgcctgtcgggattatcagtcatcgctcgaagacctgaccttcaatagcaagccgcacatcaatatgctgaccattctagccgaggagaacctgcccttcgccaaggagatcgtctctctcatcgaggcccaaaccgccaaggctccttcctcagagaagcttcctgttatgtaccttatggattctattgtgaaaaacgttggaagagagtatctcactgcctttactaaaaatctagttgcaacatttatttgtgtgtttgaaaaggtggatgaaaatactaggaaaagtttatttaagttacgttctacatgggatgaaatattccctttgaagaaactttatgccctggatgtcagagtcaattcattagatcctgcttggcctattaaacctctaccccccaatgtgaatacgtctagcatccatgtgaatcctaaatttttaaataaatcgcccgaggagccttcaacacctggtacagtggtcagttcccctagcatctccactcctccaattgttcctgatatacaaaagaatcttacacaagaacaactaataaggcagcagttactggcaaagcaaaaacagttgttagaacttcagcagaaaaagctggagcttgagctagagcaagctaaggcacagttggcagtttctcttagtgttcagcaggaaacatccaatttaggtcctggatctgcaccatccaaattacatgtttcacagattccccctatggcagttaaagctcctcatcaggttcctgtgcaatctgagaaaagccgtccaggaccatccttacaaattcaggatttaaaaggaactaaccgggatcctcgtctgaacaggataagccaacattctcatggaaaagatcagagtcacaggaaagaatttctaatgaacacattaaaccagtctgatactaagacaagtaaaactataccctctgaaaaactaaattcatccaagcaagaaaaaagtaaatcaggtgaaaaaataaccaagaaagaacttgaccaattagattctaaatcgaaatcgaaatcgaaatcaccctcacctttgaaaaacaaattatctcacacaaaagacttgaaaaatcaagaatcggaaagtatgaggttgtctgatatgaacaagagagatccaagattaaaaaaacatcttcaggataagaccgatggcaaagatgatgatgtgaaagagaagagaaaaactgcagaaaaaaaggataaagatgagcacatgaagtcatccgaacacagactggctggaagtagaaataaaatcataaatggcattgtacaaaaacaggatacaataacagaagagtcagaaaaacaggggacaaaaccagggagatcgagtactagaaagcgatcaagatctcgatcacccaagtctaggtcaccaattatacattccccaaagagaagagataggcggtcacccaaacgaaggcaaagaagtatgtctccaacatcgacacctaaagctggaaagattcgccaatctggagctaagcagtcacatatggaagagtttacaccaccttctagggaagacagaaatgctaagagaagtactaaacaggatattcgggatccaaggcgaatgaaaaagactgaagaggagcgaccacaagaaactacaaatcagcattctacaaagtcaggcactgaaccaaaggagaatgtagaaaactggcaaagttccaagtctgccaaaagatggaaatctggttgggaagaaaataaaagcttacaacaggttgatgaacatagtaaacctcctcatctgaggcatagggagagctggtcaagcactaaaggaattttatcacctcgagccccaaagcagcaacagcatcgattaagtgtagatgccaatcttcagattcctaaagagttaactcttgcaagcaaaagagaattacttcaaaagacgagtgaacgtttagcatctggtgaaattacacaggatgacttccttgttgttgtgcatcaaattcgacagctatttcagtatcaagaaggtgtgcgagaagagcagagatctccattcaatgatcgttttccacttaagcgacctcgatatgaagattcagataaaccatttgtagatagtccagcatcaagattcgccggcctggatacaaatcagcgacttacagctttagctgaagacagaccgttatttgatggacctagtaggccatcagtagcaagagatggcccaacgaagatgatttttgaaggacccaataaattaagccctcgaattgatggacctcccacaccagcttctcttcggtttgatgggtcaccaggacaaatggggggaggaggccctttgagatttgaggggccacaaggtcagctaggaggtgggtgtcctttgagatttgaaggtcctccaggaccagtggggacacctctgcggtttgagggcccaattggtcaagcaggaggaggtggttttcggtttgaaggttcccctggtctgaggtttgagggatctccaggtggtttgagatttgagggaccaggaggccagcctgtgggtggtctgaggtttgagggacatcgtggtcaacctgtgggtggtctaaggtttgagggacctcatggtcagcctgtgggtggacttagatttgataatccccgaggtcagcctgtaggtggacttagatttgaggggggtcatggtccatcaggggctgcgattaggtttgatggacctcatggtcagccaggaggtggaatcagatttgagggccctttgctacagcaaggggttggaatgaggtttgagggcccccatggtcagtcagtagctggtctgagatttgagggacaacataatcaacttggtgggaaccttaggtttgagggtccacatggtcagccaggggttggtatcaggtttgaaggccctttagtccaacaaggaggtggaatgaggtttgagggtccttctgtaccaggaggtggcctgagaattgaagggcctctgggtcaaggtggtccaagatttgaaggttgtcatgctttaaggtttgatgggcagccaggtcagccgtcactcttgccaagatttgatggattacatggtcagccaggtcctagatttgaaaggactcctggtcagccaggccctcagaggtttgatggaccacctggacagcaggttcaacccagatttgacggtgtacctcaaagatttgatggtccacaacatcagcaagcatcaaggtttgatattcctcttggtcttcaaggcacaagatttgacaatcatccttcacaaaggcttgaatcagtatctttcaatcagactggtccatataatgatccacctggcaatgcttttaatgccccatcccaaggactacagttccaaagacatgaacaaatatttgattcacctcaaggaccaaattttaatggaccacatggccctggaaaccagagtttctctaatccacttaacagagcttctggacactattttgatgaaaaaaatcttcagagttctcaatttggaaactttggcaatatacctgctccaatgacagtaggaaatattcaggcatctcaacaggttctgagtggtgttgctcagccagtagcttttggtcaaggacaacagtttttaccagttcatccacaaaatcctggatttgttcagaatccttcaggagccctccctaaggcatatcctgataatcatctcagtcaggtggatgtaaatgaattgttttcaaaattgctaaaaacaggaattctcaaattgtcccaaactgattcagctacaacacaagtaagtgaagtaactgctcagcctccccctgaagaggaggaagatcaaaatgaagatcaagatgttccagatcttactaattttacagttgaagaattgaaacaacgttatgacagtgttataaatcgactgtacactggtattcagtgttactcttgtggaatgaggtttacaacatcacagacagatgtttatgcagatcatttggactggcattatcggcaaaatagaactgaaaaggatgttagccgaaaagtcactcatagacgttggtactacagtttaacagactggatagaatttgaggagatagctgatctggaagaacgggcaaagagccagttttttgaaaaggtgcatgaagaagttgtgctcaaaactcaagaggctgctaaagaaaaagagttccaaagtgtacctgctggaccagctggagcagttgagagttgtgaaatctgtcaagaacaatttgaacaatactgggatgaagaagaggaggaatggcatttgaaaaatgctattagagtagatggaaagatttatcatccatcatgttatgaagattatcaaaatacatcttcatttgattgtacaccatctcccagcaagacaccagttgaaaaccccttgaatattatgttgaacattgtcaaaaacgaattgcaggaaccctgtgacagtcccaaagttaaggaagaacgaattgatacaccaccagcttgtacagaggaaagcatagcaacaccctctgaaattaaaacagaaaatgacacagtcgagtcagtttaaataaaatgagaaaggtatgtttttcttttttaaaaaagctgctgttggatctagaaggtgaagaatttttttatgtatatatagacatatctatataaattgtctggctgaggcagggccttcagctatcatttggttaataaatacattttagtatttgcatttcctactgcctgcagagtttcaggtgcttgttgtgtgaaagttctgtagatgtgtgcaaatttaacgaaatgaaattgtatgtgtaaaaatgtacgatttttcactgtgcaactgtaaattataaataaaaaatatttttgctattcatggagtgtaatatttatgcacaccatcaaatagtttctgtactttttattgggtaaaaatggaattgaacagcaacctcaacataagattttttttctagtagcctcccactgattaaagaagcaagtttgaggtttcatccttcaaaagggggttccgagagagcaccgtagggcttttctcaaatagaaaagccagattttgaaaaaattttaaagataaaataggacatattttgcagatatatatatatatatacacaaacacatctccaggtatagagaaccatccagatgttcacttttgaaaatatctaatgatgcaaagttttattcttgaacttggacactgatgccatcaaacaattaacaaatatatttaagtactaaaggtgattttttttttaaagactttttcaaattgtcaaatgatttaatgcagatgaacatatttctattttaagtaacgggaatctgtaagaatgtttgcttgagatatggttaacttttttcttttgttggttttgacttagatggacaccatgagatgttaatattcatacatgtaataaatagaatgatgaagaaaaacacaacaaaaaaaaaaaaaaaaaaaaaaaaaaaaaataatcataaaaatctatcctatagaatagatgattggaaactgtgctgtagagtgaagaaccacagcaaacgactgagcccggaaacgactgtacctaagcaattagagataactagacggacttgagcgaggggggaaattggtctt

SEQ ID NO: 364428 - DNA, 6026 bp, Homo sapiens
  misc_feature (5200)..(5200): n is a, c, g, or t
ggccggagaagaaggcggtgccagggcgtcctgcggaagggccgggggcggggctcgtgacgttgccgggacagccaatcacgcctggttttatcagtggccccgcccttttaccgcacatttcccctcccctagttcatttcgcacgacgcagcggttgggaacacagacattttcggagctggagccgccactgccgccgccattttgtgtctgtggagaaagaagcttctgtggcggctggaagtggacggagatcacccgcgagacggcggcgtttcatacccgaggttccccctgtgtcgtcccccatcccccctccgcggtcagcatgtggtgaagccggagccgcgagagagccggggagaggaagaggagtcggaagggaggcggggtatccagagcggcttcagcttcagctgcagcggacctcggaggggggccgcggcgcaatgtcagagcagacgccggccgaggccggtgctgcgggggcccgggaggacgcctgtcgggattatcagtcatcgctcgaagacctgaccttcaatagcaagccgcacatcaatatgctgaccattctagccgaggagaacctgcccttcgccaaggagatcgtctctctcatcgaggcccaaaccgccaaggctccttcctcagagaagcttcctgttatgtaccttatggattctattgtgaaaaacgttggaagagagtatctcactgcctttactaaaaatctagttgcaacatttatttgtgtgtttgaaaaggtggatgaaaatactaggaaaagtttatttaagttacgttctacatgggatgaaatattccctttgaagaaactttatgccctggatgtcagagtcaattcattagatcctgcttggcctattaaacctctaccccccaatgtgaatacgtctagcatccatgtgaatcctaaatttttaaataaatcgcccgaggagccttcaacacctggtacagtggtcagttcccctagcatctccactcctccaattgttcctgatatacaaaagaatcttacacaagaacaactaataaggcagcagttactggcaaagcaaaaacagttgttagaacttcagcagaaaaagctggagcttgagctagagcaagctaaggcacagttggcagtttctcttagtgttcagcaggaaacatccaatttaggtcctggatctgcaccatccaaattacatgtttcacagattccccctatggcagttaaagctcctcatcaggttcctgtgcaatctgagaaaagccgtccaggaccatccttacaaattcaggatttaaaaggaactaaccgggatcctcgtctgaacaggataagccaacattctcatggaaaagatcagagtcacaggaaagaatttctaatgaacacattaaaccagtctgatactaagacaagtaaaactataccctctgaaaaactaaattcatccaagcaagaaaaaagtaaatcaggtgaaaaaataaccaagaaagaacttgaccaattagattctaaatcgaaatcgaaatcgaaatcaccctcacctttgaaaaacaaattatctcacacaaaagacttgaaaaatcaagaatcggaaagtatgaggttgtctgatatgaacaagagagatccaagattaaaaaaacatcttcaggataagaccgatggcaaagatgatgatgtgaaagagaagagaaaaactgcagaaaaaaaggataaagatgagcacatgaagtcatccgaacacagactggctggaagtagaaataaaatcataaatggcattgtacaaaaacaggatacaataacagaagagtcagaaaaacaggggacaaaaccagggagatcgagtactagaaagcgatcaagatctcgatcacccaagtctaggtcaccaattatacattccccaaagagaagagataggcggtcacccaaacgaaggcaaagaagtatgtctccaacatcgacacctaaagctggaaagattcgccaatctggagctaagcagtcacatatggaagagtttacaccaccttctagggaagacagaaatgctaagagaagtactaaacaggatattcgggatccaaggcgaatgaaaaagactgaagaggagcgaccacaagaaactacaaatcagcattctacaaagtcaggcactgaaccaaaggagaatgtagaaaactggcaaagttccaagtctgccaaaagatggaaatctggttgggaagaaaataaaagcttacaacaggttgatgaacatagtaaacctcctcatctgaggcatagggagagctggtcaagcactaaaggaattttatcacctcgagccccaaagcagcaacagcatcgattaagtgtagatgccaatcttcagattcctaaagagttaactcttgcaagcaaaagagaattacttcaaaagacgagtgaacgtttagcatctggtgaaattacacaggatgacttccttgttgttgtgcatcaaattcgacagctatttcagtatcaagaaggtgtgcgagaagagcagagatctccattcaatgatcgttttccacttaagcgacctcgatatgaagattcagataaaccatttgtagatagtccagcatcaagattcgccggcctggatacaaatcagcgacttacagctttagctgaagacagaccgttatttgatggacctagtaggccatcagtagcaagagatggcccaacgaagatgatttttgaaggacccaataaattaagccctcgaattgatggacctcccacaccagcttctcttcggtttgatgggtcaccaggacaaatggggggaggaggccctttgagatttgaggggccacaaggtcagctaggaggtgggtgtcctttgagatttgaaggtcctccaggaccagtggggacacctctgcggtttgagggcccaattggtcaagcaggaggaggtggttttcggtttgaaggttcccctggtctgaggtttgagggatctccaggtggtttgagatttgagggaccaggaggccagcctgtgggtggtctgaggtttgagggacatcgtggtcaacctgtgggtggtctaaggtttgagggacctcatggtcagcctgtgggtggacttagatttgataatccccgaggtcagcctgtaggtggacttagatttgaggggggtcatggtccatcaggggctgcgattaggtttgatggacctcatggtcagccaggaggtggaatcagatttgagggccctttgctacagcaaggggttggaatgaggtttgagggcccccatggtcagtcagtagctggtctgagatttgagggacaacataatcaacttggtgggaaccttaggtttgagggtccacatggtcagccaggggttggtatcaggtttgaaggccctttagtccaacaaggaggtggaatgaggtttgagggtccttctgtaccaggaggtggcctgagaattgaagggcctctgggtcaaggtggtccaagatttgaaggttgtcatgctttaaggtttgatgggcagccaggtcagccgtcactcttgccaagatttgatggattacatggtcagccaggtcctagatttgaaaggactcctggtcagccaggccctcagaggtttgatggaccacctggacagcaggttcaacccagatttgacggtgtacctcaaagatttgatggtccacaacatcagcaagcatcaaggtttgatattcctcttggtcttcaaggcacaagatttgacaatcatccttcacaaaggcttgaatcagtatctttcaatcagactggtccatataatgatccacctggcaatgcttttaatgccccatcccaaggactacagttccaaagacatgaacaaatatttgattcacctcaaggaccaaattttaatggaccacatggccctggaaaccagagtttctctaatccacttaacagagcttctggacactattttgatgaaaaaaatcttcagagttctcaatttggaaactttggcaatatacctgctccaatgacagtaggaaatattcaggcatctcaacaggttctgagtggtgttgctcagccagtagcttttggtcaaggacaacagtttttaccagttcatccacaaaatcctggatttgttcagaatccttcaggagccctccctaaggcatatcctgataatcatctcagtcaggtggatgtaaatgaattgttttcaaaattgctaaaaacaggaattctcaaattgtcccaaactgattcagctacaacacaagtaagtgaagtaactgctcagcctccccctgaagaggaggaagatcaaaatgaagatcaagatgttccagatcttactaattttacagttgaagaattgaaacaacgttatgacagtgttataaatcgactgtacactggtattcagtgttactcttgtggaatgaggtttacaacatcacagacagatgtttatgcagatcatttggactggcattatcggcaaaatagaactgaaaaggatgttagccgaaaagtcactcatagacgttggtactacagtttaacagactggatagaatttgaggagatagctgatctggaagaacgggcaaagagccagttttttgaaaaggtgcatgaagaagttgtgctcaaaactcaagaggctgctaaagaaaaagagttccaaagtgtacctgctggaccagctggagcagttgagagttgtgaaatctgtcaagaacaatttgaacaatactgggatgaagaagaggaggaatggcatttgaaaaatgctattagagtagatggaaagatttatcatccatcatgttatgaagattatcaaaatacatcttcatttgattgtacaccatctcccagcaagacaccagttgaaaaccccttgaatattatgttgaacattgtcaaaaacgaattgcaggaaccctgtgacagtcccaaagttaaggaagaacgaattgatacaccaccagcttgtacagaggaaagcatagcaacaccctctgaaattaaaacagaaaatgacacagtcgagtcagtttaaataaaatgagaaaggtatgtttttcttttttaaaaaagctgctgttggatctagaaggtgaagaatttttttatgcggcngggcgtgcgcgcggtgggcgtggcggcgggcgccggcgttggggccggggggggcccgcctggccggcgccggcgccgcgcccgcgcccgccggggcgcggcggggtgggcgggcgcccgccgcgcgaaagttctgtagatgtgtgcaaatttaacgaaatgaaattgtatgtgtaaaaatgtacgatttttcactgtgcaactgtaaattataaataaaaaatatttttgctattcatggagtgtaatatttatgcacaccatcaaatagtttctgtactttttattgggtaaaaatggaattgaacagcaacctcaacataagattttttttctagtagcctcccactgattaaagaagcaagtttgaggtttcatccttcaaaagggggttccgagagagcaccgtagggcttttctcaaatagaaaagccagattttgaaaaaattttaaagataaaataggacatattttgcagatatatatatatatatacacaaacacatctccaggtatagagaaccatccagatgttcacttttgaaaatatctaatgatgcaaagttttattcttgaacttggacactgatgccatcaaacaattaacaaatatatttaagtactaaaggtgattttttttttaaagactttttcaaattgtcaaatgatttaatgcagatgaacatatttctattttaagtaacgggaatctgtaagaatgtttgcttgagatatggttaacttttttcttttgttggttttgacttagatggacaccatgagatgttaatattcatacatgtaataaatagaatgatgaagaaa

SEQ ID NO: 364429 - DNA, 1892 bp, Homo sapiens
ggccggagaagaaggcggtgccagggcgtcctgcggaagggccgggggcggggctcgtgacgttgccgggacagccaatcacgcctggttttatcagtggccccgcccttttaccgcacatttcccctcccctagttcatttcgcacgacgcagcggttgggaacacagacattttcggagctggagccgccactgccgccgccattttgtgtctgtggagaaagaagcttctgtggcggctggaagtggacggagatcacccgcgagacggcggcgtttcatacccgaggttccccctgtgtcgtcccccatcccccctccgcggtcagcatgtggtgaagccggagccgcgagagagccggggagaggaagaggagtcggaagggaggcggggtatccagagcggcttcagcttcagctgcagcggacctcggaggggggccgcggcgcaatgtcagagcagacgccggccgaggccggtgctgcgggggcccgggaggacgcctgtcgggattatcagtcatcgctcgaagacctgaccttcaatagcaagccgcacatcaatatgctgaccattctagccgaggagaacctgcccttcgccaaggagatcgtctctctcatcgaggcccaaaccgccaaggtttttatacaccccgcagcctcctattacttctaatactccctgattttagtgtcagcctcatcccaggtctcgcttccatcccaagggggacagtgttccttctctccaacccccccacccccctccaactcaggctcggtctttggcccaggcttcgagcatgggcctctgggggggagggagtggggaggataaagggtggagtcccacttccgctttccaactccctttttaggccaccgcattgtatatcccgacacacacacgctttgaatagagccctttggggtgggggagacttaaaggcagtttgtggtttggggaagtaagagttaacataagccattttaattccctgggaagtgggagagtgggtctcccattttccccaagcaccctttttggtaattgtgttctgtgggttggaaggaggtgaagggggacctgggagcgagctgttggtgggtgggaatagggatttggccccgagtggagcagccgcctgttaggagcccaacatggcgcctgaaaagcacatgatgcgaaagggaagagaggagaatccattccctgccagccaggcagctgctcactcccgtcagccccattttggggtgggggcggctagataaaacttttattctcctattggagggtctaatttgtcccaaaataggggcaagtggggttgagggtggggtttgggtggggggaggagatcttatccaacctgtaggtggagaactggcccagagggtaacaagtacttgcagtttctctgaaaagttcagtccctcctcctcttccttttctctttttctcccttccctgatagcgaaggagtgtttttctttaccccttgacagaagtggtcctctgccaccttatatttccctgtagtcctcctcttctgtggattcatatgggagcgatatgtcatttaagtaaagttactgttcaacttagttacaatgagttttaatagcgtcccagtgctacattttatttttcaagcttgtactcacggtttagttttttctagttgttagtgattgcaattatcaggatgagcctccttttagcagagtgaacccctttttaaaggccactttaacaacaaccaccaatatattgtttagagacggtttctgtctagtgtaaaacttgagtggtctgactctaataaatggttttgaaatgtgtgactggtattataaaatttgtgaataaaacatataaaatatg

SEQ ID NO: 364430 - DNA, 183 bp, Homo sapiens
gcaggacatcttgaagaaaactttgaaaaatgcttagtataatttgcatctttaagttctacattcacttcaaaagtggttttttttctttctttcttttttttgttaggagccctccctaaggcatatcctgataatcatctcagtcaggtggatgtaaatgaattgttttcaaaattgcta

SEQ ID NO: 364431 - DNA, 284 bp, Homo sapiens
ttatttaagttacgttctacatgggatgaaatattccctttgaagaaactttatgccctggatgtcagagtcaattcattagatcctgcttggcctattaaacctctaccccccaatgtgaatacgtctagcatccatgtgaatcctaaatttttaaataaatcggtaagttttaatatgaatagtaagtaacatacttttaagtatcacattttgaattcttctgcagaacttactgccagaaagtcaaaatagaatactcggtagtgaattggttcaatttg

SEQ ID NO: 364432 - DNA, 811 bp, Homo sapiens
gtaattttcatttctttataaggaagtgttaagattagtgtttttttgttgggttaacacattactttgaaaggaggcggttcataatagtttttgtttgatttttggtcttaataaaaagggtattggactttagtaatagaatgtttgaattagaagggatcttagcagtcacccggttctgtacactttacacaggaggttgcactattagtcagtgacagacccaggactaggtcttctgaatctagttagtcgtttttctgtcgacccacactattttgattgtggatttatatttcatcatcaaactatactgtgctgaaaacaaagcaagttaggctagatacttaaatgggccaagagaagtcagtttttcagactctttaagcataaggatgaaaatttggttttatccattttgggaccaaataatttttgtcttctttccaaagactatcttctggcttaaagttaaaaagaaatatcagaatagcccattagaaatgaatacgcacatatttactttttttctttttgcttcagatttatcatccatcatgttatgaagattatcaaaatgtaagttctttttggttactgtatttgttctcatttgcattaataaattttacttttcagttttttttttgcatcagagcaatattgttattttaaacttaatatattgaactgtttttgttttttgatatagcatttaggttgttcagtaaaaactggtgccagattgacagaattgacatatatgaatatcattttctgtgataacgcaaacaattaaaattttgaa

SEQ ID NO: 364433 - DNA, 770 bp, Homo sapiens
gtttgttcacttacttggtcttctatatatacctgtttcttcccaaatagggagcccagaatttaaaaaactaattatttgttgaccacagcaaactaattattgtttcccaatggtattctaagttttctctttagttatccatactattattatttcttctgtccttttttcactgttacaccagagtggagaagttgaattattcagaatgccaaagatctagagaggtgaaatttaactgttctgccatgtccatcttgacttgactccaaactaaaataagctaactattgccttgttagctagcacaggatcatttcatttttagctaaaaggaaataaataactgggtcagggctatcaataagaagacaggctccatcttccaaaagtcaccaaagttaaggtaaagagggtcaatcacattgttagagaataatactgatctttgggtattaactgtttcagccagctcttggtttcaccattgttacagtatggaaaattgaaatatttgtaattggcttttaaaggccattaagccatattatcaacactaaagattatttctttttcaaaatagacgttatgacagtgttataaatcgactgtacactggtattcagtgttactcttgtggaatgaggtttacaacatcacagacagatgtttatgcagatcatttggactggcattatcggcaaaatagaactgaaaaggatgttagccgaaaagtcactcatagacgttggtactacagtttaaca

SEQ ID NO: 364434 - DNA, 6020 bp, Homo sapiens
ggccggagaagaaggcggtgccagggcgtcctgcggaagggccgggggcggggctcgtgacgttgccgggacagccaatcacgcctggttttatcagtggccccgcccttttaccgcacatttcccctcccctagttcatttcgcacgacgcagcggttgggaacacagacattttcggagctggagccgccactgccgccgccattttgtgtctgtggagaaagaagcttctgtggcggctggaagtggacggagatcacccgcgagacggcggcgtttcatacccgaggttccccctgtgtcgtcccccatcccccctccgcggtcagcatgtggtgaagccggagccgcgagagagccggggagaggaagaggagtcggaagggaggcggggtatccagagcggcttcagcttcagctgcagcggacctcggaggggggccgcggcgcaatgtcagagcagacgccggccgaggccggtgctgcgggggcccgggaggacgcctgtcgggattatcagtcatcgctcgaagacctgaccttcaatagcaagccgcacatcaatatgctgaccattctagccgaggagaacctgcccttcgccaaggagatcgtctctctcatcgaggcccaaaccgccaaggctccttcctcagagaagcttcctgttatgtaccttatggattctattgtgaaaaacgttggaagagagtatctcactgcctttactaaaaatctagttgcaacatttatttgtgtgtttgaaaaggtggatgaaaatactaggaaaagtttatttaagttacgttctacatgggatgaaatattccctttgaagaaactttatgccctggatgtcagagtcaattcattagatcctgcttggcctattaaacctctaccccccaatgtgaatacgtctagcatccatgtgaatcctaaatttttaaataaatcgcccgaggagccttcaacacctggtacagtggtcagttcccctagcatctccactcctccaattgttcctgatatacaaaagaatcttacacaagaacaactaataaggcagcagttactggcaaagcaaaaacagttgttagaacttcagcagaaaaagctggagcttgagctagagcaagctaaggcacagttggcagtttctcttagtgttcagcaggaaacatccaatttaggtcctggatctgcaccatccaaattacatgtttcacagattccccctatggcagttaaagctcctcatcaggttcctgtgcaatctgagaaaagccgtccaggaccatccttacaaattcaggatttaaaaggaactaaccgggatcctcgtctgaacaggataagccaacattctcatggaaaagatcagagtcacaggaaagaatttctaatgaacacattaaaccagtctgatactaagacaagtaaaactataccctctgaaaaactaaattcatccaagcaagaaaaaagtaaatcaggtgaaaaaataaccaagaaagaacttgaccaattagattctaaatcgaaatcgaaatcgaaatcaccctcacctttgaaaaacaaattatctcacacaaaagacttgaaaaatcaagaatcggaaagtatgaggttgtctgatatgaacaagagagatccaagattaaaaaaacatcttcaggataagaccgatggcaaagatgatgatgtgaaagagaagagaaaaactgcagaaaaaaaggataaagatgagcacatgaagtcatccgaacacagactggctggaagtagaaataaaatcataaatggcattgtacaaaaacaggatacaataacagaagagtcagaaaaacaggggacaaaaccagggagatcgagtactagaaagcgatcaagatctcgatcacccaagtctaggtcaccaattatacattccccaaagagaagagataggcggtcacccaaacgaaggcaaagaagtatgtctccaacatcgacacctaaagctggaaagattcgccaatctggagctaagcagtcacatatggaagagtttacaccaccttctagggaagacagaaatgctaagagaagtactaaacaggatattcgggatccaaggcgaatgaaaaagactgaagaggagcgaccacaagaaactacaaatcagcattctacaaagtcaggcactgaaccaaaggagaatgtagaaaactggcaaagttccaagtctgccaaaagatggaaatctggttgggaagaaaataaaagcttacaacaggttgatgaacatagtaaacctcctcatctgaggcatagggagagctggtcaagcactaaaggaattttatcacctcgagccccaaagcagcaacagcatcgattaagtgtagatgccaatcttcagattcctaaagagttaactcttgcaagcaaaagagaattacttcaaaagacgagtgaacgtttagcatctggtgaaattacacaggatgacttccttgttgttgtgcatcaaattcgacagctatttcagtatcaagaaggtgtgcgagaagagcagagatctccattcaatgatcgttttccacttaagcgacctcgatatgaagattcagataaaccatttgtagatagtccagcatcaagattcgccggcctggatacaaatcagcgacttacagctttagctgaagacagaccgttatttgatggacctagtaggccatcagtagcaagagatggcccaacgaagatgatttttgaaggacccaataaattaagccctcgaattgatggacctcccacaccagcttctcttcggtttgatgggtcaccaggacaaatggggggaggaggccctttgagatttgaggggccacaaggtcagctaggaggtgggtgtcctttgagatttgaaggtcctccaggaccagtggggacacctctgcggtttgagggcccaattggtcaagcaggaggaggtggttttcggtttgaaggttcccctggtctgaggtttgagggatctccaggtggtttgagatttgagggaccaggaggccagcctgtgggtggtctgaggtttgagggacatcgtggtcaacctgtgggtggtctaaggtttgagggacctcatggtcagcctgtgggtggacttagatttgataatccccgaggtcagcctgtaggtggacttagatttgaggggggtcatggtccatcaggggctgcgattaggtttgatggacctcatggtcagccaggaggtggaatcagatttgagggccctttgctacagcaaggggttggaatgaggtttgagggcccccatggtcagtcagtagctggtctgagatttgagggacaacataatcaacttggtgggaaccttaggtttgagggtccacatggtcagccaggggttggtatcaggtttgaaggccctttagtccaacaaggaggtggaatgaggtttgagggtccttctgtaccaggaggtggcctgagaattgaagggcctctgggtcaaggtggtccaagatttgaaggttgtcatgctttaaggtttgatgggcagccaggtcagccgtcactcttgccaagatttgatggattacatggtcagccaggtcctagatttgaaaggactcctggtcagccaggccctcagaggtttgatggaccacctggacagcaggttcaacccagatttgacggtgtacctcaaagatttgatggtccacaacatcagcaagcatcaaggtttgatattcctcttggtcttcaaggcacaagatttgacaatcatccttcacaaaggcttgaatcagtatctttcaatcagactggtccatataatgatccacctggcaatgcttttaatgccccatcccaaggactacagttccaaagacatgaacaaatatttgattcacctcaaggaccaaattttaatggaccacatggccctggaaaccagagtttctctaatccacttaacagagcttctggacactattttgatgaaaaaaatcttcagagttctcaatttggaaactttggcaatatacctgctccaatgacagtaggaaatattcaggcatctcaacaggttctgagtggtgttgctcagccagtagcttttggtcaaggacaacagtttttaccagttcatccacaaaatcctggatttgttcagaatccttcaggagccctccctaaggcatatcctgataatcatctcagtcaggtggatgtaaatgaattgttttcaaaattgctaaaaacaggaattctcaaattgtcccaaactgattcagctacaacacaagtaagtgaagtaactgctcagcctccccctgaagaggaggaagatcaaaatgaagatcaagatgttccagatcttactaattttacagttgaagaattgaaacaacgttatgacagtgttataaatcgactgtacactggtattcagtgttactcttgtggaatgaggtttacaacatcacagacagatgtttatgcagatcatttggactggcattatcggcaaaatagaactgaaaaggatgttagccgaaaagtcactcatagacgttggtactacagtttaacagactggatagaatttgaggagatagctgatctggaagaacgggcaaagagccagttttttgaaaaggtgcatgaagaagttgtgctcaaaactcaagaggctgctaaagaaaaagagttccaaagtgtacctgctggaccagctggagcagttgagagttgtgaaatctgtcaagaacaatttgaacaatactgggatgaagaagaggaggaatggcatttgaaaaatgctattagagtagatggaaagatttatcatccatcatgttatgaagattatcaaaatacatcttcatttgattgtacaccatctcccagcaagacaccagttgaaaaccccttgaatattatgttgaacattgtcaaaaacgaattgcaggaaccctgtgacagtcccaaagttaaggaagaacgaattgatacaccaccagcttgtacagaggaaagcatagcaacaccctctgaaattaaaacagaaaatgacacagtcgagtcagtttaaataaaatgagaaaggtatgtttttcttttttaaaaaagctgctgttggatctagaaggtgaagaatttttttatgtatatatagacatatctatataaattgtctggctgaggcagggccttcagctatcatttggttaataaatacattttagtatttgcatttcctactgcctgcagagtttcaggtgcttgttgtgtgaaagttctgtagatgtgtgcaaatttaacgaaatgaaattgtatgtgtaaaaatgtacgatttttcactgtgcaactgtaaattataaataaaaaatatttttgctattcatggagtgtaatatttatgcacaccatcaaatagtttctgtactttttattgggtaaaaatggaattgaacagcaacctcaacataagattttttttctagtagcctcccactgattaaagaagcaagtttgaggtttcatccttcaaaagggggttccgagagagcaccgtagggcttttctcaaatagaaaagccagattttgaaaaaattttaaagataaaataggacatattttgcagatatatatatatatatacacaaacacatctccaggtatagagaaccatccagatgttcacttttgaaaatatctaatgatgcaaagttttattcttgaacttggacactgatgccatcaaacaattaacaaatatatttaagtactaaaggtgattttttttttaaagactttttcaaattgtcaaatgatttaatgcagatgaacatatttctattttaagtaacgggaatctgtaagaatgtttgcttgagatatggttaacttttttcttttgttggttttgacttagatggacaccatgagatgttaatattcatacatgtaataaatagaatgatgaagaaa

SEQ ID NO: 364435 - DNA, 992 bp, Homo sapiens
ggccggagaagaaggcggtgccagggcgtcctgcggaagggccgggggcggggctcgtgacgttgccgggacagccaatcacgcctggttttatcagtggccccgcccttttaccgcacatttcccctcccctagttcatttcgcacgacgcagcggttgggaacacagacattttcggagctggagccgccactgccgccgccattttgtgtctgtggagaaagaagcttctgtggcggctggaagtggacggagatcacccgcgagacggcggcgtttcatacccgaggttccccctgtgtcgtcccccatcccccctccgcggtcagcatgtggtgaagccggagccgcgagagagccggggagaggaagaggagtcggaagggaggcggggtatccagagcggcttcagcttcagctgcagcggacctcggaggggggccgcggcgcaatgtcagagcagacgccggccgaggccggtgctgcgggggcccgggaggacgcctgtcgggattatcagtcatcgctcgaagacctgaccttcaatagcaagccgcacatcaatatgctgaccattctagccgaggagtgtttttctttaccccttgacagaagtggtcctctgccaccttatatttccctgtagtcctcctcttctgtggattcatatgggagcgatatgtcatttaagtaaagttactgttcaacttagttacaatgagttttaatagcgtcccagtgctacattttatttttcaagcttgtactcacggtttagttttttctagttgttagtgattgcaattatcaggatgagcctccttttagcagagtgaacccctttttaaaggccactttaacaacaaccaccaatatattgtttagagacggtttctgtctagtgtaaaacttgagtggtctgactctaataaatggttttgaaatgtgtgactggtattataaaatttgtgaataaaacatataaaatatg

SEQ ID NO: 364436 - DNA, 6757 bp, Homo sapiens
ggccggagaagaaggcggtgccagggcgtcctgcggaagggccgggggcggggctcgtgacgttgccgggacagccaatcacgcctggttttatcagtggccccgcccttttaccgcacatttcccctcccctagttcatttcgcacgacgcagcggttgggaacacagacattttcggagctggagccgccactgccgccgccattttgtgtctgtggagaaagaagcttctgtggcggctggaagtggacggagatcacccgcgagacggcggcgtttcatacccgaggttccccctgtgtcgtcccccatcccccctccgcggtcagcatgtggtgaagccggagccgcgagagagccggggagaggaagaggagtcggaagggaggcggggtatccagagcggcttcagcttcagctgcagcggacctcggaggggggccgcggcgcaatgtcagagcagacgccggccgaggccggtgctgcgggggcccgggaggacgcctgtcgggattatcagtcatcgctcgaagacctgaccttcaatagcaagccgcacatcaatatgctgaccattctagccgaggagaacctgcccttcgccaaggagatcgtctctctcatcgaggcccaaaccgccaaggctccttcctcagagaagcttcctgttatgtaccttatggattctattgtgaaaaacgttggaagagagtatctcactgcctttactaaaaatctagttgcaacatttatttgtgtgtttgaaaaggtggatgaaaatactaggaaaagtttatttaagttacgttctacatgggatgaaatattccctttgaagaaactttatgccctggatgtcagagtcaattcattagatcctgcttggcctattaaacctctaccccccaatgtgaatacgtctagcatccatgtgaatcctaaatttttaaataaatcgcccgaggagccttcaacacctggtacagtggtcagttcccctagcatctccactcctccaattgttcctgatatacaaaagaatcttacacaagaacaactaataaggcagcagttactggcaaagcaaaaacagttgttagaacttcagcagaaaaagctggagcttgagctagagcaagctaaggcacagttggcagtttctcttagtgttcagcaggaaacatccaatttaggtcctggatctgcaccatccaaattacatgtttcacagattccccctatggcagttaaagctcctcatcaggttcctgtgcaatctgagaaaagccgtccaggaccatccttacaaattcaggatttaaaaggaactaaccgggatcctcgtctgaacaggataagccaacattctcatggaaaagatcagagtcacaggaaagaatttctaatgaacacattaaaccagtctgatactaagacaagtaaaactataccctctgaaaaactaaattcatccaagcaagaaaaaagtaaatcaggtgaaaaaataaccaagaaagaacttgaccaattagattctaaatcgaaatcgaaatcgaaatcaccctcacctttgaaaaacaaattatctcacacaaaagacttgaaaaatcaagaatcggaaagtatgaggttgtctgatatgaacaagagagatccaagattaaaaaaacatcttcaggataagaccgatggcaaagatgatgatgtgaaagagaagagaaaaactgcagaaaaaaaggataaagatgagcacatgaagtcatccgaacacagactggctggaagtagaaataaaatcataaatggcattgtacaaaaacaggatacaataacagaagagtcagaaaaacaggggacaaaaccagggagatcgagtactagaaagcgatcaagatctcgatcacccaagtctaggtcaccaattatacattccccaaagagaagagataggcggtcacccaaacgaaggcaaagaagtatgtctccaacatcgacacctaaagctggaaagattcgccaatctggagctaagcagtcacatatggaagagtttacaccaccttctagggaagacagaaatgctaagagaagtactaaacaggatattcgggatccaaggcgaatgaaaaagactgaagaggagcgaccacaagaaactacaaatcagcattctacaaagtcaggcactgaaccaaaggagaatgtagaaaactggcaaagttccaagtctgccaaaagatggaaatctggttgggaagaaaataaaagcttacaacaggttgatgaacatagtaaacctcctcatctgaggcatagggagagctggtcaagcactaaaggaattttatcacctcgagccccaaagcagcaacagcatcgattaagtgtagatgccaatcttcagattcctaaagagttaactcttgcaagcaaaagagaattacttcaaaagacgagtgaacgtttagcatctggtgaaattacacaggatgacttccttgttgttgtgcatcaaattcgacagctatttcagtatcaagaaggtgtgcgagaagagcagagatctccattcaatgatcgttttccacttaagcgacctcgatatgaagattcagataaaccatttgtagatagtccagcatcaagattcgccggcctggatacaaatcagcgacttacagctttagctgaagacagaccgttatttgatggacctagtaggccatcagtagcaagagatggcccaacgaagatgatttttgaaggacccaataaattaagccctcgaattgatggacctcccacaccagcttctcttcggtttgatgggtcaccaggacaaatggggggaggaggccctttgagatttgaggggccacaaggtcagctaggaggtgggtgtcctttgagatttgaaggtcctccaggaccagtggggacacctctgcggtttgagggcccaattggtcaagcaggaggaggtggttttcggtttgaaggttcccctggtctgaggtttgagggatctccaggtggtttgagatttgagggaccaggaggccagcctgtgggtggtctgaggtttgagggacatcgtggtcaacctgtgggtggtctaaggtttgagggacctcatggtcagcctgtgggtggacttagatttgataatccccgaggtcagcctgtaggtggacttagatttgaggggggtcatggtccatcaggggctgcgattaggtttgatggacctcatggtcagccaggaggtggaatcagatttgagggccctttgctacagcaaggggttggaatgaggtttgagggcccccatggtcagtcagtagctggtctgagatttgagggacaacataatcaacttggtgggaaccttaggtttgagggtccacatggtcagccaggggttggtatcaggtttgaaggccctttagtccaacaaggaggtggaatgaggtttgagggtccttctgtaccaggaggtggcctgagaattgaagggcctctgggtcaaggtggtccaagatttgaaggttgtcatgctttaaggtttgatgggcagccaggtcagccgtcactcttgccaagatttgatggattacatggtcagccaggtcctagatttgaaaggactcctggtcagccaggccctcagaggtttgatggaccacctggacagcaggttcaacccagatttgacggtgtacctcaaagatttgatggtccacaacatcagcaagcatcaaggtttgatattcctcttggtcttcaaggcacaagatttgacaatcatccttcacaaaggcttgaatcagtatctttcaatcagactggtccatataatgatccacctggcaatgcttttaatgccccatcccaaggactacagttccaaagacatgaacaaatatttgattcacctcaaggaccaaattttaatggaccacatggccctggaaaccagagtttctctaatccacttaacagagcttctggacactattttgatgaaaaaaatcttcagagttctcaatttggaaactttggcaatatacctgctccaatgacagtaggaaatattcaggcatctcaacaggttctgagtggtgttgctcagccagtagcttttggtcaaggacaacagtttttaccagttcatccacaaaatcctggatttgttcagaatccttcaggagccctccctaaggcatatcctgataatcatctcagtcaggtggatgtaaatgaattgttttcaaaattgctaaaaacaggaattctcaaattgtcccaaactgattcagctacaacacaagtaagtgaagtaactgctcagcctccccctgaagaggaggaagatcaaaatgaagatcaagatgttccagatcttactaattttacagttgaagaattgaaacaacgttatgacagtgttataaatcgactgtacactggtattcagtgttactcttgtggaatgaggtttacaacatcacagacagatgtttatgcagatcatttggactggcattatcggcaaaatagaactgaaaaggatgttagccgaaaagtcactcatagacgttggtactacagtttaacagactggatagaatttgaggagatagctgatctggaagaacgggcaaagagccagttttttgaaaaggtgcatgaagaagttgtgctcaaaactcaagaggctgctaaagaaaaagagttccaaagtgtacctgctggaccagctggagcagttgagagttgtgaaatctgtcaagaacaatttgaacaatactgggatgaagaagaggaggaatggcatttgaaaaatgctattagagtagatggaaagatttatcatccatcatgttatgaagattatcaaaatacatcttcatttgattgtacaccatctcccagcaagacaccagttgaaaaccccttgaatattatgttgaacattgtcaaaaacgaattgcaggaaccctgtgacagtcccaaagttaaggaagaacgaattgatacaccaccagcttgtacagaggaaagcatagcaacaccctctgaaattaaaacagaaaatgacacagtcgagtcagtttaaataaaatgagaaaggtatgtttttcttttttaaaaaagctgctgttggatctagaaggtgaagaatttttttatgtatatatagacatatctatataaattgtctggctgaggcagggccttcagctatcatttggttaataaatacattttagtatttgcatttcctactgcctgcagagtttcaggtgcttgttgtgtgaaagttctgtagatgtgtgcaaatttaacgaaatgaaattgtatgtgtaaaaatgtacgatttttcactgtgcaactgtaaattataaataaaaaatatttttgctattcatggagtgtaatatttatgcacaccatcaaatagtttctgtactttttattgggtaaaaatggaattgaacagcaacctcaacataagattttttttctagtagcctcccactgattaaagaagcaagtttgaggtttcatccttcaaaagggggttccgagagagcaccgtagggcttttctcaaatagaaaagccagattttgaaaaaattttaaagataaaataggacatattttgcagatatatatatatatatacacaaacacatctccaggtatagagaaccatccagatgttcacttttgaaaatatctaatgatgcaaagttttattcttgaacttggacactgatgccatcaaacaattaacaaatatatttaagtactaaaggtgattttttttttaaagactttttcaaattgtcaaatgatttaatgcagatgaacatatttctattttaagtaacgggaatctgtaagaatgtttgcttgagatatggttaacttttttcttttgttggttttgacttagatggacaccatgagatgttaatattcatacatgtaataaatagaatgatgaagaaactttgtttgtacttctttatttcttgaaaagctttagaatgtgactttcttgttgtctttcatctgttttttgaaacatgaacatggtacttgctatgagccaggcactctgagacaggttagtcttttctgccatttattggagataggcatataaaacactgagttttattgagcacatagtatgtggcaggcactagcactttctacatgtattttctctggtattcacatctaataactacatggtagatggtgtccccactttacagatgaaattaagccactcactttaaaatttttataagaatttgaacgtggctttgtttcctctaattccatacaatttctgcaattttaaaagatacccccaaattgattgttaggatagaaataagcacaccaaactactggaaggtggctaaggaagattctacaaaagtggtgacatttgagtcttggaggataaccaggagtggagtccatactgatgggaagggtatctttggaaaatgaacagcaaatgtaaaggcttaaaatacttttgtgttttcaaaaattgacttcttatggttaaaactcagtagttttgaatagattatgatgagccattaatttttttagtagaaatggagtctcactacgtagtccaggctggtttcgaattcctgggctcaagtgatcctactgccttggcctcccagagtgctgggattacaggcatgagccacgtgccc

SEQ ID NO: 364437 - DNA, 3866 bp, Homo sapiens
aacatagatgcaatgtacgggatagtcctacagaagaaaataaaggtggattaaaaaagaaacctctcttatctgatgctgaattaacctactatgaacataaagcaaaactgaaaaggacacaggttcagcattcatttccaagacttgatctcttagatcctgatatttttgactaccctttgactgatgccttgttgtctggaatagaatgtgagccatccaaaagtaaacatgcaagtaggaatagtggagcacagtttgacagaaaagaacaatttagtgaaagagcaagacgtctttctcctatatctgggagtcgtacttatgctgagaatctttcaccccatgagggccggagaagacatgacgagcaagtctctgctaaaggtgtgcgagaagagcagagatctccattcaatgatcgttttccacttaagcgacctcgatatgaagattcagataaaccatttgtagatagtccagcatcaagattcgccggcctggatacaaatcagcgacttacagctttagctgaagacagaccgttatttgatggacctagtaggccatcagtagcaagagatggcccaacgaagatgatttttgaaggacccaataaattaagccctcgaattgatggacctcccacaccagcttctcttcggtttgatgggtcaccaggacaaatggggggaggaggccctttgagatttgaggggccacaaggtcagctaggaggtgggtgtcctttgagatttgaaggtcctccaggaccagtggggacacctctgcggtttgagggcccaattggtcaagcaggaggaggtggttttcggtttgaaggttcccctggtctgaggtttgagggatctccaggtggtttgagatttgagggaccaggaggccagcctgtgggtggtctgaggtttgagggacatcgtggtcaacctgtgggtggtctaaggtttgagggacctcatggtcagcctgtgggtggacttagatttgataatccccgaggtcagcctgtaggtggacttagatttgaggggggtcatggtccatcaggggctgcgattaggtttgatggacctcatggtcagccaggaggtggaatcagatttgagggccctttgctacagcaaggggttggaatgaggtttgagggcccccatggtcagtcagtagctggtctgagatttgagggacaacataatcaacttggtgggaaccttaggtttgagggtccacatggtcagccaggggttggtatcaggtttgaaggccctttagtccaacaaggaggtggaatgaggtttgagggtccttctgtaccaggaggtggcctgagaattgaagggcctctgggtcaaggtggtccaagatttgaaggttgtcatgctttaaggtttgatgggcagccaggtcagccgtcactcttgccaagatttgatggattacatggtcagccaggtcctagatttgaaaggactcctggtcagccaggccctcagaggtttgatggaccacctggacagcaggttcaacccagatttgacggtgtacctcaaagatttgatggtccacaacatcagcaagcatcaaggtttgatattcctcttggtcttcaaggcacaagatttgacaatcatccttcacaaaggcttgaatcagtatctttcaatcagactggtccatataatgatccacctggcaatgcttttaatgccccatcccaaggactacagttccaaagacatgaacaaatatttgattcacctcaaggaccaaattttaatggaccacatggccctggaaaccagagtttctctaatccacttaacagagcttctggacactattttgatgaaaaaaatcttcagagttctcaatttggaaactttggcaatatacctgctccaatgacagtaggaaatattcaggcatctcaacaggttctgagtggtgttgctcagccagtagcttttggtcaaggacaacagtttttaccagttcatccacaaaatcctggatttgttcagaatccttcaggagccctccctaaggcatatcctgataatcatctcagtcaggtggatgtaaatgaattgttttcaaaattgctaaaaacaggaattctcaaattgtcccaaactgattcagctacaacacaagtaagtgaagtaactgctcagcctccccctgaagaggaggaagatcaaaatgaagatcaagatgttccagatcttactaattttacagttgaagaattgaaacaacgttatgacagtgttataaatcgactgtacactggtattcagtgttactcttgtggaatgaggtttacaacatcacagacagatgtttatgcagatcatttggactggcattatcggcaaaatagaactgaaaaggatgttagccgaaaagtcactcatagacgttggtactacagtttaacagactggatagaatttgaggagatagctgatctggaagaacgggcaaagagccagttttttgaaaaggtgcatgaagaagttgtgctcaaaactcaagaggctgctaaagaaaaagagttccaaagtgtacctgctggaccagctggagcagttgagagttgtgaaatctgtcaagaacaatttgaacaatactgggatgaagaagaggaggaatggcatttgaaaaatgctattagagtagatggaaagatttatcatccatcatgttatgaagattatcaaaatacatcttcatttgattgtacaccatctcccagcaagacaccagttgaaaaccccttgaatattatgttgaacattgtcaaaaacgaattgcaggaaccctgtgacagtcccaaagttaaggaagaacgaattgatacaccaccagcttgtacagaggaaagcatagcaacaccctctgaaattaaaacagaaaatgacacagtcgagtcagtttaaataaaatgagaaaggtatgtttttcttttttaaaaaagctgctgttggatctagaaggtgaagaatttttttatgtatatatagacatatctatataaattgtctggctgaggcagggccttcagctatcatttggttaataaatacattttagtatttgcatttcctactgcctgcagagtttcaggtgcttgttgtgtgaaagttctgtagatgtgtgcaaatttaacgaaatgaaattgtatgtgtaaaaatgtacgatttttcactgtgcaactgtaaattataaataaaaaatatttttgctattcatggagtgtaatatttatgcacaccatcaaatagtttctgtactttttattgggtaaaaatggaattgaacagcaacctcaacataagattttttttctagtagcctcccactgattaaagaagcaagtttgaggtttcatccttcaaaagggggttccgagagagcaccgtagggcttttctcaaatagaaaagccagattttgaaaaaattttaaagataaaataggacatattttgcagatatatatatatatatacacaaacacatctccaggtatagagaaccatccagatgttcacttttgaaaatatctaatgatgcaaagttttattcttgaacttggacactgatgccatcaaacaattaacaaatatatttaagtactaaaggtgattttttttttaaagactttttcaaattgtcaaatgatttaatgcagatgaacatatttctattttaagtaacgggaatctgtaagaatgtttgcttgagatatggttaacttttttcttttgttggttttgacttagatggacaccatgagatgttaatattcatacatgtaataaatagaatgatgaagaaa

SEQ ID NO: 364438 - DNA, 1564 bp, Homo sapiens
ggccggagaagaaggcggtgccagggcgtcctgcggaagggccgggggcggggctcgtgacgttgccgggacagccaatcacgcctggttttatcagtggccccgcccttttaccgcacatttcccctcccctagttcatttcgcacgacgcagcggttgggaacacagacattttcggagctggagccgccactgccgccgccattttgtgtctgtggagaaagaagcttctgtggcggctggaagtggacggagatcacccgcgagacggcggcgtttcatacccgaggttccccctgtgtcgtcccccatcccccctccgcggtcagcatgtggtgaagccggagccgcgagagagccggggagaggaagaggagtcggaagggaggcggggtatccagagcggcttcagcttcagctgcagcggacctcggaggggggccgcggcgcaatgtcagagcagacgccggccgaggccggtgctgcgggggcccgggaggacgcctgtcgggattatcagtcatcgctcgaagacctgaccttcaatagcaagccgcacatcaatatgctgaccattctagccgaggagaacctgcccttcgccaaggagatcgtctctctcatcgaggcccaaaccgccaaggtttttatacaccccgcagcctcctattacttctaatactccctgattttagtgtcagcctcatcccaggtctcgcttccatcccaagggggacagtgttccttctctccaacccccccacccccctccaatgttggtgggtgggaatagggatttggccccgagtggagcagccgcctgttaggagcccaacatggcgcctgaaaagcacatgatgcgaaagggaagagaggagaatccattccctgccagccaggcagctgctcactcccgtcagccccattttggggtgggggcggctagataaaacttttattctcctattggagggtctaatttgtcccaaaataggggcaagtggggttgagggtggggtttgggtggggggaggagatcttatccaacctgtaggtggagaactggcccagagggtaacaagtacttgcagtttctctgaaaagttcagtccctcctcctcttccttttctctttttctcccttccctgatagcgaaggagtgtttttctttaccccttgacagaagtggtcctctgccaccttatatttccctgtagtcctcctcttctgtggattcatatgggagcgatatgtcatttaagtaaagttactgttcaacttagttacaatgagttttaatagcgtcccagtgctacattttatttttcaagcttgtactcacggtttagttttttctagttgttagtgattgcaattatcaggatgagcctccttttagcagagtgaacccctttttaaaggccactttaacaacaaccaccaatatattgtttagagacggtttctgtctagtgtaaaacttgagtggtctgactctaataaatggttttgaaatgtgtgactggtattataaaatttgtgaataaaacatataaaatatg

SEQ ID NO: 364439 - DNA, 249 bp, Homo sapiens
cttcgagatcagttttcatttaagtctgcctggattggatggcaggtcaagctttttaaactttaacccaacatagattctgtcagaagcaccactaggtctggtgaatttctggatctattctgtattgcctcctaatcccttggggtatgaatctctgagaagccctttcaccttcagccctggcctctacctcccacatgttgtgggaagtcagggacccctaacagagggaccggctagagccga

SEQ ID NO: 364440 - DNA, 5176 bp, Homo sapiens
aggggcggagcgtggctcggtgacgtcctcccaagatggcggagacagagtgaagaaactgtgttccccccttgggttgctatcggtggtagaagtgttgccattcaccgtcacttattgatgtgtccaaaggattgtgttagttgatcaagatcaagggtaaaattccattctgatatcaaaatgcagtattcgcaccactgtgagcaccttttagagagactgaacaaacagcgggaagcaggttttctctgtgactgtaccatagtgattggggaattccagtttaaagctcataggaatgtgctggcctcctttagtgagtattttggtgcgatctacagaagcacttctgagaacaatgtctttcttgatcagagtcaggtgaaggctgatggatttcagaaactgttggagtttatatacacaggaactttaaatcttgacagttggaatgttaaagaaattcatcaggctgctgactatctcaaagtggaagaggtggtcactaaatgcaaaataaagatggaagattttgcttttattgctaatccttcttctacagagatatctagtattactggaaacattgaattgaatcaacagacttgtcttcttactctgcgagattataataatcgagagaaatcagaagtatctacagatttgattcaggcaaatcctaaacaaggcgcgttagcgaaaaagtcatctcaaacgaaaaagaagaagaaggctttcaactccccgaaaacagggcagaataaaacagtgcaatatcccagtgacatcttagagaatgcatctgttgaattattcctagatgcaaataaactgcccacacctgtagtagaacaagttgcacaaataaatgataattcagaactcgagttgacatcagttgtggaaaatacttttccagcacaagatattgtgcacactgttacagtgaaacggaaacgtggaaaatcacagccaaactgtgctctgaaagaacactctatgtctaatatagccagcgtcaagagtccttatgaggcggagaactccggggaagagctggatcagaggtattccaaggccaagccaatgtgtaacacatgtgggaaagtgttttcagaagccagcagtttgagaaggcacatgagaatacataaaggagtcaaaccttacgtctgccacttatgtggaaaggcatttacccaatgtaaccagctgaaaacgcatgtaagaactcatacaggtgagaagccatacaaatgtgaattgtgtgataaaggatttgctcagaaatgtcagctagtcttccatagtcgcatgcatcatggtgaagaaaaaccctataaatgtgatgtatgcaacttacagtttgcaacttctagcaatctcaagattcatgcaaggaagcatagtggagagaagccatatgtctgtgataggtgtggacagagatttgctcaagccagcacactgacctatcatgtccgtaggcatactggagaaaagccttatgtatgtgatacctgtgggaaggcatttgctgtctctagttctcttatcactcattctcgaaaacatacaggtgaaaaaccatacatatgtggtatttgtgggaaaagttttatttcctcaggagagctcaacaaacactttcggtcccatacaggagaaagaccatttatctgcgaattatgtggaaattcttacacagatattaaaaatttaaagaagcacaaaacaaaagtccattctggtgcagataaaactctagactccagtgcagaggatcatactttgagtgaacaggattccatacaaaaaagtcctttatcagaaactatggatgtgaagccttctgatatgactttaccattagctcttccacttgggactgaggaccatcacatgcttctgcctgtcacggatactcagtctcctacatcagatacattgttgaggtcaactgtgaatgggtattcagaaccacagttgatttttttacaacaattatactgactttgtaaggaatatggaattgctaagatatcattggtagcaaacatctctggtaaggtgcatatattcatattaaattcccattcatttgagttgtgaccattatttttcattcactgaagtaaaagcacctgatgctgcatcacaactgcaatgtttgtttttatttttggctttatgtctatactccacagagagctttttaagtaatgaattatgtagcactattttgggtggatgagttttattttcttttaaagctgccttaattccatttttattttgcattttagaattgcccttcatttactaaatcagccagttaatgtgattcagttgtgacctgtgggattttaaaattttcctgccctcataatttaagcaaaatccacgatagtatcagcccaagagtgtgttgctatttgtaagccccatggatcaatacataaactatgcataaaaataaaatttcatattttcgctcgtaaaaatttaggcgctgaataagaattgtgctatttctctattaatatattgttagaaataacttttctaatgaaacaaaaatgtttctcaaaatctagaaaagtgcatataaatttttgttcatttagaactgagtattctggagaaaaccaatggtcagcacttttggtttgagttatctgagattgtattttcaaaatgaattttaagtagatatttggtgtttttatcttgtcaaagacagtttcaaaatttgattcagtttatgttttattccgttctaaaatattggagatgaggaaaatgtacttgagttttgaaatattttggtaagcctctcttactcctgttatgcactttttaaaataaatactgaattccagaaagaattttctagatataaacttaatgcatactagaaatcacttggcttctaaatttggtacattatattgcataaagagttaagaaattaacctcaattataagtaaacattttgagttaccagaaagccaactatagttaaatattttatatctgagttttctataagtttggggtttgttaattttataaattaaaccacaacttttggtggtggttgtagtttcacaatggtccttttccttccaaatgaatgtagaaaattcgttattatcctgatatttgcaccactcatccccatgccacttttcccacatattaatttatttcactgcctgatctttggatatgaaattatgagttccacaaagtcaatttttatagtgccaatcaaacagcatggtgatattctttttctttttttttccccccacaaggctgttgttcagtgtgagatgacatcatttcttatttctgccatgctgtggcttttttgtgttctgcttttaaactacacctgtagtacagttaatatgttttttattggtattgatttctttaattcattaattttctctatttgggacccaagtcataagaaccaattagaggacataataaaaacacttaatgcttgtagtctgtagagatcttcaccatttcacagcacacacattattttcataataaattgccactggtgggacatgggactgacttatttgaatagagtttgaaataccacctttgtatgatgcaaacaatatttgattattttatctaagaaatctatgcatgtgtatcaagttaaaatagtgggtttaaatacaatttacaaagcattagaatgttacctaatctcttctgggttaaatgtgataggaatgtattggaatgtgaagaaattatagaaaattaaaagactcagcctctttaggaagtttgctaaaatggagaggttatgtttaatttatttatatcttcgttaatccaagcatctaatgaacaaaaaactgctacagtgacgtcataattctataagggcaatagttgccaaatttcctctggtattattagcattctgcctttgcatagattagccttcaaatttattatttttagtattatttgatacgattgaagtggctaagattgattgagcttttcttgatcacattttctgcttcttagctaaagtaattttatttaaattgacatggcttgagttgtcatcattttctgctcttctagaatgatgtgtagagaaaacttgaagatactatcccttctttggcattcttctcttaatgctatgctattatttatcataatatgcatatatttagttgtatctggtatcattctaacactcataactaccattttagttaagtccaactttatatttgttacaatgcagtgttttgggaaaggtctattagtaattatttaagtattacatatttttatggaagtctttagaaggtgaagatcttactgagaaactattttctaaataaatttaattttcttttgtatttgtatcagatcatgcctactgtatgttagattttagactattttaaaagaaaccgtagattatataaaaatttttttgctgtttttaaatggcatttgtcttatgtttaatttcacaggatgattttgatagacaaattttagaaaaccttttttcaaaggtaatggttctatcagtttcattccaacagtagctaatttctgtgtttcagtcctacagaaattgtgtgagtagttgaaataatgtacatgtactagtttttttaagtattctaaatagttctaacatttaatgcatatcagaaacatgcttaagaaataacaatatccaggcccaccccacctattgaatcagacagttcccagggcatatatatgctggggaagccccataggtgattttaatgtataccaaacatgtagagtctcactctgttgcccaggctggagtgcaatgacgtgatctcagctaactgcaacctctgcctcctggattcaagcaattctccggcctcagcctcctgagtagctggtactacaggtgcgcgccaccacacctgactaatttttgttagagatggggtttcattctgttggccaggctggtctcgaactcctgacctcaggtgatctgcccacctcagcctcccaaagtgctgggattataggcatgagccactgcgcccaaccatgaactactatcttaaacatttcctgatgttctacctttgggaagcagtttaaaatgat

SEQ ID NO: 364441 - DNA, 1979 bp, Homo sapiens
aggggcggagcgtggctcggtgacgtcctcccaagatggcggagacagagtgaagaaactgtgttccccccttgggttgctatcgatcaagggtaaaattccattctgatatcaaaatgcagtattcgcaccactgtgagcaccttttagagagactgaacaaacagcgggaagcaggttttctctgtgactgtaccatagtgattggggaattccagtttaaagctcataggaatgtgctggcctcctttagtgagtattttggtgcgatctacagaagcacttctgagaacaatgtctttcttgatcagagtcaggtgaaggctgatggatttcagaaactgttggagtttatatacacaggaactttaaatcttgacagagatatctagtattactggaaacattgaattgaatcaacagacttgtcttcttactctgcgagattataataatcgagagaaatcagaagtatctacagatttgattcaggcaaatcctaaacaaggcgcgttagcgaaaaagtcatctcaaacgaaaaagaagaagaaggctttcaactccccgaaaacagggcagaataaaacagtgcaatatcccagtgacatcttagagaatgcatctgttgaattattcctagatgcaaataaactgcccacacctgtagtagaacaagttgcacaaataaatgataattcagaactcgagttgacatcagttgtggaaaatacttttccagcacaagatattgtgcacactgttacagtgaaacggaaacgtggaaaatcacagccaaactgtgctctgaaagaacactctatgtctaatatagccagcgtcaagagtccttatgaggcggagaactccggggaagagctggatcagaggtattccaaggccaagccaatgtgtaacacatgtgggaaagtgttttcagaagccagcagtttgagaaggcacatgagaatacataaaggagtcaaaccttacgtctgccacttatgtggaaaggcatttacccaatgtaaccagctgaaaacgcatgtaagaactcatacaggtgagaagccatacaaatgtgaattgtgtgataaaggatttgctcagaaatgtcagctagtcttccatagtcgcatgcatcatggtgaagaaaaaccctataaatgtgatgtatgcaacttacagtttgcaacttctagcaatctcaagattcatgcaaggaagcatagtggagagaagccatatgtctgtgataggtgtggacagagatttgctcaagccagcacactgacctatcatgtccgtaggcatactggagaaaagccttatgtatgtgatacctgtgggaaggcatttgctgtctctagttctcttatcactcattctcgaaaacatacaggtgaaaaaccatacatatgtggtatttgtgggaaaagttttatttcctcaggagagctcaacaaacactttcggtcccatacaggagaaagaccatttatctgcgaattatgtggaaattcttacacagatattaaaaatttaaagaagcacaaaacaaaagtccattctggtgcagataaaactctagactccagtgcagaggatcatactttgagtgaacaggattccatacaaaaaagtcctttatcagaaactatggatgtgaagccttctgatatgactttaccattagctcttccacttgggactgaggaccatcacatgcttctgcctgtcacggatactcagtctcctacatcagatacattgttgaggtcaactgtgaatgggtattcagaaccacagttgatttttttacaacaattatactgactttgtaaggaatatggaattgctaagatatcattggtagcaaacatctctggtaaggtgcatatattcatattaaattcccattcatttgagttgtgaccattatttttcattcactgaagtaaaagcacctgatgctgcatcac

SEQ ID NO: 364442 - DNA, 572 bp, Homo sapiens
aggggcggagcgtggctcggtgacgtcctcccaagatggcggagacagagtgaagaaactgtgttccccccttgggttgctatcgatcaagggtaaaattccattctgatatcaaaatgcagtattcgcaccactgtgagcaccttttagagagactgaacaaacagcgggaagcaggttttctctgtgactgtaccatagtgattggggaattccagtttaaagctcataggaatgtgctggcctcctttagtgagtattttggtgcgatctacagaagcacttctgagaacaatgtctttcttgatcagagtcaggtgaaggctgatggatttcagaaactgttggagtttatatacacaggaactttaaatcttgacaggtaaagtacacattttattttcagttataaaagctagtcagtagtcttcacagcaaaagtagatttgtattttttccattcattctctgaactcaaattcttcacctatttatgcacacaatgtttgtttttataaagaaatcagtatcactgatttaggatgagcaggcaatatttttcataagcacag

SEQ ID NO: 364443 - DNA, 5025 bp, Homo sapiens
aggggcggagcgtggctcggtgacgtcctcccaagatggcggagacagagtgaagaaactgtgttccccccttgggttgctatcgatcaagggtaaaattccattctgatatcaaaatgcagtattcgcaccactgtgagcaccttttagagagactgaacaaacagcgggaagcaggttttctctgtgactgtaccatagtgattggggaattccagtttaaagctcataggaatgtgctggcctcctttagtgagtattttggtgcgatctacagaagcacttctgagaacaatgtctttcttgatcagagtcaggtgaaggctgatggatttcagaaactgttggagtttatatacacaggaactttaaatcttgacagttggaatgttaaagaaattcatcaggctgctgactatctcaaagtggaagaggtggtcactaaatgcaaaataaagatggaagattttgcttttattgctaatccttcttctacagagatatctagtattactggaaacattgaattgaatcaacagacttgtcttcttactctgcgagattataataatcgagagaaatcagaagtatctacagatttgattcaggcaaatcctaaacaaggcgcgttagcgaaaaagtcatctcaaacgaaaaagaagaagaaggctttcaactccccgaaaacagggcagaataaaacagtgcaatatcccagtgacatcttagagaatgcatctgttgaattattcctagatgcaaataaactgcccacacctgtagtagaacaagttgcacaaataaatgataattcagaactcgagttgacatcagttgtggaaaatacttttccagcacaagatattgtgcacactgttacagtgaaacggaaacgtggaaaatcacagccaaactgtgctctgaaagaacactctatgtctaatatagccagcgtcaagagtccttatgaggcggagaactccggggaagagctggatcagaggtattccaaggccaagccaatgtgtaacacatgtgggaaagtgttttcagaagccagcagtttgagaaggcacatgagaatacataaaggagtcaaaccttacgtctgccacttatgtggaaaggcatttacccaatgtaaccagctgaaaacgcatgtaagaactcatacaggtgagaagccatacaaatgtgaattgtgtgataaaggatttgctcagaaatgtcagctagtcttccatagtcgcatgcatcatggtgaagaaaaaccctataaatgtgatgtatgcaacttacagtttgcaacttctagcaatctcaagattcatgcaaggaagcatagtggagagaagccatatgtctgtgataggtgtggacagagatttgctcaagccagcacactgacctatcatgtccgtaggcatactggagaaaagccttatgtatgtgatacctgtgggaaggcatttgctgtctctagttctcttatcactcattctcgaaaacatacaggagaaagaccatttatctgcgaattatgtggaaattcttacacagatattaaaaatttaaagaagcacaaaacaaaagtccattctggtgcagataaaactctagactccagtgcagaggatcatactttgagtgaacaggattccatacaaaaaagtcctttatcagaaactatggatgtgaagccttctgatatgactttaccattagctcttccacttgggactgaggaccatcacatgcttctgcctgtcacggatactcagtctcctacatcagatacattgttgaggtcaactgtgaatgggtattcagaaccacagttgatttttttacaacaattatactgactttgtaaggaatatggaattgctaagatatcattggtagcaaacatctctggtaaggtgcatatattcatattaaattcccattcatttgagttgtgaccattatttttcattcactgaagtaaaagcacctgatgctgcatcacaactgcaatgtttgtttttatttttggctttatgtctatactccacagagagctttttaagtaatgaattatgtagcactattttgggtggatgagttttattttcttttaaagctgccttaattccatttttattttgcattttagaattgcccttcatttactaaatcagccagttaatgtgattcagttgtgacctgtgggattttaaaattttcctgccctcataatttaagcaaaatccacgatagtatcagcccaagagtgtgttgctatttgtaagccccatggatcaatacataaactatgcataaaaataaaatttcatattttcgctcgtaaaaatttaggcgctgaataagaattgtgctatttctctattaatatattgttagaaataacttttctaatgaaacaaaaatgtttctcaaaatctagaaaagtgcatataaatttttgttcatttagaactgagtattctggagaaaaccaatggtcagcacttttggtttgagttatctgagattgtattttcaaaatgaattttaagtagatatttggtgtttttatcttgtcaaagacagtttcaaaatttgattcagtttatgttttattccgttctaaaatattggagatgaggaaaatgtacttgagttttgaaatattttggtaagcctctcttactcctgttatgcactttttaaaataaatactgaattccagaaagaattttctagatataaacttaatgcatactagaaatcacttggcttctaaatttggtacattatattgcataaagagttaagaaattaacctcaattataagtaaacattttgagttaccagaaagccaactatagttaaatattttatatctgagttttctataagtttggggtttgttaattttataaattaaaccacaacttttggtggtggttgtagtttcacaatggtccttttccttccaaatgaatgtagaaaattcgttattatcctgatatttgcaccactcatccccatgccacttttcccacatattaatttatttcactgcctgatctttggatatgaaattatgagttccacaaagtcaatttttatagtgccaatcaaacagcatggtgatattctttttctttttttttccccccacaaggctgttgttcagtgtgagatgacatcatttcttatttctgccatgctgtggcttttttgtgttctgcttttaaactacacctgtagtacagttaatatgttttttattggtattgatttctttaattcattaattttctctatttgggacccaagtcataagaaccaattagaggacataataaaaacacttaatgcttgtagtctgtagagatcttcaccatttcacagcacacacattattttcataataaattgccactggtgggacatgggactgacttatttgaatagagtttgaaataccacctttgtatgatgcaaacaatatttgattattttatctaagaaatctatgcatgtgtatcaagttaaaatagtgggtttaaatacaatttacaaagcattagaatgttacctaatctcttctgggttaaatgtgataggaatgtattggaatgtgaagaaattatagaaaattaaaagactcagcctctttaggaagtttgctaaaatggagaggttatgtttaatttatttatatcttcgttaatccaagcatctaatgaacaaaaaactgctacagtgacgtcataattctataagggcaatagttgccaaatttcctctggtattattagcattctgcctttgcatagattagccttcaaatttattatttttagtattatttgatacgattgaagtggctaagattgattgagcttttcttgatcacattttctgcttcttagctaaagtaattttatttaaattgacatggcttgagttgtcatcattttctgctcttctagaatgatgtgtagagaaaacttgaagatactatcccttctttggcattcttctcttaatgctatgctattatttatcataatatgcatatatttagttgtatctggtatcattctaacactcataactaccattttagttaagtccaactttatatttgttacaatgcagtgttttgggaaaggtctattagtaattatttaagtattacatatttttatggaagtctttagaaggtgaagatcttactgagaaactattttctaaataaatttaattttcttttgtatttgtatcagatcatgcctactgtatgttagattttagactattttaaaagaaaccgtagattatataaaaatttttttgctgtttttaaatggcatttgtcttatgtttaatttcacaggatgattttgatagacaaattttagaaaaccttttttcaaaggtaatggttctatcagtttcattccaacagtagctaatttctgtgtttcagtcctacagaaattgtgtgagtagttgaaataatgtacatgtactagtttttttaagtattctaaatagttctaacatttaatgcatatcagaaacatgcttaagaaataacaatatccaggcccaccccacctattgaatcagacagttcccagggcatatatatgctggggaagccccataggtgattttaatgtataccaaacatgtagagtctcactctgttgcccaggctggagtgcaatgacgtgatctcagctaactgcaacctctgcctcctggattcaagcaattctccggcctcagcctcctgagtagctggtactacaggtgcgcgccaccacacctgactaatttttgttagagatggggtttcattctgttggccaggctggtctcgaactcctgacctcaggtgatctgcccacctcagcctcccaaagtgctgggattataggcatgagccactgcgcccaaccatgaactactatcttaaacatttcctgatgttctacctttgggaagcagtttaaaatgat

SEQ ID NO: 364444 - DNA, 5072 bp, Homo sapiens
actaggctatcgaggccggtgtgatgtgtcccccctgggttgctatcgatcaagggtaaaattccattctgatatcaaaatgcagtattcgcaccactgtgagcaccttttagagagactgaacaaacagcgggaagcaggttttctctgtgactgtaccatagtgattggggaattccagtttaaagctcataggaatgtgctggcctcctttagtgagtattttggtgcgatctacagaagcacttctgagaacaatgtctttcttgatcagagtcaggtgaaggctgatggatttcagaaactgttggagtttatatacacaggaactttaaatcttgacagttggaatgttaaagaaattcatcaggctgctgactatctcaaagtggaagaggtggtcactaaatgcaaaataaagatggaagattttgcttttattgctaatccttcttctacagagatatctagtattactggaaacattgaattgaatcaacagacttgtcttcttactctgcgagattataataatcgagagaaatcagaagtatctacagatttgattcaggcaaatcctaaacaaggcgcgttagcgaaaaagtcatctcaaacgaaaaagaagaagaaggctttcaactccccgaaaacagggcagaataaaacagtgcaatatcccagtgacatcttagagaatgcatctgttgaattattcctagatgcaaataaactgcccacacctgtagtagaacaagttgcacaaataaatgataattcagaactcgagttgacatcagttgtggaaaatacttttccagcacaagatattgtgcacactgttacagtgaaacggaaacgtggaaaatcacagccaaactgtgctctgaaagaacactctatgtctaatatagccagcgtcaagagtccttatgaggcggagaactccggggaagagctggatcagaggtattccaaggccaagccaatgtgtaacacatgtgggaaagtgttttcagaagccagcagtttgagaaggcacatgagaatacataaaggagtcaaaccttacgtctgccacttatgtggaaaggcatttacccaatgtaaccagctgaaaacgcatgtaagaactcatacaggtgagaagccatacaaatgtgaattgtgtgataaaggatttgctcagaaatgtcagctagtcttccatagtcgcatgcatcatggtgaagaaaaaccctataaatgtgatgtatgcaacttacagtttgcaacttctagcaatctcaagattcatgcaaggaagcatagtggagagaagccatatgtctgtgataggtgtggacagagatttgctcaagccagcacactgacctatcatgtccgtaggcatactggagaaaagccttatgtatgtgatacctgtgggaaggcatttgctgtctctagttctcttatcactcattctcgaaaacatacaggtgaaaaaccatacatatgtggtatttgtgggaaaagttttatttcctcaggagagctcaacaaacactttcggtcccatacaggagaaagaccatttatctgcgaattatgtggaaattcttacacagatattaaaaatttaaagaagcacaaaacaaaagtccattctggtgcagataaaactctagactccagtgcagaggatcatactttgagtgaacaggattccatacaaaaaagtcctttatcagaaactatggatgtgaagccttctgatatgactttaccattagctcttccacttgggactgaggaccatcacatgcttctgcctgtcacggatactcagtctcctacatcagatacattgttgaggtcaactgtgaatgggtattcagaaccacagttgatttttttacaacaattatactgactttgtaaggaatatggaattgctaagatatcattggtagcaaacatctctggtaaggtgcatatattcatattaaattcccattcatttgagttgtgaccattatttttcattcactgaagtaaaagcacctgatgctgcatcacaactgcaatgtttgtttttatttttggctttatgtctatactccacagagagctttttaagtaatgaattatgtagcactattttgggtggatgagttttattttcttttaaagctgccttaattccatttttattttgcattttagaattgcccttcatttactaaatcagccagttaatgtgattcagttgtgacctgtgggattttaaaattttcctgccctcataatttaagcaaaatccacgatagtatcagcccaagagtgtgttgctatttgtaagccccatggatcaatacataaactatgcataaaaataaaatttcatattttcgctcgtaaaaatttaggcgctgaataagaattgtgctatttctctattaatatattgttagaaataacttttctaatgaaacaaaaatgtttctcaaaatctagaaaagtgcatataaatttttgttcatttagaactgagtattctggagaaaaccaatggtcagcacttttggtttgagttatctgagattgtattttcaaaatgaattttaagtagatatttggtgtttttatcttgtcaaagacagtttcaaaatttgattcagtttatgttttattccgttctaaaatattggagatgaggaaaatgtacttgagttttgaaatattttggtaagcctctcttactcctgttatgcactttttaaaataaatactgaattccagaaagaattttctagatataaacttaatgcatactagaaatcacttggcttctaaatttggtacattatattgcataaagagttaagaaattaacctcaattataagtaaacattttgagttaccagaaagccaactatagttaaatattttatatctgagttttctataagtttggggtttgttaattttataaattaaaccacaacttttggtggtggttgtagtttcacaatggtccttttccttccaaatgaatgtagaaaattcgttattatcctgatatttgcaccactcatccccatgccacttttcccacatattaatttatttcactgcctgatctttggatatgaaattatgagttccacaaagtcaatttttatagtgccaatcaaacagcatggtgatattctttttctttttttttccccccacaaggctgttgttcagtgtgagatgacatcatttcttatttctgccatgctgtggcttttttgtgttctgcttttaaactacacctgtagtacagttaatatgttttttattggtattgatttctttaattcattaattttctctatttgggacccaagtcataagaaccaattagaggacataataaaaacacttaatgcttgtagtctgtagagatcttcaccatttcacagcacacacattattttcataataaattgccactggtgggacatgggactgacttatttgaatagagtttgaaataccacctttgtatgatgcaaacaatatttgattattttatctaagaaatctatgcatgtgtatcaagttaaaatagtgggtttaaatacaatttacaaagcattagaatgttacctaatctcttctgggttaaatgtgataggaatgtattggaatgtgaagaaattatagaaaattaaaagactcagcctctttaggaagtttgctaaaatggagaggttatgtttaatttatttatatcttcgttaatccaagcatctaatgaacaaaaaactgctacagtgacgtcataattctataagggcaatagttgccaaatttcctctggtattattagcattctgcctttgcatagattagccttcaaatttattatttttagtattatttgatacgattgaagtggctaagattgattgagcttttcttgatcacattttctgcttcttagctaaagtaattttatttaaattgacatggcttgagttgtcatcattttctgctcttctagaatgatgtgtagagaaaacttgaagatactatcccttctttggcattcttctcttaatgctatgctattatttatcataatatgcatatatttagttgtatctggtatcattctaacactcataactaccattttagttaagtccaactttatatttgttacaatgcagtgttttgggaaaggtctattagtaattatttaagtattacatatttttatggaagtctttagaaggtgaagatcttactgagaaactattttctaaataaatttaattttcttttgtatttgtatcagatcatgcctactgtatgttagattttagactattttaaaagaaaccgtagattatataaaaatttttttgctgtttttaaatggcatttgtcttatgtttaatttcacaggatgattttgatagacaaattttagaaaaccttttttcaaaggtaatggttctatcagtttcattccaacagtagctaatttctgtgtttcagtcctacagaaattgtgtgagtagttgaaataatgtacatgtactagtttttttaagtattctaaatagttctaacatttaatgcatatcagaaacatgcttaagaaataacaatatccaggcccaccccacctattgaatcagacagttcccagggcatatatatgctggggaagccccataggtgattttaatgtataccaaacatgtagagtctcactctgttgcccaggctggagtgcaatgacgtgatctcagctaactgcaacctctgcctcctggattcaagcaattctccggcctcagcctcctgagtagctggtactacaggtgcgcgccaccacacctgactaatttttgttagagatggggtttcattctgttggccaggctggtctcgaactcctgacctcaggtgatctgcccacctcagcctcccaaagtgctgggattataggcatgagccactgcgcccaaccatgaactactatcttaaacatttcctgatgttctacctttgggaagcagtttaaaatgat

SEQ ID NO: 364445 - DNA, 5104 bp, Homo sapiens
aggggcggagcgtggctcggtgacgtcctcccaagatggcggagacagagtgaagaaactgtgttccccccttgggttgctatcggtggtagaagtgttgccattcaccgtcacttattgatgtgtccaaaggattgtgttagttgatcaaggtaaccaaagatagaaaggcactcatcccttcattcttaaccatatcaagggtaaaattccattctgatatcaaaatgcagtattcgcaccactgtgagcaccttttagagagactgaacaaacagcgggaagcaggttttctctgtgactgtaccatagtgattggggaattccagtttaaagctcataggaatgtgctggcctcctttagtgagtattttggtgcgatctacagaagcacttctgagaacaatgtctttcttgatcagagtcaggtgaaggctgatggatttcagaaactgttggagtttatatacacaggaactttaaatcttgacagagatatctagtattactggaaacattgaattgaatcaacagacttgtcttcttactctgcgagattataataatcgagagaaatcagaagtatctacagatttgattcaggcaaatcctaaacaaggcgcgttagcgaaaaagtcatctcaaacgaaaaagaagaagaaggctttcaactccccgaaaacagggcagaataaaacagtgcaatatcccagtgacatcttagagaatgcatctgttgaattattcctagatgcaaataaactgcccacacctgtagtagaacaagttgcacaaataaatgataattcagaactcgagttgacatcagttgtggaaaatacttttccagcacaagatattgtgcacactgttacagtgaaacggaaacgtggaaaatcacagccaaactgtgctctgaaagaacactctatgtctaatatagccagcgtcaagagtccttatgaggcggagaactccggggaagagctggatcagaggtattccaaggccaagccaatgtgtaacacatgtgggaaagtgttttcagaagccagcagtttgagaaggcacatgagaatacataaaggagtcaaaccttacgtctgccacttatgtggaaaggcatttacccaatgtaaccagctgaaaacgcatgtaagaactcatacaggtgagaagccatacaaatgtgaattgtgtgataaaggatttgctcagaaatgtcagctagtcttccatagtcgcatgcatcatggtgaagaaaaaccctataaatgtgatgtatgcaacttacagtttgcaacttctagcaatctcaagattcatgcaaggaagcatagtggagagaagccatatgtctgtgataggtgtggacagagatttgctcaagccagcacactgacctatcatgtccgtaggcatactggagaaaagccttatgtatgtgatacctgtgggaaggcatttgctgtctctagttctcttatcactcattctcgaaaacatacaggtgaaaaaccatacatatgtggtatttgtgggaaaagttttatttcctcaggagagctcaacaaacactttcggtcccatacaggagaaagaccatttatctgcgaattatgtggaaattcttacacagatattaaaaatttaaagaagcacaaaacaaaagtccattctggtgcagataaaactctagactccagtgcagaggatcatactttgagtgaacaggattccatacaaaaaagtcctttatcagaaactatggatgtgaagccttctgatatgactttaccattagctcttccacttgggactgaggaccatcacatgcttctgcctgtcacggatactcagtctcctacatcagatacattgttgaggtcaactgtgaatgggtattcagaaccacagttgatttttttacaacaattatactgactttgtaaggaatatggaattgctaagatatcattggtagcaaacatctctggtaaggtgcatatattcatattaaattcccattcatttgagttgtgaccattatttttcattcactgaagtaaaagcacctgatgctgcatcacaactgcaatgtttgtttttatttttggctttatgtctatactccacagagagctttttaagtaatgaattatgtagcactattttgggtggatgagttttattttcttttaaagctgccttaattccatttttattttgcattttagaattgcccttcatttactaaatcagccagttaatgtgattcagttgtgacctgtgggattttaaaattttcctgccctcataatttaagcaaaatccacgatagtatcagcccaagagtgtgttgctatttgtaagccccatggatcaatacataaactatgcataaaaataaaatttcatattttcgctcgtaaaaatttaggcgctgaataagaattgtgctatttctctattaatatattgttagaaataacttttctaatgaaacaaaaatgtttctcaaaatctagaaaagtgcatataaatttttgttcatttagaactgagtattctggagaaaaccaatggtcagcacttttggtttgagttatctgagattgtattttcaaaatgaattttaagtagatatttggtgtttttatcttgtcaaagacagtttcaaaatttgattcagtttatgttttattccgttctaaaatattggagatgaggaaaatgtacttgagttttgaaatattttggtaagcctctcttactcctgttatgcactttttaaaataaatactgaattccagaaagaattttctagatataaacttaatgcatactagaaatcacttggcttctaaatttggtacattatattgcataaagagttaagaaattaacctcaattataagtaaacattttgagttaccagaaagccaactatagttaaatattttatatctgagttttctataagtttggggtttgttaattttataaattaaaccacaacttttggtggtggttgtagtttcacaatggtccttttccttccaaatgaatgtagaaaattcgttattatcctgatatttgcaccactcatccccatgccacttttcccacatattaatttatttcactgcctgatctttggatatgaaattatgagttccacaaagtcaatttttatagtgccaatcaaacagcatggtgatattctttttctttttttttccccccacaaggctgttgttcagtgtgagatgacatcatttcttatttctgccatgctgtggcttttttgtgttctgcttttaaactacacctgtagtacagttaatatgttttttattggtattgatttctttaattcattaattttctctatttgggacccaagtcataagaaccaattagaggacataataaaaacacttaatgcttgtagtctgtagagatcttcaccatttcacagcacacacattattttcataataaattgccactggtgggacatgggactgacttatttgaatagagtttgaaataccacctttgtatgatgcaaacaatatttgattattttatctaagaaatctatgcatgtgtatcaagttaaaatagtgggtttaaatacaatttacaaagcattagaatgttacctaatctcttctgggttaaatgtgataggaatgtattggaatgtgaagaaattatagaaaattaaaagactcagcctctttaggaagtttgctaaaatggagaggttatgtttaatttatttatatcttcgttaatccaagcatctaatgaacaaaaaactgctacagtgacgtcataattctataagggcaatagttgccaaatttcctctggtattattagcattctgcctttgcatagattagccttcaaatttattatttttagtattatttgatacgattgaagtggctaagattgattgagcttttcttgatcacattttctgcttcttagctaaagtaattttatttaaattgacatggcttgagttgtcatcattttctgctcttctagaatgatgtgtagagaaaacttgaagatactatcccttctttggcattcttctcttaatgctatgctattatttatcataatatgcatatatttagttgtatctggtatcattctaacactcataactaccattttagttaagtccaactttatatttgttacaatgcagtgttttgggaaaggtctattagtaattatttaagtattacatatttttatggaagtctttagaaggtgaagatcttactgagaaactattttctaaataaatttaattttcttttgtatttgtatcagatcatgcctactgtatgttagattttagactattttaaaagaaaccgtagattatataaaaatttttttgctgtttttaaatggcatttgtcttatgtttaatttcacaggatgattttgatagacaaattttagaaaaccttttttcaaaggtaatggttctatcagtttcattccaacagtagctaatttctgtgtttcagtcctacagaaattgtgtgagtagttgaaataatgtacatgtactagtttttttaagtattctaaatagttctaacatttaatgcatatcagaaacatgcttaagaaataacaatatccaggcccaccccacctattgaatcagacagttcccagggcatatatatgctggggaagccccataggtgattttaatgtataccaaacatgtagagtctcactctgttgcccaggctggagtgcaatgacgtgatctcagctaactgcaacctctgcctcctggattcaagcaattctccggcctcagcctcctgagtagctggtactacaggtgcgcgccaccacacctgactaatttttgttagagatggggtttcattctgttggccaggctggtctcgaactcctgacctcaggtgatctgcccacctcagcctcccaaagtgctgggattataggcatgagccactgcgcccaaccatgaactactatcttaaacatttcctgatgttctacctttgggaagcagtttaaaatgat

SEQ ID NO: 364446 - DNA, 425 bp, Homo sapiens
gtgattaaagtgacaatttgaaaccaaatttaaacactataataatttttgccttgtgttcataaacattgatatttttgtcttagctagcagcttttaaaatattgaaatttaaacttctaatttgtttttcaggagaaagaccatttatctgcgaattatgtggaaattcttacacagatattaaaaatttaaagaagcacaaaacaaaagtccattctggtaaatgcttgtgttttgtttgcttgtttgtttgttttaatttggtgctcatattagtgctattccttaaaatgctgagatgagatttacatttaagcagtttaaattagatgtctatttcaaaaactaggtatatacatgtgaggaaagtagcttttttgcagaaacattcactctggatttttcatattgaatctcttatt

SEQ ID NO: 364447 - DNA, 380 bp, Homo sapiens
ctaaatataaattttattgttcctttaggtgagaagccatacaaatgtgaattgtgtgataaaggatttgctcagaaatgtcagctagtcttccatagtcgcatgcatcatggtgaagaaaaaccctataaatgtgatgtatgcaacttacagtttgcaacttctagcaatctcaagattcatgcaaggtaaaaaaccaaatgagttgtttgatcttttagtcttttaatcaccatagtcttatgaatagactattatattagaattcaggacagtagaattgtaattgtggttccaccaaacaatgttaacacgttcaaggaaccacaaggaagccacagtggttgataggaaataagcagggggtggggactactagg

SEQ ID NO: 364448 - DNA, 2095 bp, Homo sapiens
aggggcggagcgtggctcggtgacgtcctcccaagatggcggagacagagtgaagaaactgtgttccccccttgggttgctatcgatcaagggtaaaattccattctgatatcaaaatgcagtattcgcaccactgtgagcaccttttagagagactgaacaaacagcgggaagcaggttttctctgtgactgtaccatagtgattggggaattccagtttaaagctcataggaatgtgctggcctcctttagtgagtattttggtgcgatctacagaagcacttctgagaacaatgtctttcttgatcagagtcaggtgaaggctgatggatttcagaaactgttggagtttatatacacaggaactttaaatcttgacagttggaatgttaaagaaattcatcaggctgctgactatctcaaagtggaagaggtggtcactaaatgcaaaataaagatggaagattttgcttttattgctaatccttcttctacagagatatctagtattactggaaacattgaattgaatcaacagacttgtcttcttactctgcgagattataataatcgagagaaatcagaagtatctacagatttgattcaggcaaatcctaaacaaggcgcgttagcgaaaaagtcatctcaaacgaaaaagaagaagaaggctttcaactccccgaaaacagggcagaataaaacagtgcaatatcccagtgacatcttagagaatgcatctgttgaattattcctagatgcaaataaactgcccacacctgtagtagaacaagttgcacaaataaatgataattcagaactcgagttgacatcagttgtggaaaatacttttccagcacaagatattgtgcacactgttacagtgaaacggaaacgtggaaaatcacagccaaactgtgctctgaaagaacactctatgtctaatatagccagcgtcaagagtccttatgaggcggagaactccggggaagagctggatcagaggtattccaaggccaagccaatgtgtaacacatgtgggaaagtgttttcagaagccagcagtttgagaaggcacatgagaatacataaaggagtcaaaccttacgtctgccacttatgtggaaaggcatttacccaatgtaaccagctgaaaacgcatgtaagaactcatacaggtgagaagccatacaaatgtgaattgtgtgataaaggatttgctcagaaatgtcagctagtcttccatagtcgcatgcatcatggtgaagaaaaaccctataaatgtgatgtatgcaacttacagtttgcaacttctagcaatctcaagattcatgcaaggaagcatagtggagagaagccatatgtctgtgataggtgtggacagagatttgctcaagccagcacactgacctatcatgtccgtaggcatactggagaaaagccttatgtatgtgatacctgtgggaaggcatttgctgtctctagttctcttatcactcattctcgaaaacatacaggtgaaaaaccatacatatgtggtatttgtgggaaaagttttatttcctcaggagagctcaacaaacactttcggtcccatacaggagaaagaccatttatctgcgaattatgtggaaattcttacacagatattaaaaatttaaagaagcacaaaacaaaagtccattctggtgcagataaaactctagactccagtgcagaggatcatactttgagtgaacaggattccatacaaaaaagtcctttatcagaaactatggatgtgaagccttctgatatgactttaccattagctcttccacttgggactgaggaccatcacatgcttctgcctgtcacggatactcagtctcctacatcagatacattgttgaggtcaactgtgaatgggtattcagaaccacagttgatttttttacaacaattatactgactttgtaaggaatatggaattgctaagatatcattggtagcaaacatctctggtaaggtgcatatattcatattaaattcccattcatttgagttgtgaccattatttttcattcactgaagtaaaagcacctgatgctgcatcac

SEQ ID NO: 364449 - DNA, 820 bp, Homo sapiens
aggggcggagcgtggctcggtgacgtcctcccaagatggcggagacagagtgaagaaactgtgttccccccttgggttgctatcgatcaagggtaaaattccattctgatatcaaaatgcagtattcgcaccactgtgagcaccttttagagagactgaacaaacagcgggaagcaggttttctctgtgactgtaccatagtgattggggaattccagtttaaagctcataggaatgtgctggcctcctttagtgagtattttggtgcgatctacagaagcacttctgagaacaatgtctttcttgatcagagtcaggtgaaggctgatggatttcagaaactgttggagtttatatacacaggaactttaaatcttgacagttggaatgttaaagaaattcatcaggctgctgactatctcaaagtggaagaggtggtcactaaatgcaaaataaaaaaaaaaaaaaaaaaaaaaaaatgatgttggagggcgccatggcgccccacgaaaaacggttttcagaaacacatatgagtggggagcagcgggggggccccagtgagtgaagagggaacaacgtgacactaggggggtagcctccaagaggagaaagccgggggcgagagatccacgggggcgtgggggagatctacgacaccaattaaaaaagagaggccgcggggggcgaacccaggacgggtgtctgggaaaaacaattccgagagaggaggactagcgcggagagcacgacaacggggggaatcttatcaacagggggagtacccagagggagagcgagacgatatcaaattgagccc

SEQ ID NO: 364450 - DNA, 5046 bp, Homo sapiens
aggggcggagcgtggctcggtgacgtcctcccaagatggcggagacagagtgaagaaactgtgttccccccttgggttgctatcggtggtagaagtgttgccattcaccgtcacttattgatgtgtccaaaggattgtgttagttgatcaagatcaagggtaaaattccattctgatatcaaaatgcagtattcgcaccactgtgagcaccttttagagagactgaacaaacagcgggaagcaggttttctctgtgactgtaccatagtgattggggaattccagtttaaagctcataggaatgtgctggcctcctttattggaatgttaaagaaattcatcaggctgctgactatctcaaagtggaagaggtggtcactaaatgcaaaataaagatggaagattttgcttttattgctaatccttcttctacagagatatctagtattactggaaacattgaattgaatcaacagacttgtcttcttactctgcgagattataataatcgagagaaatcagaagtatctacagatttgattcaggcaaatcctaaacaaggcgcgttagcgaaaaagtcatctcaaacgaaaaagaagaagaaggctttcaactccccgaaaacagggcagaataaaacagtgcaatatcccagtgacatcttagagaatgcatctgttgaattattcctagatgcaaataaactgcccacacctgtagtagaacaagttgcacaaataaatgataattcagaactcgagttgacatcagttgtggaaaatacttttccagcacaagatattgtgcacactgttacagtgaaacggaaacgtggaaaatcacagccaaactgtgctctgaaagaacactctatgtctaatatagccagcgtcaagagtccttatgaggcggagaactccggggaagagctggatcagaggtattccaaggccaagccaatgtgtaacacatgtgggaaagtgttttcagaagccagcagtttgagaaggcacatgagaatacataaaggagtcaaaccttacgtctgccacttatgtggaaaggcatttacccaatgtaaccagctgaaaacgcatgtaagaactcatacaggtgagaagccatacaaatgtgaattgtgtgataaaggatttgctcagaaatgtcagctagtcttccatagtcgcatgcatcatggtgaagaaaaaccctataaatgtgatgtatgcaacttacagtttgcaacttctagcaatctcaagattcatgcaaggaagcatagtggagagaagccatatgtctgtgataggtgtggacagagatttgctcaagccagcacactgacctatcatgtccgtaggcatactggagaaaagccttatgtatgtgatacctgtgggaaggcatttgctgtctctagttctcttatcactcattctcgaaaacatacaggtgaaaaaccatacatatgtggtatttgtgggaaaagttttatttcctcaggagagctcaacaaacactttcggtcccatacaggagaaagaccatttatctgcgaattatgtggaaattcttacacagatattaaaaatttaaagaagcacaaaacaaaagtccattctggtgcagataaaactctagactccagtgcagaggatcatactttgagtgaacaggattccatacaaaaaagtcctttatcagaaactatggatgtgaagccttctgatatgactttaccattagctcttccacttgggactgaggaccatcacatgcttctgcctgtcacggatactcagtctcctacatcagatacattgttgaggtcaactgtgaatgggtattcagaaccacagttgatttttttacaacaattatactgactttgtaaggaatatggaattgctaagatatcattggtagcaaacatctctggtaaggtgcatatattcatattaaattcccattcatttgagttgtgaccattatttttcattcactgaagtaaaagcacctgatgctgcatcacaactgcaatgtttgtttttatttttggctttatgtctatactccacagagagctttttaagtaatgaattatgtagcactattttgggtggatgagttttattttcttttaaagctgccttaattccatttttattttgcattttagaattgcccttcatttactaaatcagccagttaatgtgattcagttgtgacctgtgggattttaaaattttcctgccctcataatttaagcaaaatccacgatagtatcagcccaagagtgtgttgctatttgtaagccccatggatcaatacataaactatgcataaaaataaaatttcatattttcgctcgtaaaaatttaggcgctgaataagaattgtgctatttctctattaatatattgttagaaataacttttctaatgaaacaaaaatgtttctcaaaatctagaaaagtgcatataaatttttgttcatttagaactgagtattctggagaaaaccaatggtcagcacttttggtttgagttatctgagattgtattttcaaaatgaattttaagtagatatttggtgtttttatcttgtcaaagacagtttcaaaatttgattcagtttatgttttattccgttctaaaatattggagatgaggaaaatgtacttgagttttgaaatattttggtaagcctctcttactcctgttatgcactttttaaaataaatactgaattccagaaagaattttctagatataaacttaatgcatactagaaatcacttggcttctaaatttggtacattatattgcataaagagttaagaaattaacctcaattataagtaaacattttgagttaccagaaagccaactatagttaaatattttatatctgagttttctataagtttggggtttgttaattttataaattaaaccacaacttttggtggtggttgtagtttcacaatggtccttttccttccaaatgaatgtagaaaattcgttattatcctgatatttgcaccactcatccccatgccacttttcccacatattaatttatttcactgcctgatctttggatatgaaattatgagttccacaaagtcaatttttatagtgccaatcaaacagcatggtgatattctttttctttttttttccccccacaaggctgttgttcagtgtgagatgacatcatttcttatttctgccatgctgtggcttttttgtgttctgcttttaaactacacctgtagtacagttaatatgttttttattggtattgatttctttaattcattaattttctctatttgggacccaagtcataagaaccaattagaggacataataaaaacacttaatgcttgtagtctgtagagatcttcaccatttcacagcacacacattattttcataataaattgccactggtgggacatgggactgacttatttgaatagagtttgaaataccacctttgtatgatgcaaacaatatttgattattttatctaagaaatctatgcatgtgtatcaagttaaaatagtgggtttaaatacaatttacaaagcattagaatgttacctaatctcttctgggttaaatgtgataggaatgtattggaatgtgaagaaattatagaaaattaaaagactcagcctctttaggaagtttgctaaaatggagaggttatgtttaatttatttatatcttcgttaatccaagcatctaatgaacaaaaaactgctacagtgacgtcataattctataagggcaatagttgccaaatttcctctggtattattagcattctgcctttgcatagattagccttcaaatttattatttttagtattatttgatacgattgaagtggctaagattgattgagcttttcttgatcacattttctgcttcttagctaaagtaattttatttaaattgacatggcttgagttgtcatcattttctgctcttctagaatgatgtgtagagaaaacttgaagatactatcccttctttggcattcttctcttaatgctatgctattatttatcataatatgcatatatttagttgtatctggtatcattctaacactcataactaccattttagttaagtccaactttatatttgttacaatgcagtgttttgggaaaggtctattagtaattatttaagtattacatatttttatggaagtctttagaaggtgaagatcttactgagaaactattttctaaataaatttaattttcttttgtatttgtatcagatcatgcctactgtatgttagattttagactattttaaaagaaaccgtagattatataaaaatttttttgctgtttttaaatggcatttgtcttatgtttaatttcacaggatgattttgatagacaaattttagaaaaccttttttcaaaggtaatggttctatcagtttcattccaacagtagctaatttctgtgtttcagtcctacagaaattgtgtgagtagttgaaataatgtacatgtactagtttttttaagtattctaaatagttctaacatttaatgcatatcagaaacatgcttaagaaataacaatatccaggcccaccccacctattgaatcagacagttcccagggcatatatatgctggggaagccccataggtgattttaatgtataccaaacatgtagagtctcactctgttgcccaggctggagtgcaatgacgtgatctcagctaactgcaacctctgcctcctggattcaagcaattctccggcctcagcctcctgagtagctggtactacaggtgcgcgccaccacacctgactaatttttgttagagatggggtttcattctgttggccaggctggtctcgaactcctgacctcaggtgatctgcccacctcagcctcccaaagtgctgggattataggcatgagccactgcgcccaaccatgaactactatcttaaacatttcctgatgttctacctttgggaagcagtttaaaatgat

SEQ ID NO: 364451 - DNA, 830 bp, Homo sapiens
cggcgcgcgggcggccgcgaccgccggggacgagcttggaggaaaaggaaccgggagccgcccacccgggggcgctctccggacccccagggtcctagcgcgcggcccttaccgagcctgggcgcccggatttcggcagcggatcgcctttccgggttggcggcccgcctgattgggaacagccggccggttgccgggggaacgcgggagtcgggcccgacctgagccacgcgggcttggtgcccacctgtgcgcgccgcctgcgaagaaggaacggtctagggagaaggcgccgccggccgcccccgtccccaccgcggccgtcgctggagagttcgagccgcctagcgcccctggagctccccaaccatgaagcccaacttctccctgcgactgcggatcttcaacctcaactgctggggcattccgtacttgagcaagcaccgggccgaccgcatgaggcgcctgggagactttctgaaccaggagagcttcgacctggctttgctggaggaggtgtggagtgagcaggacttccagtacctgagacagaagctgtcacctacctacccagctgcacaccacttccggaggtgagaagcccactggcctgaagcctgttgtcatcccaggaggctcttgccctgccagcccttccctatcctgcctgcactctccagtctcctccagcctcctctccctctggatgtgagagaaggagaagggtgaaccaagaaggtcctatgacttcagcccatttcagctttgttttctggctgccctatactcctccaaaggctgtcgccttggttctagggctagtcccagca

SEQ ID NO: 364452 - DNA, 1655 bp, Homo sapiens
cggcgcgcgggcggccgcgaccgccggggacgagcttggaggaaaaggaaccgggagccgcccacccgggggcgctctccggacccccagggtcctagcgcgcggcccttaccgagcctgggcgcccggatttcggcagcggatcgcctttccgggttggcggcccgcctgattgggaacagccggccggttgccgggggaacgcgggagtcgggcccgacctgagccacgcgggcttggtgcccacctgtgcgcgccgcctgcgaagaaggaacggtctagggagaaggcgccgccggccgcccccgtccccaccgcggccgtcgctggagagttcgagccgcctagcgcccctggagctccccaaccatgaagcccaacttctccctgcgactgcggatcttcaacctcaactgctggggcattccgtacttgagcaagcaccgggccgaccgcatgaggcgcctgggagactttctgaaccaggagagcttcgacctggctttgctggaggaggtgtggagtgagcaggacttccagtacctgagacagaagctgtcacctacctacccagctgcacaccacttccggagcggaatcattggcagtggcctctgtgtcttctccaaacatccaatccaggagcttacccagcacatctacactctcaatggctacccctacatgatccatcatggtgactggttcagtgggaaggctgtggggctgctggtgctccatctaagtggcatggtgctcaacgcctatgtgacccatctccatgccgaatacaatcgacagaaggacatctacctagcacatcgtgtggcccaagcttgggaattggcccagttcatccaccacacatccaagaaggcagacgtggttctgttgtgtggagacctcaacatgcacccagaagacctgggctgctgcctgctgaaggagtggacagggcttcatgatgcctatcttgaaactcgggacttcaagggctctgaggaaggcaacacaatggtacccaagaactgctacgtcagccagcaggagctgaagccatttccctttggtgtccgcattgactacgtgctttacaaggcagtttctgggttttacatctcctgtaagagttttgaaaccactacaggctttgaccctcacagtggcacccccctctctgatcatgaagccctgatggctactctgtttgtgaggcacagccccccacagcagaaccccagctctacccacggaccagcagagaggtcgccgttgatgtgtgtgctaaaggaggcctggacggagctgggtctgggcatggctcaggctcgctggtgggccaccttcgctagctatgtgattggcctggggctgcttctcctggcactgctgtgtgtcctggcggctggaggaggggccggggaagctgccatactgctctggacccccagtgtagggctggtgctgtgggcaggtgcattctacctcttccacgtacaggaggtcaatggcttatatagggcccaggctgagctccagcatgtgctaggaagggcaagggaggcccaggatctgggcccagagcctcagccagccctactcctggggcagcaggagggggacagaactaaagaacaataaagcttggcccttta

SEQ ID NO: 364453 - DNA, 476 bp, Homo sapiens
tggcccttgccccgcttgaagcagcccttccactcttgactctctcctgccccactgccctgctctgttgtaggaccagcagagaggtcgccgttgatgtgtgtgctaaaggaggcctggacggagctgggtctgggcatggctcaggctcgctggtgggccaccttcgctagctatgtgattggcctggggctgcttctcctggcactgctgtgtgtcctggcggctggaggaggggccggggaagctgccatactgctctggacccccagtgtagggctggtgctgtgggcaggtgcattctacctcttccacgtacaggaggtcaatggcttatatagggcccaggctgagctccagcatgtgctaggaagggcaagggaggcccaggatctgggcccagagcctcagccagccctactcctggggcagcaggagggggacagaactaaagaacaataaagcttggcccttta

SEQ ID NO: 364454 - DNA, 2770 bp, Homo sapiens
cggcgcgcgggcggccgcgaccgccggggacgagcttggaggaaaaggaaccgggagccgcccacccgggggcgctctccggacccccagggtcctagcgcgcggcccttaccgagcctgggcgcccggatttcggcagcggatcgcctttccgggttggcggcccgcctgattgggaacagccggccggttgccgggggaacgcgggagtcgggcccgacctgagccacgcgggcttggtgcccacctgtgcgcgccgcctgcgaagaaggaacggtctagggagaaggcgccgccggccgcccccgtccccaccgcggccgtcgctggagagttcgagccgcctagcgcccctggagctccccaaccatgaagcccaacttctccctgcgactgcggatcttcaacctcaactgctggggcattccgtacttgagcaagcaccgggccgaccgcatgaggcgcctgggagactttctgaaccaggagagcttcgacctggctttgctggaggaggtgtggagtgagcaggacttccagtacctgagacagaagctgtcacctacctacccagctgcacaccacttccggagcggaatcattggcagtggcctctgtgtcttctccaaacatccaatccaggagcttacccagcacatctacactctcaatggctacccctacatgatccatcatggtgactggttcagtgggaaggctgtggggctgctggtgctccatctaagtggcatggtgctcaacgcctatgtgacccatctccatgccgaatacaatcgacagaaggacatctacctagcacatcgtgtggcccaagcttgggaattggcccagttcatccagtgtgtgagcctgggcttgaaatgggaagtgggatgggacccaggggctgagggtgaacaaggccccagtcatggggaagagctggtgatggaagaactcccgcctcaccaacctggttcccccagccacacatccaagaaggcagacgtggttctgttgtgtggagacctcaacatgcacccagaagacctgggctgctgcctgctgaaggagtggacagggcttcatgatgcctatcttgaaactcgggacttcaagggctctgaggaaggcaacacaatggtacccaagaactgctacgtcagccagcaggagctgaagccatttccctttggtgtccgcattgactacgtgctttacaaggcagtttctgggttttacatctcctgtaagagttttgaaaccactacaggctttgaccctcacagtggcacccccctctctgatcatgaagccctgatggctactctgtttgtgaggcacagccccccacagcagaaccccagctctacccacggaccagcagagaggtcgccgttgatgtgtgtgctaaaggaggcctggacggagctgggtctgggcatggctcaggctcgctggtgggccaccttcgctagctatgtgattggcctggggctgcttctcctggcactgctgtgtgtcctggcggctggaggaggggccggggaagctgccatactgctctggacccccagtgtagggctggtgctgtgggcaggtgcattctacctcttccacgtacaggaggtcaatggcttatatagggcccaggctgagctccagcatgtgctaggaagggcaagggaggcccaggatctgggcccagagcctcagccagccctactcctggggcagcaggagggggacagaactaaagaacaataaagcttggccctttaaaaaaaaaacacaaacaataatacaatctaaacattgttgtttgcgcgggcccttggcgccctcgaagaaagctttctataacacacttcgtgttgtgggcggcgcgcgggggccccctttgtggttatgtggcacacgtgggcccacagagcggtgttccccataaggaacctcggggaccatgacacccaacgggcggtgggggtttcttacccatattaaaaagagcccgggggggcacacccgaggggctttttgtgaccaattctccaagatgggggtctcagaggcaggccaatagcgggggcctcctatccaaccgagggggggcctccacagaggagaacgcgtcgcatatctacaaatatacgccccccccctggggtggggaatgatgagtacgaaggaggcacacagacaagaaagaacaaagagagaacaaagagaacaagaacaagacacaacgcaacaataagcaatgaagaggagacaaagaagatggttagagcgcgtcagagaacgtgataagagggaagatttaagcagtgcaaggaagacagagagcagagaaggaggagaccagggagaataaggcagagaggggatgaaagcggtaagagagcacagaatatataagtagttgagacaggatgcacaagaagcaggagcatatagagagtgatcgcgaacacgaatgaggggaggaagcgaagagcacgagtggcgagcgctgaagcgaatgcaatggtgctagacagcttgagtaatgttatactcgctgaaacctacacaagagacgcaagggaacgagtgcgaagcgtccattaccaagcgaagcagaacggagacggaacgagacggggcgcctgacagagcgagacagcggccacagggcggacgacatacaatgcgcaagcaaactaacaggctgcgcgtaacacgcctggagcgcgtcatgctgtgagtgggcagacggagtgccgtccgc

SEQ ID NO: 364455 - DNA, 3013 bp, Homo sapiens
cggcgcgcgggcggccgcgaccgccggggacgagcttggaggaaaaggaaccgggagccgcccacccgggggcgctctccggacccccagggtcctagcgcgcggcccttaccgagcctgggcgcccggatttcggcagcggatcgcctttccgggttggcggcccgcctgattgggaacagccggccggttgccgggggaacgcgggagtcgggcccgacctgagccacgcgggcttggtgcccacctgtgcgcgccgcctgcgaagaaggaacggtctagggagaaggcgccgccggccgcccccgtccccaccgcggccgtcgctggagagttcgagccgcctagcgcccctggagctccccaaccatgaagcccaacttctccctgcgactgcggatcttcaacctcaactgctggggcattccgtacttgagcaagcaccgggccgaccgcatgaggcgcctgggagactttctgaaccaggagagcttcgacctggctttgctggaggaggtgtggagtgagcaggacttccagtacctgagacagaagctgtcacctacctacccagctgcacaccacttccggagcggaatcattggcagtggcctctgtgtcttctccaaacatccaatccaggagcttacccagcacatctacactctcaatggctacccctacatgatccatcatggtgactggttcagtgggaaggctgtggggctgctggtgctccatctaagtggcatggtgctcaacgcctatgtgacccatgtgagtgaagctggcagtgcctagggctgggacatgcagcccagtcctgggacagagagatggtacttctctagctctcatacctggggatgaggtgtgggggcaagatcttataaggaagcaatgggcaaggcttatccattgtataccaaacaccatgccaagtgacagacacaggcttgattcagacatacccctgggaccctcagtcttatctgctgtgatctcatctatcttgctcagctccatgccgaatacaatcgacagaaggacatctacctagcacatcgtgtggcccaagcttgggaattggcccagttcatccagtgtgtgagcctgggcttgaaatgggaagtgggatgggacccaggggctgagggtgaacaaggccccagtcatggggaagagctggtgatggaagaactcccgcctcaccaacctggttcccccagccacacatccaagaaggcagacgtggttctgttgtgtggagacctcaacatgcacccagaagacctgggctgctgcctgctgaaggagtggacagggcttcatgatgcctatcttgaaactcgggacttcaagggctctgaggaaggcaacacaatggtacccaagaactgctacgtcagccagcaggagctgaagccatttccctttggtgtccgcattgactacgtgctttacaaggcagtttctgggttttacatctcctgtaagagttttgaaaccactacaggctttgaccctcacagtggcacccccctctctgatcatgaagccctgatggctactctgtttgtgaggcacagccccccacagcagaaccccagctctacccacggaccagcagagaggtcgccgttgatgtgtgtgctaaaggaggcctggacggagctgggtctgggcatggctcaggctcgctggtgggccaccttcgctagctatgtgattggcctggggctgcttctcctggcactgctgtgtgtcctggcggctggaggaggggccggggaagctgccatactgctctggacccccagtgtagggctggtgctgtgggcaggtgcattctacctcttccacgtacaggaggtcaatggcttatatagggcccaggctgagctccagcatgtgctaggaagggcaagggaggcccaggatctgggcccagagcctcagccagccctactcctggggcagcaggagggggacagaactaaagaacaataaagcttggccctttaaaaaaaaaacacaaacaataatacaatctaaacattgttgtttgcgcgggcccttggcgccctcgaagaaagctttctataacacacttcgtgttgtgggcggcgcgcgggggccccctttgtggttatgtggcacacgtgggcccacagagcggtgttccccataaggaacctcggggaccatgacacccaacgggcggtgggggtttcttacccatattaaaaagagcccgggggggcacacccgaggggctttttgtgaccaattctccaagatgggggtctcagaggcaggccaatagcgggggcctcctatccaaccgagggggggcctccacagaggagaacgcgtcgcatatctacaaatatacgccccccccctggggtggggaatgatgagtacgaaggaggcacacagacaagaaagaacaaagagagaacaaagagaacaagaacaagacacaacgcaacaataagcaatgaagaggagacaaagaagatggttagagcgcgtcagagaacgtgataagagggaagatttaagcagtgcaaggaagacagagagcagagaaggaggagaccagggagaataaggcagagaggggatgaaagcggtaagagagcacagaatatataagtagttgagacaggatgcacaagaagcaggagcatatagagagtgatcgcgaacacgaatgaggggaggaagcgaagagcacgagtggcgagcgctgaagcgaatgcaatggtgctagacagcttgagtaatgttatactcgctgaaacctacacaagagacgcaagggaacgagtgcgaagcgtccattaccaagcgaagcagaacggagacggaacgagacggggcgcctgacagagcgagacagcggccacagggcggacgacatacaatgcgcaagcaaactaacaggctgcgcgtaacacgcctggagcgcgtcatgctgtgagtgggcagacggagtgccgtccgc

SEQ ID NO: 364456 - DNA, 466 bp, Homo sapiens
ggcggccgcgaccgccggggacgagcttggaggaaaaggaaccgggagccgcccacccgggggcgctctccggacccccagggtcctagcgcgcggcccttaccgagcctgggcgcccggatttcggcagcggatcgcctttccgggttggcggcccgcctgattgggaacagccggccggttgccgggggaacgcgggagtcgggcccgacctgagccacgcgggcttggtgcccacctgtgcgcgccgcctgcgaagaaggaacggtctagggagaaggcgccgccggccgcccccgtccccaccgcggccgtcgctggagagttcgagccgcctagcgcccctggagctccccaaccatgaagcccaacttctccctgcgactgcggatcttcaacctcaactgctggtgagtgcgtctgcggagtgcggtctgggggccaccttccgttcgcacccatgcag

SEQ ID NO: 364457 - DNA, 2644 bp, Homo sapiens
cggcgcgcgggcggccgcgaccgccggggacgagcttggaggaaaaggaaccgggagccgcccacccgggggcgctctccggacccccagggtcctagcgcgcggcccttaccgagcctgggcgcccggatttcggcagcggatcgcctttccgggttggcggcccgcctgattgggaacagccggccggttgccgggggaacgcgggagtcgggcccgacctgagccacgcgggcttggtgcccacctgtgcgcgccgcctgcgaagaaggaacggtctagggagaaggcgccgccggccgcccccgtccccaccgcggccgtcgctggagagttcgagccgcctagcgcccctggagctccccaaccatgaagcccaacttctccctgcgactgcggatcttcaacctcaactgctggggcattccgtacttgagcaagcaccgggccgaccgcatgaggcgcctgggagactttctgaaccaggagagcttcgacctggctttgctggaggaggtgtggagtgagcaggacttccagtacctgagacagaagctgtcacctacctacccagctgcacaccacttccggagcggaatcattggcagtggcctctgtgtcttctccaaacatccaatccaggagcttacccagcacatctacactctcaatggctacccctacatgatccatcatggtgactggttcagtgggaaggctgtggggctgctggtgctccatctaagtggcatggtgctcaacgcctatgtgacccatctccatgccgaatacaatcgacagaaggacatctacctagcacatcgtgtggcccaagcttgggaattggcccagttcatccaccacacatccaagaaggcagacgtggttctgttgtgtggagacctcaacatgcacccagaagacctgggctgctgcctgctgaaggagtggacagggcttcatgatgcctatcttgaaactcgggacttcaagggctctgaggaaggcaacacaatggtacccaagaactgctacgtcagccagcaggagctgaagccatttccctttggtgtccgcattgactacgtgctttacaaggcagtttctgggttttacatctcctgtaagagttttgaaaccactacaggctttgaccctcacagtggcacccccctctctgatcatgaagccctgatggctactctgtttgtgaggcacagccccccacagcagaaccccagctctacccacggaccagcagagaggtcgccgttgatgtgtgtgctaaaggaggcctggacggagctgggtctgggcatggctcaggctcgctggtgggccaccttcgctagctatgtgattggcctggggctgcttctcctggcactgctgtgtgtcctggcggctggaggaggggccggggaagctgccatactgctctggacccccagtgtagggctggtgctgtgggcaggtgcattctacctcttccacgtacaggaggtcaatggcttatatagggcccaggctgagctccagcatgtgctaggaagggcaagggaggcccaggatctgggcccagagcctcagccagccctactcctggggcagcaggagggggacagaactaaagaacaataaagcttggccctttaaaaaaaaaacacaaacaataatacaatctaaacattgttgtttgcgcgggcccttggcgccctcgaagaaagctttctataacacacttcgtgttgtgggcggcgcgcgggggccccctttgtggttatgtggcacacgtgggcccacagagcggtgttccccataaggaacctcggggaccatgacacccaacgggcggtgggggtttcttacccatattaaaaagagcccgggggggcacacccgaggggctttttgtgaccaattctccaagatgggggtctcagaggcaggccaatagcgggggcctcctatccaaccgagggggggcctccacagaggagaacgcgtcgcatatctacaaatatacgccccccccctggggtggggaatgatgagtacgaaggaggcacacagacaagaaagaacaaagagagaacaaagagaacaagaacaagacacaacgcaacaataagcaatgaagaggagacaaagaagatggttagagcgcgtcagagaacgtgataagagggaagatttaagcagtgcaaggaagacagagagcagagaaggaggagaccagggagaataaggcagagaggggatgaaagcggtaagagagcacagaatatataagtagttgagacaggatgcacaagaagcaggagcatatagagagtgatcgcgaacacgaatgaggggaggaagcgaagagcacgagtggcgagcgctgaagcgaatgcaatggtgctagacagcttgagtaatgttatactcgctgaaacctacacaagagacgcaagggaacgagtgcgaagcgtccattaccaagcgaagcagaacggagacggaacgagacggggcgcctgacagagcgagacagcggccacagggcggacgacatacaatgcgcaagcaaactaacaggctgcgcgtaacacgcctggagcgcgtcatgctgtgagtgggcagacggagtgccgtccgc

SEQ ID NO: 364458 - DNA, 1334 bp, Homo sapiens
tccgctcggctcaccatgtgtcactctcgcagctgccacccgaccatgaccatcctgcaggccccgaccccggccccctccaccatcccgggaccccggcggggctccggtcctgagatcttcaccttcgaccctctcccggagcccgcagcggcccctgccgggcgccccagcgcctctcgcgggcaccgaaagcgcagccgcagggttctctaccctcgagtggtgagtatcgccgaagtgggcattcgcggggtgcgctgccctggagtcactggggaacgacccgactccagaggcctcgacctgacctgtctcctgttttgtctccccttaggtccggcgccagctgccagtcgaggaaccgaacccagccaaaaggcttctctttctgctgctcaccatcgtcttctgccagatcctgatggctgaagagggtgtgccggcgcccctgcctccagaggacgcccctaacgccgcatccctggcgcccacccctgtgtcccccgtcctcgagccctttaatctgacttcggagccctcggactacgctctggacctcagcactttcctccagcaacacccggccgccttctaactgtgactccccgcactccccaaaaagaatccgaaaaaccacaaagaaacaccaggcgtacctggtgcgcgagagcgtatccccaactgggacttccgaggcaacttgaactcagaacactacagcggagacgccacccggtgcttgaggcgggaccgaggcgcacagagaccgaggcgcatagagaccgaggcacagcccagctggggctaggcccggtgggaaggagagcgtcgttaatttatttcttattgctcctaattaatatttatatgtatttatgtacgtcctcctaggtgatggagatgtgtacgtaatatttattttaacttatgcaagggtgtgagatgttccccctgctgtaaatgcaggtctcttggtatttattgagctttgtgggactggtggaagcaggacacctggaactgcggcaaagtaggagaagaaatggggaggactcgggtgggggaggacgtcccggctgggatgaagtctggtggtgggtcgtaagtttaggaggtgactgcatcctccagcatctcaactccgtctgtctactgtgtgagacttcggcggaccattaggaatgagatccgtgagatccttccatcttcttgaagtcgcctttagggtggctgcgaggtagagggttgggggttggtgggctgtcacggagcgactgtcgagatcgcctagtatgttctgtgaacacaaataaaattgatttactgtctgc

SEQ ID NO: 364459 - DNA, 436 bp, Homo sapiens
agtgtgatgttccccttcctgtgtccatgtgatctcattgttcaattcccacctatgagtgagaaatgcaggtctcttggtatttattgagctttgtgggactggtggaagcaggacacctggaactgcggcaaagtaggagaagaaatggggaggactcgggtgggggaggacgtcccggctgggatgaagtctggtggtgggtcgtaagtttaggaggtgactgcatcctccagcatctcaactccgtctgtctactgtgtgagacttcggcggaccattaggaatgagatccgtgagatccttccatcttcttgaagtcgcctttagggtggctgcgaggtagagggttgggggttggtgggctgtcacggagcgactgtcgagatcgcctagtatgttctgtgaacacaaataaaattgatttactgtctgc

SEQ ID NO: 364460 - DNA, 1092 bp, Homo sapiens
ctagaggcaccaaggaggccagaggcaccaaggagggccccagcgcctctcgcgggcaccgaaagcgcagccgcagggttctctaccctcgagtggtccggcgccagctgccagtcgaggaaccgaacccagccaaaaggcttctctttctgctgctcaccatcgtcttctgccagatcctgatggctgaagagggtgtgccggcgcccctgcctccagaggacgcccctaacgccgcatccctggcgcccacccctgtgtcccccgtcctcgagccctttaatctgacttcggagccctcggactacgctctggacctcagcactttcctccagcaacacccggccgccttctaactgtgactccccgcactccccaaaaagaatccgaaaaaccacaaagaaacaccaggcgtacctggtgcgcgagagcgtatccccaactgggacttccgaggcaacttgaactcagaacactacagcggagacgccacccggtgcttgaggcgggaccgaggcgcacagagaccgaggcgcatagagaccgaggcacagcccagctggggctaggcccggtgggaaggagagcgtcgttaatttatttcttattgctcctaattaatatttatatgtatttatgtacgtcctcctaggtgatggagatgtgtacgtaatatttattttaacttatgcaagggtgtgagatgttccccctgctgtaaatgcaggtctcttggtatttattgagctttgtgggactggtggaagcaggacacctggaactgcggcaaagtaggagaagaaatggggaggactcgggtgggggaggacgtcccggctgggatgaagtctggtggtgggtcgtaagtttaggaggtgactgcatcctccagcatctcaactccgtctgtctactgtgtgagacttcggcggaccattaggaatgagatccgtgagatccttccatcttcttgaagtcgcctttagggtggctgcgaggtagagggttgggggttggtgggctgtcacggagcgactgtcgagatcgcctagtatgttctgtgaacacaaataaaattgatttactgtctgc

SEQ ID NO: 364461 - DNA, 1182 bp, Homo sapiens
tccgctcggctcaccatgtgtcactctcgcagctgccacccgaccatgaccatcctgcaggccccgaccccggccccctccaccatcccgggaccccggcggggctccggtcctgagatcttcaccttcgaccctctcccggagcccgcagcggcccctgccgggcgccccagcgcctctcgcgggcaccgaaagcgcagccgcagggttctctaccctcgagtggtccggcgccagctgccagtcgaggaaccgaacccagccaaaaggcttctctttctgctgctcaccatcgtcttctgcctccagaggacgcccctaacgccgcatccctggcgcccacccctgtgtcccccgtcctcgagccctttaatctgacttcggagccctcggactacgctctggacctcagcactttcctccagcaacacccggccgccttctaactgtgactccccgcactccccaaaaagaatccgaaaaaccacaaagaaacaccaggcgtacctggtgcgcgagagcgtatccccaactgggacttccgaggcaacttgaactcagaacactacagcggagacgccacccggtgcttgaggcgggaccgaggcgcacagagaccgaggcgcatagagaccgaggcacagcccagctggggctaggcccggtgggaaggagagcgtcgttaatttatttcttattgctcctaattaatatttatatgtatttatgtacgtcctcctaggtgatggagatgtgtacgtaatatttattttaacttatgcaagggtgtgagatgttccccctgctgtaaatgcaggtctcttggtatttattgagctttgtgggactggtggaagcaggacacctggaactgcggcaaagtaggagaagaaatggggaggactcgggtgggggaggacgtcccggctgggatgaagtctggtggtgggtcgtaagtttaggaggtgactgcatcctccagcatctcaactccgtctgtctactgtgtgagacttcggcggaccattaggaatgagatccgtgagatccttccatcttcttgaagtcgcctttagggtggctgcgaggtagagggttgggggttggtgggctgtcacggagcgactgtcgagatcgcctagtatgttctgtgaacacaaataaaattgatttactgtctgc

SEQ ID NO: 364462 - DNA, 1240 bp, Homo sapiens
tccgctcggctcaccatgtgtcactctcgcagctgccacccgaccatgaccatcctgcaggccccgaccccggccccctccaccatcccgggaccccggcggggctccggtcctgagatcttcaccttcgaccctctcccggagcccgcagcggcccctgccgggcgccccagcgcctctcgcgggcaccgaaagcgcagccgcagggttctctaccctcgagtggtccggcgccagctgccagtcgaggaaccgaacccagccaaaaggcttctctttctgctgctcaccatcgtcttctgccagatcctgatggctgaagagggtgtgccggcgcccctgcctccagaggacgcccctaacgccgcatccctggcgcccacccctgtgtcccccgtcctcgagccctttaatctgacttcggagccctcggactacgctctggacctcagcactttcctccagcaacacccggccgccttctaactgtgactccccgcactccccaaaaagaatccgaaaaaccacaaagaaacaccaggcgtacctggtgcgcgagagcgtatccccaactgggacttccgaggcaacttgaactcagaacactacagcggagacgccacccggtgcttgaggcgggaccgaggcgcacagagaccgaggcgcatagagaccgaggcacagcccagctggggctaggcccggtgggaaggagagcgtcgttaatttatttcttattgctcctaattaatatttatatgtatttatgtacgtcctcctaggtgatggagatgtgtacgtaatatttattttaacttatgcaagggtgtgagatgttccccctgctgtaaatgcaggtctcttggtatttattgagctttgtgggactggtggaagcaggacacctggaactgcggcaaagtaggagaagaaatggggaggactcgggtgggggaggacgtcccggctgggatgaagtctggtggtgggtcgtaagtttaggaggtgactgcatcctccagcatctcaactccgtctgtctactgtgtgagacttcggcggaccattaggaatgagatccgtgagatccttccatcttcttgaagtcgcctttagggtggctgcgaggtagagggttgggggttggtgggctgtcacggagcgactgtcgagatcgcctagtatgttctgtgaacacaaataaaattgatttactgtctgccaaaattgagtgtatctt

SEQ ID NO: 364463 - DNA, 1092 bp, Homo sapiens
tccgctcggctcaccatgtgtcactctcgcagctgccacccgaccatgaccatcctgcaggccccgaccccggccccctccaccatcccgggaccccggcggggctccggtcctgagatcttcaccttcgaccctctcccggagcccgcagcggcccctgccgggcgccccagcgcctctcgcgggcaccgaaagcgcagccgcagggttctctaccctcgagtggtccggcgccagctgccagtcgaggaaccgaacccagccaaaaggcttctctttctgctgctcaccatcgtcttctgccagatcctgatggctgaagagggtgtgccggcgcccctgcctccagaggacgcccctaacgccgcatccctggcgcccacccctgtgtcccccgtcctcgagccctttaatctgacttcggagccctcggactacgctctggacctcagcactttcctccagcaacacccggccgccttctaactgtgactccccgcactccccaaaaagaatccgaaaaaccacaaagaaacaccaggcgtacctggtgcgcgagagcgtatccccaactgggacttccgaggcaacttgaactcagaacactacagcggagacgccacccggtgcttgaggcgggaccgaggcgcacagagaccgaggcgcatagagaccgaggcacagcccagctggggctaggcccggtgggaaggagagcgtcgttaatttatttcttattgctcctaattaatatttatatgtatttatgtacgtcctcctaggtgatggagatgtgtacgtaatatttattttaacttatgcaagggtgtgagatgttccccctgctgtaaatgcaggtctcttggtatttattgagctttgtgggactggtggaagcaggacacctggaatggtcacactcatggacatggacacgctcacagtaatacacgtggaagtcatgcacatggaatacaagagcgttctaccaaggagaagcagagctcagaggaaagaagaaaaggacacaagaggggttcagaagaaggcgaggagggagcacagtacccaaagatgggccagtgagaactc

SEQ ID NO: 364464 - DNA, 766 bp, Homo sapiens
tccgctcggctcaccatgtgtcactctcgcagctgccacccgaccatgaccatcctgcaggccccgaccccggccccctccaccatcccgggaccccggcggggctccggtcctgagatcttcaccttcgaccctctcccggagcccgcagcggcccctgccgggcgccccagcgcctctcgcgggcaccgaaagcgcagccgcagggttctctaccctcgagtggtccggcgccagctgccagtcgaggaaccgaacccagccaaaaggcttctctttctgctgctcaccatcgtcttctgccagatcctgatggctgaagagggtgtgccggcgcccctgcctccagaggacgcccctaacgccgcatccctggcgcccacccctgtgtcccccgtcctcgagccctttaatctgacttcggagccctcggactacgctctggacctcagcactttcctccagcaacacccggccgccttctaacttcgggtgggggaggacgtcccggctgggatgaagtctggtggtgggtcgtaagtttaggaggtgactgcatcctccagcatctcaactccgtctgtctactgtgtgagacttcggcggaccattaggaatgagatccgtgagatccttccatcttcttgaagtcgcctttagggtggctgcgaggtagagggttgggggttggtgggctgtcacggagcgactgtcgagatcgcctagtatgttctgtgaacacaaataaaattgatttactgtctgc

SEQ ID NO: 364465 - DNA, 477 bp, Homo sapiens
tccgctcggctcaccatgtgtcactctcgcagctgccacccgaccatgaccatcctgcaggccccgaccccggccccctccaccatcccgggaccccggcggggctccggtcctgagatcttcaccttcgaccctctcccggagcccgcagcggcccctgccgggcgccccagcgcctctcgcgggcaccgaaagcgcagccgcagggttctctaccctcgagtggtccggcgccagctgccagtcgaggaaccgaacccagccaaaaggcttctctttctgctgctcaccatcgtcttctgccagatcctgatggctgaagagggtgtgccggcgcccctgcctccagaggacgcccctaacgccgcatccctggctgcgaggtagagggttgggggttggtgggctgtcacggagcgactgtcgagatcgcctagtatgttctgtgaacacaaataaaattgatttactgtctgc

SEQ ID NO: 364466 - DNA, 1222 bp, Homo sapiens
tccgctcggctcaccatgtgtcactctcgcagctgccacccgaccatgaccatcctgcaggccccgaccccggccccctccaccatcccgggaccccggcggggctccggtcctgagatcttcaccttcgaccctctcccggagcccgcagcggcccctgccgggcgccccagcgcctctcgcgggcaccgaaagcgcagccgcagggttctctaccctcgagtggtccggcgccagctgccagtcgaggaaccgaacccagccaaaaggcttctctttctgctgctcaccatcgtcttctgccagatcctgatggctgaagagggtgtgccggcgcccctgcctccagaggacgcccctaacgccgcatccctggcgcccacccctgtgtcccccgtcctcgagccctttaatctgacttcggagccctcggactacgctctggacctcagcactttcctccagcaacacccggccgccttctaactgtgactccccgcactccccaaaaagaatccgaaaaaccacaaagaaacaccaggcgtacctggtgcgcgagagcgtatccccaactgggacttccgaggcaacttgaactcagaacactacagcggagacgccacccggtgcttgaggcgggaccgaggcgcacagagaccgaggcgcatagagaccgaggcacagcccagctggggctaggcccggtgggaaggagagcgtcgttaatttatttcttattgctcctaattaatatttatatgtatttatgtacgtcctcctaggtgatggagatgtgtacgtaatatttattttaacttatgcaagggtgtgagatgttccccctgctgtaaatgcaggtctcttggtatttattgagctttgtgggactggtggaagcaggacacctggaactgcggcaaagtaggagaagaaatggggaggactcgggtgggggaggacgtcccggctgggatgaagtctggtggtgggtcgtaagtttaggaggtgactgcatcctccagcatctcaactccgtctgtctactgtgtgagacttcggcggaccattaggaatgagatccgtgagatccttccatcttcttgaagtcgcctttagggtggctgcgaggtagagggttgggggttggtgggctgtcacggagcgactgtcgagatcgcctagtatgttctgtgaacacaaataaaattgatttactgtctgc

SEQ ID NO: 364467 - DNA, 1250 bp, Homo sapiens
tccgctcggctcaccatgtgtcactctcgcagctgccacccgaccatgaccatcctgcaggccccgaccccggccccctccaccatcccgggaccccggcggggctccggtcctgagatcttcaccttcgaccctctcccggagcccgcagcggcccctgccgggcgccccagcgcctctcgcgggcaccgaaagcgcagccgcagggttctctaccctcgagtggtccggcgccagctgccagtcgaggaaccgaacccagccaaaaggcttctctttctgctgctcaccatcgtcttctgccagatcctgatggctgaagagggtgtgccggcgcccctgcctccagaggacgcccctaacgccgcatccctggcgcccacccctgtgtcccccgtcctcgagccctttaatctgacttcggagccctcggactacgctctggacctcagcactttcctccagcaacacccggccgccttctaactgtgactccccgcactccccaaaaagaatccgaaaaaccacaaagaaacaccaggcgtacctggtgcgcgagagcgtatccccaactgggacttccgaggcaacttgaactcagaacactacagcggagacgccacccggtgcttgaggcgggaccgaggcgcacagagaccgaggcgcatagagaccgaggcacagcccagctggggctaggcccggtgggaaggagagcgtcgttaatttatttcttattgctcctaattaatatttatatgtatttatgtacgtcctcctaggtgatggagatgtgtacgtaatatttattttaacttatgcaagggtgtgagatgttccccctgctgtaaatgcaggtctcttggtatttattgagctttgtgggactggtggaagcaggacacctggaactgcggcaaagtaggagaagaaatggggaggactcgggtgggggaggacgtcccggctgggatgaagtctggtggtgggtcgtaagtttaggaggtgactgcatcctccagcatctcaactccgtctgtctactgtgtgagacttcggcggaccattaggaatgagatccgtgagatccttccatcttcttgaagtcgcctttagggtggctgcgaggtagagggttgggggttggtgggctgtcacggagcgactgtcgagatcgcctagtatgttctgtgaacacaaataaaattgatttactgtctgcaaaaaaaataaagttaggaccggccgat

SEQ ID NO: 364468 - DNA, 1169 bp, Homo sapiens
tccgctcggctcaccatgtgtcactctcgcagctgccacccgaccatgaccatcctgcaggccccgaccccggccccctccaccatcccgggaccccggcggggctccggtcctgagatcttcaccttcgaccctctcccggagcccgcagcggcccctgccgggcgccccagcgcctctcgcgggcaccgaaagcgcagccgcagggttctctaccctcgagtggtccggcgccagctgccagtcgaggaaccgaacccagccaaaaggcttctctttctgctgctcaccatcgtcttctgccagatcctgatggctgaagagggtgtgccggcgcccctgcctccagaggacgcccctaacgccgcatccctggcgcccacccctgtgtcccccgtcctcgagccctttaatctgacttcggagccctcggactacgctctggacctcagcactttcctccagcaacacccggccgccttctaactgtgactccccgcactccccaaaaagaatccgatgggacttccgaggcaacttgaactcagaacactacagcggagacgccacccggtgcttgaggcgggaccgaggcgcacagagaccgaggcgcatagagaccgaggcacagcccagctggggctaggcccggtgggaaggagagcgtcgttaatttatttcttattgctcctaattaatatttatatgtatttatgtacgtcctcctaggtgatggagatgtgtacgtaatatttattttaacttatgcaagggtgtgagatgttccccctgctgtaaatgcaggtctcttggtatttattgagctttgtgggactggtggaagcaggacacctggaactgcggcaaagtaggagaagaaatggggaggactcgggtgggggaggacgtcccggctgggatgaagtctggtggtgggtcgtaagtttaggaggtgactgcatcctccagcatctcaactccgtctgtctactgtgtgagacttcggcggaccattaggaatgagatccgtgagatccttccatcttcttgaagtcgcctttagggtggctgcgaggtagagggttgggggttggtgggctgtcacggagcgactgtcgagatcgcctagtatgttctgtgaacacaaataaaattgatttactgtctgc

SEQ ID NO: 364469 - DNA, 1209 bp, Homo sapiens
tccgctcggctcaccatgtgtcactctcgcagctgccacccgaccatgaccatcctgcaggccccgaccccggccccctccaccatcccgggaccccggcggggctccggtcctgagatcttcaccttcgaccctctcccggagcccgcagcggcccctgccgggcgccccagcgcctctcgcgggcaccgaaagcgcagccgcagggttctctaccctcgagtggtccggcgccagctgccagtcgaggaaccgaacccagccaaaaggcttctctttctgctgctcaccatcgtcttctgccagatcctgatggctgaagagggtgtgccggcgcccctgcctccagaggacgcccctaacgccgcatccctggcgcccacccctgtgtcccccgtcctcgagccctttaatctgacttcggagccctcggactacgctctggacctcagcactttcctccagcaacacccggccgccttctaactgtgactccccgcactccccaaaaagaatccgaaaaaccacaaagaaacaccaggcgtacctggtgcgcgagagcgtatccccaactgggacttccgaggcaacttgaactcagaacactacagcggagacgccacccggtgcttgaggcgggaccgaggcgcacagagaccgaggcgcatagagaccgaggcacagcccagctggggctaggcccggtgggaaggagagcgtcgttaatttatttcttattgctcctaattaatatttatatgtatttatgtacgtcctcctaggtgatggagatgtgtacgtaatatttattttaacttatgcaagggtgtgagatgttccccctgctgtaaatgcaggtctcttggtatttattgagctttgtgggactggtggaagcaggacacctggaactgcggcaaagtaggagaagaaatggggaggacgacgtcccggctgggatgaagtctggtggtgggtcgtaagtttaggaggtgactgcatcctccagcatctcaactccgtctgtctactgtgtgagacttcggcggaccattaggaatgagatccgtgagatccttccatcttcttgaagtcgcctttagggtggctgcgaggtagagggttgggggttggtgggctgtcacggagcgactgtcgagatcgcctagtatgttctgtgaacacaaataaaattgatttactgtctgc

SEQ ID NO: 364470 - DNA, 996 bp, Homo sapiens
tccgctcggctcaccatgtgtcactctcgcagctgccacccgaccatgaccatcctgcaggccccgaccccggccccctccaccatcccgggaccccggcggggctccggtcctgagatcttcaccttcgaccctctcccggagcccgcagcggcccctgccgggcgccccagcgcctctcgcgggcaccgaaagcgcagccgcagggttctctaccctcgagtggtccggcgccagctgccagtcgaggaaccgaacccagccaaaaggcttctctttctgctgctcaccatcgtcttctgccagatcctgatggctgaagagggtgtgccggcgcccctgcctccagaggacgcccctaacgccgcatccctggcgcccacccctgtgtcccccgtcctcgagccctttaatctgacttcggagccctcggactacgctctggacctcagcactttcctccagcaacacccggccgccttctaactgtgactccccgcactccccaaaaagaatccgaaaaaccacaaagaaacaccaggcgtacctggtgcgcgagagcgtatccccaactgggacttccgaggcaacttgaactcagaacactacagcggagacgccacccggtgcttgaggcgggaccgaggcgcacagagaccgaggcgcatagagaccgaggcacagcccagctggggctaggcccggtgggaaggagagcgtcgttaatttatttcttattgctcctaattaatatttatatgtatttatgtacgtcctcctaggtgatggagatgtgtacgtaatatttattttaacttatgcaagggtgtgagatgttccccctgctgtaaatgcaggtctcttggtatttattgagctttgtgggactggtggaagcaggacacctggaataggagtcaataaagtgattggcttagtgggcgaaatattatgctttgctgttgtggatgttatgggtttggacacgaatgttca

SEQ ID NO: 364471 - DNA, 457 bp, Homo sapiens
gcagaagacaccagtggaaacatgtgaggaagggctgtaactggggcctggaggggttggttcaggcttcctgctcatcagttctgtgtgtatccctagtggctggggcctggcactgagtagatgcttggtagagattcgtagaatgaacagatgaagggatacctacctcaggccagagtggtggcttaaacctgtaatctcagcactttgggaggttgaggcgggtggatcacatgaggccaggagatcgagaccagcctggccgacatggtgaaaccccgcctctaccagaaaaatacaaaagttagccggacgtggtggcacacacctgtaatcccacctactcgggaggctgaggtgggagaatctcttgaacctgggagacagaggttatagtgagctgagatcacactactgcactctagcctgggcgacagagtgagatcctgtctcc

SEQ ID NO: 364472 - DNA, 373 bp, Homo sapiens
tcctctcctgccggacaatgtgctaccgtggggcttttgtcctgggctgcagtgtggtcctctcgatcctagaaaagaggccgctcaggatggggatgagacttccattgctccgggcccgatgcatcccctcacgttatcgaggcctgcacagacccaaagtggaaccgccgcgaagacgatggacagctggccgcaggacccagggagagacgcagaaagaggctcaccaaagaccggtcgacataaaagacatccctttttgacgcacagggcacattcgtcaaaagacacacacacacacacacaaacacacacacacacacacacagagggaaagaagcacacagagggtgagagacagagagagaag

SEQ ID NO: 364473 - DNA, 2532 bp, Homo sapiens
tccgggcctggcctgtacggtcgccgccgttccctggaagtagcaacttccctaccccaccccagtcctggtccccgtccagccgctgacgtgaagatgagcagctcagaggaggtgtcctggatttcctggttctgtgggctccgtggcaatgaattcttctgtgaagtggatgaagactacatccaggacaaatttaatcttactggactcaatgagcaggtccctcactaccgacaagctctagacatgatcttggacctggagcctgatgaagaactggaagacaaccccaaccagagtgacctgattgagcaggcagccgagatgctttatggattgatccacgcccgctacatccttaccaaccgtggcatcgcccagatgttggaaaagtaccagcaaggagactttggttactgtcctcgtgtgtactgtgagaaccagccaatgcttcccattggcctttcagacatcccaggtgaagccatggtgaagctctactgccccaagtgcatggatgtgtacacacccaagtcatcaagacaccatcacacggatggcgcctacttcggcactggtttccctcacatgctcttcatggtgcatcccgagtaccggcccaagagacctgccaaccagtttgtgcccaggctctacggtttcaagatccatgcgatggcctaccagctgcagctccaagccgccagcaacttcaagagcccagtcaagacgattcgctgattccctcccccacctgtcctgcagtctttgacttttcctttcttttttgccaccctttcaggaaccctgtatggtttttagtttaaattaaaggagtcgttattgtggtgggaatatgaaataaagtagaagaaaaggccatgaaaaaaaaaaaaaaaaaaaaaaaaaaggtttgtgttctcgacgccttggtagttggcataggctaaagaaaagggatctcagccccgaggaagggtcaccctcctagagatagctactaccccgtctcaggagaccctggtatttctagagcacgctttgctttcaccaaacccaaggaggtgacaggaggagcccccgcacaggacctaagaatgctgtgaccagaagatgggatcgcggaacagcagcagtgcaggatccggtccggagacccctccgagggcttgccccgaagaggggctggcctgcgtcggagtgaggaagaggaagaagaggatgaagatgtggatctggcccaggtactggcctatctcctccgcagaggccaagtgaggttggtgcagggaggaggtgcagcaaatttacaattcattcaggccctcttggactcagaggaagagaatgacagagcttgggatggtcgtcttggggatcgatacaacccacctgtggatgctacccctgacacccgggccccggactcgtggagttgtgaacgccgcggactccggagccgcacaaaccaggctcgccatgaagccaggattcagtccccgtgggggtggctttggcggccgagggggctttggtgaccgtggtggtcgtggaggccgagggggctttggcgggggccgaggtcgaggcggaggctttagaggtcgtggacgaggaggaggtggaggcggcggcggcggtggaggaggaggaagaggtggtggaggcttccattctggtggcaaccggggtcgtggtcggggaggaaaaagaggaaaccagtcggggaagaatgtgatggtggagccgcatcggcatgagggtgtcttcatttgtcgaggaaaggaagatgcactggtcaccaagaacctggtccctggggaatcagtttatggagagaagagagtctcgatttcggaaggagatgacaaaattgagtaccgagcctggaaccccttccgctccaagctagcagcagcaatcctgggtggtgtggaccagatccacatcaaaccgggggctaaggttctctacctcggggctgcctcgggcaccacggtctcccatgtctctgacatcgttggtccggatggtctagtctatgcagtcgagttctcccaccgctctggccgtgacctcattaacttggccaagaagaggaccaacatcattcctgtgatcgaggatgctcgacacccacacaaataccgcatgctcatcgcaatggtggatgtgatctttgctgatgtggcccagccagaccagacccggattgtggccctgaatgcccacaccttcctgcgtaatggaggacactttgtgatttccattaaggccaactgcattgactccacagcctcagccgaggccgtgtttgcctccgaagtgaaaaagatgcaacaggagaacatgaagccgcaggagcagttgacccttgagccatatgaaagagaccatgccgtggtcgtgggagtgtacaggccaccccccaaggtgaagaactgaagttcagcgctgtcaggattgcgagagatgtgtgttgatactgttgcacgtgtgtttttctattaaaagactcatccgtcaaaa

SEQ ID NO: 364474 - DNA, 635 bp, Homo sapiens
gggaacctgggctctcaggcagatgggattgggtacttttgctacttgctgaataactcttggccagtgactttatgtctggacctcagtttattcatgtgaaaaatggacatgatagcaatagtcattagatggatggtctagtctatgcagtcgagttctcccaccgctctggccgtgacctcattaacttggccaagaagaggaccaacatcattcctgtgatcgaggatgctcgacacccacacaaataccgcatgctcatcgcaatggtggatgtgatctttgctgatgtggcccagccagaccagacccggattgtggccctgaatgcccacaccttcctgcgtaatggaggacactttgtgatttccattaaggccaactgcattgactccacagcctcagccgaggccgtgtttgcctccgaagtgaaaaagatgcaacaggagaacatgaagccgcaggagcagttgacccttgagccatatgaaagagaccatgccgtggtcgtgggagtgtacaggccaccccccaaggtgaagaactgaagttcagcgctgtcaggattgcgagagatgtgtgttgatactgttgcacgtgtgtttttctattaaaagactcatccgtcaaaa

SEQ ID NO: 364475 - DNA, 525 bp, Homo sapiens
cggacgcgtgggtcgacccacgcggatggtctagtctatgcagtcgagttctcccaccgctctggccgtgacctcattaacttggccaagaagaggaccaacatcattcctgtgatcgaggatgctcgacacccacacaaataccgcatgctcatcgcaatggtggatgtgatctttgctgatgtggcccagccagaccagacccggattgtggccctgaatgcccacaccttcctgcgtaatggaggacactttgtgatttccattaaggccaactgcattgactccacagcctcagccgaggccgtgtttgcctccgaagtgaaaaagatgcaacaggagaacatgaagccgcaggagcagttgacccttgagccatatgaaagagaccatgccgtggtcgtgggagtgtacaggccaccccccaaggtgaagaactgaagttcagcgctgtcaggattgcgagagatgtgtgttgatactgttgcacgtgtgtttttctattaaaagactcatccgtcaaaa

SEQ ID NO: 364476 - DNA, 1155 bp, Homo sapiens
gcgggggccggtgcaaaccttacggctaggtacgaggctgggtggccccggactcgtggagttgtgaacgccgcggactccggagccgcacaaaccaggctcgccatgaagccaggattcagtccccgtgggggtggctttggcggccgagggggctttggtgaccgtggtggtcgtggaggccgagggggctttggcgggggccgaggtcgaggcggaggctttagaggtcgtggacgaggaggaggtggaggcggcggcggcggtggaggaggaggaagaggtggtggaggcttccattctggtggcaaccggggtcgtggtcggggaggaaaaagaggaaaccagtcggggaagaatgtgatggtggagccgcatcggcatgagggtgtcttcatttgtcgaggaaaggaagatgcactggtcaccaagaacctggtccctggggaatcagtttatggagagaagagagtctcgatttcggaaggagatgacaaaattgagtaccgagcctggaaccccttccgctccaagctagcagcagcaatcctgggtggtgtggaccagatccacatcaaaccgggggctaaggttctctacctcggggctgcctcgggcaccacggtctcccatgtctctgacatcgttggtccggatggtctagtctatgcagtcgagttctcccaccgctctggccgtgacctcattaacttggccaagaagaggaccaacatcattcctgtgatcgaggatgctcgacacccacacaaataccgcatgctcatcgcaatggtggatgtgatctttgctgatgtggcccagccagaccagacccggattgtggccctgaatgcccacaccttcctgcgtaatggaggacactttgtgatttccattaaggccaactgcattgactccacagcctcagccgaggccgtgtttgcctccgaagtgaaaaagatgcaacaggagaacatgaagccgcaggagcagttgacccttgagccatatgaaagagaccatgccgtggtcgtgggagtgtacaggccaccccccaaggtgaagaactgaagttcagcgctgtcaggattgcgagagatgtgtgttgatactgttgcacgtgtgtttttctattaaaagactcatccgtcaaaa

SEQ ID NO: 364477 - DNA, 1123 bp, Homo sapiens
acggctaggtcgggctggtgtgaatcggccgaggaacgccgcggactccggagccgcacaaaccaggctcgccatgaagccaggattcagtccccgtgggggtggctttggcggccgagggggctttggtgaccgtggtggtcgtggaggccgagggggctttggcgggggccgaggtcgaggcggaggctttagaggtcgtggacgaggaggaggtggaggcggcggcggcggtggaggaggaggaagaggtggtggaggcttccattctggtggcaaccggggtcgtggtcggggaggaaaaagaggaaaccagtcggggaagaatgtgatggtggagccgcatcggcatgagggtgtcttcatttgtcgaggaaaggaagatgcactggtcaccaagaacctggtccctggggaatcagtttatggagagaagagagtctcgatttcggaaggagatgacaaaattgagtaccgagcctggaaccccttccgctccaagctagcagcagcaatcctgggtggtgtggaccagatccacatcaaaccgggggctaaggttctctacctcggggctgcctcgggcaccacggtctcccatgtctctgacatcgttggtccggatggtctagtctatgcagtcgagttctcccaccgctctggccgtgacctcattaacttggccaagaagaggaccaacatcattcctgtgatcgaggatgctcgacacccacacaaataccgcatgctcatcgcaatggtggatgtgatctttgctgatgtggcccagccagaccagacccggattgtggccctgaatgcccacaccttcctgcgtaatggaggacactttgtgatttccattaaggccaactgcattgactccacagcctcagccgaggccgtgtttgcctccgaagtgaaaaagatgcaacaggagaacatgaagccgcaggagcagttgacccttgagccatatgaaagagaccatgccgtggtcgtgggagtgtacaggccaccccccaaggtgaagaactgaagttcagcgctgtcaggattgcgagagatgtgtgttgatactgttgcacgtgtgtttttctattaaaagactcatccgtcaaaa

SEQ ID NO: 364478 - DNA, 1287 bp, Homo sapiens
  misc_feature (1209)..(1209): n is a, c, g, or t
  misc_feature (1217)..(1219): n is a, c, g, or t
  misc_feature (1232)..(1232): n is a, c, g, or t
tgctagtgaggctggtgttaatcggccgaggacgcagcgcacgtcgccgcgcgcctgcgctcttttccacgtgcgaaagccccggactcgtggagttgtgaacgccgcggactccggagccgcacaaaccaggctcgccatgaagccaggattcagtccccgtgggggtggctttggcggccgagggggctttggtgaccgtggtggtcgtggaggccgagggggctttggcgggggccgaggtcgaggcggaggctttagaggtcgtggacgaggaggaggtggaggcggcggcggcggtggaggaggaggaagaggtggtggaggcttccattctggtggcaaccggggtcgtggtcggggaggaaaaagaggaaaccagtcggggaagaatgtgatggtggagccgcatcggcatgagggtgtcttcatttgtcgaggaaaggaagatgcactggtcaccaagaacctggtccctggggaatcagtttatggagagaagagagtctcgatttcggaaggagatgacaaaattgagtaccgagcctggaaccccttccgctccaagctagcagcagcaatcctgggtggtgtggaccagatccacatcaaaccgggggctaaggttctctacctcggggctgcctcgggcaccacggtctcccatgtctctgacatcgttggtccggatggtctagtctatgcagtcgagttctcccaccgctctggccgtgacctcattaacttggccaagaagaggaccaacatcattcctgtgatcgaggatgctcgacacccacacaaataccgcatgctcatcgcaatggtggatgtgatctttgctgatgtggcccagccagaccagacccggattgtggccctgaatgcccacaccttcctgcgtaatggaggacactttgtgatttccattaaggccaactgcattgactccacagcctcagccgaggccgtgtttgcctccgaagtgaaaaagatgcaacaggagaacatgaagccgcaggagcagttgacccttgagccatatgaaagagaccatgccgtggtcgtgggagtgtacaggccaccccccaaggtgaagaactgaagttcagcgctgtcaggattgcgagagatgtgtgttgatactgttgcacgtgtgtttttctattaaaagactcatccgtcaaaaaaaaaaaaaaaaaaaaaaanggggtatnnngggggggaaaagngtaaaagggagggtaagttttgacccatttgtaaggggaaagggggccaaagagt

SEQ ID NO: 364479 - DNA, 1518 bp, Homo sapiens
  misc_feature (1191)..(1191): n is a, c, g, or t
  misc_feature (1204)..(1204): n is a, c, g, or t
  misc_feature (1210)..(1210): n is a, c, g, or t
tgctagtgaggctggtgttaatcggccgaggacgcagcgcacgtcgccgcgcgcctgcgctcttttccacgtgcgaaagccccggactcgtggagttgtgaacgccgcggactccggagccgcacaaaccaggctcgccatgaagccaggattcagtccccgtgggggtggctttggcggccgagggggctttggtgaccgtggtggtcgtggaggccgagggggctttggcgggggccgaggtcgaggcggaggctttagaggtcgtggacgaggaggaggtggaggcggcggcggcggtggaggaggaggaagaggtggtggaggcttccattctggtggcaaccggggtcgtggtcggggaggaaaaagaggaaaccagtcggggaagaatgtgatggtggagccgcatcggcatgagggtgtcttcatttgtcgaggaaaggaagatgcactggtcaccaagaacctggtccctggggaatcagtttatggagagaagagagtctcgatttcggaaggagatgacaaaattgagtaccgagcctggaaccccttccgctccaagctagcagcagcaatcctgggtggtgtggaccagatccacatcaaaccgggggctaaggttctctacctcggggctgcctcgggcaccacggtctcccatgtctctgacatcgttggtccggatggtctagtctatgcagtcgagttctcccaccgctctggccgtgacctcattaacttggccaagaagaggaccaacatcattcctgtgatcgaggatgctcgacacccacacaaataccgcatgctcatcgcaatggtggatgtgatctttgctgatgtggcccagccagaccagacccggattgtggccctgaatgcccacaccttcctgcgtaatggaggacactttgtgatttccattaaggccaactgcattgactccacagcctcagccgaggccgtgtttgcctccgaagtgaaaaagatgcaacaggagaacatgaagccgcaggagcagttgacccttgagccatatgaaagagaccatgccgtggtcgtgggagtgtacaggccaccccccaaggtgaagaactgaagttcagcgctgtcaggattgcgagagatgtgtgttgatactgttgcacgtgtgtttttctattaaaagactcatccgtcaaaacngaacaacacgaanaacaanaaaaaacaacacgcccgcagaacacctgcacagggcgcacagacaaagagggacacaacaagggagggagcaggggcacagcagtagtattgccacccagcacacacctctttcgtggagcccgaaggagggtccaacacggcgcgggcccccccaagatgaagagaacgacatacagataacagcacaacgcggcggaaccccgcgctatgacgagcagtcgcacagacacgcagcatagacagagagggagacgatgcagcgcggagggggcaacgaacacgagcacaagaaggaacagagaaaat

SEQ ID NO: 364480 - DNA, 1412 bp, Homo sapiens
  misc_feature (1412)..(1412): n is a, c, g, or t
tgctagtgaggctggtgttaatcggccgaggacgcagcgcacgtcgccgcgcgcctgcgctcttttccacgtgcgaaagccccggactcgtggagttgtgaacgccgcggactccggagccgcacaaaccaggctcgccatgaagccaggattcagtccccgtgggggtggctttggcggccgagggggctttggtgaccgtggtggtcgtggaggccgagggggctttggcgggggccgaggtcgaggcggaggctttagaggtcgtggacgaggaggaggtggaggcggcggcggcggtggaggaggaggaagaggtggtggaggcttccattctggtggcaaccggggtcgtggtcggggaggaaaaagaggaaaccagtcggggaagaatgtgatggtggagccgcatcggcatgagggtgtcttcatttgtcgaggaaaggaagatgcactggtcaccaagaacctggtccctggggaatcagtttatggagagaagagagtctcgatttcggaaggagatgacaaaattgagtaccgagcctggaaccccttccgctccaagctagcagcagcaatcctgggtggtgtggaccagatccacatcaaaccgggggctaaggttctctacctcggggctgcctcgggcaccacggtctcccatgtctctgacatcgttggtccggatggtctagtctatgcagtcgagttctcccaccgctctggccgtgacctcattaacttggccaagaagaggaccaacatcattcctgtgatcgaggatgctcgacacccacacaaataccgcatgctcatcgcaatggtggatgtgatctttgctgatgtggcccagccagaccagacccggattgtggccctgaatgcccacaccttcctgcgtaatggaggacactttgtgatttccattaaggccaactgcattgactccacagcctcagccgaggccgtgtttgcctccgaagtgaaaaagatgcaacaggagaacatgaagccgcaggagcagttgacccttgagccatatgaaagagaccatgccgtggtcgtgggagtgtacaggccaccccccaaggtgaagaactgaagttcagcgctgtcaggattgcgagagatgtgtgttgatactgttgcacgtgtgtttttctattaaaagactcatccgtcaaaaaaaaaaaagagaaaaagaagaaaaaaaaaaagggggggaataaaaggcgggggggggaaaaaggggtgtcagtataatgtcgccacgttggctcaaaacgtggtttcttggacccgaatgtctctgtgtcccgagggtcgacacatatgcagggatccccattgagggaggccgtattaagtgcggaatacccgggtacccccggttatacctccgaaacaan

SEQ ID NO: 364481 - DNA, 1170 bp, Homo sapiens
tgctagtgaggctggtgttaatcggccgaggacgcagcgcacgtcgccgcgcgcctgcgctcttttccacgtgcgaaagccccggactcgtggagttgtgaacgccgcggactccggagccgcacaaaccaggctcgccatgaagccaggattcagtccccgtgggggtggctttggcggccgagggggctttggtgaccgtggtggtcgtggaggccgagggggctttggcgggggccgaggtcgaggcggaggctttagaggtcgtggacgaggaggaggtggaggcggcggcggcggtggaggaggaggaagaggtggtggaggcttccattctggtggcaaccggggtcgtggtcggggaggaaaaagaggaaaccagtcggggaagaatgtgatggtggagccgcatcggcatgagggtgtcttcatttgtcgaggaaaggaagatgcactggtcaccaagaacctggtccctggggaatcagtttatggagagaagagagtctcgatttcggaaggagatgacaaaattgagtaccgagcctggaaccccttccgctccaagctagcagcagcaatcctgggtggtgtggaccagatccacatcaaaccgggggctaaggttctctacctcggggctgcctcgggcaccacggtctcccatgtctctgacatcgttggtccggatggtctagtctatgcagtcgagttctcccaccgctctggccgtgacctcattaacttggccaagaagaggaccaacatcattcctgtgatcgaggatgctcgacacccacacaaataccgcatgctcatcgcaatggtggatgtgatctttgctgatgtggcccagccagaccagacccggattgtggccctgaatgcccacaccttcctgcgtaatggaggacactttgtgatttccattaaggccaactgcattgactccacagcctcagccgaggccgtgtttgcctccgaagtgaaaaagatgcaacaggagaacatgaagccgcaggagcagttgacccttgagccatatgaaagagaccatgccgtggtcgtgggagtgtacaggccaccccccaaggtgaagaactgaagttcagcgctgtcaggattgcgagagatgtgtgttgataccatggtaccttcgttgccggatcc

SEQ ID NO: 364482 - DNA, 1117 bp, Homo sapiens
tgctagtgaggctggtgttaatcggccgaggacgcagcgcacgtcgccgcgcgcctgcgctcttttccacgtgcgaaagccccggactcgtggagttgtgaacgccgcggactccggagccgcacaaaccaggctcgccatgaagccaggattcagtccccgtgggggtggctttggcggccgagggggctttggtgaccgtggtggtcgtggaggccgagggggctttggcgggggccgaggtcgaggcggaggcttccattctggtggcaaccggggtcgtggtcggggaggaaaaagaggaaaccagtcggggaagaatgtgatggtggagccgcatcggcatgagggtgtcttcatttgtcgaggaaaggaagatgcactggtcaccaagaacctggtccctggggaatcagtttatggagagaagagagtctcgatttcggaaggagatgacaaaattgagtaccgagcctggaaccccttccgctccaagctagcagcagcaatcctgggtggtgtggaccagatccacatcaaaccgggggctaaggttctctacctcggggctgcctcgggcaccacggtctcccatgtctctgacatcgttggtccggatggtctagtctatgcagtcgagttctcccaccgctctggccgtgacctcattaacttggccaagaagaggaccaacatcattcctgtgatcgaggatgctcgacacccacacaaataccgcatgctcatcgcaatggtggatgtgatctttgctgatgtggcccagccagaccagacccggattgtggccctgaatgcccacaccttcctgcgtaatggaggacactttgtgatttccattaaggccaactgcattgactccacagcctcagccgaggccgtgtttgcctccgaagtgaaaaagatgcaacaggagaacatgaagccgcaggagcagttgacccttgagccatatgaaagagaccatgccgtggtcgtgggagtgtacaggccaccccccaaggtgaagaactgaagttcagcgctgtcaggattgcgagagatgtgtgttgatactgttgcacgtgtgtttttctattaaaagactcatccgtcaaaa

SEQ ID NO: 364483 - DNA, 1153 bp, Homo sapiens
tgctagtgaggctggtgttaatcggccgaggacgcagcgcacgtcgccgcgcgcctgcgctcttttccacgtgcgaaagccccggactcgtggagttgtgaacgccgcggactccggagccgcacaaaccaggctcgccatgaagccaggattcagtccccgtgggggtggctttggcggccgagggggctttggtgaccgtggtggtcgtggaggccgagggggctttggcgggggccgaggtcgaggcggaggctttagaggtcgtggacgaggaggaggtggaggaggcttccattctggtggcaaccggggtcgtggtcggggaggaaaaagaggaaaccagtcggggaagaatgtgatggtggagccgcatcggcatgagggtgtcttcatttgtcgaggaaaggaagatgcactggtcaccaagaacctggtccctggggaatcagtttatggagagaagagagtctcgatttcggaaggagatgacaaaattgagtaccgagcctggaaccccttccgctccaagctagcagcagcaatcctgggtggtgtggaccagatccacatcaaaccgggggctaaggttctctacctcggggctgcctcgggcaccacggtctcccatgtctctgacatcgttggtccggatggtctagtctatgcagtcgagttctcccaccgctctggccgtgacctcattaacttggccaagaagaggaccaacatcattcctgtgatcgaggatgctcgacacccacacaaataccgcatgctcatcgcaatggtggatgtgatctttgctgatgtggcccagccagaccagacccggattgtggccctgaatgcccacaccttcctgcgtaatggaggacactttgtgatttccattaaggccaactgcattgactccacagcctcagccgaggccgtgtttgcctccgaagtgaaaaagatgcaacaggagaacatgaagccgcaggagcagttgacccttgagccatatgaaagagaccatgccgtggtcgtgggagtgtacaggccaccccccaaggtgaagaactgaagttcagcgctgtcaggattgcgagagatgtgtgttgatactgttgcacgtgtgtttttctattaaaagactcatccgtcaaaa

SEQ ID NO: 364484 - DNA, 1081 bp, Homo sapiens
tgctagtgaggctggtgttaatcggccgaggacgcagcgcacgtcgccgcgcgcctgcgctcttttccacgtgcgaaagccccggactcgtggagttgtgaacgccgcggactccggagccgcacaaaccaggctcgccatgaagccaggattcagtccccgtgggggtggctttggcggccgagggggctttggtgaccgtggtggtcgtggaggaggcttccattctggtggcaaccggggtcgtggtcggggaggaaaaagaggaaaccagtcggggaagaatgtgatggtggagccgcatcggcatgagggtgtcttcatttgtcgaggaaaggaagatgcactggtcaccaagaacctggtccctggggaatcagtttatggagagaagagagtctcgatttcggaaggagatgacaaaattgagtaccgagcctggaaccccttccgctccaagctagcagcagcaatcctgggtggtgtggaccagatccacatcaaaccgggggctaaggttctctacctcggggctgcctcgggcaccacggtctcccatgtctctgacatcgttggtccggatggtctagtctatgcagtcgagttctcccaccgctctggccgtgacctcattaacttggccaagaagaggaccaacatcattcctgtgatcgaggatgctcgacacccacacaaataccgcatgctcatcgcaatggtggatgtgatctttgctgatgtggcccagccagaccagacccggattgtggccctgaatgcccacaccttcctgcgtaatggaggacactttgtgatttccattaaggccaactgcattgactccacagcctcagccgaggccgtgtttgcctccgaagtgaaaaagatgcaacaggagaacatgaagccgcaggagcagttgacccttgagccatatgaaagagaccatgccgtggtcgtgggagtgtacaggccaccccccaaggtgaagaactgaagttcagcgctgtcaggattgcgagagatgtgtgttgatactgttgcacgtgtgtttttctattaaaagactcatccgtcaaaa

SEQ ID NO: 364485 - DNA, 1006 bp, Homo sapiens
tgctagtgaggctggtgttaatcggccgaggacgcagcgcacgtcgccgcgcgcctgcgctcttttccacgtgcgaaagccccggactcgtggagttgtgaacgccgcggactccggagccgcacaaaccaggctcgccatgaagccaggattcagtccccgtgggggtcgtggtcggggaggaaaaagaggaaaccagtcggggaagaatgtgatggtggagccgcatcggcatgagggtgtcttcatttgtcgaggaaaggaagatgcactggtcaccaagaacctggtccctggggaatcagtttatggagagaagagagtctcgatttcggaaggagatgacaaaattgagtaccgagcctggaaccccttccgctccaagctagcagcagcaatcctgggtggtgtggaccagatccacatcaaaccgggggctaaggttctctacctcggggctgcctcgggcaccacggtctcccatgtctctgacatcgttggtccggatggtctagtctatgcagtcgagttctcccaccgctctggccgtgacctcattaacttggccaagaagaggaccaacatcattcctgtgatcgaggatgctcgacacccacacaaataccgcatgctcatcgcaatggtggatgtgatctttgctgatgtggcccagccagaccagacccggattgtggccctgaatgcccacaccttcctgcgtaatggaggacactttgtgatttccattaaggccaactgcattgactccacagcctcagccgaggccgtgtttgcctccgaagtgaaaaagatgcaacaggagaacatgaagccgcaggagcagttgacccttgagccatatgaaagagaccatgccgtggtcgtgggagtgtacaggccaccccccaaggtgaagaactgaagttcagcgctgtcaggattgcgagagatgtgtgttgatactgttgcacgtgtgtttttctattaaaagactcatccgtcaaaa

SEQ ID NO: 364486 - DNA, 1138 bp, Homo sapiens
tgctagtgaggctggtgttaatcggccgaggacgcagcgcacgtcgccgcgcgcctgcgctcttttccacgtgcgaaagccccggactcgtggagttgtgaacgccgcggactccggagccgcacaaaccaggctcgccatgaagccaggattcagtccccgtgggggtggctttggcggccgagggggctttggtgaccgtggtggtcgtggaggccgagggggctttggcgggggccgaggtcgaggcggaggctttagaggtcgtggacgaggaggaggtggaggcggcggcggcggtggaggaggaggaagaggtggtggaggcttccattctggtggcaaccggggtcgtggtcggggaggaaaaagaggaaaccagtcggggaagaatgtgatggtggagccgcatcggcatgagggtgtcttcatttgtcgaggaaaggaagatgcactggtcaccaagaacctggtccctggggaatcagtttatggagagaagagagtctcgatttcggaaggagatgacaaaattgagtaccgagcctggaaccccttccgctccaagctagcagcagcaatcctgggtggtgtggaccagatccacatcaaaccgggggctaaggttctctacctcggggctgcctcgggcaccacggtctcccatgtctctgacatcgttggtccggatggtctagtctatgcagtcgagttctcccaccgctctggccgtgacctcattaacttggccaagaagaggaccaacatcattcctgtgatcgaggatgctcgacacccacacaaataccgcatgctcatcgcaatggtggatgtgatctttgctgatgtggcccagccagaccagacccggattgtggccctgaatgcccacaccttcctgcgtaatggaggacactttgtgatttccattaaggccaactgcattgactccacagcctcagccgaggccgtgtttgcctccgaagtgaaaaagataagagaccatgccgtggtcgtgggagtgtacaggccaccccccaaggtgaagaactgaagttcagcgctgtcaggattgcgagagatgtgtgttgatactgttgcacgtgtgtttttctattaaaagactcatccgtcaaaa

SEQ ID NO: 364487 - DNA, 1125 bp, Homo sapiens
tgctagtgaggctggtgttaatcggccgaggacgcagcgcacgtcgccgcgcgcctgcgctcttttccacgtgcgaaagccccggactcgtggagttgtgaacgccgcggactccggagccgcacaaaccaggctcgccatgaagccaggattcagtccccgtgggggtggctttggcggccgagggggctttggtgaccgtggtggtcgtggaggccgagggggctttggcgggggccgaggtcgaggcggaggctttagaggtcgtggacgaggaggaggtggaggcggcggcggcggtggaggaggaggaagaggtggtggaagaatgtgatggtggagccgcatcggcatgagggtgtcttcatttgtcgaggaaaggaagatgcactggtcaccaagaacctggtccctggggaatcagtttatggagagaagagagtctcgatttcggaaggagatgacaaaattgagtaccgagcctggaaccccttccgctccaagctagcagcagcaatcctgggtggtgtggaccagatccacatcaaaccgggggctaaggttctctacctcggggctgcctcgggcaccacggtctcccatgtctctgacatcgttggtccggatggtctagtctatgcagtcgagttctcccaccgctctggccgtgacctcattaacttggccaagaagaggaccaacatcattcctgtgatcgaggatgctcgacacccacacaaataccgcatgctcatcgcaatggtggatgtgatctttgctgatgtggcccagccagaccagacccggattgtggccctgaatgcccacaccttcctgcgtaatggaggacactttgtgatttccattaaggccaactgcattgactccacagcctcagccgaggccgtgtttgcctccgaagtgaaaaagatgcaacaggagaacatgaagccgcaggagcagttgacccttgagccatatgaaagagaccatgccgtggtcgtgggagtgtacaggccaccccccaaggtgaagaactgaagttcagcgctgtcaggattgcgagagatgtgtgttgatactgttgcacgtgtgtttttctattaaaagactcatccgtcaaaa

SEQ ID NO: 364488 - DNA, 1128 bp, Homo sapiens
tgctagtgaggctggtgttaatcggccgaggacgcagcgcacgtcgccgcgcgcctgcgctcttttccacgtgcgaaagccccggactcgtggagttgtgaacgccgcggactccggagccgcacaaaccaggctcgccatgaagccaggattcagtccccgtgggggtggctttggcggccgagggggctttggtgaccgtggtggtcgtggaggccgagggggctttggcgggggccgaggtcgaggcggaggctttagaggtcgtggacgaggaggaggtggaggcggcggcggcggtggaggaggaggaagaggtggtggaggcttccattctggtggcaaccggggtcgtggtcggggaggaaaaagaggaaaccagtcggggaagaatgtgatggtggagccgcatcggcatgagggtgtcttcatttgtcgaggaaaggaagatgcactggtcaccaagaacctggtccctggggaatcagtttatggagagaagagagtctcgatttcggaaggagatgacaaaattgagtaccgagcctggaaccccttccgctccaagctagcagcagcaatcctgggtggtgtggaccagatccacatcaaaccgggggctaaggttctctacctcggggctgcctcgggcaccacggtctcccatgtctctgacatcgttggtccggatggtctagtctatgcagtcgagttctcccaccgctctggccgtgacctcattaacttggccaagaagaggaccaacatcattcctgtgatcgaggatgctcgacacccacacaaataccgcatgctcatcgcaatggtggatgtgatctttgctgatgtggcccagccagaccagacccggattgtggccctgaatgcccacaccttcctgcgtaatggaggacactttgtgatttccattaagggcaacaggagaacatgaagccgcaggagcagttgacccttgagccatatgaaagagaccatgccgtggtcgtgggagtgtacaggccaccccccaaggtgaagaactgaagttcagcgctgtcaggattgcgagagatgtgtgttgatactgttgcacgtgtgtttttctattaaaagactcatccgtcaaaa

SEQ ID NO: 364489 - DNA, 1186 bp, Homo sapiens
tgctagtgaggctggtgttaatcggccgaggacgcagcgcacgtcgccgcgcgcctgcgctcttttccacgtgcgaaagccccggactcgtggagttgtgaacgccgcggactccggagccgcacaaaccaggctcgccatgaagccaggattcagtccccgtgggggtggctttggcggccgagggggctttggtgaccgtggtggtcgtggaggccgagggggctttggcgggggccgaggtcgaggcggaggctttagaggtcgtggacgaggaggaggtggaggcggcggcggcggtggaggaggaggaagaggtggtggaggcttccattctggtggcaaccggggtcgtggtcggggaggaaaaagaggaaaccagtcggggaagaatgtgatggtggagccgcatcggcatgagggtgtcttcatttgtcgaggaaaggaagatgcactggtcaccaagaacctggtccctggggaatcagtttatggagagaagagagtctcgatttcggaaggagatgacaaaattgagtaccgagcctggaaccccttccgctccaagctagcagcagcaatcctgggtggtgtggaccagatccacatcaaaccgggggctaaggttctctacctcggggctgcctcgggcaccacggtctcccatgtctctgacatcgttggtccggatggtctagtctatgcagtcgagttctcccaccgctctggccgtgacctcattaacttggccaagaagaggaccaacatcattcctgtgatcgaggatgctcgacacccacacaaataccgcatgctcatcgcaatggtggatgtgatctttgctgatgtggcccagccagaccagacccggattgtggccctgaatgcccacaccttcctgcgtaatgggggcacttgtggtttccattaagccaactgcattgactccacagcctcagccgaggccgtgtttgcctccgaagtgaaaaagatgcaacaggagaacatgaagccgcaggagcagttgacccttgagccatatgaaagagaccatgccgtggtcgtgggagtgtacaggccaccccccaaggtgaagaactgaagttcagcgctgtcaggattgcgagagatgtgtgttgatactgttgcacgtgtgtttttctattaaaagactcatccgtcaaaa

SEQ ID NO: 364490 - DNA, 1152 bp, Homo sapiens
gcgggggccggtgcaaaccttacggctaggtacgaggctgggtggccccggactcgtggagttgtgaacgccgcggactccggagccgcacaaaccaggctcgccatgaagccaggattcagtccccgtgggggtggctttggcggccgagggggctttggtgaccgtggtggtcgtggaggccgagggggctttggcgggggccgaggtcgaggcggaggctttagaggtcgtggacgaggaggaggtggaggcggcggcggcggtggaggaggaggaagaggtggtggaggcttccattctggtggcaaccggggtcgtggtcggggaggaaaaagaggaaaccagtcggggaagaatgtgatggtggagccgcatcggcatgagggtgtcttcatttgtcgaggaaaggaagatgcactggtcaccaagaacctggtccctggggaatcagtttatggagagaagagagtctcgatttcggaaggagatgacaaaattgagtaccgagcctggaaccccttccgctccaagctagcagcagcaatcctgggtggtgtggaccagatccacatcaaaccgggggctaaggttctctacctcggggctgcctcgggcaccacggtctcccatgtctctgacatcgttggtccggatggtctagtctatgcagtcgagttctcccaccgctctggccgtgacctcattaacttggccaagaagaggaccaacatcattcctgtgatcgaggatgctcgacacccacacaaataccgcatgctcatcgcaatggtggatgtgatctttgctgatgtggcccagccagaccagacccggattgtggccctgaatgcccacaccttcctgcgtaatgggggcacttgtggtttccattaagccaactgcattgactccacagcctcagccgaggccgtgtttgcctccgaagtgaaaaagatgcaacaggagaacatgaagccgcaggagcagttgacccttgagccatatgaaagagaccatgccgtggtcgtgggagtgtacaggccaccccccaaggtgaagaactgaagttcagcgctgtcaggattgcgagagatgtgtgttgatactgttgcacgtgtgtttttctattaaaagactcatccgtcaaaa

SEQ ID NO: 364491 - DNA, 931 bp, Homo sapiens
tgctagtgaggctggtgttaatcggccgaggacgcagcgcacgtcgccgcgcgcctgcgctcttttccacgtgcgaaagccccggactcgtggagttgtgaacgccgcggactccggagccgcacaaaccaggctcgccatgaagccaggattcagtccccgtgggggtggctttggcggccgagggggctttggtgaccgtggtggtcgtggaggccgagggggctttggcgggggccgaggtcgaggcggaggctttagaggtcgtggacgaggaggaggtggaggcggcggcggcggtggaggaggaggaagaggtggtggaggcttccattctggtggcaaccggggtcgtggtcggggaggaaaaagaggaaaccagtcggggaagaatgtgatggtggagccgcatcggcatgagggtgtcttcatttgtcgaggaaaggaagatgcactggtcaccaagaacctggtccctggggaatcagtttatggagagaagagagtctcgatttcggaaggagatgacaaaattgagtaccgagcctggaaccccttccgctccaagctagcagcagcaatcctgggtggtgtggaccagatccacatcaaaccgggggctaaggttctctacctcggggctgcctcgggcaccacggtctcccatgtctctgacatcgttggtccggatggtctagtctatgcagtcgagttctcccaccgctctggccgtgacctcattaacttggccaagaagaggaccaacatcattcctgtgatcgaggatgctcgacacccacacaaataccgcatgctcatcgcaatggtggatgtgatctttgctgatgtggcccagccagacccgaagccacagtagcagtgccagctcagcagcaggaattctcgcgggagcagcaggaattctcgcggg

SEQ ID NO: 364492 - DNA, 862 bp, Homo sapiens
  misc_feature (810)..(810): n is a, c, g, or t
tgctagtgaggctggtgttaatcggccgaggacgcagcgcacgtcgccgcgcgcctgcgctcttttccacgtgcgaaagccccggactcgtggagttgtgaacgccgcggactccggagccgcacaaaccaggctcgccatgaagccaggattcagtccccgtgggggtggctttggcggccgagggggctttggtgaccgtggtggtcgtggaggccgagggggctttggcgggggccgaggtcgaggcggaggctttagaggtcgtggacgaggaggaggtggaggcggcggcggcggtggaggaggaggaagaggtggtggaggcttccattctggtggcaaccggggtcgtggtcggggaggaaaaagaggaaaccagtcggggaagaatgtgatggtggagccgcatcggcatgagggtgtcttcatttgtcgaggaaaggaagatgcactggtcaccaagaacctggtccctggggaatcagtttatggagagaagagagtctcgatttcggaaggagatgacaaaattgagtaccgagcctggaaccccttccgctccaagctagcagcagcaatcctgggtggtgtggaccagatccacatcaaaccgggggctaaggttctctacctcggggctgcctcgggcaccacggtctcccatgtctctgacatcgttggtccggatggtctagtctatgcagtcgagttctcccaccgctctggccgtgacctcattaacttggccaagaagaggaccaacatcattcctgtgatcgaggatgtcgaaccaaaatacggtggtcncgctggggtgtgactttgcgttggccgcgaccgaccggttttggtctatgcc

SEQ ID NO: 364493 - DNA, 802 bp, Homo sapiens
tgctagtgaggctggtgttaatcggccgaggacgcagcgcacgtcgccgcgcgcctgcgctcttttccacgtgcgaaagccccggactcgtggagttgtgaacgccgcggactccggagccgcacaaaccaggctcgccatgaagccaggattcagtccccgtgggggtggctttggcggccgaggggaggctttagaggtcgtggacgaggaggaggtggaggcggcggcggcggtggaggaggaggaagaggtggtggaggcttccattctggtggcaaccggggtcgtggtcggggaggaaaaagaggaaaccagtcgggagttctcccaccgctctggccgtgacctcattaacttggccaagaagaggaccaacatcattcctgtgatcgaggatgctcgacacccacacaaataccgcatgctcatcgcaatggtggatgtgatctttgctgatgtggcccagccagaccagacccggattgtggccctgaatgcccacaccttcctgcgtaatggaggacactttgtgatttccattaaggccaactgcattgactccacagcctcagccgaggccgtgtttgcctccgaagtgaaaaagatgcaacaggagaacatgaagccgcaggagcagttgacccttgagccatatgaaagagaccatgccgtggtcgtgggagtgtacaggccaccccccaaggtgaagaactgaagttcagcgctgtcaggattgcgagagatgtgtgttgatactgttgcacgtgtgtttttctattaaaagactcatccgtcaaaa

SEQ ID NO: 364494 - DNA, 1215 bp, Homo sapiens
  misc_feature (970)..(970): n is a, c, g, or t
  misc_feature (977)..(977): n is a, c, g, or t
  misc_feature (986)..(986): n is a, c, g, or t
  misc_feature (990)..(990): n is a, c, g, or t
  misc_feature (996)..(996): n is a, c, g, or t
tgctagtgaggctggtgttaatcggccgaggacgcagcgcacgtcgccgcgcgcctgcgctcttttccacgtgcgaaagccccggactcgtggagttgtgaacgccgcggactccggagccgcacaaaccaggctcgccatgaagccaggattcagtccccgtgggggtggctttggcggccgagggggctttggtgaccgtggtggtcgtggaggccgagggggctttggcgggggccgaggtcgaggcggaggctttagaggtcgtggacgaggaggaggtggaggaggcttccattctggtggcaaccggggtcgtggtcggggaggaaaaagaggaaaccagtcggggaagaatgtgatggtggagccgcatcggcatgagggtgtcttcatttgtcgaggaaaggaagatgcactggtcaccaagaacctggtccctggggaatcagtttatggagagaagagagtctcgatttcggaaggagatgacaaaattgagtaccgagcctggaaccccttccgctccaagctagcagcagcaatcctgggtggtgtggaccagatccacatcaaaccgggggctaaggttctctacctcggggctgcctcgggcaccacggtctcccatgtctctgacatcgttggtccggatggtctagtctatgcagtcgagttctcccaccgctctggccgtgacctcattaacttggccaagaagaggaccaacatcattcctgtgatcgaggatgctcgacacccacacaaataccgcatgctcatcgcaatggtggatgtgatctttgctgatgtggcccagccagaccagacccggattgtggccctgaatgcccacaccttcctgcgtaatggaggacactttgtgatttccattaaggccaactgcattgactccacagcctcagccgaggccgtgtttgcctccgaagtgaaaaagatgcaccagganaaatgangcccaggancagngacctngagcatatgaagagaccaggcgggacgtggaatggacaggacacccccagggggaacgactgacgccacggcagccagattggcacacaagtgttgtcagacccgggagccaggggttccacaacagagagcaccgggcaaacacaatgagcgaaaccaacacacacacgcaacacaacgacaaagaaaagggcgcgacacaaccgacacaacagcgcc

SEQ ID NO: 364495 - DNA, 951 bp, Homo sapiens
  misc_feature (586)..(586): n is a, c, g, or t
  misc_feature (615)..(615): n is a, c, g, or t
  misc_feature (631)..(631): n is a, c, g, or t
  misc_feature (650)..(650): n is a, c, g, or t
  misc_feature (658)..(658): n is a, c, g, or t
  misc_feature (673)..(673): n is a, c, g, or t
  misc_feature (679)..(679): n is a, c, g, or t
  misc_feature (683)..(683): n is a, c, g, or t
  misc_feature (700)..(700): n is a, c, g, or t
  misc_feature (716)..(716): n is a, c, g, or t
  misc_feature (729)..(729): n is a, c, g, or t
  misc_feature (740)..(740): n is a, c, g, or t
  misc_feature (750)..(750): n is a, c, g, or t
  misc_feature (762)..(762): n is a, c, g, or t
  misc_feature (778)..(778): n is a, c, g, or t
  misc_feature (791)..(791): n is a, c, g, or t
  misc_feature (802)..(802): n is a, c, g, or t
  misc_feature (823)..(823): n is a, c, g, or t
  misc_feature (843)..(843): n is a, c, g, or t
  misc_feature (860)..(860): n is a, c, g, or t
  misc_feature (863)..(863): n is a, c, g, or t
  misc_feature (947)..(947): n is a, c, g, or t
tgctagtgaggctggtgttaatcggccgaggacgcagcgcacgtcgccgcgcgcctgcgctcttttccacgtgcgaaagccccggactcgtggagttgtgaacgccgcggactccggagccgcacaaaccaggctcgccatgaagccaggattcagtccccgtgggggtggctttggcggccgagggggctttggtgaccgtggtggtcgtggaggccgagggggctttggcgggggccgaggtcgaggcggaggctttagaggtcgtggacgaggaggaggtggaggcggcggcggcggtggaggaggaggaagaggtggtggaggcttccattctggtggcaaccggggtcgtggtcggggaggaaaaagaggaaaccagtcggggaagaatgtgatggtggagccgcatcggcatgagggtgtcttcatttgtcgaggaaaggaagatgcactggtcaccaagaacctggtccctggggaatcagtttatggagagaagagagtctcgatttcggaaggagatgacaaaattgagtaccgagcctggaaccccttccgctccaagctagcagcagcaatcctnggtgttggtgttggacacaagatcccacnattcaaaacgctgggnggctaaatggtttcttctnaaccttcngggtgcttgccttcnggtgcnaccnacagtgtctcccccatngtcttctttgacatcngtttgtgtcccgngattggttctnaagtcttatngcgaagtctgangtttctcccccacacngcttcttgtgccngttgaccctcnatttaaacttttgtgccaaanaaagaaggacccaaccatcnatttcccttgttgatcnganggattgctctgaccaccccacacaaaattaccggcattgctccatccgcaaattgtgtgggattgttgatctttttgcttgatngttg

SEQ ID NO: 364496 - DNA, 968 bp, Homo sapiens
atcgcaatggcattcctaatgcttaccgaacggaaaaattggaggctttagaggtcgtggacgaggaggaggtggaggcggcggcggcggtggaggaggaggaagaggtggtggaggcttccattctggtggcaaccggggtcgtggtcggggaggaaaaagaggaaaccagtcggggaagaatgtgatggtggagccgcatcggcatgagggtgtcttcatttgtcgaggaaaggaagatgcactggtcaccaagaacctggtccctggggaatcagtttatggagagaagagagtctcgatttcggaaggagatgacaaaattgagtaccgagcctggaaccccttccgctccaagctagcagcagcaatcctgggtggtgtggaccagatccacatcaaaccgggggctaaggttctctacctcggggctgcctcgggcaccacggtctcccatgtctctgacatcgttggtccggatggtctagtctatgcagtcgagttctcccaccgctctggccgtgacctcattaacttggccaagaagaggaccaacatcattcctgtgatcgaggatgctcgacacccacacaaataccgcatgctcatcgcaatggtggatgtgatctttgctgatgtggcccagccagaccagacccggattgtggccctgaatgcccacaccttcctgcgtaatggaggacactttgtgatttccattaaggccaactgcattgactccacagcctcagccgaggccgtgtttgcctccgaagtgaaaaagatgcacgggaacatgaacgcaggaagcagtgaggttgaagcctttgaagaaccatgcgggtcgtggaggtttaggcaccccccggtgagaacgatcacgccctcggatggaaaagtgtgactggccgttgtttttaaagctccgttaaaaaaaaaaccggctttggggaaaaagagggttttcc

SEQ ID NO: 364497 - DNA, 1189 bp, Homo sapiens
tgctagtgaggctggtgttaatcggccgaggacgcagcgcacgtcgccgcgcgcctgcgctcttttccacgtgcgaaagccccggactcgtggagttgtgaacgccgcggactccggagccgcacaaaccaggctcgccatgaagccaggattcagtccccgtgggggtggctttggcggccgagggggctttggtgaccgtggtggtcgtggaggccgagggggctttggcgggggccgaggtcgaggcggaggctttagaggtcgtggacgaggaggaggtggaggcggcggcggcggtggaggaggaggaagaggtggtggaggcttccattctggtggcaaccggggtcgtggtcggggaggaaaaagaggaaaccagtcggggaagaatgtgatggtggagccgcatcggcatgagggtgtcttcatttgtcgaggaaaggaagatgcactggtcaccaagaacctggtccctggggaatcagtttatggagagaagagagtctcgatttcggaaggagatgacaaaattgagtaccgagcctggaaccccttccgctccaagctagcagcagcaatcctgggtggtgtggaccagatccacatcaaaccgggggctaaggttctctacctcggggctgcctcgggcaccacggtctcccatgtctctgacatcgttggtccggatggtctagtctatgcagtcgagttctcccaccgctctggccgtgacctcattaacttggccaagaagaggaccaacatcattcctgtgatcgaggatgctcgacacccacacaaataccgcatgctcatcgcaatggtggatgtgatctttgctgatgtggcccagccagaccagacccggattgtggccctgaatgcccacaccttcctgcgtaatggaggacactttgtgatttccattaaggccaactgcattgactccacagcctcagccgaggccgtgtttgcctccgaagtgaaaaagatgcaacaggagaacatgaagccgcaggagcagttgacccttgagccatatgaaagagaccatgccgtggtcgtgggagtgtacaggccaccccccaaggtgaagaactgaagttcagcgctgtcaggattgcgagagatgtgtgttgatactgttgcacgtgtgtttttctattaaaagactcatccgtcaaaa

SEQ ID NO: 364498 - DNA, 1144 bp, Homo sapiens
acggctaggtcgggctggtgtgaatcggccgaggccccggactcgtggagttgtgaacgccgcggactccggagccgcacaaaccaggctcgccatgaagccaggattcagtccccgtgggggtggctttggcggccgagggggctttggtgaccgtggtggtcgtggaggccgagggggctttggcgggggccgaggtcgaggcggaggctttagaggtcgtggacgaggaggaggtggaggcggcggcggcggtggaggaggaggaagaggtggtggaggcttccattctggtggcaaccggggtcgtggtcggggaggaaaaagaggaaaccagtcggggaagaatgtgatggtggagccgcatcggcatgagggtgtcttcatttgtcgaggaaaggaagatgcactggtcaccaagaacctggtccctggggaatcagtttatggagagaagagagtctcgatttcggaaggagatgacaaaattgagtaccgagcctggaaccccttccgctccaagctagcagcagcaatcctgggtggtgtggaccagatccacatcaaaccgggggctaaggttctctacctcggggctgcctcgggcaccacggtctcccatgtctctgacatcgttggtccggatggtctagtctatgcagtcgagttctcccaccgctctggccgtgacctcattaacttggccaagaagaggaccaacatcattcctgtgatcgaggatgctcgacacccacacaaataccgcatgctcatcgcaatggtggatgtgatctttgctgatgtggcccagccagaccagacccggattgtggccctgaatgcccacaccttcctgcgtaatggaggacactttgtgatttccattaaggccaactgcattgactccacagcctcagccgaggccgtgtttgcctccgaagtgaaaaagatgcaacaggagaacatgaagccgcaggagcagttgacccttgagccatatgaaagagaccatgccgtggtcgtgggagtgtacaggccaccccccaaggtgaagaactgaagttcagcgctgtcaggattgcgagagatgtgtgttgatactgttgcacgtgtgtttttctattaaaagactcatccgtcaaaa

SEQ ID NO: 364499 - DNA, 1333 bp, Homo sapiens
tgctagtgaggctggtgttaatcggccgaggacgcagcgcacgtcgccgcgcgcctgcgctcttttccacgtgcgaaagccccggactcgtggagttgtgaacgccgcggactccggagccgcacaaaccaggctcgccatgaagccaggattcagtccccgtgggggtggctttggcggccgagggggctttggtgaccgtggtggtcgtggaggccgagggggctttggcgggggccgaggtcgaggcggaggctttagaggtcgtggacgaggaggaggtggaggcggcggcggcggtggaggaggaggaagaggtggtggaggcttccattctggtggcaaccggggtcgtggtcggggaggaaaaagaggaaaccagtcggggaagaatgtgatggtggagccgcatcggcatgagggtgtcttcatttgtcgaggaaaggaagatgcactggtcaccaagaacctggtccctggggaatcagtttatggagagaagagagtctcgatttcggaaggagatgacaaaattgagtaccgagcctggaaccccttccgctccaagctagcagcagcaatcctgggtggtgtggaccagatccacatcaaaccgggggctaaggttctctacctcggggctgcctcgggcaccacggtctcccatgtctctgacatcgttggtccggatggtctagtctatgcagtcgagttctcccaccgctctggccgtgacctcattaacttggccaagaagaggaccaacatcattcctgtgatcgaggatgctcgacacccacacaaataccgcatgctcatcgcaatggtggatgtgatctttgctgatgtggcccagccagaccagacccggattgtggccctgaatgcccacaccttcctgcgtaatggaggacactttgtgatttccattaaggccaactgcattgactccacagcctcagccgaggccgtgtttgcctccgaagtgaaaaagatgcaacaggagaacatgaagccgcaggagcagttgacccttgagccatatgaaagagaccatgccgtggtcgtgggagtgtacaggccaccccccaaggtgaagaactgaagttcagcgctgtcaggattgcgagagatgtgtgttgatactgttgcacgtgtgtttttctattaaaagactcatccgtcaaaatcccaaaaaacaacacaacacaccccgcgcggcgcctcactgatcgggggcgccgcgcaaacacgcggcccaccgggcccagggcgcagccggggttccgggacgccaccttctgcccccaccgggtgccactccgccgtcccc

SEQ ID NO: 364500 - DNA, 1292 bp, Homo sapiens
tgctagtgaggctggtgttaatcggccgaggacgcagcgcacgtcgccgcgcgcctgcgctcttttccacgtgcgaaagccccggactcgtggagttgtgaacgccgcggactccggagccgcacaaaccaggctcgccatgaagccaggattcagtccccgtgggggtggctttggcggccgagggggctttggtgaccgtggtggtcgtggaggccgagggggctttggcgggggccgaggtcgaggcggaggctttagaggtcgtggacgaggaggaggtggaggcggcggcggcggtggaggaggaggaagaggtggtggaggcttccattctggtggcaaccggggtcgtggtcggggaggaaaaagaggaaaccagtcggggaagaatgtgatggtggagccgcatcggcatgagggtgtcttcatttgtcgaggaaaggaagatgcactggtcaccaagaacctggtccctggggaatcagtttatggagagaagagagtctcgatttcggaaggagatgacaaaattgagtaccgagcctggaaccccttccgctccaagctagcagcagcaatcctgggtggtgtggaccagatccacatcaaaccgggggctaaggttctctacctcggggctgcctcgggcaccacggtctcccatgtctctgacatcgttggtccggatggtctagtctatgcagtcgagttctcccaccgctctggccgtgacctcattaacttggccaagaagaggaccaacatcattcctgtgatcgaggatgctcgacacccacacaaataccgcatgctcatcgcaatggtggatgtgatctttgctgatgtggcccagccagaccagacccggattgtggccctgaatgcccacaccttcctgcgtaatggaggacactttgtgatttccattaaggccaactgcattgactccacagcctcagccgaggccgtgtttgcctccgaagtgaaaaagatgcaacaggagaacatgaagccgcaggagcagttgacccttgagccatatgaaagagaccatgccgtggtcgtgggagtgtacaggtgagcaggggcccagcaatacaccaagacagacatctctgtcccttgcaccccgagtgccatgatcctggggaccctccttcatcacctatcttcctctcacaccaccccccaaggtgaagaactgaagttcagcgctgtcaggattgcgagagatgtgtgttgatactgttgcacgtgtgtttttctattaaaagactcatccgtcaaaa

SEQ ID NO: 364501 - DNA, 1037 bp, Homo sapiens
tgctagtgaggctggtgttaatcggccgaggacgcagcgcacgtcgccgcgcgcctgcgctcttttccacgtgcgaaagccccggactcgtggagttgtgaacgccgcggactccggagccgcacaaaccaggctcgccatgaagccaggattcagtccccgtgggggtggctttggcggccgagggggctttggtgaccgtggtggtcgtggaggccgagggggctttggcgggggccgaggtcgaggcggaggctttagaggtcgtggacgaggaggaggtggaggcggcggcggcggtggaggaggaggaagaggtggtggaggcttccattctggtggcaaccggggtcgtggtcggggaggaaaaagaggaaaccagtcggggaagaatgtgatggtggagccgcatcggcatgagggtgtcttcatttgtcgaggaaaggaagatgcactggtcaccaagaacctggtccctggggaatcagtttatggagagaagagagtctcgatttcggaaggagatgacaaaattgagtaccgagcctggaaccccttccgctccaagctagcagcagcaatcctgggtggtgtggaccagatccacatcaaaccgggggctaaggttctctacctcggggctgcctcgggcaccacggtctcccatgtctctgacatcgttggtccggatggtctagtctatgcagtcgagttctcccaccgctctggccgtgacctcattaacttggccaagaagaggacactttgtgatttccattaaggccaactgcattgactccacagcctcagccgaggccgtgtttgcctccgaagtgaaaaagatgcaacaggagaacatgaagccgcaggagcagttgacccttgagccatatgaaagagaccatgccgtggtcgtgggagtgtacaggccaccccccaaggtgaagaactgaagttcagcgctgtcaggattgcgagagatgtgtgttgatactgttgcacgtgtgtttttctattaaaagactcatccgtcaaaa

SEQ ID NO: 364502 - DNA, 1109 bp, Homo sapiens
agcggagtagggttaagtaacacagaaactgttacgctcttgcatgcagggtccctagatacgaagttcgaatcgatggaaacgtagctcaaaaggcgacgccaacaccccggagaaaacactgagctactccaaccacagtggcgcgccaagtaggaggcggtacctgaggaccacgcctgcgcgcggggttacgcaagcgcgcagcctttgcgcacgcgcacgaacgcacggccgcgcagcatctgtcttgctggaagctttttcctagaggttgagcggtttgcacaatgtcggaaatggctgagttgtccgagctgtatgaagagagcagtgacctgcagatggatgtgatgcctggcgagggtgaccttccgcagatggagtagaacacaataggacagtgactgcacagttgtgaaaaaggaagagaatcattaaagaaaaagaaaaaagattttaagaccgttgaaatcaattatcaagaacgtcctaaaacacctatggctttgactttgttattgatccagattattttccttgcattggggaaaatatctttcatatttgtttgctgtaaagatggttttgcaagaataagtcatgaccaagacaaactgccaatacaaaagcccactgatactaattatataatgagaaaaaaatgtatccaactaggacacatatcttttgagttatttggactgaaagcttaagaaaacttggaaaattctattttgtgatctagtcaagccacagttatcaaaggctacattttcagtgtaagataaatggatgagtaaactcaaatatgtatcacgtgtgctttgtatcttaagatgtgtttccaagagcatctgaaattttgtttgtacatgtatcttgatcatttataaagccactgtgatctataaatcaagaaaatccattgtcataaccatttttaaaagtcaaaaattaagacatactcttattaaagttcatcggaaaaaagaaaaaaaaatgtgggggggacgaagtttaacttgggggccaagaggaaggaaggtgaagggagggtccacaaaagggggggaaatggtgtcggtgtactgacgcggggaggtaga

SEQ ID NO: 364503 - DNA, 279 bp, Homo sapiens
  misc_feature (13)..(13): n is a, c, g, or t
attaccgggtcgnctactactactaaattcgcggccgctcgaacagatgaaggactttagttgaacttcatattgtaagaactgttaataaaagttgtcaagtaaaaagcgctatatctaaaaagactttatgaacagttattctatcaacttttaaaggttttaaacctgcccagaaatttattatctccaatgctggtgcatgacaaataacaagcttaattagaggaggagacagagggaaacttcagataccaaggtaatttctgggcgtcgacg

SEQ ID NO: 364504 - DNA, 2139 bp, Homo sapiens
agcggagtagggttaagtaacacagaaactgttacgctcttgcatgcagggtccctagatacgaagttcgaatcgatggaaacgtagctcaaaaggcgacgccaacaccccggagaaaacactgagctactccaaccacagtggcgcgccaagtaggaggcggtacctgaggaccacgcctgcgcgcggggttacgcaagcgcgcagcctttgcgcacgcgcacgaacgcacggccgcgcagcatctgtcttgctggaagctttttcctagaggttgagcggtttgcacaatgtcggaaatggctgagttgtccgagctgtatgaagagagcagtgacctgcagatggatgtgatgcctggcgagggtgaccttccgcagatggaggtaggcagcgggagccgggagctatccctgcgtccctcccgcagcggggcccaacagctcgaggaggaaggcccaatggaggaggaggaggcccagccaatggcggcgccagaggggaaacggagccttgctaacgggcccaacgctggggagcagccaggccaggtggcgggcgcagacttcgagagcgaggacgagggcgaggaatttgatgactgggaggacgactacgactatcccgaagaggagcagctcagtggtgccggctacagagtatcagccgctcttgaagaagccgacaagatgtttctgagaacaagagaaccagccctggatggcgggtttcagatgcattatgagaagaccccgtttgatcagttagcttttatcgaagagcttttttcactgatggttgtcaatcgtctgaccgaagaactcggctgtgatgagattattgatagagagtagttagatgctgttaaaagaggaggaaactacttgaggagggacccaactttccgctatcttttgggttcattccaaatagttttgtgccattgaaaaacttgaccttcaaaaaaatttgtttttcagaatagaacacaataggacagtgactgcacagttgtgaaaaaggaagagaatcattaaagaaaaagaaaaaagattttaagaccgttgaaatcaattatcaagaacgtcctaaaacacctatggctttgactttgttattgatccagattattttccttgcattggggaaaatatctttcatatttgtttgctgtaaagatggttttgcaagaataagtcatgaccaagacaaactgccaatacaaaagcccactgatactaattatataatgagaaaaaaatgtatccaactaggacacatatcttttgagttatttggactgaaagcttaagaaaacttggaaaattctattttgtgatctagtcaagccacagttatcaaaggctacattttcagtgtaagataaatggatgagtaaactcaaatatgtatcacgtgtgctttgtatcttaagatgtgtttccaagagcatctgaaattttgtttgtacatgtatcttgatcatttataaagccactgtgatctataaatcaagaaaatccattgtcataaccatttttaaaagtcaaaaattaagacatccttaattaaaaagtttcaaatctagacactaaatgtgtgtgaatgtacaaagaaaacaaaccattgcttatgctgttatatactagagaaattttgttttgcttgctgttttaacttgacagatgaaggactttagttgaacttcatattgtaagaactgttaataaaagttgtcaagtaaaaagcgctatatctaaaaagactttatgaacagttattctatcaacttttaaaggttttaaacctgcccagaaattaccttggtatctgaagtttccctctgtctcctcctctaattaagcttgttatttgtcatgcaccagcattggagataataaaatttcttgttctgtgtaaaaaaaaacaaccacaaacacacatccacccacacaatcaaactcacccaaaaaaacagcaaaaaagacgttggcgggcccaccgcgaaaagttacacaactttggggggcgccgcccagaatagacaaggtcccgtcaaagaaccacgacaaagggggtccccaaaaaacggggggacgggcaaaccacggggcgacggtaccagcaggtaaacacggg

SEQ ID NO: 364505 - DNA, 2304 bp, Homo sapiens
agcggagtagggttaagtaacacagaaactgttacgctcttgcatgcagggtccctagatacgaagttcgaatcgatggaaacgtagctcaaaaggcgacgccaacaccccggagaaaacactgagctactccaaccacagtggcgcgccaagtaggaggcggtacctgaggaccacgcctgcgcgcggggttacgcaagcgcgcagcctttgcgcacgcgcacgaacgcacggccgcgcagcatctgtcttgctggaagctttttcctagaggttgagcggtttgcacaatgtcggaaatggctgagttgtccgagctgtatgaagagagcagtgacctgcagatggatgtgatgcctggcgagggtgaccttccgcagatggaggtaggcagcgggagccgggagctatccctgcgtccctcccgcagcggggcccaacagctcgaggaggaaggcccaatggaggaggaggaggcccagccaatggcggcgccagaggggaaacggagccttgctaacgggcccaacgctggggagcagccaggccaggtggcgggcgcagacttcgagagcgaggacgagggcgaggaatttgatgactgggaggacgactacgactatcccgaagaggagcagctcagtggtgccggctacagagtatcagccgctcttgaagaagccgacaagatgtttctgagaacaagagaaccagccctggatggcgggtttcagatgcattatgagaagaccccgtttgatcagttagcttttatcgaagagcttttttcactgatggttgtcaatcgtctgaccgaagaactcggctgtgatgagattattgatagagagtagttagatgctgttaaaagaggaggaaactacttgaggagggacccaactttccgctatcttttgggttcattccaaatagttttgtgccattgaaaaacttgaccttcaaaaaaatttgtttttcagaatagaacacaataggacagtgactgcacagttgtgaaaaaggaagagaatcattaaagaaaaagaaaaaagattttaagaccgttgaaatcaattatcaagaacgtcctaaaacacctatggctttgactttgttattgatccagattattttccttgcattggggaaaatatctttcatatttgtttgctgtaaagatggttttgcaagaataagtcatgaccaagacaaactgccaatacaaaagcccactgatactaattatataatgagaaaaaaatgtatccaactaggacacatatcttttgagttatttggactgaaagcttaagaaaacttggaaaattctattttgtgatctagtcaagccacagttatcaaaggctacattttcagtgtaagataaatggatgagtaaactcaaatatgtatcacgtgtgctttgtatcttaagatgtgtttccaagagcatctgaaattttgtttgtacatgtatcttgatcatttataaagccactgtgatctataaatcaagaaaatccattgtcataaccatttttaaaagtcaaaaattaagacatccttaattaaaaagtttcaaatctagacactaaatgtgtgtgaatgtacaaagaaaacaaaccattgcttatgctgttatatactagagaaattttgttttgcttgctgttttaacttgacagatgaaggactttagttgaacttcatattgtaagaactgttaataaaagttgtcaagtaaaaagcgctatatctaaaaagactttatgaacagttattctatcaacttttaaaggttttaaacctgcccagaaattaccttggtatctgaagtttccctctgtctcctcctctaattaagcttgttatttgtcatgcaccagcattggagataataaaatttcttgttctgtgtatattttgtttggctaatagtattgcatacatactttctctgtatactactttctattgtatgtgttaaccagtattaagggaaaatgatccagcttcagctatctaattcacaaattaatttctggaaattaaactttgtaaattaagtttttgcctataagaatttgctggtctgggaaaacctgccctatcaatgagtatgttgccgtggttaccttactaagatgctgaagttctaggagagtaatgattacatcagaaggctaggttcagcaaaataagtgtatcagcaggttttatcatgatcagtaaaaatgttccaaatgcttctgctccattatagcagtaaagaacgaatatccaatgcaacaggacaattcagag

SEQ ID NO: 364506 - DNA, 2294 bp, Homo sapiens
  misc_feature (1932)..(1932): n is a, c, g, or t
agcggagtagggttaagtaacacagaaactgttacgctcttgcatgcagggtccctagatacgaagttcgaatcgatggaaacgtagctcaaaaggcgacgccaacaccccggagaaaacactgagctactccaaccacagtggcgcgccaagtaggaggcggtacctgaggaccacgcctgcgcgcggggttacgcaagcgcgcagcctttgcgcacgcgcacgaacgcacggccgcgcagcatctgtcttgctggaagctttttcctagaggttgagcggtttgcacaatgtcggaaatggctgagttgtccgagctgtatgaagagagcagtgacctgcagatggatgtgatgcctggcgagggtgaccttccgcagatggaggtaggcagcgggagccgggagctatccctgcgtccctcccgcagcggggcccaacagctcgaggaggaaggcccaatggaggaggaggaggcccagccaatggcggcgccagaggggaaacggagccttgctaacgggcccaacgctggggagcagccaggccaggtggcgggcgcagacttcgagagcgaggacgagggcgaggaatttgatgactgggaggacgactacgactatcccgaagaggagcagctcagtggtgccggctacagagtatcagccgctcttgaagaagccgacaagatgtttctgagaacaagagaaccagccctggatggcgggtttcagatgcattatgagaagaccccgtttgatcagttagcttttatcgaagagcttttttcactgatggttgtcaatcgtctgaccgaagaactcggctgtgatgagattattgatagagagtagttagatgctgttaaaagaggaggaaactacttgaggagggacccaactttccgctatcttttgggttcattccaaatagttttgtgccattgaaaaacttgaccttcaaaaaaatttgtttttcagaatagaacacaataggacagtgactgcacagttgtgaaaaaggaagagaatcattaaagaaaaagaaaaaagattttaagaccgttgaaatcaattatcaagaacgtcctaaaacacctatggctttgactttgttattgatccagattattttccttgcattggggaaaatatctttcatatttgtttgctgtaaagatggttttgcaagaataagtcatgaccaagacaaactgccaatacaaaagcccactgatactaattatataatgagaaaaaaatgtatccaactaggacacatatcttttgagttatttggactgaaagcttaagaaaacttggaaaattctattttgtgatctagtcaagccacagttatcaaaggctacattttcagtgtaagataaatggatgagtaaactcaaatatgtatcacgtgtgctttgtatcttaagatgtgtttccaagagcatctgaaattttgtttgtacatgtatcttgatcatttataaagccactgtgatctataaatcaagaaaatccattgtcataaccatttttaaaagtcaaaaattaagacatccttaattaaaaagtttcaaatctagacactaaatgtgtgtgaatgtacaaagaaaacaaaccattgcttatgctgttatatactagagaaattttgttttgcttgctgttttaacttgacagatgaaggactttagttgaacttcatattgtaagaactgttaataaaagttgtcaagtaaaaagcgctatatctaaaaagactttatgaacagttattctatcaacttttaaaggttttaaacctgcccagaaattaccttggtatctgaagtttccctctgtctcctcctctaattaagcttgttatttgtcatgcaccagcattggagataataaaatttcttgttctgtgtaaaaaaaaaaaaanaaaaaaaaaaaaaaaaaaaaaaaaaaaaaaaaaaaaaaaaaaaaaaaaaaaaaaaaaaaaaaaaaaacataacaaacaacaaaaaaaccaacaccatgaaacaaggaatctgtgacgatccgtagaaaaagagcagaagggccgtgactactattaatatgtcgcgacgaccgcacaacccattcagacccctatcccattaagaaacccgggcactatggtcctactgatacttcatagacctagggagcgctctcaacagcctgccgaaaaatcggctacaagctcgatagagagacacctattagtagtcagaagaaaagcaacaagagtaaatagccaagaaatataaactggtggca

SEQ ID NO: 364507 - DNA, 1884 bp, Homo sapiens
agcggagtagggttaagtaacacagaaactgttacgctcttgcatgcagggtccctagatacgaagttcgaatcgatggaaacgtagctcaaaaggcgacgccaacaccccggagaaaacactgagctactccaaccacagtggcgcgccaagtaggaggcggtacctgaggaccacgcctgcgcgcggggttacgcaagcgcgcagcctttgcgcacgcgcacgaacgcacggccgcgcagcatctgtcttgctggaagctttttcctagaggttgagcggtttgcacaatgtcggaaatggctgagttgtccgagctgtatgaagagagcagtgacctgcagatggatgtgatgcctggcgagggtgaccttccgcagatggaggtaggcagcgggagccgggagctatccctgcgtccctcccgcagcggggcccaacagctcgaggaggaaggcccaatggaggaggaggaggcccagccaatggcggcgccagaggggaaacggagccttgctaacgggcccaacgctggggagcagccaggccaggtggcgggcgcagacttcgagagcgaggacgagggcgaggaatttgatgactgggaggacgactacgactatcccgaagaggagcagctcagtggtgccggctacagagtatcagccgctcttgaagaagccgacaagatgtttctgagaacaagagaaccagccctggatggcgggtttcagatgcattatgagaagaccccgtttgatcagttagcttttatcgaagagcttttttcactgatggttgtcaatcgtctgaccgaagaactcggctgtgatgagattattgatagagagtagttagatgctgttaaaagaggaggaaactacttgaggagggacccaactttccgctatcttttgggttcattccaaatagttttgtgccattgaaaaacttgaccttcaaaaaaatttgtttttcagaatagaacacaataggacagtgactgcacagttgtgaaaaaggaagagaatcattaaagaaaaagaaaaaagattttaagaccgttgaaatcaattatcaagaacgtcctaaaacacctatggctttgactttgttattgatccagattattttccttgcattggggaaaatatctttcatatttgtttgctgtaaagatggttttgcaagaataagtcatgaccaagacaaactgccaatacaaaagcccactgatactaattatatcttttgagttatttggactgaaagcttaagaaaacttggaaaattctattttgtgatctagtcaagccacagttatcaaaggctacattttcagtgtaagataaatggatgagtaaactcaaatatgtatcacgtgtgctttgtatcttaagatgtgtttccaagagcatctgaaattttgtttgtacatgtatcttgatcatttataaagccactgtgatctataaatcaagaaaatccattgtcataaccatttttaaaagtcaaaaattaagacatccttaattaaaaagtttcaaatctagacactaaatgtgtgtgaatgtacaaagaaaacaaaccattgcttatgctgttatatactagagaaattttgttttgcttgctgttttaacttgacagatgaaggactttagttgaacttcatattgtaagaactgttaataaaagttgtcaagtaaaaagcgctatatctaaaaagactttatgaacagttattctatcaacttttaaaggttttaaacctgcccagaaattaccttggtatctgaagtttccctctgtctcctcctctaattaagcttgttatttgtcatgcaccagcattggagataataaaatttcttgttctgtgta

SEQ ID NO: 364508 - DNA, 1899 bp, Homo sapiens
agcggagtagggttaagtaacacagaaactgttacgctcttgcatgcagggtccctagatacgaagttcgaatcgatggaaacgtagctcaaaaggcgacgccaacaccccggagaaaacactgagctactccaaccacagtggcgcgccaagtaggaggcggtacctgaggaccacgcctgcgcgcggggttacgcaagcgcgcagcctttgcgcacgcgcacgaacgcacggccgcgcagcatctgtcttgctggaagctttttcctagaggttgagcggtttgcacaatgtcggaaatggctgagttgtccgagctgtatgaagagagcagtgacctgcagatggatgtgatgcctggcgagggtgaccttccgcagatggaggtaggcagcgggagccgggagctatccctgcgtccctcccgcagcggggcccaacagctcgaggaggaaggcccaatggaggaggaggaggcccagccaatggcggcgccagaggggaaacggagccttgctaacgggcccaacgctggggagcagccaggccaggtggcgggcgcagacttcgagagcgaggacgagggcgaggaatttgatgactgggaggacgactacgactatcccgaagaggagcagctcagtggtgccggctacagaagccgacaagatgtttctgagaacaagagaaccagccctggatggcgggtttcagatgcattatgagaagaccccgtttgatcagttagcttttatcgaagagcttttttcactgatggttgtcaatcgtctgaccgaagaactcggctgtgatgagattattgatagagagtagttagatgctgttaaaagaggaggaaactacttgaggagggacccaactttccgctatcttttgggttcattccaaatagttttgtgccattgaaaaacttgaccttcaaaaaaatttgtttttcagaatagaacacaataggacagtgactgcacagttgtgaaaaaggaagagaatcattaaagaaaaagaaaaaagattttaagaccgttgaaatcaattatcaagaacgtcctaaaacacctatggctttgactttgttattgatccagattattttccttgcattggggaaaatatctttcatatttgtttgctgtaaagatggttttgcaagaataagtcatgaccaagacaaactgccaatacaaaagcccactgatactaattatataatgagaaaaaaatgtatccaactaggacacatatcttttgagttatttggactgaaagcttaagaaaacttggaaaattctattttgtgatctagtcaagccacagttatcaaaggctacattttcagtgtaagataaatggatgagtaaactcaaatatgtatcacgtgtgctttgtatcttaagatgtgtttccaagagcatctgaaattttgtttgtacatgtatcttgatcatttataaagccactgtgatctataaatcaagaaaatccattgtcataaccatttttaaaagtcaaaaattaagacatccttaattaaaaagtttcaaatctagacactaaatgtgtgtgaatgtacaaagaaaacaaaccattgcttatgctgttatatactagagaaattttgttttgcttgctgttttaacttgacagatgaaggactttagttgaacttcatattgtaagaactgttaataaaagttgtcaagtaaaaagcgctatatctaaaaagactttatgaacagttattctatcaacttttaaaggttttaaacctgcccagaaattaccttggtatctgaagtttccctctgtctcctcctctaattaagcttgttatttgtcatgcaccagcattggagataataaaatttcttgttctgtgta

SEQ ID NO: 364509 - DNA, 1495 bp, Homo sapiens
agcggagtagggttaagtaacacagaaactgttacgctcttgcatgcagggtccctagatacgaagttcgaatcgatggaaacgtagctcaaaaggcgacgccaacaccccggagaaaacactgagctactccaaccacagtggcgcgccaagtaggaggcggtacctgaggaccacgcctgcgcgcggggttacgcaagcgcgcagcctttgcgcacgcgcacgaacgcacggccgcgcagcatctgtcttgctggaagctttttcctagaggttgagcggtttgcacaatgtcggaaatggctgagttgtccgagctgtatgaagagagcagtgacctgcagatggatgtgatgcctggcgagggtgaccttccgcagatggaggtaggcagcgggagccgggagctatccctgcgtccctcccgcagcggggcccaacagctcgaggaggaaactacttgaggagggacccaactttccgctatcttttgggttcattccaaatagttttgtgccattgaaaaacttgaccttcaaaaaaatttgtttttcagaatagaacacaataggacagtgactgcacagttgtgaaaaaggaagagaatcattaaagaaaaagaaaaaagattttaagaccgttgaaatcaattatcaagaacgtcctaaaacacctatggctttgactttgttattgatccagattattttccttgcattggggaaaatatctttcatatttgtttgctgtaaagatggttttgcaagaataagtcatgaccaagacaaactgccaatacaaaagcccactgatactaattatataatgagaaaaaaatgtatccaactaggacacatatcttttgagttatttggactgaaagcttaagaaaacttggaaaattctattttgtgatctagtcaagccacagttatcaaaggctacattttcagtgtaagataaatggatgagtaaactcaaatatgtatcacgtgtgctttgtatcttaagatgtgtttccaagagcatctgaaattttgtttgtacatgtatcttgatcatttataaagccactgtgatctataaatcaagaaaatccattgtcataaccatttttaaaagtcaaaaattaagacatccttaattaaaaagtttcaaatctagacactaaatgtgtgtgaatgtacaaagaaaacaaaccattgcttatgctgttatatactagagaaattttgttttgcttgctgttttaacttgacagatgaaggactttagttgaacttcatattgtaagaactgttaataaaagttgtcaagtaaaaagcgctatatctaaaaagactttatgaacagttattctatcaacttttaaaggttttaaacctgcccagaaattaccttggtatctgaagtttccctctgtctcctcctctaattaagcttgttatttgtcatgcaccagcattggagataataaaatttcttgttctgtgta

SEQ ID NO: 364510 - DNA, 1051 bp, Homo sapiens
  misc_feature (10)..(10): n is a, c, g, or t
tgccattganaaactatttggaatgaacccaaaagatagcggaaagttgggttcattccaaatagttttgtgccattgaaaaacttgaccttcaaaaaaatttgtttttcagaatagaacacaataggacagtgactgcacagttgtgaaaaaggaagagaatcattaaagaaaaagaaaaaagattttaagaccgttgaaatcaattatcaagaacgtcctaaaacacctatggctttgactttgttattgatccagattattttccttgcattggggaaaatatctttcatatttgtttgctgtaaagatggttttgcaagaataagtcatgaccaagacaaactgccaatacaaaagcccactgatactaattatataatgagaaaaaaatgtatccaactaggacacatatcttttgagttatttggactgaaagcttaagaaaacttggaaaattctattttgtgatctagtcaagccacagttatcaaaggctacattttcagtgtaagataaatggatgagtaaactcaaatatgtatcacgtgtgctttgtatcttaagatgtgtttccaagagcatctgaaattttgtttgtacatgtatcttgatcatttataaagccactgtgatctataaatcaagaaaatccattgtcataaccatttttaaaagtcaaaaattaagacatccttaattaaaaagtttcaaatctagacactaaatgtgtgtgaatgtacaaagaaaacaaaccattgcttatgctgttatatactagagaaattttgttttgcttgctgttttaacttgacagatgaaggactttagttgaacttcatattgtaagaactgttaataaaagttgtcaagtaaaaagcgctatatctaaaaagactttatgaacagttattctatcaacttttaaaggttttaaacctgcccagaaattaccttggtatctgaagtttccctctgtctcctcctctaattaagcttgttatttgtcatgcaccagcattggagataataaaatttcttgttctgtgta

SEQ ID NO: 364511 - DNA, 996 bp, Homo sapiens
cccacgcgtccggacccacgcgtccgaacttgaccttcaaaaaaatttgtttttcagaatagaacacaataggacagtgactgcacagttgtgaaaaaggaagagaatcattaaagaaaaagaaaaaagattttaagaccgttgaaatcaattatcaagaacgtcctaaaacacctatggctttgactttgttattgatccagattattttccttgcattggggaaaatatctttcatatttgtttgctgtaaagatggttttgcaagaataagtcatgaccaagacaaactgccaatacaaaagcccactgatactaattatataatgagaaaaaaatgtatccaactaggacacatatcttttgagttatttggactgaaagcttaagaaaacttggaaaattctattttgtgatctagtcaagccacagttatcaaaggctacattttcagtgtaagataaatggatgagtaaactcaaatatgtatcacgtgtgctttgtatcttaagatgtgtttccaagagcatctgaaattttgtttgtacatgtatcttgatcatttataaagccactgtgatctataaatcaagaaaatccattgtcataaccatttttaaaagtcaaaaattaagacatccttaattaaaaagtttcaaatctagacactaaatgtgtgtgaatgtacaaagaaaacaaaccattgcttatgctgttatatactagagaaattttgttttgcttgctgttttaacttgacagatgaaggactttagttgaacttcatattgtaagaactgttaataaaagttgtcaagtaaaaagcgctatatctaaaaagactttatgaacagttattctatcaacttttaaaggttttaaacctgcccagaaattaccttggtatctgaagtttccctctgtctcctcctctaattaagcttgttatttgtcatgcaccagcattggagataataaaatttcttgttctgtgta

SEQ ID NO: 364512 - DNA, 1294 bp, Homo sapiens
agcggagtagggttaagtaacacagaaactgttacgctcttgcatgcagggtccctagatacgaagttcgaatcgatggaaacgtagctcaaaaggcgacgccaacaccccggagaaaacactgagctactccaaccacagtggcgcgccaagtaggaggcggtacctgaggaccacgcctgcgcgcggggttacgcaagcgcgcagcctttgcgcacgcgcacgaacgcacggccgcgcagcatctgtcttgctggaagctttttcctagaggttgagcggtttgcacaatgtcggaaatggctgagttgtccgagctgtatgaagagagcagtgacctgcagatggatgtgatgctagaacacaataggacagtgactgcacagttgtgaaaaaggaagagaatcattaaagaaaaagaaaaaagattttaagaccgttgaaatcaattatcaagaacgtcctaaaacacctatggctttgactttgttattgatccagattattttccttgcattggggaaaatatctttcatatttgtttgctgtaaagatggttttgcaagaataagtcatgaccaagacaaactgccaatacaaaagcccactgatactaattatataatgagaaaaaaatgtatccaactaggacacatatcttttgagttatttggactgaaagcttaagaaaacttggaaaattctattttgtgatctagtcaagccacagttatcaaaggctacattttcagtgtaagataaatggatgagtaaactcaaatatgtatcacgtgtgctttgtatcttaagatgtgtttccaagagcatctgaaattttgtttgtacatgtatcttgatcatttataaagccactgtgatctataaatcaagaaaatccattgtcataaccatttttaaaagtcaaaaattaagacatccttaattaaaaagtttcaaatctagacactaaatgtgtgtgaatgtacaaagaaaacaaaccattgcttatgctgttatatactagagaaattttgttttgcttgctgttttaacttgacagatgaaggactttagttgaacttcatattgtaagaactgttaataaaagttgtcaagtaaaaagcgctatatctaaaaagactttatgaacagttattctatcaacttttaaaggttttaaacctgcccagaaattaccttggtatctgaagtttccctctgtctcctcctctaattaagcttgttatttgtcatgcaccagcattggagataataaaatttcttgttctgtgta

SEQ ID NO: 364513 - DNA, 1323 bp, Homo sapiens
agcggagtagggttaagtaacacagaaactgttacgctcttgcatgcagggtccctagatacgaagttcgaatcgatggaaacgtagctcaaaaggcgacgccaacaccccggagaaaacactgagctactccaaccacagtggcgcgccaagtaggaggcggtacctgaggaccacgcctgcgcgcggggttacgcaagcgcgcagcctttgcgcacgcgcacgaacgcacggccgcgcagcatctgtcttgctggaagctttttcctagaggttgagcggtttgcacaatgtcggaaatggctgagttgtccgagctgtatgaagagagcagtgacctgcagatggatgtgatgcctggcgagggtgaccttccgcagatggagtagaacacaataggacagtgactgcacagttgtgaaaaaggaagagaatcattaaagaaaaagaaaaaagattttaagaccgttgaaatcaattatcaagaacgtcctaaaacacctatggctttgactttgttattgatccagattattttccttgcattggggaaaatatctttcatatttgtttgctgtaaagatggttttgcaagaataagtcatgaccaagacaaactgccaatacaaaagcccactgatactaattatataatgagaaaaaaatgtatccaactaggacacatatcttttgagttatttggactgaaagcttaagaaaacttggaaaattctattttgtgatctagtcaagccacagttatcaaaggctacattttcagtgtaagataaatggatgagtaaactcaaatatgtatcacgtgtgctttgtatcttaagatgtgtttccaagagcatctgaaattttgtttgtacatgtatcttgatcatttataaagccactgtgatctataaatcaagaaaatccattgtcataaccatttttaaaagtcaaaaattaagacatccttaattaaaaagtttcaaatctagacactaaatgtgtgtgaatgtacaaagaaaacaaaccattgcttatgctgttatatactagagaaattttgttttgcttgctgttttaacttgacagatgaaggactttagttgaacttcatattgtaagaactgttaataaaagttgtcaagtaaaaagcgctatatctaaaaagactttatgaacagttattctatcaacttttaaaggttttaaacctgcccagaaattaccttggtatctgaagtttccctctgtctcctcctctaattaagcttgttatttgtcatgcaccagcattggagataataaaatttcttgttctgtgta

SEQ ID NO: 364514 - DNA, 890 bp, Homo sapiens
  misc_feature (13)..(13): n is a, c, g, or t
attaccgggtcgnctactactactaaattcgcggccgctcgacaattatcaagaacgtcctaaaacacctatggctttgactttgttattgatccagattattttccttgcattggggaaaatatctttcatatttgtttgctgtaaagatggttttgcaagaataagtcatgaccaagacaaactgccaatacaaaagcccactgatactaattatataatgagaaaaaaatgtatccaactaggacacatatcttttgagttatttggactgaaagcttaagaaaacttggaaaattctattttgtgatctagtcaagccacagttatcaaaggctacattttcagtgtaagataaatggatgagtaaactcaaatatgtatcacgtgtgctttgtatcttaagatgtgtttccaagagcatctgaaattttgtttgtacatgtatcttgatcatttataaagccactgtgatctataaatcaagaaaatccattgtcataaccatttttaaaagtcaaaaattaagacatccttaattaaaaagtttcaaatctagacactaaatgtgtgtgaatgtacaaagaaaacaaaccattgcttatgctgttatatactagagaaattttgttttgcttgctgttttaacttgacagatgaaggactttagttgaacttcatattgtaagaactgttaataaaagttgtcaagtaaaaagcgctatatctaaaaagactttatgaacagttattctatcaacttttaaaggttttaaacctgcccagaaattaccttggtatctgaagtttccctctgtctcctcctctaattaagcttgttatttgtcatgcaccagcattggagataataaaatttcttgttctgtgta

SEQ ID NO: 364515 - DNA, 632 bp, Homo sapiens
agcggagtagggttaagtaacacagaaactgttacgctcttgcatgcagggtccctagatacgaagttcgaatcgatggaaacgtagctcaaaaggcgacgccaacaccccggagaaaacactgagctactccaaccacagtggcgcgccaagtaggaggcggtacctgaggaccacgcctgcgcgcggggttacgcaagcgcgcagcctttgcgcacgcgcacgaacgcacggccgcgcagcatctgtcttgctggaagctttttcctagaggttgagcggtttgcacaatgtcggaaatggctgagttgtccgagctgtatgaagagagcagtgacctgcagatggatgtgatgcctggcgagggtgaccttccgcagatggaggtaggcagcgggagccgggagctatccctgcgtccctcccgcagcggggcccaacagctcgaggaggaaggcccaatggaggaggaggaggcccagccaatggcggcgccagaggggaaacggagccttgctaacgggcccaacgctggggagcagccaggccaggtggcgggcgcagacttcgagagctctggcaaggggagctctgccaaggggagctctgccaaggggagctctgccaagggg

SEQ ID NO: 364516 - DNA, 1919 bp, Homo sapiens
agcggagtagggttaagtaacacagaaactgttacgctcttgcatgcagggtccctagatacgaagttcgaatcgatggaaacgtagctcaaaaggcgacgccaacaccccggagaaaacactgagctactccaaccacagtggcgcgccaagtaggaggcggtacctgaggaccacgcctgcgcgcggggttacgcaagcgcgcagcctttgcgcacgcgcacgaacgcacggccgcgcagcatctgtcttgctggaagctttttcctagaggttgagcggtttgcacaatgtcggaaatggctgagttgtccgagctgtatgaagagagcagtgacctgcagatggatgtgatgcctggcgagggtgaccttccgcagatggaggtaggcagcgggagccgggagctatccctgcgtccctcccgcagcggggcccaacagctcgaggaggaaggcccaatggaggaggaggaggcccagccaatggcggcgccagaggggaaacggagccttgctaacgggcccaacgctggggagcagccaggccaggtggcgggcgcagacttcgagagcgaggacgagggcgaggaatttgatgactgggaggacgactacgactatcccgaagaggagcagctcagtggtgccggctacagagtatcagccgctcttgaagaagccgacaagatgtttctgagaacaagagaaccagccctggatggcgggtttcagatgcattatgagaagaccccgtttgatcagttagcttttatcgaagagcttttttcactgatggttgtcaatcgtctgaccgaagaactcggctgtgatgagattattgatagagagtagttagatgctgttaaaagaggaggaaactacttgaggagggacccaactttccgctatcttttgggttcattccaaatagttttgtgccattgaaaaacttgaccttcaaaaaaatttgtttttcagaatagaacacaataggacagtgactgcacagttgtgaaaaaggaagagaatcattaaagaaaaagaaaaaagattttaagaccgttgaaatcaattatcaagaacgtcctaaaacacctatggctttgactttgttattgatccagattattttccttgcattggggaaaatatctttcatatttgtttgctgtaaagatggttttgcaagaataagtcatgaccaagacaaactgccaatacaaaagcccactgatactaattatataatgagaaaaaaatgtatccaactaggacacatatcttttgagttatttggactgaaagcttaagaaaacttggaaaattctattttgtgatctagtcaagccacagttatcaaaggctacattttcagtgtaagataaatggatgagtaaactcaaatatgtatcacgtgtgctttgtatcttaagatgtgtttccaagagcatctgaaattttgtttgtacatgtatcttgatcatttataaagccactgtgatctataaatcaagaaaatccattgtcataaccatttttaaaagtcaaaaattaagacatccttaattaaaaagtttcaaatctagacactaaatgtgtgtgaatgtacaaagaaaacaaaccattgcttatgctgttatatactagagaaattttgttttgcttgctgttttaacttgacagatgaaggactttagttgaacttcatattgtaagaactgttaataaaagttgtcaagtaaaaagcgctatatctaaaaagactttatgaacagttattctatcaacttttaaaggttttaaacctgcccagaaattaccttggtatctgaagtttccctctgtctcctcctctaattaagcttgttatttgtcatgcaccagcattggagataataaaatttcttgttctgtgta

SEQ ID NO: 364517 - DNA, 1776 bp, Homo sapiens
agcggagtagggttaagtaacacagaaactgttacgctcttgcatgcagggtccctagatacgaagttcgaatcgatggaaacgtagctcaaaaggcgacgccaacaccccggagaaaacactgagctactccaaccacagtggcgcgccaagtaggaggcggtacctgaggaccacgcctgcgcgcggggttacgcaagcgcgcagcctttgcgcacgcgcacgaacgcacggccgcgcagcatctgtcttgctggaagctttttcctagaggttgagcggtttgcacaatgtcggaaatggctgagttgtccgagctgtatgaagagagcagtgacctgcagatggatgtgatgcctggcgagggtgaccttccgcagatggaggtaggcagcgggagccgggagctatccctgcgtccctcccgcagcggggcccaacagctcgaggaggaaggcccaatggaggaggaggaggcccagccaatggcggcgccagaggggaaacggagccttgctaacgggcccaacgctggggagcagccaggccaggtggcgggcgcagacttcgagagcgaggacgagggcgaggaatttgatgactgggaggacgactacgactatcccgaagaggagcagctcagtggtgccggctacagagtatcagccgctcttgaagaagccgacaagatgtttctgagaacaagagaaccagccctggatggcgggtttcagatgcattatgagaagaccccgtttgatcagttagcttttatcgaagagcttttttcactgatggttgtcaatcgtctgaccgaagaactcggctgtgatgagattattgatagagagtagttagatgctgttaaaagaggaggaaactacttgaggagggacccaactttccgctatcttttgggttcattccaaatagttttgtgccattgaaaaacttgaccttcaaaaaaatttgtttttcagaatagaacacaataggacagtgactgcacagttgtgaaaaaggaagagaatcattaaagaaaaagaaaaaagattttaagaccgttgaaatcaattatcaagaacgtcctaaaacacctatggctttgactttgttattgatccagattattttccttgcattggggaaaatatctttcatatttgtttgctgtaaagatggttttgcaagaataagtcatgaccaagacaaactgccaatacaaaagcccactgatactaattatataatgagaaaaaaatgtatccaactaggacacatatcttttgagttatttggactgaaagcttaagaaaacttggaaaattctattttgtgatctagtcaagccacagttatcaaaggctacattttcagtgtaagataaatggatgagtaaactcaaatatgtatcacgtgtgctttgtatcttaagatgtgtttccaagagcatctgaaattttgtttgtacatgtatcttgatcatttataaagccactgtgatctataaatcaagaaaatccattgtcataaccatttttaaaagtcaaaaattaagacatccttaattaaaaagtttcaaatctagacactaaatgtgtgtgaatgtacaaagaaaacaaaccattgcttatgctgttatatactagagaaattttgttttgcttgctgttttaacttgacttttattaacagttcttacaatatgaagttcaactaaagtccttcatctgtcaagttaaaacagcaagcaaaacaaaatttctctagtatata

SEQ ID NO: 364518 - DNA, 1656 bp, Homo sapiens
agcggagtagggttaagtaacacagaaactgttacgctcttgcatgcagggtccctagatacgaagttcgaatcgatggaaacgtagctcaaaaggcgacgccaacaccccggagaaaacactgagctactccaaccacagtggcgcgccaagtaggaggcggtacctgaggaccacgcctgcgcgcggggttacgcaagcgcgcagcctttgcgcacgcgcacgaacgcacggccgcgcagcatctgtcttgctggaagctttttcctagaggttgagcggtttgcacaatgtcggaaatggctgagttgtccgagctgtatgaagagagcagtgacctgcagatggatgtgatgcctggcgagggtgaccttccgcagatggaggtaggcagcgggagccgggagctatccctgcgtccctcccgcagcggggcccaacagctcgaggaggaaggcccaatggaggaggaggaggcccagccaatggcggcgccagaggggaaacggagccttgctaacgggcccaacgctggggagcagccaggccaggtggcgggcgcagacttcgagagcgaggacgagggcgaggaatttgatgactgggaggacgactacgactatcccgaagaggagcagctcagtggtgccggctacagagtatcagccgctcttgaagaagccgacaagatgtttctgagaacaagagaaccagccctggatggcgggtttcagatgcattatgagaagaccccgtttgatcagttagcttttatcgaagagcttttttcactgatggttgtcaatcgtctgaccgaagaactcggctgtgatgagattattgatagagagtagttagatgctgttaaaagaggaggaaactacttgaggagggacccaactttccgctatcttttgggttcattccaaatagttttgtgccattgaaaaacttgaccttcaaaaaaatttgtttttcagaatagaacacaataggacagtgactgcacagttgtgaaaaaggaagagaatcattaaagaaaaagaaaaaagattttaagaccgttgaaatcaattatcaagaacgtcctaaaacacctatggctttgactttgttattgatccagattattttccttgcattggggaaaatatctttcatatttgtttgctgtaaagatggttttgcaagaataagtcatgaccaagacaaactgccaatacaaaagcccactgatactaattatataatgagaaaaaaatgtatccaactaggacacatatcttttgagttatttggactgaaagcttaagaaaacttggaaaattctattttgtgatctagtcaagccacagttatcaaaggctacattttcagtgtaagataaatggatgagtaaactcaaatatgtatcacgtgtgctttgtatcttaagatgtgtttccaagagcatctgaaattttgtttgtacatgtatcttgatcatttataaagccactgtgatctataaatcaagaaaatccattgtcataaccatttttaaaagtcaaaaattaagacattctagtatataacagcataagcaatggtttgttttctttgtacattcacacacatttagtgtctagatttgaaactttttaattaagggtcgac

SEQ ID NO: 364519 - DNA, 1220 bp, Homo sapiens
  misc_feature (1030)..(1030): n is a, c, g, or t
  misc_feature (1219)..(1219): n is a, c, g, or t
agcggagtagggttaagtaacacagaaactgttacgctcttgcatgcagggtccctagatacgaagttcgaatcgatggaaacgtagctcaaaaggcgacgccaacaccccggagaaaacactgagctactccaaccacagtggcgcgccaagtaggaggcggtacctgaggaccacgcctgcgcgcggggttacgcaagcgcgcagcctttgcgcacgcgcacgaacgcacggccgcgcagcatctgtcttgctggaagctttttcctagaggttgagcggtttgcacaatgtcggaaatggctgagttgtccgagctgtatgaagagagcagtgacctgcagatggatgtgatgcctggcgagggtgaccttccgcagatggaggtaggcagcgggagccgggagctatccctgcgtccctcccgcagcggggcccaacagctcgaggaggaaggcccaatggaggaggaggaggcccagccaatggcggcgccagaggggaaacggagccttgctaacgggcccaacgctggggagcagccaggccaggtggcgggcgcagacttcgagagcgaggacgagggcgaggaatttgatgactgggaggacgactacgactatcccgaagaggagcagctcagtggtgccggctacagagtatcagccgctcttgaagaagccgacaagatgtttctgagaacaagagaaccagccctggatggcgggtttcagatgcattatgagaagaccccgtttgatcagttagcttttatcgaagagcttttttcactgatggttgtcaatcgtctgaccgaagaactcggctgtgatgagattattgatagagagtagttagatgctgttaaaagaggaggaaactacttgaggagggacccaactttccgctatcttttgggttcattccaaatagttttgtgccattgaaaaacttgaccttcaaaaaaatttgtttttcagaatagaacacaataggacagtgactgcacagttgtgaaaaggagatcttntgaaagaaaacgattttgacgtggacacttagaggctaaacccatggtgtgttgttgggccaatttcggctgggggacttttgcggggaagttgtgaaattgacaaggtgaagccggtatattgacgatggctctttgtggaggactgtagccgagaggaattatgttggtgttgcataaaatgacgcna

SEQ ID NO: 364520 - DNA, 1323 bp, Homo sapiens
tcttggtgtactgttgtgtattctaattactgtcttaagttgggatgtttttacttttcatttcataccattttactcataaagtattttaaatatccatatagtaaattcagcatcaccgaagtgattctccaacagagtatgactcgtgcttatagtctcctgctgaagccagagtttagctttccttactgtgcgcatgcatgagacttcagttcttttcaagcttatttgtgctttggacagttgatgcaatgtgattgctttctttgaattttgaacatttagaccttaatgccagtgacttattaatttttttatattcaattagaacccctaagacatcagtgaagggggttgtgcaaaatagacagaagccttcacagagcagagtgcctaacagagtgcctgtttcaggtttgtagaaaataaattcctgaagcccattcaatagaaggaagtgcacaagctgccccataactcaggccatagaagtggaatagattgtctttccttgccaccataattttggcatattcacagtcatcttattagtgttctttggtcttagcattgtatggcagtcaggaagtcttagtaaaagtgtgattccagtcttcatttctataatatttctgtggaaagcaccttgtatttttcattctgaaaaaattgtagaatttgccatgcttaattcagaaaacctttttatttaatgaataaaagataacgatcatctctggtgctaagtctgtgcattgtctgttcagcttggggaagtgtatctgcacataaggggataaactttctccctcagactataagatcacatgtgaatatgccagtgggaggagggcttcatattttgctcagtccaaagcttgagctaaatctctccttatgttcattatttgaggattaagagctaaactaaaaactgtattttaaaattctgtttatggtggcaagaagacaaactcattcttgagcaaattcaaagctcttaaccaaatgctttaatattttttaggtatctttgttaagacactttgattaagctcacttaaaaattatgtgatccatttaaaaatactttccaaatgttgtgctttaactatactgctttctagacatttacaacaaacctaaattaatcaccaggcattgaagattaaacctttaatcaattttaatctttccattaatatacaattaggcaaattttagagctttattactaagtgatttccttcaaattaggagggaacaagctattggtcgtaactttgaaatgatggctgaccttttgtatgtatgtagtga

SEQ ID NO: 364521 - DNA, 5566 bp, Homo sapiens
agtgccggccctgagaggtggagtcggggtggcagcggcggcggttgccaggagcccgcgttgcagcctgagatccgtaatatggcggggaggaggaggagaaggcggcggcggaccgagctgcgctctgtcagtaccatttgagccattcgcttcctgacaaggcccgtggcgaggggagaggagctgaaggggccgtgggggatcagtgcctgctgtgtgctgatactgttctgtgtaatggggattcagtgaacaagactgaaaaggtacctgtacttatggcgcttacattttggtggaggaagacagacaaaaatcaaggaaataaacacgataatttcagatagtgtgtgactgtgggaagatggaggagtatgagaagttctgtgaaaaaagtcttgccagaatacaagaagcatcactatccacagagagctttctccctgctcagtctgaaagtatctcacttattcgctttcatggagtggctatcctttctccactgcttaacattgagaaaagaaaggaaatgcaacaagaaaagcagaaagcacttgatgtagaagcaagaaagcaggttaacaggaagaaagctttactgactcgtgtccaggagattcttgacaatgttcaggttagaaaagcacctaatgccagtgattttgatcagtgggagatggaaacagtttactctaattcagaagtcagaaacttgaatgttcctgctacatttccaaatagctttccaagccatacggaacactctactgcagcaaagcttgataagatagctgggattttgccattggataatgaggaccaatgtaaaactgatggaatagacttagctagagattcagaaggatttaattctccgaagcaatgtgatagttccaatattagtcatgtagaaaatgaagcttttccaaagacctcttcagcaaccccacaagaaactcttatttctgatggtcccttctcagtaaatgaacaacaggatctaccacttttggcagaagtcatcccagatccctatgtaatgagtcttcagaatctgatgaaaaagtcaaaggaatatatagaaagagaacaatctagacgcagtctgagaggtagtatgaacagaattgttaatgagagtcatttagacaaagaacatgatgctgttgaagtggctgactgtgtaaaagagaaaggccagttgacaggcaaacactgtgtctcagttattcctgacaaaccaagccttaataaatcaaatgttcttctccaaggtgcttccactcaagcaagcagcatgagtatgccagttttagctagcttttcgaaagtggacatacctatacgaactggccatcccactgttctagagtctaattctgattttaaagttattcccacttttgttaccgaaaataatgttatcaaaagtcttacaggttcatatgccaaattacctagtccagagccaagtatgagtcctaaaatgcaccgaagacgttccaggacatcatcagcgtgtcatatacttataaataacccaataaatgcctgtgaattaagccctaaaggaaaagaacaggcaatggacttaattattcaagatactgatgaaaacacaaatgtgcccgaaattatgccaaagttaccaactgatttagcgggagtttgttcaagcaaggtttatgtgggcaaaaatacatctgaagtcaaagaagatgtggttttaggtaaatcaaatcaggtatgtcaatcttcaggaaatcatttagaaaataaagttactcatggacttgttactgtggaaggtcagttaacatccgatgagagaggcgcacacataatgaacagtacctgtgctgcgatgccaaagctgcatgaaccatatgccagcagtcagtgtatagcaagtccaaactttggaactgtgagtggactcaagccagccagtatgttagagaaaaactgcagtttgcaaacagaactgaataagtcttatgatgtaaaaaacccttctcctttattgatgcaaaaccagaatacgagacagcagatggacacacctatggtgtcctgtggaaatgaacaatttttggataacagttttgagaaagttaaacggagacttgatttagatattgatggtttgcaaaaagaaaactgcccttatgtcataacaagtggaataactgaacaagaaaggcaacatttgccagaaaaaagataccctaagggatctggcttcgttaacaagaataaaatgttaggaactagttccaaagaaagcgaggagttactaaaaagcaagatgttagcttttgaagaaatgcggaagagactagaagaacagcacgcccagcaattatcactactcatagctgagcaggaaagggaacaagaaagactgcaaaaggaaatagaagagcaggagaaaatgttaaaagagaagaaggcaatgacagcggaagcctctgagttggacattaacaatgcagtggaattagaatggagaaaaataagtgactctagtttgctggaaacaatgctgtctcaagcggactcactccatacttcaaattcaaatagttctggtttcaccaattctgccatgcaatatagctttgtttctgcaaacgaagcaccattctacctctggggatcatcaactagtggcttgaccaaactctcagtaacaaggccttttggaagagccaaaactagatggtctcaagtttttagtctggaaatacaagcaaaatttaacaaaataactgcagtggcaaaaggatttcttactcgtagacttatgcagacagataagctgaagcaacttcgacaaactgtaaaagatactatggaattcataagaagttttcagtcagaagcaccattaaagagaggcattgtttcagctcaagatgcttcacttcaggaaagagtgttagctcagttgcgagctgccttgtacggtattcatgacatattctttgtaatggatgcagctgaaagaatgtctattctacatcatgatcgagaagttcgcaaagagaaaatgctcaggcaaatggataaaatgaaaagtccacgagtggctctttcagctgcaacacagaagtctcttgataggaagaaatacatgaaagctgctgaaatgggaatgccaaataagaaatttctggttaaacaaaatccttctgaaacaagagtccttcagccaaaccaaggacagaatgcacctgttcataggctacttagtagacaaggaacccctaagacatcagtgaagggggttgtgcaaaatagacagaagccttcacagagcagagtgcctaacagagtgcctgtttcaggagtatatgcaggaaaaatccaaagaaagcggccaaatgttgcgacaatttaagaagacaacattcattaggataaaatggggggaaggattattattcatgttattttccctgcccaagactttatttaaccctggactccgtttacacagacaaagtgacatcagaaggctgagcacttatctggatcatttggtcagtttggtaattcctgctccacacccctattttcctcttaataatacgtttgggtgaagacaaattagtgtttagtaattgcatcatctctgtgcttacctatacaaacataagtttattttatatgcccagatgtctacagagaccctttttgtaaatgtcaaggacatttggatttacttttacagaatattgaaaagataagacaaattataaataagttctaaaacataaatttaattcatctctgcatagtgatttttgaatttgattcaaagggaaattattgcagaagaatgcctttccctcattttataactttaaaaacttggattaaccactcaatgtccactttctttgacttacagtataaccatgtagccaattgtggcccactaaaatctacagaagttaatgtgggtcaccattttggtcagaagcatacattcctgtcagacaactagttgtctgacagaaatgttaggcttcatgtatgttaccccagtactgttagaaacatttgtactaggttataagatctttctgtgacaggtaacaaatttggggaagacagcacaatcttcttgaatgtagctcttgggaatgcattattacatccatttctgtaacataataatatgttgcatgcagttatattttctatttagtctgtatattttgttcttcatagtctgttttttctagcatgcttgatttaggagagaataaagggctatataataataaatccagatttccggataagaatattgcctggttaaaattctgcattgcttaaagacacccatgtttaagatttttcatcactaacatatccattaaaagtatcaactggccaggcagggtggctcacgcctgtactcccagcattttgtgaggccaaggtgggtggatcacctgaggtcaggagtttgagaccagcctgaccaaacatggcgaaaccccatctgtactgaaaatacaaaaattaggcatggtggtgcatgcctgtagttccagctacttgggaggctgagacaggcgaattgcttgaacctgggaggcagaggttgcagtgagctgagactgtgccattgcactccagtcgggttaacagagcaagacactgtctcaaaaaaaaaaaaaaaaaaaagtatcaaccaacaaatgttaccaagataacgtgacttcatgagggagaatgtcactattaatttatcataccatttccaaaaagggctttgtgcttttcacataaaattgagacagtgtatatttaatctaatttaaattttaaagagatactggtattttgaaaatgcaacctatatatattcttaatatccttttaagaatatggagatgaagattgttttctccaattttctgtgccattttaaatttaactttgacatccagctatagacagaaataataagccaccctgggtgtaaacttgattttctttattgagatgtatcatgtattgaatgagtgaaccagaaaattagaagatggtcaaaaaaagtccaagttaccaattttttaaaatttataggcaaagtatcaaattgtcttcttaatatgataaactgtgctttatcattctgaaaactcaggatacagcttattcatagcattgtgggtctctccagtaagaaagatgctaaaagttttgtgcactttttgtgtgtgtaatgcaaattagttaaaacaaatagttttggagaaagttaaaactagctttagagtaaggatgagaaacttgagtgtttttaatttaaagataaaagcctgtgttttacacattcttttttggtgttcatagcttcttctcatacaggtgccagacactgtttgtgcttttgatggatttttatttatatactttttttgcttatttttactttgagtggaatgttcattaatgtaaattgtatttatttttatacttttattttcactagttttgcttctaggcaaaaagcaaaataaacttttcatcttaaagaaaa

SEQ ID NO: 364522 - DNA, 6376 bp, Homo sapiens
agtgccggccctgagaggtggagtcggggtggcagcggcggcggttgccaggagcccgcgttgcagcctgagatccgtaatatggcggggaggaggaggagaaggcggcggcggaccgagctgcgctctgtcagtaccatttgagccattcgcttcctgacaaggcccgtggcgaggggagaggagctgaaggggccgtgggggatcagtttcatttgaaacctacggggaaccaagcactgtcgctgccctccaggaattcatactctactgctaaaaatcgtcatcatcattatcctcttaataagaaaagcagtccccattatttgttgctttctgcgtgttctgcactacgttaattgccctacatgcattagctcattgaattcttacaacattcctttgagacggataccgtgatcatccctcttttacagaggacgaaacaggtgtggggatggtaactggcttgccaagaacttgcagctagtacgcatctgaataagaaatcttcccctttaccgcttttacaagaagtttgcgtctttggcggaactgatgggcaaagaaacactaggttctgcaaaaaaaaagcaggatctgttctgtgttacttttaccactcttttcagtgacatgtctggcagagcacgggtaaggagcagataggaccatgagtctacggggtttgcaaagaggctcatttgcacaagggtcagtggttctctgtggtataaatggagaagacggcatgtctgaacctgctgtagctgacaaattattactggaagtggaccagtgatgcctgatggcaagatatagagcagtagatttgtggctggggtagccttgtagtcagggctcccttaaaataaaaccttgctgacagtggtaattgtagtgtgaaaggcatagtgtcctcttgcttaatcatgggatacagactgctcacttcttaaatggttacctttgcagtttaagaggtaccagtttctctgggactagagccatggtgaaatttccattctctaaattccactcttccttgctagcttcggtgtatagtccgccttctttttttcttctggtttacattattgtttgagcttattattattcttattcatttattcaatacttttatcaagtgcctgctgtgtgctgatactgttctgtgtaatggggattcagtgaacaagactgaaaaggtacctgtacttatggcgcttacattttggtggaggaagacagacaaaaatcaaggaaataaacacgataatttcagatagtgtgtgactgtgggaagatggaggagtatgagaagttctgtgaaaaaagtcttgccagaatacaagaagcatcactatccacagagagctttctccctgctcagtctgaaagtatctcacttattcgctttcatggagtggctatcctttctccactggttagaaaagcacctaatgccagtgattttgatcagtgggagatggaaacagtttactctaattcagaagtcagaaacttgaatgttcctgctacatttccaaatagctttccaagccatacggaacactctactgcagcaaagcttgataagatagctgggattttgccattggataatgaggaccaatgtaaaactgatggaatagacttagctagagattcagaaggatttaattctccgaagcaatgtgatagttccaatattagtcatgtagaaaatgaagcttttccaaagacctcttcagcaaccccacaagaaactcttatttctgatggtcccttctcagtaaatgaacaacaggatctaccacttttggcagaagtcatcccagatccctatgtaatgagtcttcagaatctgatgaaaaagtcaaaggaatatatagaaagagaacaatctagacgcagtctgagaggtagtatgaacagaattgttaatgagagtcatttagacaaagaacatgatgctgttgaagtggctgactgtgtaaaagagaaaggccagttgacaggcaaacactgtgtctcagttattcctgacaaaccaagccttaataaatcaaatgttcttctccaaggtgcttccactcaagcaagcagcatgagtatgccagttttagctagcttttcgaaagtggacatacctatacgaactggccatcccactgttctagagtctaattctgattttaaagttattcccacttttgttaccgaaaataatgttatcaaaagtcttacaggttcatatgccaaattacctagtccagagccaagtatgagtcctaaaatgcaccgaagacgttccaggacatcatcagcgtgtcatatacttataaataacccaataaatgcctgtgaattaagccctaaaggaaaagaacaggcaatggacttaattattcaagatactgatgaaaacacaaatgtgcccgaaattatgccaaagttaccaactgatttagcgggagtttgttcaagcaaggtttatgtgggcaaaaatacatctgaagtcaaagaagatgtggttttaggtaaatcaaatcaggtatgtcaatcttcaggaaatcatttagaaaataaagttactcatggacttgttactgtggaaggtcagttaacatccgatgagagaggcgcacacataatgaacagtacctgtgctgcgatgccaaagctgcatgaaccatatgccagcagtcagtgtatagcaagtccaaactttggaactgtgagtggactcaagccagccagtatgttagagaaaaactgcagtttgcaaacagaactgaataagtcttatgatgtaaaaaacccttctcctttattgatgcaaaaccagaatacgagacagcagatggacacacctatggtgtcctgtggaaatgaacaatttttggataacagttttgagaaagttaaacggagacttgatttagatattgatggtttgcaaaaagaaaactgcccttatgtcataacaagtggaataactgaacaagaaaggcaacatttgccagaaaaaagataccctaagggatctggcttcgttaacaagaataaaatgttaggaactagttccaaagaaagcgaggagttactaaaaagcaagatgttagcttttgaagaaatgcggaagagactagaagaacagcacgcccagcaattatcactactcatagctgagcaggaaagggaacaagaaagactgcaaaaggaaatagaagagcaggagaaaatgttaaaagagaagaaggcaatgacagcggaagcctctgagttggacattaacaatgcagtggaattagaatggagaaaaataagtgactctagtttgctggaaacaatgctgtctcaagcggactcactccatacttcaaattcaaatagttctggtttcaccaattctgccatgcaatatagctttgtttctgcaaacgaagcaccattctacctctggggatcatcaactagtggcttgaccaaactctcagtaacaaggccttttggaagagccaaaactagatggtctcaagtttttagtctggaaatacaagcaaaatttaacaaaataactgcagtggcaaaaggatttcttactcgtagacttatgcagacagataagctgaagcaacttcgacaaactgtaaaagatactatggaattcataagaagttttcagtcagaagcaccattaaagagaggcattgtttcagctcaagatgcttcacttcaggaaagagtgttagctcagttgcgagctgccttgtacggtattcatgacatattctttgtaatggatgcagctgaaagaatgtctattctacatcatgatcgagaagttcgcaaagagaaaatgctcaggcaaatggataaaatgaaaagtccacgagtggctctttcagctgcaacacagaagtctcttgataggaagaaatacatgaaagctgctgaaatgggaatgccaaataagaaatttctggttaaacaaaatccttctgaaacaagagtccttcagccaaaccaaggacagaatgcacctgttcataggctacttagtagacaaggaacccctaagacatcagtgaagggggttgtgcaaaatagacagaagccttcacagagcagagtgcctaacagagtgcctgtttcaggagtatatgcaggaaaaatccaaagaaagcggccaaatgttgcgacaatttaagaagacaacattcattaggataaaatggggggaaggattattattcatgttattttccctgcccaagactttatttaaccctggactccgtttacacagacaaagtgacatcagaaggctgagcacttatctggatcatttggtcagtttggtaattcctgctccacacccctattttcctcttaataatacgtttgggtgaagacaaattagtgtttagtaattgcatcatctctgtgcttacctatacaaacataagtttattttatatgcccagatgtctacagagaccctttttgtaaatgtcaaggacatttggatttacttttacagaatattgaaaagataagacaaattataaataagttctaaaacataaatttaattcatctctgcatagtgatttttgaatttgattcaaagggaaattattgcagaagaatgcctttccctcattttataactttaaaaacttggattaaccactcaatgtccactttctttgacttacagtataaccatgtagccaattgtggcccactaaaatctacagaagttaatgtgggtcaccattttggtcagaagcatacattcctgtcagacaactagttgtctgacagaaatgttaggcttcatgtatgttaccccagtactgttagaaacatttgtactaggttataagatctttctgtgacaggtaacaaatttggggaagacagcacaatcttcttgaatgtagctcttgggaatgcattattacatccatttctgtaacataataatatgttgcatgcagttatattttctatttagtctgtatattttgttcttcatagtctgttttttctagcatgcttgatttaggagagaataaagggctatataataataaatccagatttccggataagaatattgcctggttaaaattctgcattgcttaaagacacccatgtttaagatttttcatcactaacatatccattaaaagtatcaactggccaggcagggtggctcacgcctgtactcccagcattttgtgaggccaaggtgggtggatcacctgaggtcaggagtttgagaccagcctgaccaaacatggcgaaaccccatctgtactgaaaatacaaaaattaggcatggtggtgcatgcctgtagttccagctacttgggaggctgagacaggcgaattgcttgaacctgggaggcagaggttgcagtgagctgagactgtgccattgcactccagtcgggttaacagagcaagacactgtctcaaaaaaaaaaaaaaaaaaaagtatcaaccaacaaatgttaccaagataacgtgacttcatgagggagaatgtcactattaatttatcataccatttccaaaaagggctttgtgcttttcacataaaattgagacagtgtatatttaatctaatttaaattttaaagagatactggtattttgaaaatgcaacctatatatattcttaatatccttttaagaatatggagatgaagattgttttctccaattttctgtgccattttaaatttaactttgacatccagctatagacagaaataataagccaccctgggtgtaaacttgattttctttattgagatgtatcatgtattgaatgagtgaaccagaaaattagaagatggtcaaaaaaagtccaagttaccaattttttaaaatttataggcaaagtatcaaattgtcttcttaatatgataaactgtgctttatcattctgaaaactcaggatacagcttattcatagcattgtgggtctctccagtaagaaagatgctaaaagttttgtgcactttttgtgtgtgtaatgcaaattagttaaaacaaatagttttggagaaagttaaaactagctttagagtaaggatgagaaacttgagtgtttttaatttaaagataaaagcctgtgttttacacattcttttttggtgttcatagcttcttctcatacaggtgccagacactgtttgtgcttttgatggatttttatttatatactttttttgcttatttttactttgagtggaatgttcattaatgtaaattgtatttatttttatacttttattttcactagttttgcttctaggcaaaaagcaaaataaacttttcatcttaaagaaaa

SEQ ID NO: 364523 - DNA, 5508 bp, Homo sapiens
agtgccggccctgagaggtggagtcggggtggcagcggcggcggttgccaggagcccgcgttgcagcctgagatccgtaatatggcggggaggaggaggagaaggcggcggcggaccgagctgcgctctgtcagtaccatttgagccattcgcttcctgacaaggcccgtggcgaggggagaggagctgaaggggccgtgggggatcagtgcctgctgtgtgctgatactgttctgtgtaatggggattcagtgaacaagactgaaaaggtacctgtacttatggcgcttacattttggtggaggaagacagacaaaaatcaaggaaataaacacgataatttcagatagtgtgtgactgtgggaagatggaggagtatgagaagttctgtgaaaaaagtcttgccagaatacaagaagcatcactatccacagagagctttctccctgctcagtctgaaagtatctcacttattcgctttcatggagtggctatcctttctccactgcttaacattgagaaaagaaaggaaatgcaacaagaaaagcagaaagcacttgatgtagaagcaagaaagcaggttaacaggaagaaagctttactgactcgtgtccaggagattcttgacaatgttcaggttagaaaagcacctaatgccagtgattttgatcagtgggagatggaaacagtttactctaattcagaagtcagaaacttgaatgttcctgctacatttccaaatagctttccaagccatacggaacactctactgcagcaaagcttgataagatagctgggattttgccattggataatgaggaccaatgtaaaactgatggaatagacttagctagagattcagaaggatttaattctccgaagcaatgtgatagttccaatattagtcatgtagaaaatgaagcttttccaaagacctcttcagcaaccccacaagaaactcttatttctgatggtcccttctcagtaaatgaacaacaggatctaccacttttggcagaagtcatcccagatccctatgtaatgagtcttcagaatctgatgaaaaagtcaaaggaatatatagaaagagaacaatctagacgcagtctgagaggtagtatgaacagaattgttaatgagagtcatttagacaaagaacatgatgctgttgaagtggctgactgtgtaaaagagaaaggccagttgacaggcaaacactgtgtctcagttattcctgacaaaccaagccttaataaatcaaatgttcttctccaaggtgcttccactcaagcaagcagcatgagtatgccagttttagctagcttttcgaaagtggacatacctatacgaactggccatcccactgttctagagtctaattctgattttaaagttattcccacttttgttaccgaaaataatgttatcaaaagtcttacaggttcatatgccaaattacctagtccagagccaagtatgagtcctaaaatgcaccgaagacgttccaggacatcatcagcgtgtcatatacttataaataacccaataaatgcctgtgaattaagccctaaaggaaaagaacaggcaatggacttaattattcaagatactgatgaaaacacaaatgtgcccgaaattatgccaaagttaccaactgatttagcgggagtttgttcaagcaaggtttatgtgggcaaaaatacatctgaagtcaaagaagatgtggttttaggtaaatcaaatcaggtatgtcaatcttcaggaaatcatttagaaaataaagttactcatggacttgttactgtggaaggtcagttaacatccgatgagagaggcgcacacataatgaacagtacctgtgctgcgatgccaaagctgcatgaaccatatgccagcagtcagtgtatagcaagtccaaactttggaactgtgagtggactcaagccagccagtatgttagagaaaaactgcagtttgcaaacagaactgaataagtcttatgatgtaaaaaacccttctcctttattgatgcaaaaccagaatacgagacagcagatggacacacctatggtgtcctgtggaaatgaacaatttttggataacagttttgagaaagttaaacggagacttgatttagatattgatggtttgcaaaaagaaaactgcccttatgtcataacaagtggaataactgaacaagaaaggcaacatttgccagaaaaaagataccctaagggatctggcttcgttaacaagaataaaatgttaggaactagttccaaagaaagcgaggagttactaaaaagcaagatgttagcttttgaagaaatgcggaagagactagaagaacagcacgcccagcaattatcactactcatagctgagcaggaaagggaacaagaaagactgcaaaaggaaatagaagagcaggagaaaatgttaaaagagaagaaggcaatgacagcggaagcctctgagttggacattaacaatgcagtggaattagaatggagaaaaataagtgactctagtttgctggaaacaatgctgtctcaagcggactcactccatacttcaaattcaaatagttctggtttcaccaattctgccatgcaatatagctttgtttctgcaaacgaagcaccattctacctctggggatcatcaactagtggcttgaccaaactctcagtaacaaggccttttggaagagccaaaactagatggtctcaagtttttagtctggaaatacaagcaaaatttaacaaaataactgcagtggcaaaaggatttcttactcgtagacttatgcagacagataagctgaagcaacttcgacaaactgtaaaagatactatggaattcataagaagttttcagtcagaagcaccattaaagagaggcattgtttcagctcaagatgcttcacttcaggaaagagtgttagctcagttgcgagctgccttgtacggtattcatgacatattctttgtaatggatgcagctgaaagaatgtctattctacatcatgatcgagaagttcgcaaagagaaaatgctcaggcaaatggataaaatgaaaagtccacgagtggctctttcagctgcaacacagaagtctcttgataggaagaaatacatgaaagctgctgaaatgggaatgccaaataagaaatttctggttaaacaaaatccttctgaaacaagagtccttcagccaaaccaaggacagaatgcacctgttcataggctacttagtagacaaggaacccctaagacatcagtgaagggggttgtgcaaaatagacagaagccttcacagagcagagtgcctaacagagtgcctgtttcaggagtatatgcaggaaaaatccaaagaaagcggccaaatgttgcgacaatttaagaagacaacattcattaggataaaatggggggaaggattattattcatgttattttccctgcccaagactttatttaaccctggactccgtttacacagacaaagtgacatcagaaggctgagcacttatctggatcatttggtcagtttggtaattcctgctccacacccctattttcctcttaataatacgtttgggtgaagacaaattagtgtttagtaattgcatcatctctgtgcttacctatacaaacataagtttattttatatgcccagatgtctacagagaccctttttgtaaatgtcaaggacatttggatttacttttacagaatattgaaaagataagacaaattataaataagttctaaaacataaatttaattcatctctgcatagtgatttttgaatttgattcaaagggaaattattgcagaagaatgcctttccctcattttataactttaaaaacttggattaaccactcaatgtccactttctttgacttacagtataaccatgtagccaattgtggcccactaaaatctacagaagttaatgtgggtcaccattttggtcagaagcatacattcctgtcagacaactagttgtctgacagaaatgttaggcttcatgtatgttaccccagtactgttagaaacatttgtactaggttataagatctttctgtgacaggtaacaaatttggggaagacagcacaatcttcttgaatgtagctcttgggaatgcattattacatccatttctgtaacataataatatgttgcatgcagttatattttctatttagtctgtatattttgttcttcatagtctgttttttctagcatgcttgatttaggagagaataaagggctatataataataaatccagatttccggataagaatattgcctggttaaaattctgcattgcttaaagacacccatgtttaagatttttcatcactaacatatccattaaaagtatcaactggccaggcagggtggctcacgcctgtactcccagcattttgtgaggccaaggtgggtggatcacctgaggtcaggagtttgagaccagcctgaccaaacatggcgaaaccccatctgtactgaaaatacaaaaattaggcatggtggtgcatgcctgtagttccagctacttgggaggctgagacaggcgaattgcttgaacctgggaggcagaggttgcagtgagctgagactgtgccattgcactccagtcgggttaacagagcaagacactgtctcaaaaaaaaaaatgtcactattaatttatcataccatttccaaaaagggctttgtgcttttcacataaaattgagacagtgtatatttaatctaatttaaattttaaagagatactggtattttgaaaatgcaacctatatatattcttaatatccttttaagaatatggagatgaagattgttttctccaattttctgtgccattttaaatttaactttgacatccagctatagacagaaataataagccaccctgggtgtaaacttgattttctttattgagatgtatcatgtattgaatgagtgaaccagaaaattagaagatggtcaaaaaaagtccaagttaccaattttttaaaatttataggcaaagtatcaaattgtcttcttaatatgataaactgtgctttatcattctgaaaactcaggatacagcttattcatagcattgtgggtctctccagtaagaaagatgctaaaagttttgtgcactttttgtgtgtgtaatgcaaattagttaaaacaaatagttttggagaaagttaaaactagctttagagtaaggatgagaaacttgagtgtttttaatttaaagataaaagcctgtgttttacacattcttttttggtgttcatagcttcttctcatacaggtgccagacactgtttgtgcttttgatggatttttatttatatactttttttgcttatttttactttgagtggaatgttcattaatgtaaattgtatttatttttatacttttattttcactagttttgcttctaggcaaaaagcaaaataaacttttcatcttaaagaaaa

SEQ ID NO: 364524 - DNA, 5423 bp, Homo sapiens
agtgccggccctgagaggtggagtcggggtggcagcggcggcggttgccaggagcccgcgttgcagcctgagatccgtaatatggcggggaggaggaggagaaggcggcggcggaccgagctgcgctctgtcagtaccatttgagccattcgcttcctgacaaggcccgtggcgaggggagaggagctgaaggggccgtgggggatcagtgtgactgtgggaagatggaggagtatgagaagttctgtgaaaaaagtcttgccagaatacaagaagcatcactatccacagagagctttctccctgctcagtctgaaagtatctcacttattcgctttcatggagtggctatcctttctccactgcttaacattgagaaaagaaaggaaatgcaacaagaaaagcagaaagcacttgatgtagaagcaagaaagcaggttaacaggaagaaagctttactgactcgtgtccaggagattcttgacaatgttcaggttagaaaagcacctaatgccagtgattttgatcagtgggagatggaaacagtttactctaattcagaagtcagaaacttgaatgttcctgctacatttccaaatagctttccaagccatacggaacactctactgcagcaaagcttgataagatagctgggattttgccattggataatgaggaccaatgtaaaactgatggaatagacttagctagagattcagaaggatttaattctccgaagcaatgtgatagttccaatattagtcatgtagaaaatgaagcttttccaaagacctcttcagcaaccccacaagaaactcttatttctgatggtcccttctcagtaaatgaacaacaggatctaccacttttggcagaagtcatcccagatccctatgtaatgagtcttcagaatctgatgaaaaagtcaaaggaatatatagaaagagaacaatctagacgcagtctgagaggtagtatgaacagaattgttaatgagagtcatttagacaaagaacatgatgctgttgaagtggctgactgtgtaaaagagaaaggccagttgacaggcaaacactgtgtctcagttattcctgacaaaccaagccttaataaatcaaatgttcttctccaaggtgcttccactcaagcaagcagcatgagtatgccagttttagctagcttttcgaaagtggacatacctatacgaactggccatcccactgttctagagtctaattctgattttaaagttattcccacttttgttaccgaaaataatgttatcaaaagtcttacaggttcatatgccaaattacctagtccagagccaagtatgagtcctaaaatgcaccgaagacgttccaggacatcatcagcgtgtcatatacttataaataacccaataaatgcctgtgaattaagccctaaaggaaaagaacaggcaatggacttaattattcaagatactgatgaaaacacaaatgtgcccgaaattatgccaaagttaccaactgatttagcgggagtttgttcaagcaaggtttatgtgggcaaaaatacatctgaagtcaaagaagatgtggttttaggtaaatcaaatcaggtatgtcaatcttcaggaaatcatttagaaaataaagttactcatggacttgttactgtggaaggtcagttaacatccgatgagagaggcgcacacataatgaacagtacctgtgctgcgatgccaaagctgcatgaaccatatgccagcagtcagtgtatagcaagtccaaactttggaactgtgagtggactcaagccagccagtatgttagagaaaaactgcagtttgcaaacagaactgaataagtcttatgatgtaaaaaacccttctcctttattgatgcaaaaccagaatacgagacagcagatggacacacctatggtgtcctgtggaaatgaacaatttttggataacagttttgagaaagttaaacggagacttgatttagatattgatggtttgcaaaaagaaaactgcccttatgtcataacaagtggaataactgaacaagaaaggcaacatttgccagaaaaaagataccctaagggatctggcttcgttaacaagaataaaatgttaggaactagttccaaagaaagcgaggagttactaaaaagcaagatgttagcttttgaagaaatgcggaagagactagaagaacagcacgcccagcaattatcactactcatagctgagcaggaaagggaacaagaaagactgcaaaaggaaatagaagagcaggagaaaatgttaaaagagaagaaggcaatgacagcggaagcctctgagttggacattaacaatgcagtggaattagaatggagaaaaataagtgactctagtttgctggaaacaatgctgtctcaagcggactcactccatacttcaaattcaaatagttctggtttcaccaattctgccatgcaatatagctttgtttctgcaaacgaagcaccattctacctctggggatcatcaactagtggcttgaccaaactctcagtaacaaggccttttggaagagccaaaactagatggtctcaagtttttagtctggaaatacaagcaaaatttaacaaaataactgcagtggcaaaaggatttcttactcgtagacttatgcagacagataagctgaagcaacttcgacaaactgtaaaagatactatggaattcataagaagttttcagtcagaagcaccattaaagagaggcattgtttcagctcaagatgcttcacttcaggaaagagtgttagctcagttgcgagctgccttgtacggtattcatgacatattctttgtaatggatgcagctgaaagaatgtctattctacatcatgatcgagaagttcgcaaagagaaaatgctcaggcaaatggataaaatgaaaagtccacgagtggctctttcagctgcaacacagaagtctcttgataggaagaaatacatgaaagctgctgaaatgggaatgccaaataagaaatttctggttaaacaaaatccttctgaaacaagagtccttcagccaaaccaaggacagaatgcacctgttcataggctacttagtagacaaggaacccctaagacatcagtgaagggggttgtgcaaaatagacagaagccttcacagagcagagtgcctaacagagtgcctgtttcaggagtatatgcaggaaaaatccaaagaaagcggccaaatgttgcgacaatttaagaagacaacattcattaggataaaatggggggaaggattattattcatgttattttccctgcccaagactttatttaaccctggactccgtttacacagacaaagtgacatcagaaggctgagcacttatctggatcatttggtcagtttggtaattcctgctccacacccctattttcctcttaataatacgtttgggtgaagacaaattagtgtttagtaattgcatcatctctgtgcttacctatacaaacataagtttattttatatgcccagatgtctacagagaccctttttgtaaatgtcaaggacatttggatttacttttacagaatattgaaaagataagacaaattataaataagttctaaaacataaatttaattcatctctgcatagtgatttttgaatttgattcaaagggaaattattgcagaagaatgcctttccctcattttataactttaaaaacttggattaaccactcaatgtccactttctttgacttacagtataaccatgtagccaattgtggcccactaaaatctacagaagttaatgtgggtcaccattttggtcagaagcatacattcctgtcagacaactagttgtctgacagaaatgttaggcttcatgtatgttaccccagtactgttagaaacatttgtactaggttataagatctttctgtgacaggtaacaaatttggggaagacagcacaatcttcttgaatgtagctcttgggaatgcattattacatccatttctgtaacataataatatgttgcatgcagttatattttctatttagtctgtatattttgttcttcatagtctgttttttctagcatgcttgatttaggagagaataaagggctatataataataaatccagatttccggataagaatattgcctggttaaaattctgcattgcttaaagacacccatgtttaagatttttcatcactaacatatccattaaaagtatcaactggccaggcagggtggctcacgcctgtactcccagcattttgtgaggccaaggtgggtggatcacctgaggtcaggagtttgagaccagcctgaccaaacatggcgaaaccccatctgtactgaaaatacaaaaattaggcatggtggtgcatgcctgtagttccagctacttgggaggctgagacaggcgaattgcttgaacctgggaggcagaggttgcagtgagctgagactgtgccattgcactccagtcgggttaacagagcaagacactgtctcaaaaaaaaaaaaaaaaaaaagtatcaaccaacaaatgttaccaagataacgtgacttcatgagggagaatgtcactattaatttatcataccatttccaaaaagggctttgtgcttttcacataaaattgagacagtgtatatttaatctaatttaaattttaaagagatactggtattttgaaaatgcaacctatatatattcttaatatccttttaagaatatggagatgaagattgttttctccaattttctgtgccattttaaatttaactttgacatccagctatagacagaaataataagccaccctgggtgtaaacttgattttctttattgagatgtatcatgtattgaatgagtgaaccagaaaattagaagatggtcaaaaaaagtccaagttaccaattttttaaaatttataggcaaagtatcaaattgtcttcttaatatgataaactgtgctttatcattctgaaaactcaggatacagcttattcatagcattgtgggtctctccagtaagaaagatgctaaaagttttgtgcactttttgtgtgtgtaatgcaaattagttaaaacaaatagttttggagaaagttaaaactagctttagagtaaggatgagaaacttgagtgtttttaatttaaagataaaagcctgtgttttacacattcttttttggtgttcatagcttcttctcatacaggtgccagacactgtttgtgcttttgatggatttttatttatatactttttttgcttatttttactttgagtggaatgttcattaatgtaaattgtatttatttttatacttttattttcactagttttgcttctaggcaaaaagcaaaataaacttttcatcttaaagaaaa

SEQ ID NO: 364525 - DNA, 2802 bp, Homo sapiens
aggctcttccaaaaggctgtttactgagagttgggtcacgccactagttgatgatccccagaggtagaaggtgcttcgttgcggaaacaaagctatatggcatggcaaaaggatttcttactcgtagacttatgcagacagataagctgaagcaacttcgacaaactgtaaaagatactatggaattcataagaagttttcagtcagaagcaccattaaagagaggcattgtttcagctcaagatgcttcacttcaggaaagagtgttagctcagttgcgagctgccttgtacggtattcatgacatattctttgtaatggatgcagctgaaagaatgtctattctacatcatgatcgagaagttcgcaaagagaaaatgctcaggcaaatggataaaatgaaaagtccacgagtggctctttcagctgcaacacagaagtctcttgataggaagaaatacatgaaagctgctgaaatgggaatgccaaataagaaatttctggttaaacaaaatccttctgaaacaagagtccttcagccaaaccaaggacagaatgcacctgttcataggctacttagtagacaagggagtatatgcaggaaaaatccaaagaaagcggccaaatgttgcgacaatttaagaagacaacattcattaggataaaatggggggaaggattattattcatgttattttccctgcccaagactttatttaaccctggactccgtttacacagacaaagtgacatcagaaggctgagcacttatctggatcatttggtcagtttggtaattcctgctccacacccctattttcctcttaataatacgtttgggtgaagacaaattagtgtttagtaattgcatcatctctgtgcttacctatacaaacataagtttattttatatgcccagatgtctacagagaccctttttgtaaatgtcaaggacatttggatttacttttacagaatattgaaaagataagacaaattataaataagttctaaaacataaatttaattcatctctgcatagtgatttttgaatttgattcaaagggaaattattgcagaagaatgcctttccctcattttataactttaaaaacttggattaaccactcaatgtccactttctttgacttacagtataaccatgtagccaattgtggcccactaaaatctacagaagttaatgtgggtcaccattttggtcagaagcatacattcctgtcagacaactagttgtctgacagaaatgttaggcttcatgtatgttaccccagtactgttagaaacatttgtactaggttataagatctttctgtgacaggtaacaaatttggggaagacagcacaatcttcttgaatgtagctcttgggaatgcattattacatccatttctgtaacataataatatgttgcatgcagttatattttctatttagtctgtatattttgttcttcatagtctgttttttctagcatgcttgatttaggagagaataaagggctatataataataaatccagatttccggataagaatattgcctggttaaaattctgcattgcttaaagacacccatgtttaagatttttcatcactaacatatccattaaaagtatcaactggccaggcagggtggctcacgcctgtactcccagcattttgtgaggccaaggtgggtggatcacctgaggtcaggagtttgagaccagcctgaccaaacatggcgaaaccccatctgtactgaaaatacaaaaattaggcatggtggtgcatgcctgtagttccagctacttgggaggctgagacaggcgaattgcttgaacctgggaggcagaggttgcagtgagctgagactgtgccattgcactccagtcgggttaacagagcaagacactgtctcaaaaaaaaaaaaaaaaaaaagtatcaaccaacaaatgttaccaagataacgtgacttcatgagggagaatgtcactattaatttatcataccatttccaaaaagggctttgtgcttttcacataaaattgagacagtgtatatttaatctaatttaaattttaaagagatactggtattttgaaaatgcaacctatatatattcttaatatccttttaagaatatggagatgaagattgttttctccaattttctgtgccattttaaatttaactttgacatccagctatagacagaaataataagccaccctgggtgtaaacttgattttctttattgagatgtatcatgtattgaatgagtgaaccagaaaattagaagatggtcaaaaaaagtccaagttaccaattttttaaaatttataggcaaagtatcaaattgtcttcttaatatgataaactgtgctttatcattctgaaaactcaggatacagcttattcatagcattgtgggtctctccagtaagaaagatgctaaaagttttgtgcactttttgtgtgtgtaatgcaaattagttaaaacaaatagttttggagaaagttaaaactagctttagagtaaggatgagaaacttgagtgtttttaatttaaagataaaagcctgtgttttacacattcttttttggtgttcatagcttcttctcatacaggtgccagacactgtttgtgcttttgatggatttttatttatatactttttttgcttatttttactttgagtggaatgttcattaatgtaaattgtatttatttttatacttttattttcactagttttgcttctaggcaaaaagcaaaataaacttttcatcttaaagaaaa

SEQ ID NO: 364526 - DNA, 2358 bp, Homo sapiens
tacctcaggatgattcatataaggattaaatatgataatgtatattgcctagctcagtgtttgttccagagtaaaaactcattaaatggtatcattatagaaaacctcccattgagaagtaatactggttttgctctatttttaggagtatatgcaggaaaaatccaaagaaagcggccaaatgttgcgacaatttaagaagacaacattcattaggataaaatggggggaaggattattattcatgttattttccctgcccaagactttatttaaccctggactccgtttacacagacaaagtgacatcagaaggctgagcacttatctggatcatttggtcagtttggtaattcctgctccacacccctattttcctcttaataatacgtttgggtgaagacaaattagtgtttagtaattgcatcatctctgtgcttacctatacaaacataagtttattttatatgcccagatgtctacagagaccctttttgtaaatgtcaaggacatttggatttacttttacagaatattgaaaagataagacaaattataaataagttctaaaacataaatttaattcatctctgcatagtgatttttgaatttgattcaaagggaaattattgcagaagaatgcctttccctcattttataactttaaaaacttggattaaccactcaatgtccactttctttgacttacagtataaccatgtagccaattgtggcccactaaaatctacagaagttaatgtgggtcaccattttggtcagaagcatacattcctgtcagacaactagttgtctgacagaaatgttaggcttcatgtatgttaccccagtactgttagaaacatttgtactaggttataagatctttctgtgacaggtaacaaatttggggaagacagcacaatcttcttgaatgtagctcttgggaatgcattattacatccatttctgtaacataataatatgttgcatgcagttatattttctatttagtctgtatattttgttcttcatagtctgttttttctagcatgcttgatttaggagagaataaagggctatataataataaatccagatttccggataagaatattgcctggttaaaattctgcattgcttaaagacacccatgtttaagatttttcatcactaacatatccattaaaagtatcaactggccaggcagggtggctcacgcctgtactcccagcattttgtgaggccaaggtgggtggatcacctgaggtcaggagtttgagaccagcctgaccaaacatggcgaaaccccatctgtactgaaaatacaaaaattaggcatggtggtgcatgcctgtagttccagctacttgggaggctgagacaggcgaattgcttgaacctgggaggcagaggttgcagtgagctgagactgtgccattgcactccagtcgggttaacagagcaagacactgtctcaaaaaaaaaaaaaaaaaaaagtatcaaccaacaaatgttaccaagataacgtgacttcatgagggagaatgtcactattaatttatcataccatttccaaaaagggctttgtgcttttcacataaaattgagacagtgtatatttaatctaatttaaattttaaagagatactggtattttgaaaatgcaacctatatatattcttaatatccttttaagaatatggagatgaagattgttttctccaattttctgtgccattttaaatttaactttgacatccagctatagacagaaataataagccaccctgggtgtaaacttgattttctttattgagatgtatcatgtattgaatgagtgaaccagaaaattagaagatggtcaaaaaaagtccaagttaccaattttttaaaatttataggcaaagtatcaaattgtcttcttaatatgataaactgtgctttatcattctgaaaactcaggatacagcttattcatagcattgtgggtctctccagtaagaaagatgctaaaagttttgtgcactttttgtgtgtgtaatgcaaattagttaaaacaaatagttttggagaaagttaaaactagctttagagtaaggatgagaaacttgagtgtttttaatttaaagataaaagcctgtgttttacacattcttttttggtgttcatagcttcttctcatacaggtgccagacactgtttgtgcttttgatggatttttatttatatactttttttgcttatttttactttgagtggaatgttcattaatgtaaattgtatttatttttatacttttattttcactagttttgcttctaggcaaaaagcaaaataaacttttcatcttaaagaaaa

SEQ ID NO: 364527 - DNA, 4259 bp, Homo sapiens
agtgccggccctgagaggtggagtcggggtggcagcggcggcggttgccaggagcccgcgttgcagcctgagatccgtaatatggcggggaggaggaggagaaggcggcggcggaccgagctgcgctctgtcagtaccatttgagccattcgcttcctgacaaggcccgtggcgaggggagaggagctgaaggggccgtgggggatcagtgcctgctgtgtgctgatactgttctgtgtaatggggattcagtgaacaagactgaaaaggtacctgtacttatggcgcttacattttggtggaggaagacagacaaaaatcaaggaaataaacacgataatttcagatagtgtgtgactgtgggaagatggaggagtatgagaagttctgtgaaaaaagtcttgccagaatacaagaagcatcactatccacagagagctttctccctgctcagtctgaaagtatctcacttattcgctttcatggagtggctatcctttctccactgcttaacattgagaaaagaaaggaaatgcaacaagaaaagcagaaagcacttgatgtagaagcaagaaagcaggttaacaggaagaaagctttactgactcgtgtccaggagattcttgacaatgttcaggttagaaaagcacctaatgccagtgattttgatcagtgggagatggaaacagtttactctaattcagaagtcagaaacttgaatgttcctgctacatttccaaatagctttccaagccatacggaacactctactgcagcaaagcttgataagatagctgggattttgccattggataatgaggaccaatgtaaaactgatggaatagacttagctagagattcagaaggatttaattctccgaagcaatgtgatagttccaatattagtcatgtagaaaatgaagcttttccaaagacctcttcagcaaccccacaagaaactcttatttctgatggtcccttctcagtaaatgaacaacaggatctaccacttttggcagaagtcatcccagatccctatgtaatgagtcttcagaatctgatgaaaaagtcaaaggaatatatagaaagagaacaatctagacgcagtctgagaggtagtatgaacagaattgttaatgagagtcatttagacaaagaacatgatgctgttgaagtggctgactgtgtaaaagagaaaggccagttgacaggcaaacactgtgtctcagttattcctgacaaaccaagccttaataaatcaaatgttcttctccaaggtgcttccactcaagcaagcagcatgagtatgccagttttagctagcttttcgaaagtggacatacctatacgaactggccatcccactgttctagagtctaattctgattttaaagttattcccacttttgttaccgaaaataatgttatcaaaagtcttacaggttcatatgccaaattacctagtccagagccaagtatgagtcctaaaatgcaccgaagacgttccaggacatcatcagcgtgtcatatacttataaataacccaataaatgcctgtgaattaagccctaaaggaaaagaacaggcaatggacttaattattcaagatactgatgaaaacacaaatgtgcccgaaattatgccaaagttaccaactgatttagcgggagtttgttcaagcaaggtttatgtgggcaaaaatacatctgaagtcaaagaagatgtggttttaggtaaatcaaatcaggtatgtcaatcttcaggaaatcatttagaaaataaagttactcatggacttgttactgtggaaggtcagttaacatccgatgagagaggcgcacacataatgaacagtacctgtgctgcgatgccaaagctgcatgaaccatatgccagcagtcagtgtatagcaagtccaaactttggaactgtgagtggactcaagccagccagtatgttagagaaaaactgcagtttgcaaacagaactgaataagtcttatgatgtaaaaaacccttctcctttattgatgcaaaaccagaatacgagacagcagatggacacacctatggtgtcctgtggaaatgaacaatttttggataacagttttgagaaagttaaacggagacttgatttagatattgatggtttgcaaaaagaaaactgcccttatgtcataacaagtggaataactgaacaagaaaggcaacatttgccagaaaaaagataccctaagggatctggcttcgttaacaagaataaaatgttaggaactagttccaaagaaagcgaggagttactaaaaagcaagatgttagcttttgaagaaatgcggaagagactagaagaacagcacgcccagcaattatcactactcatagctgagcaggaaagggaacaagaaagactgcaaaaggaaatagaagagcaggagaaaatgttaaaagagaagaaggcaatgacagcggaagcctctgagttggacattaacaatgcagtggaattagaatggagaaaaataagtgactctagtttgctggaaacaatgctgtctcaagcggactcactccatacttcaaattcaaatagttctggtttcaccaattctgccatgcaatatagctttgtttctgcaaacgaagcaccattctacctctggggatcatcaactagtggcttgaccaaactctcagtaacaaggccttttggaagagccaaaactagatggtctcaagtttttagtctggaaatacaagcaaaatttaacaaaataactgcagtggcaaaaggatttcttactcgtagacttatgcagacagataagctgaagcaacttcgacaaactgtaaaagatactatggaattcataagaagttttcagtcagaagcaccattaaagagaggcattgtttcagctcaagatgcttcacttcaggaaagagtgttagctcagttgcgagctgccttgtacggtattcatgacatattctttgtaatggatgcagctgaaagaatgtctattctacatcatgatcgagaagttcgcaaagagaaaatgctcaggcaaatggataaaatgaaaagtccacgagtggctctttcagctgcaacacagaagtctcttgataggaagaaatacatgaaagctgctgaaatgggaatgccaaataagaaatttctggttaaacaaaatccttctgaaacaagagtccttcagccaaaccaaggacagaatgcacctgttcataggctacttagtagacaaggaacccctaagacatcagtgaagggggttgtgcaaaatagacagaagccttcacagagcagagtgcctaacagagtgcctgtttcaggtttgtagaaaataaattcctgaagcccattcaatagaaggaagtgcacaagctgccccataactcaggccatagaagtggaatagattgtctttccttgccaccataattttggcatattcacagtcatcttattagtgttctttggtcttagcattgtatggcagtcaggaagtcttagtaaaagtgtgattccagtcttcatttctataatatttctgtggaaagcaccttgtatttttcattctgaaaaaattgtagaatttgccatgcttaattcagaaaacctttttatttaatgaataaaagataacgatcatctctggtgctaagtctgtgcattgtctgttcagcttggggaagtgtatctgcacataaggggataaactttctccctcagactataagatcacatgtgaatatgccagtgggaggagggcttcatattttgctcagtccaaagcttgagctaaatctctccttatgttcattatttgaggattaagagctaaactaaaaactgtattttaaaattctgtttatggtggcaagaagacaaactcattcttgagcaaattcaaagctcttaaccaaatgctttaatattttttaggtatctttgttaagacactttgattaagctcacttaaaaattatgtgatccatttaaaaatactttccaaatgttgtgctttaactatactgctttctagacatttacaacaaacctaaattaatcaccaggcattgaagattaaacctttaatcaattttaatctttccattaatatacaattaggcaaattttagagctttattactaagtgatttccttcaaattaggagggaacaagctattggtcgtaactttgaaatgatggctgaccttttgtatgtatgtagtga

SEQ ID NO: 364528 - DNA, 2145 bp, Homo sapiens
agtgccggccctgagaggtggagtcggggtggcagcggcggcggttgccaggagcccgcgttgcagcctgagatccgtaatatggcggggaggaggaggagaaggcggcggcggaccgagctgcgctctgtcagtaccatttgagccattcgcttcctgacaaggcccgtggcgaggggagaggagctgaaggggccgtgggggatcagtttcatttgaaacctacggggaaccaagcactgtcgctgccctccaggaattcatactctactgctaaaaatcgtcatcatcattatcctcttaataagaaaagcagtccccattatttgttgctttctgcgtgttctgcactacgttaattgccctacatgcattagctcattgaattcttacaacattcctttgagacggataccgtgatcatccctcttttacagaggacgaaacaggtgtggggatggtaactggcttgccaagaacttgcagctagtacgcatctgaataagaaatcttcccctttaccgcttttacaagaagtttgcgtctttggcggaactgatgggcaaagaaacactaggttctgcaaaaaaaaagcaggatctgttctgtgttacttttaccactcttttcagtgacatgtctggcagagcacgggtaaggagcagataggaccatgagtctacggggtttgcaaagaggctcatttgcacaagggtcagtggttctctgtggtataaatggagaagacggcatgtctgaacctgctgtagctgacaaattattactggaagtggaccagtgatgcctgatggcaagatatagagcagtagatttgtggctggggtagccttgtagtcagggctcccttaaaataaaaccttgctgacagtggtaattgtagtgtgaaaggcatagtgtcctcttgcttaatcatgggatacagactgctcacttcttaaatggttacctttgcagtttaagaggtaccagtttctctgggactagagccatggtgaaatttccattctctaaattccactcttccttgctagcttcggtgtatagtccgccttctttttttcttctggtttacattattgtttgagcttattattattcttattcatttattcaatacttttatcaagtgcctgctgtgtgctgatactgttctgtgtaatggggattcagtgaacaagactgaaaaggtacctgtacttatggcgcttacattttggtggaggaagacagacaaaaatcaaggaaataaacacgataatttcagatagtggtaagtgctatgaaaattgggaaacagcagggtaatgtgatagtgatagaggcagagttcatttagatggggtcatcagggatgccttctctgaggaggggatatccaagccgagactgaagaataagaaggatccagtcatgctctaaggatcatctagtaatttgtataatctccatattagcactcatatttgaatgagtaatgcgttgtcatatgctgtgttgtgctgtaataataatatagtactatacatctgcaagatataggacatatatgtactatttaagggatgtgaataactttctgaaacaatgaggcatagctctatgatgttgaaagaaaaataaaactatggccataaaagtattatatttccttaataatttccctcacttctaaaattgaatttcatgctttgcttgagtatccatagaagatatattactttatttgtataatctatttacattctgtgtattgctgaatgcatggcatgattaaaaaaataaaatatttgagcagaaatggggttaagaaataatgtgagttgaaacctagacctaaaaaaaggctatgccttaaggtgttttattgtttttacttttgcttttttaaaataaataaaagcttgtaaaatagtctcactcacactgtagagaaccatttgtttgtcattagattcctactttgcatagattgaacacaaataattacaattgattgaatagtagaaacagttggtatgattaacttattgaaaaatacatatattcatttttaaacggaatatatggacatttttcccattccaggcaaaatggcgcgggcacaaatcgaggaccggtctctgg

SEQ ID NO: 364529 - DNA, 359 bp, Homo sapiens
gggtaaacttaatgatacatgtccatctatctatttatcttttcttaagagctatattatcttagactgtataaatgaacaccaataaacattgtgtctgtcttctttctcctaggtttttagtctggaaatacaagcaaaatttaacaaaataactgcagtggcaaaaggatttcttactcgtagacttatgcagacagataagctgaagcaacttcgacaaactgtaaaagtaagattcctgtaaatcgtttgtatttcacttctgtcttagtttctatcagtcttgtgacagctgagctaacagattagttcagaacttaaacgctttttagtcactgtaatctaggcagttttag

SEQ ID NO: 364530 - DNA, 5480 bp, Homo sapiens
agtgccggccctgagaggtggagtcggggtggcagcggcggcggttgccaggagcccgcgttgcagcctgagatccgtaatatggcggggaggaggaggagaaggcggcggcggaccgagctgcgctctgtcagtaccatttgagccattcgcttcctgacaaggcccgtggcgaggggagaggagctgaaggggccgtgggggatcagtgcctgctgtgtgctgatactgttctgtgtaatggggattcagtgaacaagactgaaaaggtacctgtacttatggcgcttacattttggtggaggaagacagacaaaaatcaaggaaataaacacgataatttcagatagtgtgtgactgtgggaagatggaggagtatgagaagttctgtgaaaaaagtcttgccagaatacaagaagcatcactatccacagagagctttctccctgctcagtctgaaagtatctcacttattcgctttcatggagtggctatcctttctccactgcttaacattgagaaaagaaaggaaatgcaacaagaaaagcagaaagcacttgatgtagaagcaagaaagcaggttaacaggaagaaagctttactgactcgtgtccaggagattcttgacaatgttcaggttagaaaagcacctaatgccagtgattttgatcagtgggagatggaaacagtttactctaattcagaagtcagaaacttgaatgttcctgctacatttccaaatagctttccaagccatacggaacactctactgcagcaaagcttgataagatagctgggattttgccattggataatgaggaccaatgtaaaactgatggaatagacttagctagagattcagaaggatttaattctccgaagcaatgtgatagttccaatattagtcatgtagaaaatgaagcttttccaaagacctcttcagcaaccccacaagaaactcttatttctgatggtcccttctcagtaaatgaacaacaggatctaccacttttggcagaagtcatcccagatccctatgtaatgagtcttcagaatctgatgaaaaagtcaaaggaatatatagaaagagaacaatctagacgcagtctgagaggtagtatgaacagaattgttaatgagagtcatttagacaaagaacatgatgctgttgaagtggctgactgtgtaaaagagaaaggccagttgacaggcaaacactgtgtctcagttattcctgacaaaccaagccttaataaatcaaatgttcttctccaaggtgcttccactcaagcaagcagcatgagtatgccagttttagctagcttttcgaaagtggacatacctatacgaactggccatcccactgttctagagtctaattctgattttaaagttattcccacttttgttaccgaaaataatgttatcaaaagtcttacaggttcatatgccaaattacctagtccagagccaagtatgagtcctaaaatgcaccgaagacgttccaggacatcatcagcgtgtcatatacttataaataacccaataaatgcctgtgaattaagccctaaaggaaaagaacaggcaatggacttaattattcaagatactgatgaaaacacaaatgtgcccgaaattatgccaaagttaccaactgatttagcgggagtttgttcaagcaaggtttatgtgggcaaaaatacatctgaagtcaaagaagatgtggttttaggtaaatcaaatcaggtatgtcaatcttcaggaaatcatttagaaaataaagttactcatggacttgttactgtggaaggtcagttaacatccgatgagagaggcgcacacataatgaacagtacctgtgctgcgatgccaaagctgcatgaaccatatgccagcagtcagtgtatagcaagtccaaactttggaactgtgagtggactcaagccagccagtatgttagagaaaaactgcagtttgcaaacagaactgaataagtcttatgatgtaaaaaacccttctcctttattgatgcaaaaccagaatacgagacagcagatggacacacctatggtgtcctgtggaaatgaacaatttttggataacagttttgagaaagttaaacggagacttgatttagatattgatggtttgcaaaaagaaaactgcccttatgtcataacaagtggaataactgaacaagaaaggcaacatttgccagaaaaaagataccctaagggatctggcttcgttaacaagaataaaatgttaggaactagttccaaagaaagcgaggagttactaaaaagcaagatgttagcttttgaagaaatgcggaagagactagaagaacagcacgcccagcaattatcactactcatagctgagcaggaaagggaacaagaaagactgcaaaaggaaatagaagagcaggagaaaatgttaaaagagaagaaggcaatgacagcggaagcctctgagttggacattaacaatgcagtggaattagaatggagaaaaataagtgactctagtttgctggaaacaatgctgtctcaagcggactcactccatacttcaaattcaaatagttctggtttcaccaattctgccatgcaatatagctttgtttctgcaaacgaagcaccattctacctctggggatcatcaactagtggcttgaccaaactctcagtaacaaggccttttggaagagccaaaactagatggtctcaagtttttagtctggaaatacaagcaaaatttaacaaaataactgcagtggcaaaaggatttcttactcgtagacttatgcagacagataagctgaagcaacttcgacaaactgtaaaagatactatggaattcataagaagttttcagtcagaagcaccattaaagagaggcattgtttcagctcaagatgcttcacttcaggaaagagtgttagctcagttgcgagctgccttgtacggtattcatgacatattctttgtaatggatgcagctgaaagaatgtctattctacatcatgatcgagaagttcgcaaagagaaaatgctcaggcaaatggataaaatgaaaagtccacgagtggctctttcagctgcaacacagaagtctcttgataggaagaaatacatgaaagctgctgaaatgggaatgccaaataagaaatttctggttaaacaaaatccttctgaaacaagagtccttcagccaaaccaaggacagaatgcacctgttcataggctacttagtagacaagggagtatatgcaggaaaaatccaaagaaagcggccaaatgttgcgacaatttaagaagacaacattcattaggataaaatggggggaaggattattattcatgttattttccctgcccaagactttatttaaccctggactccgtttacacagacaaagtgacatcagaaggctgagcacttatctggatcatttggtcagtttggtaattcctgctccacacccctattttcctcttaataatacgtttgggtgaagacaaattagtgtttagtaattgcatcatctctgtgcttacctatacaaacataagtttattttatatgcccagatgtctacagagaccctttttgtaaatgtcaaggacatttggatttacttttacagaatattgaaaagataagacaaattataaataagttctaaaacataaatttaattcatctctgcatagtgatttttgaatttgattcaaagggaaattattgcagaagaatgcctttccctcattttataactttaaaaacttggattaaccactcaatgtccactttctttgacttacagtataaccatgtagccaattgtggcccactaaaatctacagaagttaatgtgggtcaccattttggtcagaagcatacattcctgtcagacaactagttgtctgacagaaatgttaggcttcatgtatgttaccccagtactgttagaaacatttgtactaggttataagatctttctgtgacaggtaacaaatttggggaagacagcacaatcttcttgaatgtagctcttgggaatgcattattacatccatttctgtaacataataatatgttgcatgcagttatattttctatttagtctgtatattttgttcttcatagtctgttttttctagcatgcttgatttaggagagaataaagggctatataataataaatccagatttccggataagaatattgcctggttaaaattctgcattgcttaaagacacccatgtttaagatttttcatcactaacatatccattaaaagtatcaactggccaggcagggtggctcacgcctgtactcccagcattttgtgaggccaaggtgggtggatcacctgaggtcaggagtttgagaccagcctgaccaaacatggcgaaaccccatctgtactgaaaatacaaaaattaggcatggtggtgcatgcctgtagttccagctacttgggaggctgagacaggcgaattgcttgaacctgggaggcagaggttgcagtgagctgagactgtgccattgcactccagtcgggttaacagagcaagacactgtctcaaaaaaaaaaaaaaaaaaaagtatcaaccaacaaatgttaccaagataacgtgacttcatgagggagaatgtcactattaatttatcataccatttccaaaaagggctttgtgcttttcacataaaattgagacagtgtatatttaatctaatttaaattttaaagagatactggtattttgaaaatgcaacctatatatattcttaatatccttttaagaatatggagatgaagattgttttctccaattttctgtgccattttaaatttaactttgacatccagctatagacagaaataataagccaccctgggtgtaaacttgattttctttattgagatgtatcatgtattgaatgagtgaaccagaaaattagaagatggtcaaaaaaagtccaagttaccaattttttaaaatttataggcaaagtatcaaattgtcttcttaatatgataaactgtgctttatcattctgaaaactcaggatacagcttattcatagcattgtgggtctctccagtaagaaagatgctaaaagttttgtgcactttttgtgtgtgtaatgcaaattagttaaaacaaatagttttggagaaagttaaaactagctttagagtaaggatgagaaacttgagtgtttttaatttaaagataaaagcctgtgttttacacattcttttttggtgttcatagcttcttctcatacaggtgccagacactgtttgtgcttttgatggatttttatttatatactttttttgcttatttttactttgagtggaatgttcattaatgtaaattgtatttatttttatacttttattttcactagttttgcttctaggcaaaaagcaaaataaacttttcatcttaaagaaaa

SEQ ID NO: 364531 - DNA, 5602 bp, Homo sapiens
agtgccggccctgagaggtggagtcggggtggcagcggcggcggttgccaggagcccgcgttgcagcctgagatccgtaatatggcggggaggaggaggagaaggcggcggcggaccgagctgcgctctgtcagtaccatttgagccattcgcttcctgacaaggcccgtggcgaggggagaggagctgaaggggccgtgggggatcagtgcctgctgtgtgctgatactgttctgtgtaatggggattcagtgaacaagactgaaaaggtacctgtacttatggcgcttacattttggtggaggaagacagacaaaaatcaaggaaataaacacgataatttcagatagtgtgtgactgtgggaagatggaggagtatgagaagttctgtgaaaaaagtcttgccagaatacaagaagcatcactatccacagagagctttctccctgctcagtctgaaagtatctcacttattcgctttcatggagtggctatcctttctccactgcttaacattgagaaaagaaaggaaatgcaacaagaaaagcagaaagcacttgatgtagaagcaagaaagcaggttaacaggaagaaagctttactgactcgtgtccaggagattcttgacaatgttcaggttagaaaagcacctaatgccagtgattttgatcagtgggagatggaaacagtttactctaattcagaagtcagaaacttgaatgttcctgctacatttccaaatagctttccaagccatacggaacactctactgcagcaaagcttgataagatagctgggattttgccattggataatgaggaccaatgtaaaactgatggaatagacttagctagagattcagaaggatttaattctccgaagcaatgtgatagttccaatattagtcatgtagaaaatgaagcttttccaaagacctcttcagcaaccccacaagaaactcttatttctgatggtcccttctcagtaaatgaacaacaggatctaccacttttggcagaagtcatcccagatccctatgtaatgagtcttcagaatctgatgaaaaagtcaaaggaatatatagaaagagaacaatctagacgcagtctgagaggtagtatgaacagaattgttaatgagagtcatttagacaaagaacatgatgctgttgaagtggctgactgtgtaaaagagaaaggccagttgacaggcaaacactgtgtctcagttattcctgacaaaccaagccttaataaatcaaatgttcttctccaaggtgcttccactcaagcaagcagcatgagtatgccagttttagctagcttttcgaaagtggacatacctatacgaactggccatcccactgttctagagtctaattctgattttaaagttattcccacttttgttaccgaaaataatgttatcaaaagtcttacaggttcatatgccaaattacctagtccagagccaagtatgagtcctaaaatgcaccgaagacgttccaggacatcatcagcgtgtcatatacttataaataacccaataaatgcctgtgaattaagccctaaaggaaaagaacaggcaatggacttaattattcaagatactgatgaaaacacaaatgtgcccgaaattatgccaaagttaccaactgatttagcgggagtttgttcaagcaaggtttatgtgggcaaaaatacatctgaagtcaaagaagatgtggttttaggtaaatcaaatcaggtatgtcaatcttcaggaaatcatttagaaaataaagttactcatggacttgttactgtggaaggtcagttaacatccgatgagagaggcgcacacataatgaacagtacctgtgctgcgatgccaaagctgcatgaaccatatgccagcagtcagtgtatagcaagtccaaactttggaactgtgagtggactcaagccagccagtatgttagagaaaaactgcagtttgcaaacagaactgaataagtcttatgatgtaaaaaacccttctcctttattgatgcaaaaccagaatacgagacagcagatggacacacctatggtgtcctgtggaaatgaacaatttttggataacagttttgagaaagttaaacggagacttgatttagatattgatggtttgcaaaaagaaaactgcccttatgtcataacaagtggaataactgaacaagaaaggcaacatttgccagaaaaaagataccctaagggatctggcttcgttaacaagaataaaatgttaggaactagttccaaagaaagcgaggagttactaaaaagcaagatgttagcttttgaagaaatgcggaagagactagaagaacagcacgcccagcaattatcactactcatagctgagcaggaaagggaacaagaaagactgcaaaaggaaatagaagagcaggagaaaatgttaaaagagaagaaggcaatgacagcggaagcctctgagttggacattaacaatgcagtggaattagaatggagaaaaataagtgactctagtttgctggaaacaatgctgtctcaagcggactcactccatacttcaaattcaaatagttctggtttcaccaattctgccatgcaatatagctttgtttctgcaaacgaagcaccattctacctctggggatcatcaactagtggcttgaccaaactctcagtaacaaggccttttggaagagccaaaactagatggtctcaagtttttagtctggaaatacaagcaaaatttaacaaaataactgcagtggcaaaaggatttcttactcgtagacttatgcagacagataagctgaagcaacttcgacaaactgtaaaagatactatggaattcataagaagttttcagtcagaagcaccattaaagagaggcattgtttcagctcaagatgcttcacttcaggaaagagtgttagctcagttgcgagctgccttgtacggtattcatgacatattctttgtaatggatgcagctgaaagaatgtctattctacatcatgatcgagaagttcgcaaagagaaaatgctcaggcaaatggataaaatgaaaagtccacgagtggctctttcagctgcaacacagaagtctcttgataggaagaaatacatgaaagctgctgaaatgggaatgccaaataagaaatttctggttaaacaaaatccttctgaaacaagagtccttcagccaaaccaaggacagaatgcacctgttcataggctacttagtagacaaggaacccctaagacatcagtgaagggggttgtgcaaaatagacagaagccttcacagagcagagtgcctaacagagtgcctgtttcaggagtatatgcaggaaaaatccaaagaaagcggccaaatgttgcgacaatttaagaagacaacattcattaggataaaatggggggaaggattattattcatgttattttccctgcccaagactttatttaaccctggactccgtttacacagacaaagtgacatcagaaggctgagcacttatctggatcatttggtcagtttggtaattcctgctccacacccctattttcctcttaataatacgtttgggtgaagacaaattagtgtttagtaattgcatcatctctgtgcttacctatacaaacataagtttattttatatgcccagatgtctacagagaccctttttgtaaatgtcaaggacatttggatttacttttacagaatattgaaaagataagacaaattataaataagttctaaaacataaatttaattcatctctgcatagtgatttttgaatttgattcaaagggaaattattgcagaagaatgcctttccctcattttataactttaaaaacttggattaaccactcaatgtccactttctttgacttacagtataaccatgtagccaattgtggcccactaaaatctacagaagttaatgtgggtcaccattttggtcagaagcatacattcctgtcagacaactagttgtctgacagaaatgttaggcttcatgtatgttaccccagtactgttagaaacatttgtactaggttataagatctttctgtgacaggtaacaaatttggggaagacagcacaatcttcttgaatgtagctcttgggaatgcattattacatccatttctgtaacataataatatgttgcatgcagttatattttctatttagtctgtatattttgttcttcatagtctgttttttctagcatgcttgatttaggagagaataaagggctatataataataaatccagatttccggataagaatattgcctggttaaaattctgcattgcttaaagacacccatgtttaagatttttcatcactaacatatccattaaaagtatcaactggccaggcagggtggctcacgcctgtactcccagcattttgtgaggccaaggtgggtggatcacctgaggtcaggagtttgagaccagcctgaccaaacatggcgaaaccccatctgtactgaaaatacaaaaattaggcatggtggtgcatgcctgtagttccagctacttgggaggctgagacaggcgaattgcttgaacctgggaggcagaggttgcagtgagctgagactgtgccattgcactccagtcgggttaacagagcaagacactgtctcaaaaaaaaaaaaaaaaaaaagtatcaaccaacaaatgttaccaagataacgtgacttcatgagggagaatgtcactattaatttatcataccatttccaaaaagggctttgtgcttttcacataaaattgagacagtgtatatttaatctaatttaaattttaaagagatactggtattttgaaaatgcaacctatatatattcttaatatccttttaagaatatggagatgaagattgttttctccaattttctgtgccattttaaatttaactttgacatccagctatagacagaaataataagccaccctgggtgtaaacttgattttctttattgagatgtatcatgtattgaatgagtgaaccagaaaattagaagatggtcaaaaaaagtccaagttaccaattttttaaaatttataggcaaagtatcaaattgtcttcttaatatgataaactgtgctttatcattctgaaaactcaggatacagcttattcatagcattgtgggtctctccagtaagaaagatgctaaaagttttgtgcactttttgtgtgtgtaatgcaaattagttaaaacaaatagttttggagaaagttaaaactagctttagagtaaggatgagaaacttgagtgtttttaatttaaagataaaagcctgtgttttacacattcttttttggtgttcatagcttcttctcatacaggtgccagacactgtttgtgcttttgatggatttttatttatatactttttttgcttatttttactttgagtggaatgttcattaatgtaaattgtatttatttttatacttttattttcactagttttgcttctaggcaaaaagcaaaataaacttttcatcttaaagaaaaaaaaaagtcgacgcggccgcgaatttagtagtagta

SEQ ID NO: 364532 - DNA, 3646 bp, Homo sapiens
agtgccggccctgagaggtggagtcggggtggcagcggcggcggttgccaggagcccgcgttgcagcctgagatccgtaatatggcggggaggaggaggagaaggcggcggcggaccgagctgcgctctgtcagtaccatttgagccattcgcttcctgacaaggcccgtggcgaggggagaggagctgaaggggccgtgggggatcagtgtgactgtgggaagatggaggagtatgagaagttctgtgaaaaaagtcttgccagaatacaagaagcatcactatccacagagagctttctccctgctcagtctgaaagtatctcacttattcgctttcatggagtggctatcctttctccactgaaagcgaggagttactaaaaagcaagatgttagcttttgaagaaatgcggaagagactagaagaacagcacgcccagcaattatcactactcatagctgagcaggaaagggaacaagaaagactgcaaaaggaaatagaagagcaggagaaaatgttaaaagagaagaaggcaatgacagcggaagcctctgagttggacattaacaatgcagtggaattagaatggagaaaaataagtgactctagtttgctggaaacaatgctgtctcaagcggactcactccatacttcaaattcaaatagttctggtttcaccaattctgccatgcaatatagctttgtttctgcaaacgaagcaccattctacctctggggatcatcaactagtggcttgaccaaactctcagtaacaaggccttttggaagagccaaaactagatggtctcaagtttttagtctggaaatacaagcaaaatttaacaaaataactgcagtggcaaaaggatttcttactcgtagacttatgcagacagataagctgaagcaacttcgacaaactgtaaaagatactatggaattcataagaagttttcagtcagaagcaccattaaagagaggcattgtttcagctcaagatgcttcacttcaggaaagagtgttagctcagttgcgagctgccttgtacggtattcatgacatattctttgtaatggatgcagctgaaagaatgtctattctacatcatgatcgagaagttcgcaaagagaaaatgctcaggcaaatggataaaatgaaaagtccacgagtggctctttcagctgcaacacagaagtctcttgataggaagaaatacatgaaagctgctgaaatgggaatgccaaataagaaatttctggttaaacaaaatccttctgaaacaagagtccttcagccaaaccaaggacagaatgcacctgttcataggctacttagtagacaaggaacccctaagacatcagtgaagggggttgtgcaaaatagacagaagccttcacagagcagagtgcctaacagagtgcctgtttcaggagtatatgcaggaaaaatccaaagaaagcggccaaatgttgcgacaatttaagaagacaacattcattaggataaaatggggggaaggattattattcatgttattttccctgcccaagactttatttaaccctggactccgtttacacagacaaagtgacatcagaaggctgagcacttatctggatcatttggtcagtttggtaattcctgctccacacccctattttcctcttaataatacgtttgggtgaagacaaattagtgtttagtaattgcatcatctctgtgcttacctatacaaacataagtttattttatatgcccagatgtctacagagaccctttttgtaaatgtcaaggacatttggatttacttttacagaatattgaaaagataagacaaattataaataagttctaaaacataaatttaattcatctctgcatagtgatttttgaatttgattcaaagggaaattattgcagaagaatgcctttccctcattttataactttaaaaacttggattaaccactcaatgtccactttctttgacttacagtataaccatgtagccaattgtggcccactaaaatctacagaagttaatgtgggtcaccattttggtcagaagcatacattcctgtcagacaactagttgtctgacagaaatgttaggcttcatgtatgttaccccagtactgttagaaacatttgtactaggttataagatctttctgtgacaggtaacaaatttggggaagacagcacaatcttcttgaatgtagctcttgggaatgcattattacatccatttctgtaacataataatatgttgcatgcagttatattttctatttagtctgtatattttgttcttcatagtctgttttttctagcatgcttgatttaggagagaataaagggctatataataataaatccagatttccggataagaatattgcctggttaaaattctgcattgcttaaagacacccatgtttaagatttttcatcactaacatatccattaaaagtatcaactggccaggcagggtggctcacgcctgtactcccagcattttgtgaggccaaggtgggtggatcacctgaggtcaggagtttgagaccagcctgaccaaacatggcgaaaccccatctgtactgaaaatacaaaaattaggcatggtggtgcatgcctgtagttccagctacttgggaggctgagacaggcgaattgcttgaacctgggaggcagaggttgcagtgagctgagactgtgccattgcactccagtcgggttaacagagcaagacactgtctcaaaaaaaaaaaaaaaaaaaagtatcaaccaacaaatgttaccaagataacgtgacttcatgagggagaatgtcactattaatttatcataccatttccaaaaagggctttgtgcttttcacataaaattgagacagtgtatatttaatctaatttaaattttaaagagatactggtattttgaaaatgcaacctatatatattcttaatatccttttaagaatatggagatgaagattgttttctccaattttctgtgccattttaaatttaactttgacatccagctatagacagaaataataagccaccctgggtgtaaacttgattttctttattgagatgtatcatgtattgaatgagtgaaccagaaaattagaagatggtcaaaaaaagtccaagttaccaattttttaaaatttataggcaaagtatcaaattgtcttcttaatatgataaactgtgctttatcattctgaaaactcaggatacagcttattcatagcattgtgggtctctccagtaagaaagatgctaaaagttttgtgcactttttgtgtgtgtaatgcaaattagttaaaacaaatagttttggagaaagttaaaactagctttagagtaaggatgagaaacttgagtgtttttaatttaaagataaaagcctgtgttttacacattcttttttggtgttcatagcttcttctcatacaggtgccagacactgtttgtgcttttgatggatttttatttatatactttttttgcttatttttactttgagtggaatgttcattaatgtaaattgtatttatttttatacttttattttcactagttttgcttctaggcaaaaagcaaaataaacttttcatcttaaagaaaa

SEQ ID NO: 364533 - DNA, 3892 bp, Homo sapiens
agtgccggccctgagaggtggagtcggggtggcagcggcggcggttgccaggagcccgcgttgcagcctgagatccgtaatatggcggggaggaggaggagaaggcggcggcggaccgagctgcgctctgtcagtaccatttgagccattcgcttcctgacaaggcccgtggcgaggggagaggagctgaaggggccgtgggggatcagtgcctgctgtgtgctgatactgttctgtgtaatggggattcagtgaacaagactgaaaaggtacctgtacttatggcgcttacattttggtggaggaagacagacaaaaatcaaggaaataaacacgataatttcagatagtgtgtgactgtgggaagatggaggagtatgagaagttctgtgaaaaaagtcttgccagaatacaagaagcatcactatccacagagagctttctccctgctcagtctgaaagtatctcacttattcgctttcatggagtggctatcctttctccactgcttaacattgagaaaagaaaggaaatgcaacaagaaaagcagaaagcacttgatgtagaagcaagaaagcaggttaacaggaagaaagctttactgactcgtgtccaggagattcttgacaatgttcaggttagaaaagcacctaatgccagtgattttgatcagtgggagatggaaacagtttactctaattcagaagtcagaaacttgaatgttcctgctacatttccaaatagctttccaagccatacggaacactctactgcagcaaagcttgataagatagctgggattttgccattggataatgaggaccaatgtaaaactgatggaatagacttagctagagattcagaaggatttaattctccgaagcaatgtgatagttccaatattagtcatgtagaaaatgaagcttttccaaagacctcttcagcaaccccacaagaaactcttatttctgatggtcccttctcagtaaatgaacaacaggatctaccacttttggcagaagtcatcccagatccctatgtaatgagtcttcagaatctgatgaaaaagtcaaaggaatatatagaaagagaacaatctagacgcagtctgagaggtagtatgaacagaattgttaatgagagtcatttagacaaagaacatgatgctgttgaagtggctgactgtgtaaaagagaaaggccagttgacaggcaaacactgtgtctcagttattcctgacaaaccaagccttaataaatcaaatgttcttctccaaggtgcttccactcaagcaagcagcatgagtatgccagttttagctagcttttcgaaagtggacatacctatacgaactggccatcccactgttctagagtctaattctgattttaaagttattcccacttttgttaccgaaaataatgttatcaaaagtcttacaggttcatatgccaaattacctagtccagagccaagtatgagtcctaaaatgcaccgaagacgttccaggacatcatcagcgtgtcatatacttataaataacccaataaatgcctgtgaattaagccctaaaggaaaagaacaggcaatggacttaattattcaagatactgatgaaaacacaaatgtgcccgaaattatgccaaagttaccaactgatttagcgggagtttgttcaagcaaggtttatgtgggcaaaaatacatctgaagtcaaagaagatgtggttttaggtaaatcaaatcaggtatgtcaatcttcaggaaatcatttagaaaataaagttactcatggacttgttactgtggaaggtcagttaacatccgatgagagaggcgcacacataatgaacagtacctgtgctgcgatgccaaagctgcatgaaccatatgccagcagtcagtgtatagcaagtccaaactttggaactgtgagtggactcaagccagccagtatgttagagaaaaactgcagtttgcaaacagaactgaataagtcttatgatgtaaaaaacccttctcctttattgatgcaaaaccagaatacgagacagcagatggacacacctatggtgtcctgtggaaatgaacaatttttggataacagttttgagaaagttaaacggagacttgatttagatattgatggtttgcaaaaagaaaactgcccttatgtcataacaagtggaataactgaacaagaaaggcaacatttgccagaaaaaagataccctaagggatctggcttcgttaacaagaataaaatgttaggaactagttccaaagaaagcgaggagttactaaaaagcaagatgttagcttttgaagaaatgcggaagagactagaagaacagcacgcccagcaattatcactactcatagctgagcaggaaagggaacaagaaagactgcaaaaggaaatagaagagcaggagaaaatgttaaaagagaagaaggcaatgacagcggaagcctctgagttggacattaacaatgcagtggaattagaatggagaaaaataagtgactctagtttgctggaaacaatgctgtctcaagcggactcactccatacttcaaattcaaatagttctggtttcaccaattctgccatgcaatatagctttgtttctgcaaacgaagcaccattctacctctggggatcatcaactagtggcttgaccaaactctcagtaacaaggccttttggaagagccaaaactagatggtctcaagtttttagtctggaaatacaagcaaaatttaacaaaataactgcagtggcaaaaggatttcttactcgtagacttatgcagacagataagctgaagcaacttcgacaaactgtaaaagatactatggaattcataagaagttttcagtcagaagcaccattaaagagaggcattgtttcagctcaagatgcttcacttcaggaaagagtgttagctcagttgcgagctgccttgtacggtattcatgacatattctttgtaatggatgcagctgaaagaatgtctattctacatcatgatcgagaagttcgcaaagagaaaatgctcaggcaaatggataaaatgaaaagtccacgagtggctctttcagctgcaacacagaagtctcttgataggaagaaatacatgaaaaacaaaaaacaaaaacacaattttgtgcgcgcgcgcgcctctcggcgccctctcgaaagaagctctttctctaaacaccatctccgttttggcgcgcgcgcgcgggcgccccaaatggggcgaaaggtacacactgggggcccaaacaccgcgtggtccccccagagggagaacacccgggggccacagaagaacatcaggggcggtgaggagtctctctcccccacaatttaacaaaaaccgccccccggggggggacacccccgagagcgcgactctcgagagcacacaatctcccccaagagagggcgagtccctctagagggggggccaacataacacggggggagatctctatttaccaagccggagggaagctcccacaacagcgaagaaaccccccgagcaaaataataaaaatataatgacccaccggacagacggggcggagtccacccgcaaacagacaagccaagaacgaaaaccacagacacgaagaaccgaaaaaccccaacacactagcacacgagtcagcagttgataagcaacgaagagcaaaccagccaaccacggtagggagagaagaaacatagccagagcaggacagaacagcaaggggagcccaagaccgaggtacgatagaaagtcaagaaagcaaggatcaataagaaaatacaggagaataggacagacacaaaataccgccgcacaacaaaagcgaaaaaacacaacaacacaaaccagtaa

SEQ ID NO: 364534 - DNA, 3086 bp, Homo sapiens
agtgccggccctgagaggtggagtcggggtggcagcggcggcggttgccaggagcccgcgttgcagcctgagatccgtaatatggcggggaggaggaggagaaggcggcggcggaccgagctgcgctctgtcagtaccatttgagccattcgcttcctgacaaggcccgtggcgaggggagaggagctgaaggggccgtgggggatcagtgcctgctgtgtgctgatactgttctgtgtaatggggattcagtgaacaagactgaaaaggtacctgtacttatggcgcttacattttggtggaggaagacagacaaaaatcaaggaaataaacacgataatttcagatagtgtgtgactgtgggaagatggaggagtatgagaagttctgtgaaaaaagtcttgccagaatacaagaagcatcactatccacagagagctttctccctgctcagtctgaaagtatctcacttattcgctttcatggagtggctatcctttctccactgcttaacattgagaaaagaaaggaaatgcaacaagaaaagcagaaagcacttgatgtagaagcaagaaagcaggttaacaggaagaaagctttactgactcgtgtccaggagattcttgacaatgttcaggttagaaaagcacctaatgccagtgattttgatcagtgggagatggaaacagtttactctaattcagaagtcagaaacttgaatgttcctgctacatttccaaatagctttccaagccatacggaacactctactgcagcaaagcttgataagatagctgggattttgccattggataatgaggaccaatgtaaaactgatggaatagacttagctagagattcagaaggatttaattctccgaagcaatgtgatagttccaatattagtcatgtagaaaatgaagcttttccaaagacctcttcagcaaccccacaagaaactcttatttctgatggtcccttctcagtaaatgaacaacaggatctaccacttttggcagaagtcatcccagatccctatgtaatgagtcttcagaatctgatgaaaaagtcaaaggaatatatagaaagagaacaatctagacgcagtctgagaggtagtatgaacagaattgttaatgagagtcatttagacaaagaacatgatgctgttgaagtggctgactgtgtaaaagagaaaggccagttgacaggcaaacactgtgtctcagttattcctgacaaaccaagccttaataaatcaaatgttcttctccaaggtgcttccactcaagcaagcagcatgagtatgccagttttagctagcttttcgaaagtggacatacctatacgaactggccatcccactgttctagagtctaattctgattttaaagttattcccacttttgttaccgaaaataatgttatcaaaagtcttacaggttcatatgccaaattacctagtccagagccaagtatgagtcctaaaatgcaccgaagacgttccaggacatcatcagcgtgtcatatacttataaataacccaataaatgcctgtgaattaagccctaaaggaaaagaacaggcaatggacttaattattcaagatactgatgaaaacacaaatgtgcccgaaattatgccaaagttaccaactgatttagcgggagtttgttcaagcaaggtttatgtgggcaaaaatacatctgaagtcaaagaagatgtggttttaggtaaatcaaatcaggtatgtcaatcttcaggaaatcatttagaaaataaagttactcatggacttgttactgtggaaggtcagttaacatccgatgagagaggcgcacacataatgaacagtacctgtgctgcgatgccaaagctgcatgaaccatatgccagcagtcagtgtatagcaagtccaaactttggaactgtgagtggactcaagccagccagtatgttagagaaaaactgcagtttgcaaacagaactgaataagtcttatgatgtaaaaaacccttctcctttattgatgcaaaaccagaatacgagacagcagatggacacacctatggtgtcctgtggaaatgaacaatttttggataacagttttgagaaagttaaacggagacttgatttagatattgatggtttgcaaaaagaaaactgcccttatgtcataacaagtggaataactgaacaagaaaggcaacatttgccagaaaaaagataccctaagggatctggcttcgttaacaagaataaaatgttaggaactagttccaaagaaagcgaggagttactaaaaagcaagatgttagcttttgaagaaatgcggaagagactagaagaacagcacgcccagcaattatcactactcatagctgagcaggaaagggaacaagaaagactgcaaaaggaaatagaagagcaggagaaaatgttaaaagagaagaaggcaatgacagcggaagcctctgagttggacattaacaatgcagtggaattagaatggagaaaaataagtgactctagtttgctggaaacaatgctgtctcaagcggactcactccatacttcaaattcaaatagttctggtttcaccaattctgccatgcaatatagctttgtttctgcaaacgaagcaccattctacctctggggatcatcaactagtggcttgaccaaactctcagtaacaaggccttttggaagagccaaaactagatggtctcaagtttttagtctggaaatacaagcaaaatttaacaaaataactgcagtggcaaaaggatttcttactcgtagacttatgcagacagataagctgaagcaacttcgacaaactgtaaaagtaagattcctgtaaatcgtttgtatttcacttctgtcttagtttctatcagtcttgtgacagctgagctaacagattagttcagaacttaaacgctttttagtcactgtaatctaggcagttttagaagtctgattgtttgttgcgggaagtcagggaccccgaatggagggaccagctggagccgcagcaaaggaatataaattgtgaagatttcattttaatatggacatat

SEQ ID NO: 364535 - DNA, 1940 bp, Homo sapiens
gtattttatgatctatttattgatattctaatggttttaagaaggataattttccaaaacctaaatgctacacattttacagtggcaatatcaaccttatcatgagctaaagatttgcaatcagaacattggtagagtgcattgctgagttataacaagtgtctcaggacgaggatatttggtaggtatccttaaatatatagatgcttaccagtaggtttaatagaagatttctgaaaggtagcgcaagtttttatttcattatttttatttttatttttttgagacagagtctcactctgtcatctaggctggagtgcagtggtgcaatcttggcttgctgcaatctccacctcccaggttcaagcgattctcccacctcagcctcccgagtagctgggattacaggcatgcgccaccatgcctggctaatttttgtatttttagtagagacggggtttcgccatgttggccaggctcgtctcgaactcctggcctcaagtgatctgcccgcctcagcctcccaaagtgctgggattacaaatgtgagctactatgcctggtcccaacttcttaaaattaaattttggggaagttcatggagatatttttgacatgtaaaaatagaaaacaaaccatccatagtgtgtgcatatatacacacaaggtttggtttaatatacttgctgtgcactagtcagttttgattcaggttacataagggataaaatatagaaagacattttaaagtttgaaatatgtgctaagtagttagagatttggcagttttgccacatttcaaatgggccaaacattaaaataacttatccatgaatttcaggtttcaaggaaggaggaatatctgactatttttttttgtgtgtgagatttggtctcagctttttggtccatctgaatcctggaagtccccaactctaccagaccaaaagggtgtctctattttttgttgttacttctctgttcttgatgtaatgagttaagtagatgaaagagattaaggtgcagggaagggctcttaaaagtttaatgtttcagctttccatagtcattcatacttgtgaatcttcttcctcttctacttcaaagtagccaaaacttggaaagttcaaattaatctttgggctccaaagagcaattctgaaggattaacaggtttcattctctccagtgggaggtggcctagacaggtgccggttttggggagaggtgagagtacccagatgtgggtgactatttcctgttcttccctgaaagtcaggccagtggtctcgaatcattcccacagcaactgctacaaaagtgactatcttaatcctttggctagatgggatacctcttctaccttttcagaggtgagctgttgagtagtaatgtccgctacaacaccacgctcccggaatggtggttcctaagagcaaagtcagttaatacaatttctccaggtatccagctatctccaggtgtgcggtcctgtgaagcactctaagaactgtaaaaaatatttcatagggtatagaaggcatttgtaatactgttggttcaaatgtgctgacatgtagccagtggaggaagatgtttctttggaagcctgccatctttctgtaacgcaccttcaacctgagataattaagagtcattacgtttcccagtcccatgtcacattgaccagtcctgtggtcctatggctaagcggaggacacggccacaagctgtgagtcatgaaaaggagggtgcaggtgataggcaaagggacccattagccagtttacaatgactggcaactgaccagatagagcttaccgtatgtccatgtagagttgctcatattagtctgtaaataattctatgcatagtgaatgcagcttctgaattattaaactgatgctataaatgtgaactgacaaaacccacttttggtc

SEQ ID NO: 364536 - DNA, 528 bp, Homo sapiens
ttctgaaaacagaaacaaaaacaaaacaataaaaagaaaaagaaaaaaaaatccatcccatcaggaagggcaagtgggaactcaggcacaagctgaagctgatgtccacaggtggaatttcttcatccgaaaagtctctgatctgctttttaaaacattcagctgattgaatgagacccacctagaacaagcaggatcacctctcccacttacagtcagctgattatggattttcatcacatccagaaaatacctccactgggccgggtacggtggctcacgcctgtaatcccagcactctgggaggccgaggcaggtgaatcacctggggtcaggagttcgagaccagcctgtccaacgtggtgaaaccccgtctctactaaaaatacaaaaaagccggcgtgttggtggacgcctgtaattccagctactcgggaggctcagtcaggagaatctcttgaacccgggaggcagagcttgcagtgagctgagattgcaccattacactccagcctgggcaacaagagc

SEQ ID NO: 364537 - DNA, 1283 bp, Homo sapiens
tgtcgggtcccaaaatacgtggtctaaagtcctttgggctcctgccgctgccagcactgatcatatgctcttgaccctggtcgggtggggggatgtctggatacctcctctgtggaaagaactggccacacatccgcagaggtgactcgggctgagaacccaggctcctcctccctttggtgacacgcccctcggtccctcactggcacttctccctccggccacacggcggcgtctcgccatagcgcagcggccgatggtacagcccgctcccccctcgcgctctcggacagtgggtccttccacttgtagaaaagcattgtgggacggaagcctgtcctttcttccttttggtgcgagcttgctgtggtttttgctctgggtcctctgggatggcgcctggctgtggccgcgtggtctctcacgcaggggcgccgggcgggggaacgcggccaccctgagtctggtgagtcgactgcggcggcctgtgtccgaagtgtccggggccgtgaacaagggcagcggcctggcctcaggcctgcgttcccacgtttggaaacggggagcttcgtcgatttgtgtttacatcatcgactatgccagggagttctccagataagcctggttttattttcgtcagtgaaaaggccttaccgtataactgactttatgcttgccctgcccccgtataaaataacttaaaagcagcgtgcctggttacagctgtttccacgtgcggtgctcgtcgggagtgatcacctaccctacaggtggaagatggatgcctgaagtgtagactgctgctagctgaataccatctgggagcataaaggtgacctgaaggatgtccttggtgaggattttgaaaatttgatcttcacaagagttgcctggatcatttgaaatttctgggagtctgaggagtactgacataattacctgctggagtctgtaaatacacatttaagacagtgaggatgtgaataaatatattaatgccaaaaaaaaaaaagactcggactaattctctcatcgagagttccctgggcccggcaggtattggcggggatcgaagccaccggggtcccgggtcccagtacttgagcatagaagaaccgatatcggataaaagtatgacaccgttctttgagggacaagggttgtgtcttacccgaggggaggctcaaaaggttgggaaatcacatgtaaacacccgggtgcctggttgtcaactctgggggcacacgttgcgttatcgcttggaagaccaattgtggttaaac

SEQ ID NO: 364538 - DNA, 695 bp, Homo sapiens
tgtcgggtcccaaaatacgtggtctaaagtcctttgggctcctgccgctgccagcactgatcatatgctcttgaccctggtcgggtggggggatgtctggatacctcctctgtggaaagaactggccacacatccgcagaggtgactcgggctgagaacccaggctcctcctccctttggtgacacgcccctcggtccctcactggcacttctccctccggccacacggcggcgtctcgccatagcgcagcggccgatggtacagcccgctcccccctcgcgctctcggacagtgggtccttccacttgtagaaaagcattgtgggacggaagcctgtcctttcttccttttggtgcgagcttgctgtggtttttgctctgggtcctctgggatggcgcctggctgtggccgcgtggtctctcacgcaggggcgccgggcgggggaacgcggccaccctgagtctggtggaagatggatgcctgaagtgtagactgctgctagctgaataccatctgggagcataaaggtgacctgaaggatgtccttggtgaggattttgaaaatttgatcttcacaagagttgcctggatcatttgaaatttctgggagtctgaggagtactgacataattacctgctggagtctgtaaatacacatttaagacagtgaggatgtgaataaatatattaatgc

SEQ ID NO: 364539 - DNA, 3870 bp, Homo sapiens
  misc_feature (3423)..(3423): n is a, c, g, or t
  misc_feature (3818)..(3819): n is a, c, g, or t
  misc_feature (3853)..(3853): n is a, c, g, or t
  misc_feature (3855)..(3858): n is a, c, g, or t
tgtcgggtcccaaaatacgtggtctaaagtcctttgggctcctgccgctgccagcactgatcatatgctcttgaccctggtcgggtggggggatgtctggatacctcctctgtggaaagaactggccacacatccgcagaggtgactcgggctgagaacccaggctcctcctccctttggtgacacgcccctcggtccctcactggcacttctccctccggccacacggcggcgtctcgccatagcgcagcggccgatggtacagcccgctcccccctcgcgctctcggacagtgggtccttccacttgtagaaaagcattgtgggacggaagcctgtcctttcttccttttggtgcgagcttgctgtggtttttgctctgggtcctctgggatggcgcctggctgtggccgcgtggtctctcacgcaggggcgccgggcgggggaacgcggccaccctgagtctggtgagtcgactgcggcggcctgtgtccgaagtgtccggggccgtgaacaagggcagcggcctggcctcaggcctgcgttcccacgtttggaaacggggagcttcgtcgatttgtgtttacatcatcgactatgccagggagttctccagataagcctggttttattttcgtcagtgaaaaggccttaccgtataactgactttatgcttgccctgcccccgtataaaataacttaaaagcagcgtgcctggttacagctgtttccacgtgcggtgctcgtcgggagtgatcacctaccctacaggtggaagatggatgcctgaagtgtagactgctgctagctgaataccatctgggagcataaaggtgacctgaaggatgtccttggtgaggattttgaaaatttgatcttcacaagagttgcctggatcatttgaaatttctgggagtctgaggagtactgacataattacctgctggagtctgtaaatacacatttaagacagtgaggatgtgaataaatatattaatgcactttggcatttgtgttttaagtgattaactgccagaaacagctatttctaaaaagttataagggaggaggggttcttttttgatcagtattcactgctgtcaccataattaatagccttaaaatagcttgtgtttggcccaaagagaaatgtactttcttccagtgactcaaaaatcgtggctagaactagactgatttctagtgacaggtgtgctttactgcactcaatgcgtatttttcctccaactaaattgtacatttaatgttgccatatcttctgcctttgctttgcaggaaacgacaaataatgtatagaggtattcaaaaaatttattgaaagcactgtactaggagctgagaacacgatgatgagcacaacacagttcttccctttggaaacatagataagtggagggaatgtcatcacaaatgtaaaacttcactatgagatgagttccgtgataggattttcttagggaaacctgagaaagagttgagactaaaggtatgtgtcatatttttcacaaggcaaaactgggggaatgacatatacagaggcttgggctagaaaaaagataccgttagtccacttacttttgagacagttttggctgctttccctcttcagtgccctgttttagaactgagtccttactgaggcttgtaagatggctattatgggaggtgagagtgttacaaaatgaggctgaagaggtaggtaaagaagccagaccacttcaggctccctctggctttattaaagcaagataaatccatggtggaaaatcagatttgcaagaaaaggtagttgaactaggttgcttattgttgtctagacaagagaccagcttggactagtaaaattagtgaaataagatcgtttatagttggatgacagagccaactagacgtggtaatagtggaggtgtccataactgctaggtgtccagcttgcacactgatgagcataatgaccctagattcagctggggagcagcatttaaacagctgaatttttaaattacctttgagaaacccaaatggtctttttgcagtagcacattactcagtagtctaaactacagaaataaaccttaaggccatgggtataaatgagatctgctggtggtagaggaagagggcctagggtctgaagtttgagaaactccactaattaatggcaaggtaaagcatgataagccagaaaggatggtcagtggtaggagcaaaataggattatattaaagaagcaaaagaatgtcctaaaaattctccctgggattaagtaacacagtgattgatattagtggagtagagggaaagatccatgttagagatagcttaagatagggattagatgaattgagggcaatgactaaagatactgcttgcaagaaaactggctgagaatgagaggaaaatcttagttgcttggcgggagggggtttgtggttgtgaaagatagttttgtttaatcttagtcttaaatttaaaaccaagtagcaaggatctagctgagagaataattgaatacattaatataggaggacagacaaagatcctgaaaaggctgggagaagagcatccaaagcacaggtggagagacaaaaaggttagggctgctggcagctgtggagagaactgtacgtggtaagggggagatataagatgtcctgcataagtattttccctgtagattgcaaagtcatctatggagaggaaaggtccaaaatagtcactggggagagcaggtgaattagatggccaagcagggtggatggatcatttgaggtttggggtgacagatcaactgagatccacttacacttctgaaaacgcaagaacactttagaaattaacaacacttaaagctttttacatcatttgtaaataactggtggaacttaacaccacaaaataaagtattataaagaactttatatgaataaaaatatatgcagtctgaaagtgatgcctcagtccttttgcatctgggcactagttgagaaccagcccagccctgggaagacgtcctcccacttgtactattgcacagcaggctagctgcagttcagaattccagaatgttcatcagatgcatctggtcttggttgtggtggacacagacacaagatagaaatgaatgattgctatcctgttccagaaatgaaaatgtggtatcaagtgaatttttacaaaatacttattcttccagttaaaacaaaaaggtccttcagcacaactgtgctgtagttaaaccatggcctataatcccagcactttgggaggctgaggcaggcggatcacttgaggtcaggagttcgagaccagcctccaacatggcaaagccctgtctctactaaaaatacaaaaagaattagccgggtgttgtggtgcacgcctgtaatcccagctgctcggnagcctgagacaggagaatcgcttaacccagtaagtggaggctgcggtgagctgacacggtgccgctgcactccagcctgggcgacagagtgataacatctcaaaaaaaaaaaaaaaagaagcaaaagataatgtattttctcatgctgaagaaatacttgcaggtctgagatttgaattaagatacctatttcacagtttcaaaagtaccagtggcgcacacaaccttcccacccctacccttgacccttcatcaggatcaagtctctgtcttgaggcgggaagcttgtatagtttttattgtttttgctgtgtgttttccagccaggttgtttgtagatgtctgaggtttttcttccatcaggctatctttagacccattgttttccctgaagnntttttttgttttttttgtccaaccacacaacacncnnnnaatatttacttt

SEQ ID NO: 364540 - DNA, 3345 bp, Homo sapiens
tgtcgggtcccaaaatacgtggtctaaagtcctttgggctcctgccgctgccagcactgatcatatgctcttgaccctggtcgggtggggggatgtctggatacctcctctgtggaaagaactggccacacatccgcagaggtgactcgggctgagaacccaggctcctcctccctttggtgacacgcccctcggtccctcactggcacttctccctccggccacacggcggcgtctcgccatagcgcagcggccgatggtacagcccgctcccccctcgcgctctcggacagtgggtccttccacttgtagaaaagcattgtgggacggaagcctgtcctttcttccttttggtgcgagcttgctgtggtttttgctctgggtcctctgggatggcgcctggctgtggccgcgtggtctctcacgcaggggcgccgggcgggggaacgcggccaccctgagtctggtgagtcgactgcggcggcctgtgtccgaagtgtccggggccgtgaacaagggcagcggcctggcctcaggcctgcgttcccacgtttggaaacggggagcttcgtcgatttgtgtttacatcatcgactatgccagggagttctccagataagcctggttttattttcgtcagtgaaaaggccttaccgtataactgactttatgcttgccctgcccccgtataaaataacttaaaagcagcgtgcctggttacagctgtttccacgtgcggtgctcgtcgggagtgatcacctaccctacaggtggaagatggatgcctgaagtgtagactgctgctagctgaataccatctgggagcataaaggtgacctgaaggatgtccttggtgaggattttgaaaatttgatcttcacaagagttgcctggatcatttgaaatttctgggagtctgaggagtactgacataattacctgctggagtctgtaaatacacatttaagacagtgaggatgtgaataaatatattaatgcactttggcatttgtgttttaagtgattaactgccagaaacagctatttctaaaaagttataagggaggaggggttcttttttgatcagtattcactgctgtcaccataattaatagccttaaaatagcttgtgtttggcccaaagagaaatgtactttcttccagtgactcaaaaatcgtggctagaactagactgatttctagtgacaggtgtgctttactgcactcaatgcgtatttttcctccaactaaattgtacatttaatgttgccatatcttctgcctttgctttgcaggaaacgacaaataatgtatagaggtattcaaaaaatttattgaaagcactgtactaggagctgagaacacgatgatgagcacaacacagttcttccctttggaaacatagataagtggagggaatgtcatcacaaatgtaaaacttcactatgagatgagttccgtgataggattttcttagggaaacctgagaaagagttgagactaaaggtatgtgtcatatttttcacaaggcaaaactgggggaatgacatatacagaggcttgggctagaaaaaagataccgttagtccacttacttttgagacagttttggctgctttccctcttcagtgccctgttttagaactgagtccttactgaggcttgtaagatggctattatgggaggtgagagtgttacaaaatgaggctgaagaggtaggtaaagaagccagaccacttcaggctccctctggctttattaaagcaagataaatccatggtggaaaatcagatttgcaagaaaaggtagttgaactaggttgcttattgttgtctagacaagagaccagcttggactagtaaaattagtgaaataagatcgtttatagttggatgacagagccaactagacgtggtaatagtggaggtgtccataactgctaggtgtccagcttgcacactgatgagcataatgaccctagattcagctggggagcagcatttaaacagctgaatttttaaattacctttgagaaacccaaatggtctttttgcagtagcacattactcagtagtctaaactacagaaataaaccttaaggccatgggtataaatgagatctgctggtggtagaggaagagggcctagggtctgaagtttgagaaactccactaattaatggcaaggtaaagcatgataagccagaaaggatggtcagtggtaggagcaaaataggattatattaaagaagcaaaagaatgtcctaaaaattctccctgggattaagtaacacagtgattgatattagtggagtagagggaaagatccatgttagagatagcttaagatagggattagatgaattgagggcaatgactaaagatactgcttgcaagaaaactggctgagaatgagaggaaaatcttagttgcttggcgggagggggtttgtggttgtgaaagatagttttgtttaatcttagtcttaaatttaaaaccaagtagcaaggatctagctgagagaataattgaatacattaatataggaggacagacaaagatcctgaaaaggctgggagaagagcatccaaagcacaggtggagagacaaaaaggttagggctgctggcagctgtggagagaactgtacgtggtaagggggagatataagatgtcctgcataagtattttccctgtagattgcaaagtcatctatggagaggaaaggtccaaaatagtcactggggagagcaggtgaattagatggccaagcagggtggatggatcatttgaggtttggggtgacagatcaactgagatccacttacacttctgaaaacgcaagaacactttagaaattaacaacacttaaagctttttacatcatttgtaaataactggtggaacttaacaccacaaaataaagtattataaagaactttatatgaataaaaatatatgcagtctgaaagtgatgcctcagtccttttgcatctgggcactagttgagaaccagcccagccctgggaagacgtcctcccacttgtactattgcacagcaggctagctgcagttcagaattccagaatgttcatcagatgcatctggtcttggttgtggtggacacagacacaagatagaaatgaatgattgctatcctgttccagaaatgaaaatgtggtatcaagtgaatttttacaaaatacttattcttccagttaaaacaaaaaggtccttcagcacaactgtgctgtagttaaaccatggcctataatcccagcactttgggaggctgggattacaggcatgtgccaccacgcccagctaattttgtatttttagtagag

SEQ ID NO: 364541 - DNA, 999 bp, Homo sapiens
tgtcgggtcccaaaatacgtggtctaaagtcctttgggctcctgccgctgccagcactgatcatatgctcttgaccctggtcgggtggggggatgtctggatacctcctctgtggaaagaactggccacacatccgcagaggtgactcgggctgagaacccaggctcctcctccctttggtgacacgcccctcggtccctcactggcacttctccctccggccacacggcggcgtctcgccatagcgcagcggccgatggtacagcccgctcccccctcgcgctctcggacagtgggtccttccacttgtagaaaagcattgtgggacggaagcctgtcctttcttccttttggtgcgagcttgctgtggtttttgctctgggtcctctgggatggcgcctggctgtggccgcgtggtctctcacgcaggggcgccgggcgggggaacgcggccaccctgagtctggtgagtcgactgcggcggcctgtgtccgaagtgtccggggccgtgaacaagggcagcggcctggcctcaggcctgcgttcccacgtttggaaacggggagcttcgtcgatttgtgtttacatcatcgactatgccagggagttctccagataagcctggttttattttcgtcagtgaaaaggccttaccgtataactgactttatgcttgccctgcccccgtataaaataacttaaaagcagcgtgcctggttacagctgtttccacgtgcggtgctcgtcgggagtgatcacctaccctacaggtggaagatggatgcctgaagtgtagactgctgctagctgaataccatctgggagcataaaggtgacctgaaggatgtccttggtgaggattttgaaaatttgatcttcacaagagttgcctggatcatttgaaatttctgggagtctgaggagtactgacataattacctgctggagtctgtaaatacacatttaagacagtgaggatgtgaataaatatattaatgc

SEQ ID NO: 364542 - DNA, 5102 bp, Homo sapiens
  misc_feature (3423)..(3423): n is a, c, g, or t
  misc_feature (4729)..(4729): n is a, c, g, or t
tgtcgggtcccaaaatacgtggtctaaagtcctttgggctcctgccgctgccagcactgatcatatgctcttgaccctggtcgggtggggggatgtctggatacctcctctgtggaaagaactggccacacatccgcagaggtgactcgggctgagaacccaggctcctcctccctttggtgacacgcccctcggtccctcactggcacttctccctccggccacacggcggcgtctcgccatagcgcagcggccgatggtacagcccgctcccccctcgcgctctcggacagtgggtccttccacttgtagaaaagcattgtgggacggaagcctgtcctttcttccttttggtgcgagcttgctgtggtttttgctctgggtcctctgggatggcgcctggctgtggccgcgtggtctctcacgcaggggcgccgggcgggggaacgcggccaccctgagtctggtgagtcgactgcggcggcctgtgtccgaagtgtccggggccgtgaacaagggcagcggcctggcctcaggcctgcgttcccacgtttggaaacggggagcttcgtcgatttgtgtttacatcatcgactatgccagggagttctccagataagcctggttttattttcgtcagtgaaaaggccttaccgtataactgactttatgcttgccctgcccccgtataaaataacttaaaagcagcgtgcctggttacagctgtttccacgtgcggtgctcgtcgggagtgatcacctaccctacaggtggaagatggatgcctgaagtgtagactgctgctagctgaataccatctgggagcataaaggtgacctgaaggatgtccttggtgaggattttgaaaatttgatcttcacaagagttgcctggatcatttgaaatttctgggagtctgaggagtactgacataattacctgctggagtctgtaaatacacatttaagacagtgaggatgtgaataaatatattaatgcactttggcatttgtgttttaagtgattaactgccagaaacagctatttctaaaaagttataagggaggaggggttcttttttgatcagtattcactgctgtcaccataattaatagccttaaaatagcttgtgtttggcccaaagagaaatgtactttcttccagtgactcaaaaatcgtggctagaactagactgatttctagtgacaggtgtgctttactgcactcaatgcgtatttttcctccaactaaattgtacatttaatgttgccatatcttctgcctttgctttgcaggaaacgacaaataatgtatagaggtattcaaaaaatttattgaaagcactgtactaggagctgagaacacgatgatgagcacaacacagttcttccctttggaaacatagataagtggagggaatgtcatcacaaatgtaaaacttcactatgagatgagttccgtgataggattttcttagggaaacctgagaaagagttgagactaaaggtatgtgtcatatttttcacaaggcaaaactgggggaatgacatatacagaggcttgggctagaaaaaagataccgttagtccacttacttttgagacagttttggctgctttccctcttcagtgccctgttttagaactgagtccttactgaggcttgtaagatggctattatgggaggtgagagtgttacaaaatgaggctgaagaggtaggtaaagaagccagaccacttcaggctccctctggctttattaaagcaagataaatccatggtggaaaatcagatttgcaagaaaaggtagttgaactaggttgcttattgttgtctagacaagagaccagcttggactagtaaaattagtgaaataagatcgtttatagttggatgacagagccaactagacgtggtaatagtggaggtgtccataactgctaggtgtccagcttgcacactgatgagcataatgaccctagattcagctggggagcagcatttaaacagctgaatttttaaattacctttgagaaacccaaatggtctttttgcagtagcacattactcagtagtctaaactacagaaataaaccttaaggccatgggtataaatgagatctgctggtggtagaggaagagggcctagggtctgaagtttgagaaactccactaattaatggcaaggtaaagcatgataagccagaaaggatggtcagtggtaggagcaaaataggattatattaaagaagcaaaagaatgtcctaaaaattctccctgggattaagtaacacagtgattgatattagtggagtagagggaaagatccatgttagagatagcttaagatagggattagatgaattgagggcaatgactaaagatactgcttgcaagaaaactggctgagaatgagaggaaaatcttagttgcttggcgggagggggtttgtggttgtgaaagatagttttgtttaatcttagtcttaaatttaaaaccaagtagcaaggatctagctgagagaataattgaatacattaatataggaggacagacaaagatcctgaaaaggctgggagaagagcatccaaagcacaggtggagagacaaaaaggttagggctgctggcagctgtggagagaactgtacgtggtaagggggagatataagatgtcctgcataagtattttccctgtagattgcaaagtcatctatggagaggaaaggtccaaaatagtcactggggagagcaggtgaattagatggccaagcagggtggatggatcatttgaggtttggggtgacagatcaactgagatccacttacacttctgaaaacgcaagaacactttagaaattaacaacacttaaagctttttacatcatttgtaaataactggtggaacttaacaccacaaaataaagtattataaagaactttatatgaataaaaatatatgcagtctgaaagtgatgcctcagtccttttgcatctgggcactagttgagaaccagcccagccctgggaagacgtcctcccacttgtactattgcacagcaggctagctgcagttcagaattccagaatgttcatcagatgcatctggtcttggttgtggtggacacagacacaagatagaaatgaatgattgctatcctgttccagaaatgaaaatgtggtatcaagtgaatttttacaaaatacttattcttccagttaaaacaaaaaggtccttcagcacaactgtgctgtagttaaaccatggcctataatcccagcactttgggaggctgaggcaggcggatcacttgaggtcaggagttcgagaccagcctccaacatggcaaagccctgtctctactaaaaatacaaaaagaattagccgggtgttgtggtgcacgcctgtaatcccagctgctcggnagcctgagacaggagaatcgcttaacccagtaagtggaggctgcggtgagctgacacggtgccgctgcactccagcctgggcgacagagtgataacatctcaaaaaaaaaaaaaaaagaagcaaaagataatgtattttctcatgctgaagaaatacttgcaggtctgagatttgaattaagatacctatttcacagtttcaaaagtaccagtggcgcacacaaccttcccacccctacccttgacccttcatcaggatcaagtctctgtcttgaggcgggaagcttgtatagtttttattgtttttgctgtgtgttttccagccaggttgtttgtagatgtctgaggtttttcttccatcaggctatctttagacccatttcttctctaaaataaaatacatttgaaaaatgtagaaagattcagaagaaaacagccaaatgaagtattttaattacatcagaaaccaagctgctcttaaatttaagatactgagttaattcaaaagtttcataataccaaaagctattcaataaatgttccctctaaatagctgtgcaaaataaagtttgtatttaaactttaatatacaaagttagtctgacatttacatgcataacgattttattcatgaatattaggcataattcacccaaatcagtgtcattacttttgttaacaattcccaaaccaggctctcaacctcactcttccaaacaggatagtgatggagacttggaggcaatttataatcccctgattatattttcagtagtcaatgaatggaacaatgtcttgtgagcccctatcacttgtctcatacggagaaacagggcagctcattaccagagcctgggcaccacatccactagtttgtaaaacttaggttttacacatctcccatcatcacgggtggaggctctgagaatgacactaactcacaactactacttcttatgcgaacccctcctcctcttacttccaaggatggtctaacattgtcagtgtatcaggctggcaagcatatttccttccccaaatgtatattcccataaataatgggctataccgtcccaatctattttgagatttgtttgagctaaaaataaataaatccctcttaaaatgcagctacctttaatctgttcctatgactggcttaatttgttttactgacattcaaaaagcactgatggaataattattctgcctatcatgggaagcatgaacccatctatttgggatggaagatttctagatagccagaggtgggaagagaacaccagtgaatgtgagaggagaatanagcagaagaattaccagaaaaaaagtgctaggagaggacctgaaataagtactatgttgtaagtttgtctaggattgaatctgtccactctgcagaccttaagaaattaagttgctattcttccccattcttagcagcctttgcgtgaaaaggcaaggtgaggtgtaaggcaggtcactgccagaactctggtggcattgtggtggaaattagaacttaaagttgtaccttaaaaatgtacctttccagcttccactggtcactccagccccttctccgcttggcagccagatgagtggcttccttttagcacttggaataaaacagtaagatccaaacgcttcccacagcctttaagtccctgtgttatctg

SEQ ID NO: 364543 - DNA, 5477 bp, Homo sapiens
  misc_feature (3798)..(3798): n is a, c, g, or t
  misc_feature (5104)..(5104): n is a, c, g, or t
tgtcgggtcccaaaatacgtggtctaaagtcctttgggctcctgccgctgccagcactgatcatatgctcttgaccctggtcgggtggggggatgtctggatacctcctctgtggaaagaactggccacacatccgcagaggtgactcgggctgagaacccaggctcctcctccctttggtgacacgcccctcggtccctcactggcacttctccctccggccacacggcggcgtctcgccatagcgcagcggccgatggtacagcccgctcccccctcgcgctctcggacagtgggtccttccacttgtagaaaagcattgtgggacggaagcctgtcctttcttccttttggtgcgagcttgctgtggtttttgctctgggtcctctgggatggcgcctggctgtggccgcgtggtctctcacgcaggggcgccgggcgggggaacgcggccaccctgagtctggtgagtcgactgcggcggcctgtgtccgaagtgtccggggccgtgaacaagggcagcggcctggcctcaggcctgcgttcccacgtttggaaacggggagcttcgtcgatttgtgtttacatcatcgactatgccagggagttctccagataagcctggttttattttcgtcagtgaaaaggccttaccgtataactgactttatgcttgccctgcccccgtataaaataacttaaaagcagcgtgcctggttacagctgtttccacgtgcggtgctcgtcgggagtgatcacctaccctacaggtggaagatggatgcctgaagtgtagactgctgctagctgaataccatctgggagcataaaggtgacctgaaggtagggtgatatgtcttaaagcactttgtaatgggaatttttatcaccttttaaattggggttccttctctagtgagttttaatgtcagtggtacattcgtagtgttgctctgtctgtagctattaaggtgagttaataaatgggatagcctccacagcttatttttgggaaggttttgctgatacttcctgagaagcccagggaaataaatacgcatagtactggcattctgcatctctttaagatttgtttttatgtgtagtaattgagttttttaaaagcttgtgaaatcgcaggcatattaccaagttcttgattaaaatgtaatacaaaaatatttgctgtcgaattgagtactttattttttctcttaggatgtccttggtgaggattttgaaaatttgatcttcacaagagttgcctggatcatttgaaatttctgggagtctgaggagtactgacataattacctgctggagtctgtaaatacacatttaagacagtgaggatgtgaataaatatattaatgcactttggcatttgtgttttaagtgattaactgccagaaacagctatttctaaaaagttataagggaggaggggttcttttttgatcagtattcactgctgtcaccataattaatagccttaaaatagcttgtgtttggcccaaagagaaatgtactttcttccagtgactcaaaaatcgtggctagaactagactgatttctagtgacaggtgtgctttactgcactcaatgcgtatttttcctccaactaaattgtacatttaatgttgccatatcttctgcctttgctttgcaggaaacgacaaataatgtatagaggtattcaaaaaatttattgaaagcactgtactaggagctgagaacacgatgatgagcacaacacagttcttccctttggaaacatagataagtggagggaatgtcatcacaaatgtaaaacttcactatgagatgagttccgtgataggattttcttagggaaacctgagaaagagttgagactaaaggtatgtgtcatatttttcacaaggcaaaactgggggaatgacatatacagaggcttgggctagaaaaaagataccgttagtccacttacttttgagacagttttggctgctttccctcttcagtgccctgttttagaactgagtccttactgaggcttgtaagatggctattatgggaggtgagagtgttacaaaatgaggctgaagaggtaggtaaagaagccagaccacttcaggctccctctggctttattaaagcaagataaatccatggtggaaaatcagatttgcaagaaaaggtagttgaactaggttgcttattgttgtctagacaagagaccagcttggactagtaaaattagtgaaataagatcgtttatagttggatgacagagccaactagacgtggtaatagtggaggtgtccataactgctaggtgtccagcttgcacactgatgagcataatgaccctagattcagctggggagcagcatttaaacagctgaatttttaaattacctttgagaaacccaaatggtctttttgcagtagcacattactcagtagtctaaactacagaaataaaccttaaggccatgggtataaatgagatctgctggtggtagaggaagagggcctagggtctgaagtttgagaaactccactaattaatggcaaggtaaagcatgataagccagaaaggatggtcagtggtaggagcaaaataggattatattaaagaagcaaaagaatgtcctaaaaattctccctgggattaagtaacacagtgattgatattagtggagtagagggaaagatccatgttagagatagcttaagatagggattagatgaattgagggcaatgactaaagatactgcttgcaagaaaactggctgagaatgagaggaaaatcttagttgcttggcgggagggggtttgtggttgtgaaagatagttttgtttaatcttagtcttaaatttaaaaccaagtagcaaggatctagctgagagaataattgaatacattaatataggaggacagacaaagatcctgaaaaggctgggagaagagcatccaaagcacaggtggagagacaaaaaggttagggctgctggcagctgtggagagaactgtacgtggtaagggggagatataagatgtcctgcataagtattttccctgtagattgcaaagtcatctatggagaggaaaggtccaaaatagtcactggggagagcaggtgaattagatggccaagcagggtggatggatcatttgaggtttggggtgacagatcaactgagatccacttacacttctgaaaacgcaagaacactttagaaattaacaacacttaaagctttttacatcatttgtaaataactggtggaacttaacaccacaaaataaagtattataaagaactttatatgaataaaaatatatgcagtctgaaagtgatgcctcagtccttttgcatctgggcactagttgagaaccagcccagccctgggaagacgtcctcccacttgtactattgcacagcaggctagctgcagttcagaattccagaatgttcatcagatgcatctggtcttggttgtggtggacacagacacaagatagaaatgaatgattgctatcctgttccagaaatgaaaatgtggtatcaagtgaatttttacaaaatacttattcttccagttaaaacaaaaaggtccttcagcacaactgtgctgtagttaaaccatggcctataatcccagcactttgggaggctgaggcaggcggatcacttgaggtcaggagttcgagaccagcctccaacatggcaaagccctgtctctactaaaaatacaaaaagaattagccgggtgttgtggtgcacgcctgtaatcccagctgctcggnagcctgagacaggagaatcgcttaacccagtaagtggaggctgcggtgagctgacacggtgccgctgcactccagcctgggcgacagagtgataacatctcaaaaaaaaaaaaaaaagaagcaaaagataatgtattttctcatgctgaagaaatacttgcaggtctgagatttgaattaagatacctatttcacagtttcaaaagtaccagtggcgcacacaaccttcccacccctacccttgacccttcatcaggatcaagtctctgtcttgaggcgggaagcttgtatagtttttattgtttttgctgtgtgttttccagccaggttgtttgtagatgtctgaggtttttcttccatcaggctatctttagacccatttcttctctaaaataaaatacatttgaaaaatgtagaaagattcagaagaaaacagccaaatgaagtattttaattacatcagaaaccaagctgctcttaaatttaagatactgagttaattcaaaagtttcataataccaaaagctattcaataaatgttccctctaaatagctgtgcaaaataaagtttgtatttaaactttaatatacaaagttagtctgacatttacatgcataacgattttattcatgaatattaggcataattcacccaaatcagtgtcattacttttgttaacaattcccaaaccaggctctcaacctcactcttccaaacaggatagtgatggagacttggaggcaatttataatcccctgattatattttcagtagtcaatgaatggaacaatgtcttgtgagcccctatcacttgtctcatacggagaaacagggcagctcattaccagagcctgggcaccacatccactagtttgtaaaacttaggttttacacatctcccatcatcacgggtggaggctctgagaatgacactaactcacaactactacttcttatgcgaacccctcctcctcttacttccaaggatggtctaacattgtcagtgtatcaggctggcaagcatatttccttccccaaatgtatattcccataaataatgggctataccgtcccaatctattttgagatttgtttgagctaaaaataaataaatccctcttaaaatgcagctacctttaatctgttcctatgactggcttaatttgttttactgacattcaaaaagcactgatggaataattattctgcctatcatgggaagcatgaacccatctatttgggatggaagatttctagatagccagaggtgggaagagaacaccagtgaatgtgagaggagaatanagcagaagaattaccagaaaaaaagtgctaggagaggacctgaaataagtactatgttgtaagtttgtctaggattgaatctgtccactctgcagaccttaagaaattaagttgctattcttccccattcttagcagcctttgcgtgaaaaggcaaggtgaggtgtaaggcaggtcactgccagaactctggtggcattgtggtggaaattagaacttaaagttgtaccttaaaaatgtacctttccagcttccactggtcactccagccccttctccgcttggcagccagatgagtggcttccttttagcacttggaataaaacagtaagatccaaacgcttcccacagcctttaagtccctgtgttatctg

SEQ ID NO: 364544 - DNA, 530 bp, Homo sapiens
gccacgtgaccctgagcgggacgacggcaggggagggcgggggctccggccggctccgcagcgccgcgcaggcgccccagggccacgccgaaccgagcccctcctgctccgtctaggagtcaaaatggcggcgaggggaacctggagcagtcccggagcctgagccactgacaggagaggagagggcggcggcggcggtgggaggaggatggccgggggtgctggcgccggtgcggacggcggtgctggtggcggcggcggcggaggcgacggcagcggtcccagcggcagcagcagcggcgggaggagcctccggggtgagtgtcccttggtgtctctgggctgtggagccgaggctgtgtccggtgttggcgcggggcgtccgggagaggaaggggctgttcttaggcgtgggggcgccggggctggggccaagccgccgcgggaggcgctggggcgccgggcggggaggggccagtcgtccgtctggggctgaggcgcggcggcgccggactggccggtctcccgct

SEQ ID NO: 364545 - DNA, 8544 bp, Homo sapiens
gccacgtgaccctgagcgggacgacggcaggggagggcgggggctccggccggctccgcagcgccgcgcaggcgccccagggccacgccgaaccgagcccctcctgctccgtctaggagtcaaaatggcggcgaggggaacctggagcagtcccggagcctgagccactgacaggagaggagagggcggcggcggcggtgggaggaggatggccgggggtgctggcgccggtgcggacggcggtgctggtggcggcggcggcggaggcgacggcagcggtcccagcggcagcagcagcggcgggaggagcctccgggaaatggatgaaaagaggctgctggatccagggttgaaggttcataaaggcctctgggattatactctgaagaacccgcagacggaatgcctgagtgactgaagaaaatgggtgctaatgcatctaattatcctcattcatgttccccgagggtagggggaaattcacaggcccaacagacttttatagggacctcatcctattctcagcaaggctatggttgcgaatcaaagttgtatagccttgaccatggccatgagaaaccacaagacaaaaaaaagagaacctctggtcttgccaccctcaaaaagaagtttattaagcgtcggaaatctaataggtctgccgatcatgccaagcagatgcgagaactcctctctgggtgggatgttagagatgtcaatgcattagtggaggaatatgagggaacatcagcattaaaggagctttctctacaagccagtttggctagaccagaagcccggacattgcagaaagatatggctgatctttatgagtacaagtattgtactgatgtagacttaatatttcaagaaacttgttttcctgttcatcgtgccattttggcagcaaggtgtccattttttaaaacactgctttcttcctcaccagagtatggggcagagataataatggacatcaatacagctggtattgatatgcccatgttttctgctttgttacactacctttatacaggagagtttggaatggaggactcaaggtttcaaaatgtcgatatccttgttcagcttagtgaagaatttggaacaccaaattcccttgatgtagatatgcgtggactctttgattacatgtgttattatgatgtcgtccttagtttttcttcagactctgaactggttgaagcttttggtggaaatcagaactgtttagatgaagagctcaaagcccacaaggctgttatttctgcacggtccccattttttcgaaatttattacaaaggaggatacgaactggtgaagaaatcacagaccgaactttgaggactcccacaagaattatattagatgagtccattataccaaaaaaatatgcaacagtgatattacactgtatgtataccgacgtggtggacctctctgttttgcactgtagcccctctgtggggagtctcagtgaagttcaggctctcgtcgcagggaagccaaacatgaccagggcagaagaagccatggaactttaccacatagcactgttcttggaatttaacatgcttgcacaaggctgtgaggatatcattgctgagagcatctcattagataccttaattgccatcctcaagtggagttctcatccatatggctctaaatgggtgcaccgacaagctttacatttcctctgtgaggaattttcccaggtcatgacttcggatgttttttatgaactcagcaaagaccatctgcttactgctatccagtctgactacctacaggcaagtgaacaagatatccttaaatatctgattaaatggggagagcatcagttgatgaaaagaatagcagatagagagccaaacttactgagtggcactgcccatagtgtgaacaaaagaggtgtaaaaagacgggacctggacatggaagagctcagagagatcctttcttctctcttaccttttgtgcgaattgaacacatcttacctataaacagtgaagtcttaagtgatgcaatgaaaagaggcttgattagtactcctccatcagatatgcttcctacaacagaaggtgggaagtcaaatgcctggttacggcaaaaaaatgctggcatctatgttcgtcctcgactcttctctccctatgtggaagaagcaaagtcagtgctagatgagatgatggtggaacaaacggatcttgtgcgcttgcgaatggttagaatgtccaatgtgccagacacgctctacatggtcaataatgccgtgccacagtgttgtcacatgatcagccaccagcagatcagcagcaaccagtcaagccctccttcagttgtagccaacgaaattccagttcctcgtctcctcattatgaaagacatggtcagacgactgcaggaactgcggcacacggagcaggtgcagagggcctatgccctgaactgcggggaaggcgccactgtcagctatgaaattcagattcgagtgctaagagagtttggtcttgcagatgctgctgcagagctgttgcagaatcctcacaaattctttcctgatgaacgttttggggatgaaagtccactcttgacaatgagacagcctgggagatgtcgcgtaaacagtacacctcctgcagaaaccatgtttacagatctggactcttttgtggccttccatccacccttgccccctccaccacctccctaccaccccccagctaccccaatccataaccaactcaaagcaggctggaagcaaagacctcccagtcagcacccttcacgttcattttcttatccctgtaatcattcgctgttccactccagaacagctcctaaagctggccctcccccagtctacttgccgagtgtgaaagctgcaccgcctgattgtaccagcactgcaggactgggcagacagacggtggctgctgctgccgccaccaccacctcaacagcaacagcagcagcagcagcagcatctgagaagcaagtgcgaacacaacctgtgctgaatgatctgatgccagacatcgcggtgggtgtgtccacactgtcactcaaggacaggaggcttccagagcttgctgtagacacagaattaagccagtcagtttctgaagcaggaccagggcctccccagcatctgtcgtgtattccacagagacatacacacacttctcggaaaaaacacacactagagcaaaaaacagacaccagagaaaatccacaggaatatccggatttctatgacttctcaaatgctgcttgcagaccttctactcctgctctcagcagacgcaccccttccccttcgcaaggtggatattttggtcccgatctgtacagccacaataaggcatcaccaagtggcttaaagtcagcctacctacctggtcagacgtctcctaaaaaacaggaagaagctaggagagaatatccactttcccctgacgggcatctacacagacaaaagaatgagccgatacacctggatgtcgttgagcaacctccccagcggtcagactttcctttggcagccccagaaaatgctagtaccggtccagcccatgtcaggggacgaactgcagtagaaactgacttgacttttgggctgactcctaacagaccttcactttctgcatgtagctctgaagctcccgaagagagatccggtagaagactggcagacagtgagtccctgggccatggagctcagagaaatacagatttggaaagggaagattcaataagcagaggaaggaggtcaccaagcaagccggacttcctctacaaaaagtctgccctctgagagcaacctccaagtcgtctgtgcctgagatgtgaaacatcccattttatgatgtaacccaacaacttacagaccagttcatcaatgccagctgataactcggtttcacatgattttgttctagtttttgtgtatatatgtgtttattagacatggcatgctaagaaggttttgttttttttttttaatgttgcatctgtctaatttgtctttgaacaattatgtcgggaggcatttttaagaacaagcaggctggcactttttatttctctttacaaatgatggaatttttttgcacttgtacatttattttctctgtattgattttatatcagtatgttaaactttattgccacatttaaaggactgtattttcatacttttttgcattttacctttcatctaccaatccatgtgcattggattgcacactaagatgtattttcttacgaaatagttctgtgtttattttttaattatagaaattccaaagaacagcacatcagaatgctcctctcttttcagtaattgttttagttcagagatcttcccgctcagcctccataaatctaatgtcattttttttttaataagtcctaggagctgggcttcattcctccagcgggagtccagtcagggtcctgaagtttgctggttcaggaaagaacaggaaagagaaaagccttctgtgcccaggctaaagctgttacatttccacagtgtggatgcagtcagaatccctgcacattctggtcataaggattagagtcaccagatgaggctctaaacagatcgcatcccttggaattagaaagcagtggagaccgggcgcagtgactcacacctgtgatcggcacttcggaaggccgaggcgggcagatcactgaagctcaggagttcaagaccagcctgggcaacatggcgaaactccatttctataaaaaatacaaaaaaaaaaaaatctagccaggcgtggtggtgcgtgcctgtagtcccagctacttggggggctgaggtggcaggatcgcttgagcctgggaggttgagactgcagtgagccaagattgcaccactgtgctcccacctgggcaacagtgagaccctgtctcaaaaaaaaaaaaaaaggcagtggaaatagagaagtaacttaaaggtcacactgacagaatttctggttctgagcgtcaactctccagctgtgatggcggaactgactgcttgctgcctttaattgtcttgctctctatgggaaaaaaacaaaagggcttcagtctcatggatgttatttggtgtttgtaaagatacgttttcttttaaacgattttcaaaatatgtctaaattttggtgttgtgtaatgcataatgctttctcaccaacagaaaaaaggaaaaaaattgttttcagttaaacactacatgtcctacttgaactccactgggacgctggtttggcatttactaaaccactgagcacatggggtctttcaggatcctctcccttggaagggcaatgtgtgagctaaggactgttttttttcttactctccaatgtaaatatatgagtatttgagtttttaaatcacttcaacattatttgagcatttactttgtatttttacaaacacataaacacacagccgtagcacttagaagaaaagaggctttctaagcattccttcctctgcaggatatttgggatcctcttttctatgtatgtatatatataaaaaactatgaatcactcacactcactcgaaaactatgcagggctagggagcgtttatgagctaccgggtaaatgaattacatgcactttgaagtaaataggttttctattgggtgtcaacaacgctgatttctcccaaaactatagtttctcttacggtcttttcctcctttaccctgtggatatacactcaggaataatctgacattttagaaaagccgaacagtagatagtctccaagatgggaaacatgtcgtgtgtctgcacgccccggcaaactgccgccactcgttctgctgcctgactggttagctgctgtgcgggtgcgctcggtgacactggtggtggtgcacgctcccgagctcccagagttaacactaatctgcaggtcggctgtgcatcgcattcgaggctccttttttaaagagaaaagcataggcctctgttctcatttgtaagaagtttgactcataatagaagacggtgtcttttgaagcccagtctctgtctgtcttcagaaacaaaagtgaatgccgtcatgttccttgatgtgtgtttctgccacatatgtatgttgacatgttcatgtactgcgccggtactgcaagtaagactcaacagacctaatttggatggggagaaaaactctcatccctgacccttccccccccgcaaatgttagaccagagctgttgatcccacacattcatttttctgaaaattcatgaactattctctcatatccctgaaatataaaagtaagtggccactattcctaagattatttagtttataaagtttgcttttaatcatacaatagcttacctggctaaaactttgcgtataaagggaaaacttgctttaatctgtgggattgcggaccgatgcgacttgcagaaggtaaacaggcgtgggttttgtgtgcgttaggttaggtgttagtggacttttaatgtatcttgtgaagtatggttactagggtaggttcaagagctacatgcctctggcttttgaacccatctattaaatcttttttaatgctgtactaagataaatgtgaagtctgagtaaggttgctcagaaaaaaaaaaaaagcatatatatatataaaataaaatttaggccatgggaactggcattttacttggtataggaatttaatgagaaccaaatcacaaaaataccagatctccttttgagatcgtggacaatcaggcctttggacaatcaccgcttccagtgcccgctgtgcgtttgaggttagagacctaccgtttacacgctagagccgagaggacgttcaagtttcttaaagatgctgttggtcttttttcttatgttattgttttagttttgtgattttgatgaataattgaagttcagagtcacccgtggctcctaaggaaaaaacagcatcatgaaaggcaaaaagtatttgaaacgtaattgtttcaattttccacgcccgttctcacatgccccctttagctttatttctgggaacatgtcactagacctcagctagcctgacaccgcaataacccgttaggctttgaggcttttcagtgaattcttgacatttaaatcttcttatagaattctttatgaagccttaactaattcttgtttttgcttcctcagaaactttttattgcatctgccatccttcattggatttttgttttggtttgttgttgccattctagcaatgagcttagtccttgtacatctgcattaaggtgccgatgcagaaggcaaattggaaacacgcgccagcggcagtggggctcaaagccgacctccatgcatcattctctagagttgaaaggattgacatttctcagtaactacccggcaaaatatatattttcataatgttgaatttgccttttaggaaaacaatgtttcatgaaacacttgtaagatacttattttgaaattaattataaggcattcatatttttaggactgaattcaaagggaaatgcttctttgactttttttcattgttcggttgactttcagctttctggagtgacaaagcagcagtgatgggtgctattcctggttctgtggtggtttactttgtctactaagtgatttactttcaaacctcattacagataatcttactaaaagacttaacatgcacactgctaaaaggtgttttactgttttccattaacgctgttgtatgaacaatatttggtgacatgttgtctttttgtcctgtagattgtcatatctgttatgtagttatccttttggcaagtcctttgatttttttttcctctagaaaatcctcagactgtcaatcttccatattttgaatattataatgctgtggccatttctatagaaagattacttgcaagtgtgtgtcttgaaaataacctcttgtatttgtgtgtttatgtgagttctgtctaagagatcagataagctctggaagcttcatcatctgtacctacatgtaactgtatctgggttacatgggcaggcggtaccaagtcctgctcttcgatggggtggctgagagataaaggttcctgaactctccttgctgtgtatgcaccacatctgtacttcagagaggtggaaaatcatctacaacactgcgtttcttgtggttgtgctgttactggtataaagtcaagtgccttcaatgctaaaggctcagaaatttttcttaaactgatttcatgtcctatgcaagtgttttctacaacctgcataaccagtactttgtaaaacttgtttacgcttcaattgtacatagtgatttttaaagaaatatatagtatttttatttaggtacctccaaacttgaattcgtctgtgtgaagcattgtaaaacgatacatttctcttttgagtaccattacagttgtacagaggttttcactgcttctatttttctactgttactgataagcatgtaacactgactttatcctacatatagttggcatttcaaataaatggcttgtatagaa

SEQ ID NO: 364546 - DNA, 8270 bp, Homo sapiens
aggcctgaggactgctactcccaggggaagttagattgtccggaaatggatgaaaagaggctgctggatccagggttgaaggttcataaaggcctctgggattatactctgaagaacccgcagacggaatgcctgagtgactgaagaaaatgggtgctaatgcatctaattatcctcattcatgttccccgagggtagggggaaattcacaggcccaacagacttttatagggacctcatcctattctcagcaaggctatggttgcgaatcaaagttgtatagccttgaccatggccatgagaaaccacaagacaaaaaaaagagaacctctggtcttgccaccctcaaaaagaagtttattaagcgtcggaaatctaataggtctgccgatcatgccaagcagatgcgagaactcctctctgggtgggatgttagagatgtcaatgcattagtggaggaatatgagggaacatcagcattaaaggagctttctctacaagccagtttggctagaccagaagcccggacattgcagaaagatatggctgatctttatgagtacaagtattgtactgatgtagacttaatatttcaagaaacttgttttcctgttcatcgtgccattttggcagcaaggtgtccattttttaaaacactgctttcttcctcaccagagtatggggcagagataataatggacatcaatacagctggtattgatatgcccatgttttctgctttgttacactacctttatacaggagagtttggaatggaggactcaaggtttcaaaatgtcgatatccttgttcagcttagtgaagaatttggaacaccaaattcccttgatgtagatatgcgtggactctttgattacatgtgttattatgatgtcgtccttagtttttcttcagactctgaactggttgaagcttttggtggaaatcagaactgtttagatgaagagctcaaagcccacaaggctgttatttctgcacggtccccattttttcgaaatttattacaaaggaggatacgaactggtgaagaaatcacagaccgaactttgaggactcccacaagaattatattagatgagtccattataccaaaaaaatatgcaacagtgatattacactgtatgtataccgacgtggtggacctctctgttttgcactgtagcccctctgtggggagtctcagtgaagttcaggctctcgtcgcagggaagccaaacatgaccagggcagaagaagccatggaactttaccacatagcactgttcttggaatttaacatgcttgcacaaggctgtgaggatatcattgctgagagcatctcattagataccttaattgccatcctcaagtggagttctcatccatatggctctaaatgggtgcaccgacaagctttacatttcctctgtgaggaattttcccaggtcatgacttcggatgttttttatgaactcagcaaagaccatctgcttactgctatccagtctgactacctacaggcaagtgaacaagatatccttaaatatctgattaaatggggagagcatcagttgatgaaaagaatagcagatagagagccaaacttactgagtggcactgcccatagtgtgaacaaaagaggtgtaaaaagacgggacctggacatggaagagctcagagagatcctttcttctctcttaccttttgtgcgaattgaacacatcttacctataaacagtgaagtcttaagtgatgcaatgaaaagaggcttgattagtactcctccatcagatatgcttcctacaacagaaggtgggaagtcaaatgcctggttacggcaaaaaaatgctggcatctatgttcgtcctcgactcttctctccctatgtggaagaagcaaagtcagtgctagatgagatgatggtggaacaaacggatcttgtgcgcttgcgaatggttagaatgtccaatgtgccagacacgctctacatggtcaataatgccgtgccacagtgttgtcacatgatcagccaccagcagatcagcagcaaccagtcaagccctccttcagttgtagccaacgaaattccagttcctcgtctcctcattatgaaagacatggtcagacgactgcaggaactgcggcacacggagcaggtgcagagggcctatgccctgaactgcggggaaggcgccactgtcagctatgaaattcagattcgagtgctaagagagtttggtcttgcagatgctgctgcagagctgttgcagaatcctcacaaattctttcctgatgaacgttttggggatgaaagtccactcttgacaatgagacagcctgggagatgtcgcgtaaacagtacacctcctgcagaaaccatgtttacagatctggactcttttgtggccttccatccacccttgccccctccaccacctccctaccaccccccagctaccccaatccataaccaactcaaagcaggctggaagcaaagacctcccagtcagcacccttcacgttcattttcttatccctgtaatcattcgctgttccactccagaacagctcctaaagctggccctcccccagtctacttgccgagtgtgaaagctgcaccgcctgattgtaccagcactgcaggactgggcagacagacggtggctgctgctgccgccaccaccacctcaacagcaacagcagcagcagcagcagcatctgagaagcaagtgcgaacacaacctgtgctgaatgatctgatgccagacatcgcggtgggtgtgtccacactgtcactcaaggacaggaggcttccagagcttgctgtagacacagaattaagccagtcagtttctgaagcaggaccagggcctccccagcatctgtcgtgtattccacagagacatacacacacttctcggaaaaaacacacactagagcaaaaaacagacaccagagaaaatccacaggaatatccggatttctatgacttctcaaatgctgcttgcagaccttctactcctgctctcagcagacgcaccccttccccttcgcaaggtggatattttggtcccgatctgtacagccacaataaggcatcaccaagtggcttaaagtcagcctacctacctggtcagacgtctcctaaaaaacaggaagaagctaggagagaatatccactttcccctgacgggcatctacacagacaaaagaatgagccgatacacctggatgtcgttgagcaacctccccagcggtcagactttcctttggcagccccagaaaatgctagtaccggtccagcccatgtcaggggacgaactgcagtagaaactgacttgacttttgggctgactcctaacagaccttcactttctgcatgtagctctgaagctcccgaagagagatccggtagaagactggcagacagtgagtccctgggccatggagctcagagaaatacagatttggaaagggaagattcaataagcagaggaaggaggtcaccaagcaagccggacttcctctacaaaaagtctgccctctgagagcaacctccaagtcgtctgtgcctgagatgtgaaacatcccattttatgatgtaacccaacaacttacagaccagttcatcaatgccagctgataactcggtttcacatgattttgttctagtttttgtgtatatatgtgtttattagacatggcatgctaagaaggttttgttttttttttttaatgttgcatctgtctaatttgtctttgaacaattatgtcgggaggcatttttaagaacaagcaggctggcactttttatttctctttacaaatgatggaatttttttgcacttgtacatttattttctctgtattgattttatatcagtatgttaaactttattgccacatttaaaggactgtattttcatacttttttgcattttacctttcatctaccaatccatgtgcattggattgcacactaagatgtattttcttacgaaatagttctgtgtttattttttaattatagaaattccaaagaacagcacatcagaatgctcctctcttttcagtaattgttttagttcagagatcttcccgctcagcctccataaatctaatgtcattttttttttaataagtcctaggagctgggcttcattcctccagcgggagtccagtcagggtcctgaagtttgctggttcaggaaagaacaggaaagagaaaagccttctgtgcccaggctaaagctgttacatttccacagtgtggatgcagtcagaatccctgcacattctggtcataaggattagagtcaccagatgaggctctaaacagatcgcatcccttggaattagaaagcagtggagaccgggcgcagtgactcacacctgtgatcggcacttcggaaggccgaggcgggcagatcactgaagctcaggagttcaagaccagcctgggcaacatggcgaaactccatttctataaaaaatacaaaaaaaaaaaaatctagccaggcgtggtggtgcgtgcctgtagtcccagctacttggggggctgaggtggcaggatcgcttgagcctgggaggttgagactgcagtgagccaagattgcaccactgtgctcccacctgggcaacagtgagaccctgtctcaaaaaaaaaaaaaaaggcagtggaaatagagaagtaacttaaaggtcacactgacagaatttctggttctgagcgtcaactctccagctgtgatggcggaactgactgcttgctgcctttaattgtcttgctctctatgggaaaaaaacaaaagggcttcagtctcatggatgttatttggtgtttgtaaagatacgttttcttttaaacgattttcaaaatatgtctaaattttggtgttgtgtaatgcataatgctttctcaccaacagaaaaaaggaaaaaaattgttttcagttaaacactacatgtcctacttgaactccactgggacgctggtttggcatttactaaaccactgagcacatggggtctttcaggatcctctcccttggaagggcaatgtgtgagctaaggactgttttttttcttactctccaatgtaaatatatgagtatttgagtttttaaatcacttcaacattatttgagcatttactttgtatttttacaaacacataaacacacagccgtagcacttagaagaaaagaggctttctaagcattccttcctctgcaggatatttgggatcctcttttctatgtatgtatatatataaaaaactatgaatcactcacactcactcgaaaactatgcagggctagggagcgtttatgagctaccgggtaaatgaattacatgcactttgaagtaaataggttttctattgggtgtcaacaacgctgatttctcccaaaactatagtttctcttacggtcttttcctcctttaccctgtggatatacactcaggaataatctgacattttagaaaagccgaacagtagatagtctccaagatgggaaacatgtcgtgtgtctgcacgccccggcaaactgccgccactcgttctgctgcctgactggttagctgctgtgcgggtgcgctcggtgacactggtggtggtgcacgctcccgagctcccagagttaacactaatctgcaggtcggctgtgcatcgcattcgaggctccttttttaaagagaaaagcataggcctctgttctcatttgtaagaagtttgactcataatagaagacggtgtcttttgaagcccagtctctgtctgtcttcagaaacaaaagtgaatgccgtcatgttccttgatgtgtgtttctgccacatatgtatgttgacatgttcatgtactgcgccggtactgcaagtaagactcaacagacctaatttggatggggagaaaaactctcatccctgacccttccccccccgcaaatgttagaccagagctgttgatcccacacattcatttttctgaaaattcatgaactattctctcatatccctgaaatataaaagtaagtggccactattcctaagattatttagtttataaagtttgcttttaatcatacaatagcttacctggctaaaactttgcgtataaagggaaaacttgctttaatctgtgggattgcggaccgatgcgacttgcagaaggtaaacaggcgtgggttttgtgtgcgttaggttaggtgttagtggacttttaatgtatcttgtgaagtatggttactagggtaggttcaagagctacatgcctctggcttttgaacccatctattaaatcttttttaatgctgtactaagataaatgtgaagtctgagtaaggttgctcagaaaaaaaaaaaaagcatatatatatataaaataaaatttaggccatgggaactggcattttacttggtataggaatttaatgagaaccaaatcacaaaaataccagatctccttttgagatcgtggacaatcaggcctttggacaatcaccgcttccagtgcccgctgtgcgtttgaggttagagacctaccgtttacacgctagagccgagaggacgttcaagtttcttaaagatgctgttggtcttttttcttatgttattgttttagttttgtgattttgatgaataattgaagttcagagtcacccgtggctcctaaggaaaaaacagcatcatgaaaggcaaaaagtatttgaaacgtaattgtttcaattttccacgcccgttctcacatgccccctttagctttatttctgggaacatgtcactagacctcagctagcctgacaccgcaataacccgttaggctttgaggcttttcagtgaattcttgacatttaaatcttcttatagaattctttatgaagccttaactaattcttgtttttgcttcctcagaaactttttattgcatctgccatccttcattggatttttgttttggtttgttgttgccattctagcaatgagcttagtccttgtacatctgcattaaggtgccgatgcagaaggcaaattggaaacacgcgccagcggcagtggggctcaaagccgacctccatgcatcattctctagagttgaaaggattgacatttctcagtaactacccggcaaaatatatattttcataatgttgaatttgccttttaggaaaacaatgtttcatgaaacacttgtaagatacttattttgaaattaattataaggcattcatatttttaggactgaattcaaagggaaatgcttctttgactttttttcattgttcggttgactttcagctttctggagtgacaaagcagcagtgatgggtgctattcctggttctgtggtggtttactttgtctactaagtgatttactttcaaacctcattacagataatcttactaaaagacttaacatgcacactgctaaaaggtgttttactgttttccattaacgctgttgtatgaacaatatttggtgacatgttgtctttttgtcctgtagattgtcatatctgttatgtagttatccttttggcaagtcctttgatttttttttcctctagaaaatcctcagactgtcaatcttccatattttgaatattataatgctgtggccatttctatagaaagattacttgcaagtgtgtgtcttgaaaataacctcttgtatttgtgtgtttatgtgagttctgtctaagagatcagataagctctggaagcttcatcatctgtacctacatgtaactgtatctgggttacatgggcaggcggtaccaagtcctgctcttcgatggggtggctgagagataaaggttcctgaactctccttgctgtgtatgcaccacatctgtacttcagagaggtggaaaatcatctacaacactgcgtttcttgtggttgtgctgttactggtataaagtcaagtgccttcaatgctaaaggctcagaaatttttcttaaactgatttcatgtcctatgcaagtgttttctacaacctgcataaccagtactttgtaaaacttgtttacgcttcaattgtacatagtgatttttaaagaaatatatagtatttttatttaggtacctccaaacttgaattcgtctgtgtgaagcattgtaaaacgatacatttctcttttgagtaccattacagttgtacagaggttttcactgcttctatttttctactgttactgataagcatgtaacactgactttatcctacatatagttggcatttcaaataaatggcttgtatagaa

SEQ ID NO: 364547 - DNA, 7125 bp, Homo sapiens
ctattgtttacccatcccaccaagtcttggtgattttcatgagattttatttatctccttgagttcttttttgctattgtgacttttaaatatcgtgcctagcacactaatgttcaataagtaatatttatgattaatctcaagaagtatttgccttctcttttaggctgtgaggatatcattgctgagagcatctcattagataccttaattgccatcctcaagtggagttctcatccatatggctctaaatgggtgcaccgacaagctttacatttcctctgtgaggaattttcccaggtcatgacttcggatgttttttatgaactcagcaaagaccatctgcttactgctatccagtctgactacctacaggcaagtgaacaagatatccttaaatatctgattaaatggggagagcatcagttgatgaaaagaatagcagatagagagccaaacttactgagtggcactgcccatagtgtgaacaaaagaggtgtaaaaagacgggacctggacatggaagagctcagagagatcctttcttctctcttaccttttgtgcgaattgaacacatcttacctataaacagtgaagtcttaagtgatgcaatgaaaagaggcttgattagtactcctccatcagatatgcttcctacaacagaaggtgggaagtcaaatgcctggttacggcaaaaaaatgctggcatctatgttcgtcctcgactcttctctccctatgtggaagaagcaaagtcagtgctagatgagatgatggtggaacaaacggatcttgtgcgcttgcgaatggttagaatgtccaatgtgccagacacgctctacatggtcaataatgccgtgccacagtgttgtcacatgatcagccaccagcagatcagcagcaaccagtcaagccctccttcagttgtagccaacgaaattccagttcctcgtctcctcattatgaaagacatggtcagacgactgcaggaactgcggcacacggagcaggtgcagagggcctatgccctgaactgcggggaaggcgccactgtcagctatgaaattcagattcgagtgctaagagagtttggtcttgcagatgctgctgcagagctgttgcagaatcctcacaaattctttcctgatgaacgttttggggatgaaagtccactcttgacaatgagacagcctgggagatgtcgcgtaaacagtacacctcctgcagaaaccatgtttacagatctggactcttttgtggccttccatccacccttgccccctccaccacctccctaccaccccccagctaccccaatccataaccaactcaaagcaggctggaagcaaagacctcccagtcagcacccttcacgttcattttcttatccctgtaatcattcgctgttccactccagaacagctcctaaagctggccctcccccagtctacttgccgagtgtgaaagctgcaccgcctgattgtaccagcactgcaggactgggcagacagacggtggctgctgctgccgccaccaccacctcaacagcaacagcagcagcagcagcagcatctgagaagcaagtgcgaacacaacctgtgctgaatgatctgatgccagacatcgcggtgggtgtgtccacactgtcactcaaggacaggaggcttccagagcttgctgtagacacagaattaagccagtcagtttctgaagcaggaccagggcctccccagcatctgtcgtgtattccacagagacatacacacacttctcggaaaaaacacacactagagcaaaaaacagacaccagagaaaatccacaggaatatccggatttctatgacttctcaaatgctgcttgcagaccttctactcctgctctcagcagacgcaccccttccccttcgcaaggtggatattttggtcccgatctgtacagccacaataaggcatcaccaagtggcttaaagtcagcctacctacctggtcagacgtctcctaaaaaacaggaagaagctaggagagaatatccactttcccctgacgggcatctacacagacaaaagaatgagccgatacacctggatgtcgttgagcaacctccccagcggtcagactttcctttggcagccccagaaaatgctagtaccggtccagcccatgtcaggggacgaactgcagtagaaactgacttgacttttgggctgactcctaacagaccttcactttctgcatgtagctctgaagctcccgaagagagatccggtagaagactggcagacagtgagtccctgggccatggagctcagagaaatacagatttggaaagggaagattcaataagcagaggaaggaggtcaccaagcaagccggacttcctctacaaaaagtctgccctctgagagcaacctccaagtcgtctgtgcctgagatgtgaaacatcccattttatgatgtaacccaacaacttacagaccagttcatcaatgccagctgataactcggtttcacatgattttgttctagtttttgtgtatatatgtgtttattagacatggcatgctaagaaggttttgttttttttttttaatgttgcatctgtctaatttgtctttgaacaattatgtcgggaggcatttttaagaacaagcaggctggcactttttatttctctttacaaatgatggaatttttttgcacttgtacatttattttctctgtattgattttatatcagtatgttaaactttattgccacatttaaaggactgtattttcatacttttttgcattttacctttcatctaccaatccatgtgcattggattgcacactaagatgtattttcttacgaaatagttctgtgtttattttttaattatagaaattccaaagaacagcacatcagaatgctcctctcttttcagtaattgttttagttcagagatcttcccgctcagcctccataaatctaatgtcattttttttttaataagtcctaggagctgggcttcattcctccagcgggagtccagtcagggtcctgaagtttgctggttcaggaaagaacaggaaagagaaaagccttctgtgcccaggctaaagctgttacatttccacagtgtggatgcagtcagaatccctgcacattctggtcataaggattagagtcaccagatgaggctctaaacagatcgcatcccttggaattagaaagcagtggagaccgggcgcagtgactcacacctgtgatcggcacttcggaaggccgaggcgggcagatcactgaagctcaggagttcaagaccagcctgggcaacatggcgaaactccatttctataaaaaatacaaaaaaaaaaaaatctagccaggcgtggtggtgcgtgcctgtagtcccagctacttggggggctgaggtggcaggatcgcttgagcctgggaggttgagactgcagtgagccaagattgcaccactgtgctcccacctgggcaacagtgagaccctgtctcaaaaaaaaaaaaaaaggcagtggaaatagagaagtaacttaaaggtcacactgacagaatttctggttctgagcgtcaactctccagctgtgatggcggaactgactgcttgctgcctttaattgtcttgctctctatgggaaaaaaacaaaagggcttcagtctcatggatgttatttggtgtttgtaaagatacgttttcttttaaacgattttcaaaatatgtctaaattttggtgttgtgtaatgcataatgctttctcaccaacagaaaaaaggaaaaaaattgttttcagttaaacactacatgtcctacttgaactccactgggacgctggtttggcatttactaaaccactgagcacatggggtctttcaggatcctctcccttggaagggcaatgtgtgagctaaggactgttttttttcttactctccaatgtaaatatatgagtatttgagtttttaaatcacttcaacattatttgagcatttactttgtatttttacaaacacataaacacacagccgtagcacttagaagaaaagaggctttctaagcattccttcctctgcaggatatttgggatcctcttttctatgtatgtatatatataaaaaactatgaatcactcacactcactcgaaaactatgcagggctagggagcgtttatgagctaccgggtaaatgaattacatgcactttgaagtaaataggttttctattgggtgtcaacaacgctgatttctcccaaaactatagtttctcttacggtcttttcctcctttaccctgtggatatacactcaggaataatctgacattttagaaaagccgaacagtagatagtctccaagatgggaaacatgtcgtgtgtctgcacgccccggcaaactgccgccactcgttctgctgcctgactggttagctgctgtgcgggtgcgctcggtgacactggtggtggtgcacgctcccgagctcccagagttaacactaatctgcaggtcggctgtgcatcgcattcgaggctccttttttaaagagaaaagcataggcctctgttctcatttgtaagaagtttgactcataatagaagacggtgtcttttgaagcccagtctctgtctgtcttcagaaacaaaagtgaatgccgtcatgttccttgatgtgtgtttctgccacatatgtatgttgacatgttcatgtactgcgccggtactgcaagtaagactcaacagacctaatttggatggggagaaaaactctcatccctgacccttccccccccgcaaatgttagaccagagctgttgatcccacacattcatttttctgaaaattcatgaactattctctcatatccctgaaatataaaagtaagtggccactattcctaagattatttagtttataaagtttgcttttaatcatacaatagcttacctggctaaaactttgcgtataaagggaaaacttgctttaatctgtgggattgcggaccgatgcgacttgcagaaggtaaacaggcgtgggttttgtgtgcgttaggttaggtgttagtggacttttaatgtatcttgtgaagtatggttactagggtaggttcaagagctacatgcctctggcttttgaacccatctattaaatcttttttaatgctgtactaagataaatgtgaagtctgagtaaggttgctcagaaaaaaaaaaaaagcatatatatatataaaataaaatttaggccatgggaactggcattttacttggtataggaatttaatgagaaccaaatcacaaaaataccagatctccttttgagatcgtggacaatcaggcctttggacaatcaccgcttccagtgcccgctgtgcgtttgaggttagagacctaccgtttacacgctagagccgagaggacgttcaagtttcttaaagatgctgttggtcttttttcttatgttattgttttagttttgtgattttgatgaataattgaagttcagagtcacccgtggctcctaaggaaaaaacagcatcatgaaaggcaaaaagtatttgaaacgtaattgtttcaattttccacgcccgttctcacatgccccctttagctttatttctgggaacatgtcactagacctcagctagcctgacaccgcaataacccgttaggctttgaggcttttcagtgaattcttgacatttaaatcttcttatagaattctttatgaagccttaactaattcttgtttttgcttcctcagaaactttttattgcatctgccatccttcattggatttttgttttggtttgttgttgccattctagcaatgagcttagtccttgtacatctgcattaaggtgccgatgcagaaggcaaattggaaacacgcgccagcggcagtggggctcaaagccgacctccatgcatcattctctagagttgaaaggattgacatttctcagtaactacccggcaaaatatatattttcataatgttgaatttgccttttaggaaaacaatgtttcatgaaacacttgtaagatacttattttgaaattaattataaggcattcatatttttaggactgaattcaaagggaaatgcttctttgactttttttcattgttcggttgactttcagctttctggagtgacaaagcagcagtgatgggtgctattcctggttctgtggtggtttactttgtctactaagtgatttactttcaaacctcattacagataatcttactaaaagacttaacatgcacactgctaaaaggtgttttactgttttccattaacgctgttgtatgaacaatatttggtgacatgttgtctttttgtcctgtagattgtcatatctgttatgtagttatccttttggcaagtcctttgatttttttttcctctagaaaatcctcagactgtcaatcttccatattttgaatattataatgctgtggccatttctatagaaagattacttgcaagtgtgtgtcttgaaaataacctcttgtatttgtgtgtttatgtgagttctgtctaagagatcagataagctctggaagcttcatcatctgtacctacatgtaactgtatctgggttacatgggcaggcggtaccaagtcctgctcttcgatggggtggctgagagataaaggttcctgaactctccttgctgtgtatgcaccacatctgtacttcagagaggtggaaaatcatctacaacactgcgtttcttgtggttgtgctgttactggtataaagtcaagtgccttcaatgctaaaggctcagaaatttttcttaaactgatttcatgtcctatgcaagtgttttctacaacctgcataaccagtactttgtaaaacttgtttacgcttcaattgtacatagtgatttttaaagaaatatatagtatttttatttaggtacctccaaacttgaattcgtctgtgtgaagcattgtaaaacgatacatttctcttttgagtaccattacagttgtacagaggttttcactgcttctatttttctactgttactgataagcatgtaacactgactttatcctacatatagttggcatttcaaataaatggcttgtatagaa

SEQ ID NO: 364548 - DNA, 3699 bp, Homo sapiens
  misc_feature (2886)..(2886): n is a, c, g, or t
gccacgtgaccctgagcgggacgacggcaggggagggcgggggctccggccggctccgcagcgccgcgcaggcgccccagggccacgccgaaccgagcccctcctgctccgtctaggagtcaaaatggcggcgaggggaacctggagcagtcccggagcctgagccactgacaggagaggagagggcggcggcggcggtgggaggaggatggccgggggtgctggcgccggtgcggacggcggtgctggtggcggcggcggcggaggcgacggcagcggtcccagcggcagcagcagcggcgggaggagcctccgggaaatggatgaaaagaggctgctggatccagggttgaaggttcataaaggcctctgggattatactctgaagaacccgcagacggaatgcctgagtgactgaagaaaatgggtgctaatgcatctaattatcctcattcatgttccccgagggtagggggaaattcacaggcccaacagacttttatagggacctcatcctattctcagcaaggctatggttgcgaatcaaagttgtatagccttgaccatggccatgagaaaccacaagacaaaaaaaagagaacctctggtcttgccaccctcaaaaagaagtttattaagcgtcggaaatctaataggtctgccgatcatgccaagcagatgcgagaactcctctctgggtgggatgttagagatgtcaatgcattagtggaggaatatgagggaacatcagcattaaaggagctttctctacaagccagtttggctagaccagaagcccggacattgcagaaagatatggctgatctttatgagtacaagtattgtactgatgtagacttaatatttcaagaaacttgttttcctgttcatcgtgccattttggcagcaaggtgtccattttttaaaacactgctttcttcctcaccagagtatggggcagagataataatggacatcaatacagctggtattgatatgcccatgttttctgctttgttacactacctttatacaggagagtttggaatggaggactcaaggtttcaaaatgtcgatatccttgttcagcttagtgaagaatttggaacaccaaattcccttgatgtagatatgcgtggactctttgattacatgtgttattatgatgtcgtccttagtttttcttcagactctgaactggttgaagcttttggtggaaatcagaactgtttagatgaagagctcaaagcccacaaggctgttatttctgcacggtccccattttttcgaaatttattacaaaggaggatacgaactggtgaagaaatcacagaccgaactttgaggactcccacaagaattatattagatgagtccattataccaaaaaaatatgcaacagtgatattacactgtatgtataccgacgtggtggacctctctgttttgcactgtagcccctctgtggggagtctcagtgaagttcaggctctcgtcgcagggaagccaaacatgaccagggcagaagaagccatggaactttaccacatagcactgttcttggaatttaacatgcttgcacaaggctgtgaggatatcattgctgagagcatctcattagataccttaattgccatcctcaagtggagttctcatccatatggctctaaatgggtgcaccgacaagctttacatttcctctgtgaggaattttcccaggtcatgacttcggatgttttttatgaactcagcaaagaccatctgcttactgctatccagtctgactacctacaggcaagtgaacaagatatccttaaatatctgattaaatggggagagcatcagttgatgaaaagaatagcagatagagagccaaacttactgagtggcactgcccatagtgtgaacaaaagaggtgtaaaaagacgggacctggacatggaagagctcagagagatcctttcttctctcttaccttttgtgcgaattgaacacatcttacctataaacagtgaagtcttaagtgatgcagtaagtgtttttctccatgtattcctttcatgaaaagaaaaatgccaggtgtatgtttttattcattgtaaataatttctgctactaatagagtattgtgaagctgtaattctgtgaggacagagacagatgtctattgtgtacgatgttgtatctcctgtgtcttccacataatacagttaaaatgttcagtgaatgagagttgagtgggtaaataggtcttactcatgcaagagcattatttctagcagagttaattctgtcatttaagtgtagatcaagtagacccttattcaaaaagggaaaggtagaaattacctttgaagagtcttcaagaacagcagtgaatcagagagtagtggagtggagggattggttgaatagaaaaagaatggatggacctgaaaattaatagagctcatcttgttactttcataattttttaaacagtgaattttttaaaaattaatataattggctgggcgcggtggctcactcctgtaatcccagcactttgggacgccaaggcaggtggatcacctgaggtcaggagtttgagaccagcctggccaacatggtagaaccccatctctactaaacatacaaaaattagccaggcgtggtggtgcatgcctataatcccagctactcgggaggctgaggcaggggaattgcttgaactggggaggtggaggttgcagtgagccgagatcgagccattgcactccagcctgggtgacagagcgagactccatctcaaaaaaaaaaaaattaatagaattgcttgaattcatggatgggaaaaataaatattataaatattagttcttcacacattgacttataaacttaatntaatgcttataaacatcataatatgttttttctaactgcacaggaacattataaaacattataaaagtcttctggaaaaaaaacaaaacataataataaacgaactatcacaagtcaatgtggtgctagattaactgattagcagaagaagaaatttattgaaagttaaaccatcgtttcactggcacacaaaattaatccttgttagactgaagaattaaatactaaatggaaacatggaagaactagaagaaaacaatattgttttcaagaagtatttatgggctactctgggcatactgcctatggggtagccctgctccacaaggagcagtaataaaaataaataaaaacaaaacttaaaaaaagaaatatttgtggattctgattagaaaaaaaaattcaccctcactaattacacacacaccagagaaagcaaaatgaaacagttaccattttttcacctgttaaggtagtagttatagtaccactacacaacagaatattttgctcccctgaacagttgttataaagactgtatagtggccgggcgtggtggctcacacctataatcccagcactttgggaggccaaggcaggtggatcacctgaggtcaggagttcaagaccagcctggccgacatggcaaaaccctgtctctactaaaaatacaaaaattagccaggcatggtggtgcatgccgttaatcccagctgctcgagaggctgaggcacaagaattgcttgaacccagaggcaagtcaagaatgtgtcactgcactccagccttggtgacagagcaagactctgtatc

SEQ ID NO: 364549 - DNA, 2664 bp, Homo sapiens
gccacgtgaccctgagcgggacgacggcaggggagggcgggggctccggccggctccgcagcgccgcgcaggcgccccagggccacgccgaaccgagcccctcctgctccgtctaggagtcaaaatggcggcgaggggaacctggagcagtcccggagcctgagccactgacaggagaggagagggcggcggcggcggtgggaggaggatggccgggggtgctggcgccggtgcggacggcggtgctggtggcggcggcggcggaggcgacggcagcggtcccagcggcagcagcagcggcgggaggagcctccgggaaatggatgaaaagaggctgctggatccagggttgaaggttcataaaggcctctgggattatactctgaagaacccgcagacggaatgcctgagtgactgaagaaaatgggtgctaatgcatctaattatcctcattcatgttccccgagggtagggggaaattcacaggcccaacagacttttatagggacctcatcctattctcagcaaggctatggttgcgaatcaaagttgtatagccttgaccatggccatgagaaaccacaagacaaaaaaaagagaacctctggtcttgccaccctcaaaaagaagtttattaagcgtcggaaatctaataggtctgccgatcatgccaagcagatgcgagaactcctctctgggtgggatgttagagatgtcaatgcattagtggaggaatatgagggaacatcagcattaaaggagctttctctacaagccagtttggctagaccagaagcccggacattgcagaaagatatggctgatctttatgagtacaagtattgtactgatgtagacttaatatttcaagaaacttgttttcctgttcatcgtgccattttggcagcaaggtgtccattttttaaaacactgctttcttcctcaccagagtatggggcagagataataatggacatcaatacagctggtattgatatgcccatgttttctgctttgttacactacctttatacaggagagtttggaatggaggactcaaggtttcaaaatgtcgatatccttgttcagcttagtgaagaatttggaacaccaaattcccttgatgtagatatgcgtggactctttgattacatgtgttattatgatgtcgtccttagtttttcttcagactctgaactggttgaagcttttggtggaaatcagaactgtttagatgaagagctcaaagcccacaaggctgttatttctgcacggtccccattttttcgaaatttattacaaaggaggatacgaactggtgaagaaatcacagaccgaactttgaggactcccacaagaattatattagatgagtccattataccaaaaaaatatgcaacagtgatattacactgtatgtataccgacgtggtggacctctctgttttgcactgtagcccctctgtggggagtctcagtgaagttcaggctctcgtcgcagggaagccaaacatgaccagggcagaagaagccatggaactttaccacatagcactgttcttggaatttaacatgcttgcacaagaggagactacagtcatcaggcctgcctgtgcagcagagctttcaaacagctgcttactgcctcaatcttaaatatgaaaacccatccaaggataactggacatttgaggaaagcttccaaattgagacagagatcagagcaaaaagaacaaagtcctggaggaagcagacaatgaagggagcagaagaaaacttcagtagaatcaaaatatccttatataaaagaactttttatggaatcagtgagacataagcaggatgctattaaagtaaaaacaggagcttttagaaataagatagcagaaatgaaagatataatggaagcattgaaaggtacagttgaggaaatctagaaagtaaataatataataaagagatgagtggagacaaataaaactagagtattcatccagggtctaacatctaacaaatagtggctttagaaatatataccagagaaaagtgaagagaagacagtatctaaggagtaatataagaaatatttccaaaactaaaggaatttctatataaaaagtttctttttcagaacactggggaaaaagagacaattttaaaatgttgcagggaggagaaaaattaggttccatgcaaagaaataggaatcagatggtattgagattttcagtagcaacaactgaataccacaatacagtgaagtagtgtcttccaaaagctgatggaaaattattttaaacacaaaatcctatatttagccaaacagtcaatcaagtgtaaggctaaataaaggcatttttcagtcatacctcgaaaaactgcctgtgtagggatatttcccctgcttccccactcaggcagctgctgggaatgtattccaccaaatgacgaagcaaaccaagaacaaagaagtgaaggatctagaaaatgggctccaacacgggaaggaagcaaagggagatcccacgcatcagccacacagtaggtcttgtgggcattcagtctagcccagaccgggagggtgaaagtctccaaggaaagaggtgtctcggaagaaatcaattactttcaatgtttgaacattaaatagcaaatgacaaagca

SEQ ID NO: 364550 - DNA, 8740 bp, Homo sapiens
gccacgtgaccctgagcgggacgacggcaggggagggcgggggctccggccggctccgcagcgccgcgcaggcgccccagggccacgccgaaccgagcccctcctgctccgtctaggagtcaaaatggcggcgaggggaacctggagcagtcccggagcctgagccactgacaggagaggagagggcggcggcggcggtgggaggaggatggccgggggtgctggcgccggtgcggacggcggtgctggtggcggcggcggcggaggcgacggcagcggtcccagcggcagcagcagcggcgggaggagcctccgggaaatggatgaaaagaggctgctggatccagggttgaaggttcataaaggcctctgggattatactctgaagaacccgcagacggaatgcctgagtgactgaagaaaatgggtgctaatgcatctaattatcctcattcatgttccccgagggtagggggaaattcacaggcccaacagacttttatagggacctcatcctattctcagcaaggctatggttgcgaatcaaagttgtatagccttgaccatggccatgagaaaccacaagacaaaaaaaagagaacctctggtcttgccaccctcaaaaagaagtttattaagcgtcggaaatctaataggtctgccgatcatgccaagcagatgcgagaactcctctctgggtgggatgttagagatgtcaatgcattagtggaggaatatgagggaacatcagcattaaaggagctttctctacaagccagtttggctagaccagaagcccggacattgcagaaagatatggctgatctttatgagtacaagtattgtactgatgtagacttaatatttcaagaaacttgttttcctgttcatcgtgccattttggcagcaaggtgtccattttttaaaacactgctttcttcctcaccagagtatggggcagagataataatggacatcaatacagctggtattgatatgcccatgttttctgctttgttacactacctttatacaggagagtttggaatggaggactcaaggtttcaaaatgtcgatatccttgttcagcttagtgaagaatttggaacaccaaattcccttgatgtagatatgcgtggactctttgattacatgtgttattatgatgtcgtccttagtttttcttcagactctgaactggttgaagcttttggtggaaatcagaactgtttagatgaagagctcaaagcccacaaggctgttatttctgcacggtccccattttttcgaaatttattacaaaggaggatacgaactggtgaagaaatcacagaccgaactttgaggactcccacaagaattatattagatgagtccattataccaaaaaaatatgcaacagtgatattacactgtatgtataccgacgtggtggacctctctgttttgcactgtagcccctctgtggggagtctcagtgaagttcaggctctcgtcgcagggaagccaaacatgaccagggcagaagaagccatggaactttaccacatagcactgttcttggaatttaacatgcttgcacaaggctgtgaggatatcattgctgagagcatctcattagataccttaattgccatcctcaagtggagttctcatccatatggctctaaatgggtgcaccgacaagctttacatttcctctgtgaggaattttcccaggtcatgacttcggatgttttttatgaactcagcaaagaccatctgcttactgctatccagtctgactacctacaggcaagtgaacaagatatccttaaatatctgattaaatggggagagcatcagttgatgaaaagaatagcagatagagagccaaacttactgagtggcactgcccatagtgtgaacaaaagaggtgtaaaaagacgggacctggacatggaagagctcagagagatcctttcttctctcttaccttttgtgcgaattgaacacatcttacctataaacagtgaagtcttaagtgatgcaatgaaaagaggcttgattagtactcctccatcagatatgcttcctacaacagaaggtgggaagtcaaatgcctggttacggcaaaaaaatgctggcatctatgttcgtcctcgactcttctctccctatgtggaagaagcaaagtcagtgctagatgagatgatggtggaacaaacggatcttgtgcgcttgcgaatggttagaatgtccaatgtgccagacacgctctacatggtcaataatgccgtgccacagtgttgtcacatgatcagccaccagcagatcagcagcaaccagtcaagccctccttcagttgtagccaacgaaattccagttcctcgtctcctcattatgaaagacatggtcagacgactgcaggaactgcggcacacggagcaggtgcagagggcctatgccctgaactgcggggaaggcgccactgtcagctatgaaattcagattcgagtgctaagagagtttggtcttgcagatgctgctgcagagctgttgcagaatcctcacaaattctttcctgatgaacgttttggggatgaaagtccactcttgacaatgagacagcctgggagatgtcgcgtaaacagtacacctcctgcagaaaccatgtttacagatctggactcttttgtggccttccatccacccttgccccctccaccacctccctaccaccccccagctaccccaatccataaccaactcaaagcaggctggaagcaaagacctcccagtcagcacccttcacgttcattttcttatccctgtaatcattcgctgttccactccagaacagctcctaaagctggccctcccccagtctacttgccgagtgtgaaagctgcaccgcctgattgtaccagcactgcaggactgggcagacagacggtggctgctgctgccgccaccaccacctcaacagcaacagcagcagcagcagcagcatctgagaagcaagtgcgaacacaacctgtgctgaatgatctgatgccagacatcgcggtgggtgtgtccacactgtcactcaaggacaggaggcttccagagcttgctgtagacacagaattaagccagtcagtttctgaagcaggaccagggcctccccagcatctgtcgtgtattccacagagacatacacacacttctcggaaaaaacacacactagagcaaaaaacagacaccagagaaaatccacaggaatatccggatttctatgacttctcaaatgctgcttgcagaccttctactcctgctctcagcagacgcaccccttccccttcgcaaggtggatattttggtcccgatctgtacagccacaataaggcatcaccaagtggcttaaagtcagcctacctacctggtcagacgtctcctaaaaaacaggaagaagctaggagagaatatccactttcccctgacgggcatctacacagacaaaagaatgagccgatacacctggatgtcgttgagcaacctccccagcggtcagactttcctttggcagccccagaaaatgctagtaccggtccagcccatgtcaggggacgaactgcagtagaaactgacttgacttttgggctgactcctaacagaccttcactttctgcatgtagctctgaagctcccgaagagagatccggtagaagactggcagacagtgagtccctgggccatggagctcagagaaatacagatttggaaagggaagattcaataagcagaggaaggaggtcaccaagcaagccggacttcctctacaaaaagtctgccctctgagagcaacctccaagtcgtctgtgcctgagatgtgaaacatcccattttatgatgtaacccaacaacttacagaccagttcatcaatgccagctgataactcggtttcacatgattttgttctagtttttgtgtatatatgtgtttattagacatggcatgctaagaaggttttgttttttttttttaatgttgcatctgtctaatttgtctttgaacaattatgtcgggaggcatttttaagaacaagcaggctggcactttttatttctctttacaaatgatggaatttttttgcacttgtacatttattttctctgtattgattttatatcagtatgttaaactttattgccacatttaaaggactgtattttcatacttttttgcattttacctttcatctaccaatccatgtgcattggattgcacactaagatgtattttcttacgaaatagttctgtgtttattttttaattatagaaattccaaagaacagcacatcagaatgctcctctcttttcagtaattgttttagttcagagatcttcccgctcagcctccataaatctaatgtcattttttttttaataagtcctaggagctgggcttcattcctccagcgggagtccagtcagggtcctgaagtttgctggttcaggaaagaacaggaaagagaaaagccttctgtgcccaggctaaagctgttacatttccacagtgtggatgcagtcagaatccctgcacattctggtcataaggattagagtcaccagatgaggctctaaacagatcgcatcccttggaattagaaagcagtggagaccgggcgcagtgactcacacctgtgatcggcacttcggaaggccgaggcgggcagatcactgaagctcaggagttcaagaccagcctgggcaacatggcgaaactccatttctataaaaaatacaaaaaaaaaaaaatctagccaggcgtggtggtgcgtgcctgtagtcccagctacttggggggctgaggtggcaggatcgcttgagcctgggaggttgagactgcagtgagccaagattgcaccactgtgctcccacctgggcaacagtgagaccctgtctcaaaaaaaaaaaaaaaggcagtggaaatagagaagtaacttaaaggtcacactgacagaatttctggttctgagcgtcaactctccagctgtgatggcggaactgactgcttgctgcctttaattgtcttgctctctatgggaaaaaaacaaaagggcttcagtctcatggatgttatttggtgtttgtaaagatacgttttcttttaaacgattttcaaaatatgtctaaattttggtgttgtgtaatgcataatgctttctcaccaacagaaaaaaggaaaaaaattgttttcagttaaacactacatgtcctacttgaactccactgggacgctggtttggcatttactaaaccactgagcacatggggtctttcaggatcctctcccttggaagggcaatgtgtgagctaaggactgttttttttcttactctccaatgtaaatatatgagtatttgagtttttaaatcacttcaacattatttgagcatttactttgtatttttacaaacacataaacacacagccgtagcacttagaagaaaagaggctttctaagcattccttcctctgcaggatatttgggatcctcttttctatgtatgtatatatataaaaaactatgaatcactcacactcactcgaaaactatgcagggctagggagcgtttatgagctaccgggtaaatgaattacatgcactttgaagtaaataggttttctattgggtgtcaacaacgctgatttctcccaaaactatagtttctcttacggtcttttcctcctttaccctgtggatatacactcaggaataatctgacattttagaaaagccgaacagtagatagtctccaagatgggaaacatgtcgtgtgtctgcacgccccggcaaactgccgccactcgttctgctgcctgactggttagctgctgtgcgggtgcgctcggtgacactggtggtggtgcacgctcccgagctcccagagttaacactaatctgcaggtcggctgtgcatcgcattcgaggctccttttttaaagagaaaagcataggcctctgttctcatttgtaagaagtttgactcataatagaagacggtgtcttttgaagcccagtctctgtctgtcttcagaaacaaaagtgaatgccgtcatgttccttgatgtgtgtttctgccacatatgtatgttgacatgttcatgtactgcgccggtactgcaagtaagactcaacagacctaatttggatggggagaaaaactctcatccctgacccttccccccccgcaaatgttagaccagagctgttgatcccacacattcatttttctgaaaattcatgaactattctctcatatccctgaaatataaaagtaagtggccactattcctaagattatttagtttataaagtttgcttttaatcatacaatagcttacctggctaaaactttgcgtataaagggaaaacttgctttaatctgtgggattgcggaccgatgcgacttgcagaaggtaaacaggcgtgggttttgtgtgcgttaggttaggtgttagtggacttttaatgtatcttgtgaagtatggttactagggtaggttcaagagctacatgcctctggcttttgaacccatctattaaatcttttttaatgctgtactaagataaatgtgaagtctgagtaaggttgctcagaaaaaaaaaaaaagcatatatatatataaaataaaatttaggccatgggaactggcattttacttggtataggaatttaatgagaaccaaatcacaaaaataccagatctccttttgagatcgtggacaatcaggcctttggacaatcaccgcttccagtgcccgctgtgcgtttgaggttagagacctaccgtttacacgctagagccgagaggacgttcaagtttcttaaagatgctgttggtcttttttcttatgttattgttttagttttgtgattttgatgaataattgaagttcagagtcacccgtggctcctaaggaaaaaacagcatcatgaaaggcaaaaagtatttgaaacgtaattgtttcaattttccacgcccgttctcacatgccccctttagctttatttctgggaacatgtcactagacctcagctagcctgacaccgcaataacccgttaggctttgaggcttttcagtgaattcttgacatttaaatcttcttatagaattctttatgaagccttaactaattcttgtttttgcttcctcagaaactttttattgcatctgccatccttcattggatttttgttttggtttgttgttgccattctagcaatgagcttagtccttgtacatctgcattaaggtgccgatgcagaaggcaaattggaaacacgcgccagcggcagtggggctcaaagccgacctccatgcatcattctctagagttgaaaggattgacatttctcagtaactacccggcaaaatatatattttcataatgttgaatttgccttttaggaaaacaatgtttcatgaaacacttgtaagatacttattttgaaattaattataaggcattcatatttttaggactgaattcaaagggaaatgcttctttgactttttttcattgttcggttgactttcagctttctggagtgacaaagcagcagtgatgggtgctattcctggttctgtggtggtttactttgtctactaagtgatttactttcaaacctcattacagataatcttactaaaagacttaacatgcacactgctaaaaggtgttttactgttttccattaacgctgttgtatgaacaatatttggtgacatgttgtctttttgtcctgtagattgtcatatctgttatgtagttatccttttggcaagtcctttgatttttttttcctctagaaaatcctcagactgtcaatcttccatattttgaatattataatgctgtggccatttctatagaaagattacttgcaagtgtgtgtcttgaaaataacctcttgtatttgtgtgtttatgtgagttctgtctaagagatcagataagctctggaagcttcatcatctgtacctacatgtaactgtatctgggttacatgggcaggcggtaccaagtcctgctcttcgatggggtggctgagagataaaggttcctgaactctccttgctgtgtatgcaccacatctgtacttcagagaggtggaaaatcatctacaacactgcgtttcttgtggttgtgctgttactggtataaagtcaagtgccttcaatgctaaaggctcagaaatttttcttaaactgatttcatgtcctatgcaagtgttttctacaacctgcataaccagtactttgtaaaacttgtttacgcttcaattgtacatagtgatttttaaagaaatatatagtatttttatttaggtacctccaaacttgaattcgtctgtgtgaagcattgtaaaacgatacatttctcttttgagtaccattacagttgtacagaggttttcactgcttctatttttctactgttactgataagcatgtaacactgactttatcctacatatagttggcatttcaaataaatggcttgtatagaaaaaaaaaaagacaacaaacaacagacacaacagtgtcgtgggacggaccagggggcaccagcagaagaaaggatataaaaaaccaaaggatggagacacggcggacccaagatgctgataaggaacaaggtgccaaaagcggcgtcccagagagaatacggggcagagacaagggacggggatctcacgcaaaaaa

SEQ ID NO: 364551 - DNA, 8727 bp, Homo sapiens
gccacgtgaccctgagcgggacgacggcaggggagggcgggggctccggccggctccgcagcgccgcgcaggcgccccagggccacgccgaaccgagcccctcctgctccgtctaggagtcaaaatggcggcgaggggaacctggagcagtcccggagcctgagccactgacaggagaggagagggcggcggcggcggtgggaggaggatggccgggggtgctggcgccggtgcggacggcggtgctggtggcggcggcggcggaggcgacggcagcggtcccagcggcagcagcagcggcgggaggagcctccgggaaatggatgaaaagaggctgctggatccagggttgaaggttcataaaggcctctgggattatactctgaagaacccgcagacggaatgcctgagtgactgaagaaaatgggtgctaatgcatctaattatcctcattcatgttccccgagggtagggggaaattcacaggcccaacagacttttatagggacctcatcctattctcagcaaggctatggttgcgaatcaaagttgtatagccttgaccatggccatgagaaaccacaagacaaaaaaaagagaacctctggtcttgccaccctcaaaaagaagtttattaagcgtcggaaatctaataggtctgccgatcatgccaagcagatgcgagaactcctctctgggtgggatgttagagatgtcaatgcattagtggaggaatatgagggaacatcagcattaaaggagctttctctacaagccagtttggctagaccagaagcccggacattgcagaaagatatggctgatctttatgagtacaagtattgtactgatgtagacttaatatttcaagaaacttgttttcctgttcatcgtgccattttggcagcaaggtgtccattttttaaaacactgctttcttcctcaccagagtatggggcagagataataatggacatcaatacagctggtattgatatgcccatgttttctgctttgttacactacctttatacaggagagtttggaatggaggactcaaggtttcaaaatgtcgatatccttgttcagcttagtgaagaatttggaacaccaaattcccttgatgtagatatgcgtggactctttgattacatgtgttattatgatgtcgtccttagtttttcttcagactctgaactggttgaagcttttggtggaaatcagaactgtttagatgaagagctcaaagcccacaaggctgttatttctgcacggtccccattttttcgaaatttattacaaaggaggatacgaactggtgaagaaatcacagaccgaactttgaggactcccacaagaattatattagatgagtccattataccaaaaaaatatgcaacagtgatattacactgtatgtataccgacgtggtggacctctctgttttgcactgtagcccctctgtggggagtctcagtgaagttcaggctctcgtcgcagggaagccaaacatgaccagggcagaagaagccatggaactttaccacatagcactgttcttggaatttaacatgcttgcacaaggctgtgaggatatcattgctgagagcatctcattagataccttaattgccatcctcaagtggagttctcatccatatggctctaaatgggtgcaccgacaagctttacatttcctctgtgaggaattttcccaggtcatgacttcggatgttttttatgaactcagcaaagaccatctgcttactgctatccagtctgactacctacaggcaagtgaacaagatatccttaaatatctgattaaatggggagagcatcagttgatgaaaagaatagcagatagagagccaaacttactgagtggcactgcccatagtgtgaacaaaagaggtgtaaaaagacgggacctggacatggaagagctcagagagatcctttcttctctcttaccttttgtgcgaattgaacacatcttacctataaacagtgaagtcttaagtgatgcaatgaaaagaggcttgattagtactcctccatcagatatgcttcctacaacagaaggtgggaagtcaaatgcctggttacggcaaaaaaatgctggcatctatgttcgtcctcgactcttctctccctatgtggaagaagcaaagtcagtgctagatgagatgatggtggaacaaacggatcttgtgcgcttgcgaatggttagaatgtccaatgtgccagacacgctctacatggtcaataatgccgtgccacagtgttgtcacatgatcagccaccagcagatcagcagcaaccagtcaagccctccttcagttgtagccaacgaaattccagttcctcgtctcctcattatgaaagacatggtcagacgactgcaggaactgcggcacacggagcaggtgcagagggcctatgccctgaactgcggggaaggcgccactgtcagctatgaaattcagattcgagtgctaagagagtttggtcttgcagatgctgctgcagagctgttgcagaatcctcacaaattctttcctgatgaacgttttggggatgaaagtccactcttgacaatgagacagcctgggagatgtcgcgtaaacagtacacctcctgcagaaaccatgtttacagatctggactcttttgtggccttccatccacccttgccccctccaccacctccctaccaccccccagctaccccaatccataaccaactcaaagcaggctggaagcaaagacctcccagtcagcacccttcacgttcattttcttatccctgtaatcattcgctgttccactccagaacagctcctaaagctggccctcccccagtctacttgccgagtgtgaaagctgcaccgcctgattgtaccagcactgcaggactgggcagacagacggtggctgctgctgccgccaccaccacctcaacagcaacagcagcagcagcagcagcatctgagaagcaagtgcgaacacaacctgtgctgaatgatctgatgccagacatcgcggtgggtgtgtccacactgtcactcaaggacaggaggcttccagagcttgctgtagacacagaattaagccagtcagtttctgaagcaggaccagggcctccccagcatctgtcgtgtattccacagagacatacacacacttctcggaaaaaacacacactagagcaaaaaacagacaccagagaaaatccacaggaatatccggatttctatgacttctcaaatgctgcttgcagaccttctactcctgctctcagcagacgcaccccttccccttcgcaaggtggatattttggtcccgatctgtacagccacaataaggcatcaccaagtggcttaaagtcagcctacctacctggtcagacgtctcctaaaaaacaggaagaagctaggagagaatatccactttcccctgacgggcatctacacagacaaaagaatgagccgatacacctggatgtcgttgagcaacctccccagcggtcagactttcctttggcagccccagaaaatgctagtaccggtccagcccatgtcaggggacgaactgcagtagaaactgacttgacttttgggctgactcctaacagaccttcactttctgcatgtagctctgaagctcccgaagagagatccggtagaagactggcagacagtgagtccctgggccatggagctcagagaaatacagatttggaaagggaagattcaataagcagaggaaggaggtcaccaagcaagccggacttcctctacaaaaagtctgccctctgagagcaacctccaagtcgtctgtgcctgagatgtgaaacatcccattttatgatgtaacccaacaacttacagaccagttcatcaatgccagctgataactcggtttcacatgattttgttctagtttttgtgtatatatgtgtttattagacatggcatgctaagaaggttttgttttttttttttaatgttgcatctgtctaatttgtctttgaacaattatgtcgggaggcatttttaagaacaagcaggctggcactttttatttctctttacaaatgatggaatttttttgcacttgtacatttattttctctgtattgattttatatcagtatgttaaactttattgccacatttaaaggactgtattttcatacttttttgcattttacctttcatctaccaatccatgtgcattggattgcacactaagatgtattttcttacgaaatagttctgtgtttattttttaattatagaaattccaaagaacagcacatcagaatgctcctctcttttcagtaattgttttagttcagagatcttcccgctcagcctccataaatctaatgtcattttttttttaataagtcctaggagctgggcttcattcctccagcgggagtccagtcagggtcctgaagtttgctggttcaggaaagaacaggaaagagaaaagccttctgtgcccaggctaaagctgttacatttccacagtgtggatgcagtcagaatccctgcacattctggtcataaggattagagtcaccagatgaggctctaaacagatcgcatcccttggaattagaaagcagtggagaccgggcgcagtgactcacacctgtgatcggcacttcggaaggccgaggcgggcagatcactgaagctcaggagttcaagaccagcctgggcaacatggcgaaactccatttctataaaaaatacaaaaaaaaaaaaatctagccaggcgtggtggtgcgtgcctgtagtcccagctacttggggggctgaggtggcaggatcgcttgagcctgggaggttgagactgcagtgagccaagattgcaccactgtgctcccacctgggcaacagtgagaccctgtctcaaaaaaaaaaaaaaaggcagtggaaatagagaagtaacttaaaggtcacactgacagaatttctggttctgagcgtcaactctccagctgtgatggcggaactgactgcttgctgcctttaattgtcttgctctctatgggaaaaaaacaaaagggcttcagtctcatggatgttatttggtgtttgtaaagatacgttttcttttaaacgattttcaaaatatgtctaaattttggtgttgtgtaatgcataatgctttctcaccaacagaaaaaaggaaaaaaattgttttcagttaaacactacatgtcctacttgaactccactgggacgctggtttggcatttactaaaccactgagcacatggggtctttcaggatcctctcccttggaagggcaatgtgtgagctaaggactgttttttttcttactctccaatgtaaatatatgagtatttgagtttttaaatcacttcaacattatttgagcatttactttgtatttttacaaacacataaacacacagccgtagcacttagaagaaaagaggctttctaagcattccttcctctgcaggatatttgggatcctcttttctatgtatgtatatatataaaaaactatgaatcactcacactcactcgaaaactatgcagggctagggagcgtttatgagctaccgggtaaatgaattacatgcactttgaagtaaataggttttctattgggtgtcaacaacgctgatttctcccaaaactatagtttctcttacggtcttttcctcctttaccctgtggatatacactcaggaataatctgacattttagaaaagccgaacagtagatagtctccaagatgggaaacatgtcgtgtgtctgcacgccccggcaaactgccgccactcgttctgctgcctgactggttagctgctgtgcgggtgcgctcggtgacactggtggtggtgcacgctcccgagctcccagagttaacactaatctgcaggtcggctgtgcatcgcattcgaggctccttttttaaagagaaaagcataggcctctgttctcatttgtaagaagtttgactcataatagaagacggtgtcttttgaagcccagtctctgtctgtcttcagaaacaaaagtgaatgccgtcatgttccttgatgtgtgtttctgccacatatgtatgttgacatgttcatgtactgcgccggtactgcaagtaagactcaacagacctaatttggatggggagaaaaactctcatccctgacccttccccccccgcaaatgttagaccagagctgttgatcccacacattcatttttctgaaaattcatgaactattctctcatatccctgaaatataaaagtaagtggccactattcctaagattatttagtttataaagtttgcttttaatcatacaatagcttacctggctaaaactttgcgtataaagggaaaacttgctttaatctgtgggattgcggaccgatgcgacttgcagaaggtaaacaggcgtgggttttgtgtgcgttaggttaggtgttagtggacttttaatgtatcttgtgaagtatggttactagggtaggttcaagagctacatgcctctggcttttgaacccatctattaaatcttttttaatgctgtactaagataaatgtgaagtctgagtaaggttgctcagaaaaaaaaaaaaagcatatatatatataaaataaaatttaggccatgggaactggcattttacttggtataggaatttaatgagaaccaaatcacaaaaataccagatctccttttgagatcgtggacaatcaggcctttggacaatcaccgcttccagtgcccgctgtgcgtttgaggttagagacctaccgtttacacgctagagccgagaggacgttcaagtttcttaaagatgctgttggtcttttttcttatgttattgttttagttttgtgattttgatgaataattgaagttcagagtcacccgtggctcctaaggaaaaaacagcatcatgaaaggcaaaaagtatttgaaacgtaattgtttcaattttccacgcccgttctcacatgccccctttagctttatttctgggaacatgtcactagacctcagctagcctgacaccgcaataacccgttaggctttgaggcttttcagtgaattcttgacatttaaatcttcttatagaattctttatgaagccttaactaattcttgtttttgcttcctcagaaactttttattgcatctgccatccttcattggatttttgttttggtttgttgttgccattctagcaatgagcttagtccttgtacatctgcattaaggtgccgatgcagaaggcaaattggaaacacgcgccagcggcagtggggctcaaagccgacctccatgcatcattctctagagttgaaaggattgacatttctcagtaactacccggcaaaatatatattttcataatgttgaatttgccttttaggaaaacaatgtttcatgaaacacttgtaagatacttattttgaaattaattataaggcattcatatttttaggactgaattcaaagggaaatgcttctttgactttttttcattgttcggttgactttcagctttctggagtgacaaagcagcagtgatgggtgctattcctggttctgtggtggtttactttgtctactaagtgatttactttcaaacctcattacagataatcttactaaaagacttaacatgcacactgctaaaaggtgttttactgttttccattaacgctgttgtatgaacaatatttggtgacatgttgtctttttgtcctgtagattgtcatatctgttatgtagttatccttttggcaagtcctttgatttttttttcctctagaaaatcctcagactgtcaatcttccatattttgaatattataatgctgtggccatttctatagaaagattacttgcaagtgtgtgtcttgaaaataacctcttgtatttgtgtgtttatgtgagttctgtctaagagatcagataagctctggaagcttcatcatctgtacctacatgtaactgtatctgggttacatgggcaggcggtaccaagtcctgctcttcgatggggtggctgagagataaaggttcctgaactctccttgctgtgtatgcaccacatctgtacttcagagaggtggaaaatcatctacaacactgcgtttcttgtggttgtgctgttactggtataaagtcaagtgccttcaatgctaaaggctcagaaatttttcttaaactgatttcatgtcctatgcaagtgttttctacaacctgcataaccagtactttgtaaaacttgtttacgcttcaattgtacatagtgatttttaaagaaatatatagtatttttatttaggtacctccaaacttgaattcgtctgtgtgaagcattgtaaaacgatacatttctcttttgagtaccattacagttgtacagaggttttcactgcttctatttttctactgttactgataagcatgtaacactgactttatcctacatatagttggcatttcaaataaatggcttgtatagaaaaaaaaaaaaaaaaaaaaaaaaaaaaaaaaaaacaaaaaaaaaaaaaaaaaaaaaaacaacaccaaaaaaaaccaccacaaaaaaccaacccaacaccaaccatcccaacaaaacaaaccccccccacaacactaccctctcattccacacccaccaacacaaatcccaataacacacacccg

SEQ ID NO: 364552 - DNA, 8673 bp, Homo sapiens
gccacgtgaccctgagcgggacgacggcaggggagggcgggggctccggccggctccgcagcgccgcgcaggcgccccagggccacgccgaaccgagcccctcctgctccgtctaggagtcaaaatggcggcgaggggaacctggagcagtcccggagcctgagccactgacaggagaggagagggcggcggcggcggtgggaggaggatggccgggggtgctggcgccggtgcggacggcggtgctggtggcggcggcggcggaggcgacggcagcggtcccagcggcagcagcagcggcgggaggagcctccgggaaatggatgaaaagaggctgctggatccagggttgaaggttcataaaggcctctgggattatactctgaagaacccgcagacggaatgcctgagtgactgaagaaaatgggtgctaatgcatctaattatcctcattcatgttccccgagggtagggggaaattcacaggcccaacagacttttatagggacctcatcctattctcagcaaggctatggttgcgaatcaaagttgtatagccttgaccatggccatgagaaaccacaagacaaaaaaaagagaacctctggtcttgccaccctcaaaaagaagtttattaagcgtcggaaatctaataggtctgccgatcatgccaagcagatgcgagaactcctctctgggtgggatgttagagatgtcaatgcattagtggaggaatatgagggaacatcagcattaaaggagctttctctacaagccagtttggctagaccagaagcccggacattgcagaaagatatggctgatctttatgagtacaagtattgtactgatgtagacttaatatttcaagaaacttgttttcctgttcatcgtgccattttggcagcaaggtgtccattttttaaaacactgctttcttcctcaccagagtatggggcagagataataatggacatcaatacagctggtattgatatgcccatgttttctgctttgttacactacctttatacaggagagtttggaatggaggactcaaggtttcaaaatgtcgatatccttgttcagcttagtgaagaatttggaacaccaaattcccttgatgtagatatgcgtggactctttgattacatgtgttattatgatgtcgtccttagtttttcttcagactctgaactggttgaagcttttggtggaaatcagaactgtttagatgaagagctcaaagcccacaaggctgttatttctgcacggtccccattttttcgaaatttattacaaaggaggatacgaactggtgaagaaatcacagaccgaactttgaggactcccacaagaattatattagatgagtccattataccaaaaaaatatgcaacagtgatattacactgtatgtataccgacgtggtggacctctctgttttgcactgtagcccctctgtggggagtctcagtgaagttcaggctctcgtcgcagggaagccaaacatgaccagggcagaagaagccatggaactttaccacatagcactgttcttggaatttaacatgcttgcacaaggctgtgaggatatcattgctgagagcatctcattagataccttaattgccatcctcaagtggagttctcatccatatggctctaaatgggtgcaccgacaagctttacatttcctctgtgaggaattttcccaggtcatgacttcggatgttttttatgaactcagcaaagaccatctgcttactgctatccagtctgactacctacaggcaagtgaacaagatatccttaaatatctgattaaatggggagagcatcagttgatgaaaagaatagcagatagagagccaaacttactgagtggcactgcccatagtgtgaacaaaagaggtgtaaaaagacgggacctggacatggaagagctcagagagatcctttcttctctcttaccttttgtgcgaattgaacacatcttacctataaacagtgaagtcttaagtgatgcaatgaaaagaggcttgattagtactcctccatcagatatgcttcctacaacagaaggtgggaagtcaaatgcctggttacggcaaaaaaatgctggcatctatgttcgtcctcgactcttctctccctatgtggaagaagcaaagtcagtgctagatgagatgatggtggaacaaacggatcttgtgcgcttgcgaatggttagaatgtccaatgtgccagacacgctctacatggtcaataatgccgtgccacagtgttgtcacatgatcagccaccagcagatcagcagcaaccagtcaagccctccttcagttgtagccaacgaaattccagttcctcgtctcctcattatgaaagacatggtcagacgactgcaggaactgcggcacacggagcaggtgcagagggcctatgccctgaactgcggggaaggcgccactgtcagctatgaaattcagattcgagtgctaagagagtttggtcttgcagatgctgctgcagagctgttgcagaatcctcacaaattctttcctgatgaacgttttggggatgaaagtccactcttgacaatgagacagcctgggagatgtcgcgtaaacagtacacctcctgcagaaaccatgtttacagatctggactcttttgtggccttccatccacccttgccccctccaccacctccctaccaccccccagctaccccaatccataaccaactcaaagcaggctggaagcaaagacctcccagtcagcacccttcacgttcattttcttatccctgtaatcattcgctgttccactccagaacagctcctaaagctggccctcccccagtctacttgccgagtgtgaaagctgcaccgcctgattgtaccagcactgcaggactgggcagacagacggtggctgctgctgccgccaccaccacctcaacagcaacagcagcagcagcagcagcatctgagaagcaagtgcgaacacaacctgtgctgaatgatctgatgccagacatcgcggtgggtgtgtccacactgtcactcaaggacaggaggcttccagagcttgctgtagacacagaattaagccagtcagtttctgaagcaggaccagggcctccccagcatctgtcgtgtattccacagagacatacacacacttctcggaaaaaacacacactagagcaaaaaacagacaccagagaaaatccacaggaatatccggatttctatgacttctcaaatgctgcttgcagaccttctactcctgctctcagcagacgcaccccttccccttcgcaaggtggatattttggtcccgatctgtacagccacaataaggcatcaccaagtggcttaaagtcagcctacctacctggtcagacgtctcctaaaaaacaggaagaagctaggagagaatatccactttcccctgacgggcatctacacagacaaaagaatgagccgatacacctggatgtcgttgagcaacctccccagcggtcagactttcctttggcagccccagaaaatgctagtaccggtccagcccatgtcaggggacgaactgcagtagaaactgacttgacttttgggctgactcctaacagaccttcactttctgcatgtagctctgaagctcccgaagagagatccggtagaagactggcagacagtgagtccctgggccatggagctcagagaaatacagatttggaaagggaagattcaataagcagaggaaggaggtcaccaagcaagccggacttcctctacaaaaagtctgccctctgagagcaacctccaagtcgtctgtgcctgagatgtgaaacatcccattttatgatgtaacccaacaacttacagaccagttcatcaatgccagctgataactcggtttcacatgattttgttctagtttttgtgtatatatgtgtttattagacatggcatgctaagaaggttttgttttttttttttaatgttgcatctgtctaatttgtctttgaacaattatgtcgggaggcatttttaagaacaagcaggctggcactttttatttctctttacaaatgatggaatttttttgcacttgtacatttattttctctgtattgattttatatcagtatgttaaactttattgccacatttaaaggactgtattttcatacttttttgcattttacctttcatctaccaatccatgtgcattggattgcacactaagatgtattttcttacgaaatagttctgtgtttattttttaattatagaaattccaaagaacagcacatcagaatgctcctctcttttcagtaattgttttagttcagagatcttcccgctcagcctccataaatctaatgtcattttttttttaataagtcctaggagctgggcttcattcctccagcgggagtccagtcagggtcctgaagtttgctggttcaggaaagaacaggaaagagaaaagccttctgtgcccaggctaaagctgttacatttccacagtgtggatgcagtcagaatccctgcacattctggtcataaggattagagtcaccagatgaggctctaaacagatcgcatcccttggaattagaaagcagtggagaccgggcgcagtgactcacacctgtgatcggcacttcggaaggccgaggcgggcagatcactgaagctcaggagttcaagaccagcctgggcaacatggcgaaactccatttctataaaaaatacaaaaaaaaaaaaatctagccaggcgtggtggtgcgtgcctgtagtcccagctacttggggggctgaggtggcaggatcgcttgagcctgggaggttgagactgcagtgagccaagattgcaccactgtgctcccacctgggcaacagtgagaccctgtctcaaaaaaaaaaaaaaaggcagtggaaatagagaagtaacttaaaggtcacactgacagaatttctggttctgagcgtcaactctccagctgtgatggcggaactgactgcttgctgcctttaattgtcttgctctctatgggaaaaaaacaaaagggcttcagtctcatggatgttatttggtgtttgtaaagatacgttttcttttaaacgattttcaaaatatgtctaaattttggtgttgtgtaatgcataatgctttctcaccaacagaaaaaaggaaaaaaattgttttcagttaaacactacatgtcctacttgaactccactgggacgctggtttggcatttactaaaccactgagcacatggggtctttcaggatcctctcccttggaagggcaatgtgtgagctaaggactgttttttttcttactctccaatgtaaatatatgagtatttgagtttttaaatcacttcaacattatttgagcatttactttgtatttttacaaacacataaacacacagccgtagcacttagaagaaaagaggctttctaagcattccttcctctgcaggatatttgggatcctcttttctatgtatgtatatatataaaaaactatgaatcactcacactcactcgaaaactatgcagggctagggagcgtttatgagctaccgggtaaatgaattacatgcactttgaagtaaataggttttctattgggtgtcaacaacgctgatttctcccaaaactatagtttctcttacggtcttttcctcctttaccctgtggatatacactcaggaataatctgacattttagaaaagccgaacagtagatagtctccaagatgggaaacatgtcgtgtgtctgcacgccccggcaaactgccgccactcgttctgctgcctgactggttagctgctgtgcgggtgcgctcggtgacactggtggtggtgcacgctcccgagctcccagagttaacactaatctgcaggtcggctgtgcatcgcattcgaggctccttttttaaagagaaaagcataggcctctgttctcatttgtaagaagtttgactcataatagaagacggtgtcttttgaagcccagtctctgtctgtcttcagaaacaaaagtgaatgccgtcatgttccttgatgtgtgtttctgccacatatgtatgttgacatgttcatgtactgcgccggtactgcaagtaagactcaacagacctaatttggatggggagaaaaactctcatccctgacccttccccccccgcaaatgttagaccagagctgttgatcccacacattcatttttctgaaaattcatgaactattctctcatatccctgaaatataaaagtaagtggccactattcctaagattatttagtttataaagtttgcttttaatcatacaatagcttacctggctaaaactttgcgtataaagggaaaacttgctttaatctgtgggattgcggaccgatgcgacttgcagaaggtaaacaggcgtgggttttgtgtgcgttaggttaggtgttagtggacttttaatgtatcttgtgaagtatggttactagggtaggttcaagagctacatgcctctggcttttgaacccatctattaaatcttttttaatgctgtactaagataaatgtgaagtctgagtaaggttgctcagaaaaaaaaaaaaagcatatatatatataaaataaaatttaggccatgggaactggcattttacttggtataggaatttaatgagaaccaaatcacaaaaataccagatctccttttgagatcgtggacaatcaggcctttggacaatcaccgcttccagtgcccgctgtgcgtttgaggttagagacctaccgtttacacgctagagccgagaggacgttcaagtttcttaaagatgctgttggtcttttttcttatgttattgttttagttttgtgattttgatgaataattgaagttcagagtcacccgtggctcctaaggaaaaaacagcatcatgaaaggcaaaaagtatttgaaacgtaattgtttcaattttccacgcccgttctcacatgccccctttagctttatttctgggaacatgtcactagacctcagctagcctgacaccgcaataacccgttaggctttgaggcttttcagtgaattcttgacatttaaatcttcttatagaattctttatgaagccttaactaattcttgtttttgcttcctcagaaactttttattgcatctgccatccttcattggatttttgttttggtttgttgttgccattctagcaatgagcttagtccttgtacatctgcattaaggtgccgatgcagaaggcaaattggaaacacgcgccagcggcagtggggctcaaagccgacctccatgcatcattctctagagttgaaaggattgacatttctcagtaactacccggcaaaatatatattttcataatgttgaatttgccttttaggaaaacaatgtttcatgaaacacttgtaagatacttattttgaaattaattataaggcattcatatttttaggactgaattcaaagggaaatgcttctttgactttttttcattgttcggttgactttcagctttctggagtgacaaagcagcagtgatgggtgctattcctggttctgtggtggtttactttgtctactaagtgatttactttcaaacctcattacagataatcttactaaaagacttaacatgcacactgctaaaaggtgttttactgttttccattaacgctgttgtatgaacaatatttggtgacatgttgtctttttgtcctgtagattgtcatatctgttatgtagttatccttttggcaagtcctttgatttttttttcctctagaaaatcctcagactgtcaatcttccatattttgaatattataatgctgtggccatttctatagaaagattacttgcaagtgtgtgtcttgaaaataacctcttgtatttgtgtgtttatgtgagttctgtctaagagatcagataagctctggaagcttcatcatctgtacctacatgtaactgtatctgggttacatgggcaggcggtaccaagtcctgctcttcgatggggtggctgagagataaaggttcctgaactctccttgctgtgtatgcaccacatctgtacttcagagaggtggaaaatcatctacaacactgcgtttcttgtggttgtcttaaactgatttcatgtcctatgcaagtgttttctacaacctgcataaccagtactttgtaaaacttgtttacgcttcaattgtacatagtgatttttaaagaaatatatagtatttttatttaggtacctccaaacttgaattcgtctgtgtgaagcattgtaaaacgatacatttctcttttgagtaccattacagttgtacagaggttttcactgcttctatttttctactgttactgataagcatgtaacactgactttatcctacatatagttggcatttcaaataaatggcttgtatagaaaaaaaaaaaaaaaaaaaaaaaaaaaaaaaaaaacaaaaaaaaaaaaaaaaaaaaaaacaacaccaaaaaaaaccaccacaaaaaaccaacccaacaccaaccatcccaacaaaacaaaccccccccacaacactaccctctcattccacacccaccaacacaaatcccaataacacacacccg

SEQ ID NO: 364553 - DNA, 8354 bp, Homo sapiens
gccacgtgaccctgagcgggacgacggcaggggagggcgggggctccggccggctccgcagcgccgcgcaggcgccccagggccacgccgaaccgagcccctcctgctccgtctaggagtcaaaatggcggcgaggggaacctggagcagtcccggagcctgagccactgacaggagaggagagggcggcggcggcggtgggaggaggatggccgggggtgctggcgccggtgcggacggcggtgctggtggcggcggcggcggaggcgacggcagcggtcccagcggcagcagcagcggcgggaggagcctccgggaaatggatgaaaagaggctgctggatccagggttgaaggttcataaaggcctctgggattatactctgaagaacccgcagacggaatgcctgagtgactgaagaaaatgggtgctaatgcatctaattatcctcattcatgttccccgagggtagggggaaattcacaggcccaacagacttttatagggacctcatcctattctcagcaaggctatggttgcgaatcaaagttgtatagccttgaccatggccatgagaaaccacaagacaaaaaaaagagaacctctggtcttgccaccctcaaaaagaagtttattaagcgtcggaaatctaataggtctgccgatcatgccaagcagatgcgagaactcctctctgggtgggatgttagagatgtcaatgcattagtggaggaatatgagggaacatcagcattaaaggagctttctctacaagccagtttggctagaccagaagcccggacattgcagaaagatatggctgatctttatgagtacaagtattgtactgatgtagacttaatatttcaagaaacttgttttcctgttcatcgtgccattttggcagcaaggtgtccattttttaaaacactgctttcttcctcaccagagtatggggcagagataataatggacatcaatacagctggtattgatatgcccatgttttctgctttgttacactacctttatacaggagagtttggaatggaggactcaaggtttcaaaatgtcgatatccttgttcagcttagtgaagaatttggaacaccaaattcccttgatgtagatatgcgtggactctttgattacatgtgttattatgatgtcgtccttagtttttcttcagactctgaactggttgaagcttttggtggaaatcagaactgtttagatgaagagctcaaagcccacaaggctgttatttctgcacggtccccattttttcgaaatttattacaaaggaggatacgaactggtgaagaaatcacagaccgaactttgaggactcccacaagaattatattagatgagtccattataccaaaaaaatatgcaacagtgatattacactgtatgtataccgacgtggtggacctctctgttttgcactgtagcccctctgtggggagtctcagtgaagttcaggctctcgtcgcagggaagccaaacatgaccagggcagaagaagccatggaactttaccacatagcactgttcttggaatttaacatgcttgcacaaggctgtgaggatatcattgctgagagcatctcattagataccttaattgccatcctcaagtggagttctcatccatatggctctaaatgggtgcaccgacaagctttacatttcctctgtgaggaattttcccaggtcatgacttcggatgttttttatgaactcagcaaagaccatctgcttactgctatccagtctgactacctacaggcaagtgaacaagatatccttaaatatctgattaaatggggagagcatcagttgatgaaaagaatagcagatagagagccaaacttactgagtggcactgcccatagtgtgaacaaaagaggtgtaaaaagacgggacctggacatggaagagctcagagagatcctttcttctctcttaccttttgtgcgaattgaacacatcttacctataaacagtgaagtcttaagtgatgcaatgaaaagaggcttgattagtactcctccatcagatatgcttcctacaacagaaggtgggaagtcaaatgcctggttacggcaaaaaaatgctggcatctatgttcgtcctcgactcttctctccctatgtggaagaagcaaagtcagtgctagatgagatgatggtggaacaaacggatcttgtgcgcttgcgaatggttagaatgtccaatgtgccagacacgctctacatggtcaataatgccgtgccacagtgttgtcacatgatcagccaccagcagatcagcagcaaccagtcaagccctccttcagttgtagccaacgaaattccagttcctcgtctcctcattatgaaagacatggtcagacgactgcaggaactgcggcacacggagcaggtgcagagggcctatgccctgaactgcggggaaggcgccactgtcagctatgaaattcagattcgagtgctaagagagtttggtcttgcagatgctgctgcagagctgttgcagaatcctcacaaattctttcctgatgaacgttttggggatgaaagtccactcttgacaatgagacagcctgggagatgtcgcgtaaacagtacacctcctgcagaaaccatgtttacagatctggactcttttgtggccttccatccacccttgccccctccaccacctccctaccaccccccagctaccccaatccataaccaactcaaagcaggctggaagcaaagacctcccagtcagcacccttcacgttcattttcttatccctgtaatcattcgctgttccactccagaacagctcctaaagctggccctcccccagtctacttgccgagtgtgaaagctgcaccgcctgattgtaccagcactgcaggactgggcagacagacggtggctgctgctgccgccaccaccacctcaacagcaacagcagcagcagcagcagcatctgagaagcaagtgcgaacacaacctgtgctgaatgatctgatgccagacatcgcggtgggtgtgtccacactgtcactcaaggacaggaggcttccagagcttgctgtagacacagaattaagccagtcagtttctgaagcaggaccagggcctccccagcatctgtcgtgtattccacagagacatacacacacttctcggaaaaaacacacactagagcaaaaaacagacaccagagaaaatccacaggaatatccggatttctatgacttctcaaatgctgcttgcagaccttctactcctgctctcagcagacgcaccccttccccttcgcaaggtggatattttggtcccgatctgtacagccacaataaggcatcaccaagtggcttaaagtcagcctacctacctggtcagacgtctcctaaaaaacaggaagaagctaggagagaatatccactttcccctgacgggcatctacacagacaaaagaatgagccgatacacctggatgtcgttgagcaacctccccagcggtcagactttcctttggcagccccagaaaatgctagtaccggtccagcccatgtcaggggacgaactgcagtagaaactgacttgacttttgggctgactcctaacagaccttcactttctgcatgtagctctgaagctcccgaagagagatccggtagaagactggcagacagtgagtccctgggccatggagctcagagaaatacagatttggaaagggaagattcaataagcagaggaaggaggtcaccaagcaagccggacttcctctacaaaaagtctgccctctgagagcaacctccaagtcgtctgtgcctgagatgtgaaacatcccattttatgatgtaacccaacaacttacagaccagttcatcaatgccagctgataactcggtttcacatgattttgttctagtttttgtgtatatatgtgtttattagacatggcatgctaagaaggttttgttttttttttttaatgttgcatctgtctaatttgtctttgaacaattatgtcgggaggcatttttaagaacaagcaggctggcactttttatttctctttacaaatgatggaatttttttgcacttgtacatttattttctctgtattgattttatatcagtatgttaaactttattgccacatttaaaggactgtattttcatacttttttgcattttacctttcatctaccaatccatgtgcattggattgcacactaagatgtattttcttacgaaatagttctgtgtttattttttaattatagaaattccaaagaacagcacatcagaatgctcctctcttttcagtaattgttttagttcagagatcttcccgctcagcctccataaatctaatgtcattttttttttaataagtcctaggagctgggcttcattcctccagcgggagtccagtcagggtcctgaagtttgctggttcaggaaagaacaggaaagagaaaagccttctgtgcccaggctaaagctgttacatttccacagtgtggatgcagtcagaatccctgcacattctggtcataaggattagagtcaccagatgaggctctaaacagatcgcatcccttggaattagaaagcagtggagaccgggcgcagtgactcacacctgtgatcggcacttcggaaggccgaggcgggcagatcactgaagctcaggagttcaagaccagcctgggcaacatggcgaaactccatttctataaaaaatacaaaaaaaaaaaaatctagccaggcgtggtggtgcgtgcctgtagtcccagctacttggggggctgaggtggcaggatcgcttgagcctgggaggttgagactgcagtgagccaagattgcaccactgtgctcccacctgggcaacagtgagaccctgtctcaaaaaaaaaaaaaaaggcagtggaaatagagaagtaacttaaaggtcacactgacagaatttctggttctgagcgtcaactctccagctgtgatggcggaactgactgcttgctgcctttaattgtcttgctctctatgggaaaaaaacaaaagggcttcagtctcatggatgttatttggtgtttgtaaagatacgttttcttttaaacgattttcaaaatatgtctaaattttggtgttgtgtaatgcataatgctttctcaccaacagaaaaaaggaaaaaaattgttttcagttaaacactacatgtcctacttgaactccactgggacgctggtttggcatttactaaaccactgagcacatggggtctttcaggatcctctcccttggaagggcaatgtgtgagctaaggactgttttttttcttactctccaatgtaaatatatgagtatttgagtttttaaatcacttcaacattatttgagcatttactttgtatttttacaaacacataaacacacagccgtagcacttagaagaaaagaggctttctaagcattccttcctctgcaggatatttgggatcctcttttctatgtatgtatatatataaaaaactatgaatcactcacactcactcgaaaactatgcagggctagggagcgtttatgagctaccgggtaaatgaattacatgcactttgaagtaaataggttttctattgggtgtcaacaacgctgatttctcccaaaactatagtttctcttacggtcttttcctcctttaccctgtggatatacactcaggaataatctgacattttagaaaagccgaacagtagatagtctccaagatgggaaacatgtcgtgtgtctgcacgccccggcaaactgccgccactcgttctgctgcctgactggttagctgctgtgcgggtgcgctcggtgacactggtggtggtgcacgctcccgagctcccagagttaacactaatctgcaggtcggctgtgcatcgcattcgaggctccttttttaaagagaaaagcataggcctctgttctcatttgtaagaagtttgactcataatagaagacggtgtcttttgaagcccagtctctgtctgtcttcagaaacaaaagtgaatgccgtcatgttccttgatgtgtgtttctgccacatatgtatgttgacatgttcatgtactgcgccggtactgcaagtaagactcaacagacctaatttggatggggagaaaaactctcatccctgacccttccccccccgcaaatgttagaccagagctgttgatcccacacattcatttttctgaaaattcatgaactattctctcatatccctgaaatataaaagtaagtggccactattcctaagattatttagtttataaagtttgcttttaatcatacaatagcttacctggctaaaactttgcgtataaagggaaaacttgctttaatctgtgggattgcggaccgatgcgacttgcagaaggtaaacaggcgtgggttttgtgtgcgttaggttaggtgttagtggacttttaatgtatcttgtgaagtatggttactagggtaggttcaagagctacatgcctctggcttttgaacccatctattaaatcttttttaatgctgtactaagataaatgtgaagtctgagtaaggttgctcagaaaaaaaaaaaaagcatatatatatataaaataaaatttaggccatgggaactggcattttacttggtataggaatttaatgagaaccaaatcacaaaaataccagatctccttttgagatcgtggacaatcaggcctttggacaatcaccgcttccagtgcccgctgtgcgtttgaggttagagacctaccgtttacacgctagagccgagaggacgttcaagtttcttaaagatgctgttggtcttttttcttatgttattgttttagttttgtgattttgatgaataattgaagttcagagtcacccgtggctcctaaggaaaaaacagcatcatgaaaggcaaaaagtatttgaaacgtaattgtttcaattttccacgcccgttctcacatgccccctttagctttatttctgggaacatgtcactagacctcagctagcctgacaccgcaataacccgttaggctttgaggcttttcagtgaattcttgacatttaaatcttcttatagaattctttatgaagccttaactaattcttgtttttgcttcctcagaaactttttattgcatctgccatccttcattggatttttgttttggtttgttgttgccattctagcaatgagcttagtccttgtacatctgcattaaggtgccgatgcagaaggcaaattggaaacacgcgccagcggcagtggggctcaaagccgacctccatgcatcattctctagagttgaaaggattgacatttctcagtaactacccggcaaaatatatattttcataatgttgaatttgccttttaggaaaacaatgtttcatgaaacacttgtaagatacttattttgaaattaattataaggcattcatatttttaggactgaattcaaagggaaatgcttctttgactttttttcattgttcggttgactttcagctttctggagtgacaaagcagcagtgatgggtgctattcctggttctgtggtggtttactttgtctactaagtgatttactttcaaacctcattacagataatcttactaaaagacttaacatgcacactgctaaaaggtgttttactgttttccattaacgctgttgtatgaacaatatttggtgacatgttgtctttttgtcctgtagattgtcatatctgttatgtagttatccttttggcaagtcctttgatttttttttcctctagaaaatcctcagactgtcaatcttccatattttgaatattataatgctgtggccatttctatagaaagattacttgcaagtgtgtgtcttgaaaataacctcttgtatttgtgtgtttatgtgagttctgtctaagagatcagataagctctggaagcttcatcatctgtacctacatgtaactgtatctgggttacatgggcaggcggtaccaagtcctgctcttcgatggggtggctgagagataaaggttcctgaactctccttgctgtgtatgcaccacatctgtacttcagagaggtggaaaatcatctacaacactgcgtttcttgtggttgtgctgttactggtataaagtcaacattgtaaaacgatacatttctcttttgagtaccattacagttgtacagaggttttcactgcttctatttttctactgttactgataagcatgtaacactgactttatcctacatatagttggcatttcaaataaatggcttgtatagaa

SEQ ID NO: 364554 - DNA, 5742 bp, Homo sapiens
gccacgtgaccctgagcgggacgacggcaggggagggcgggggctccggccggctccgcagcgccgcgcaggcgccccagggccacgccgaaccgagcccctcctgctccgtctaggagtcaaaatggcggcgaggggaacctggagcagtcccggagcctgagccactgacaggagaggagagggcggcggcggcggtgggaggaggatggccgggggtgctggcgccggtgcggacggcggtgctggtggcggcggcggcggaggcgacggcagcggtcccagcggcagcagcagcggcgggaggagcctccgggaaatggatgaaaagaggctgctggatccagggttgaaggttcataaaggcctctgggattatactctgaagaacccgcagacggaatgcctgagtgactgaagaaaatgggtgctaatgcatctaattatcctcattcatgttccccgagggtagggggaaattcacaggcccaacagacttttatagggacctcatcctattctcagcaaggctatggttgcgaatcaaagttgtatagccttgaccatggccatgagaaaccacaagacaaaaaaaagagaacctctggtcttgccaccctcaaaaagaagtttattaagcgtcggaaatctaataggtctgccgatcatgccaagcagatgcgagaactcctctctgggtgggatgttagagatgtcaatgcattagtggaggaatatgagggaacatcagcattaaaggagctttctctacaagccagtttggctagaccagaagcccggacattgcagaaagatatggctgatctttatgagtacaagtattgtactgatgtagacttaatatttcaagaaacttgttttcctgttcatcgtgccattttggcagcaaggtgtccattttttaaaacactgctttcttcctcaccagagtatggggcagagataataatggacatcaatacagctggtattgatatgcccatgttttctgctttgttacactacctttatacaggagagtttggaatggaggactcaaggtttcaaaatgtcgatatccttgttcagcttagtgaagaatttggaacaccaaattcccttgatgtagatatgcgtggactctttgattacatgtgttattatgatgtcgtccttagtttttcttcagactctgaactggttgaagcttttggtggaaatcagaactgtttagatgaagagctcaaagcccacaaggctgttatttctgcacggtccccattttttcgaaatttattacaaaggaggatacgaactggtgaagaaatcacagaccgaactttgaggactcccacaagaattatattagatgagtccattataccaaaaaaatatgcaacagtgatattacactgtatgtataccgacgtggtggacctctctgttttgcactgtagcccctctgtggggagtctcagtgaagttcaggctctcgtcgcagggaagccaaacatgaccagggcagaagaagccatggaactttaccacatagcactgttcttggaatttaacatgcttgcacaaggctgtgaggatatcattgctgagagcatctcattagataccttaattgccatcctcaagtggagttctcatccatatggctctaaatgggtgcaccgacaagctttacatttcctctgtgaggaattttcccaggtcatgacttcggatgttttttatgaactcagcaaagaccatctgcttactgctatccagtctgactacctacaggcaagtgaacaagatatccttaaatatctgattaaatggggagagcatcagttgatgaaaagaatagcagatagagagccaaacttactgagtggcactgcccatagtgtgaacaaaagaggtgtaaaaagacgggacctggacatggaagagctcagagagatcctttcttctctcttaccttttgtgcgaattgaacacatcttacctataaacagtgaagtcttaagtgatgcaatgaaaagaggcttgattagtactcctccatcagatatgcttcctacaacagaaggtgggaagtcaaatgcctggttacggcaaaaaaatgctggcatctatgttcgtcctcgactcttctctccctatgtggaagaagcaaagtcagtgctagatgagatgatggtggaacaaacggatcttgtgcgcttgcgaatggttagaatgtccaatgtgccagacacgctctacatggtcaataatgccgtgccacagtgttgtcacatgatcagccaccagcagatcagcagcaaccagtcaagccctccttcagttgtagccaacgaaattccagttcctcgtctcctcattatgaaagacatggtcagacgactgcaggaactgcggcacacggagcaggtgcagagggcctatgccctgaactgcggggaaggcgccactgtcagctatgaaattcagattcgagtgctaagagagtttggtcttgcagatgctgctgcagagctgttgcagaatcctcacaaattctttcctgatgaacgttttggggatgaaagtccactcttgacaatgagacagcctgggagatgtcgcgtaaacagtacacctcctgcagaaaccatgtttacagatctggactcttttgtggccttccatccacccttgccccctccaccacctccctaccaccccccagctaccccaatccataaccaactcaaagcaggctggaagcaaagacctcccagtcagcacccttcacgttcattttcttatccctgtaatcattcgctgttccactccagaacagctcctaaagctggccctcccccagtctacttgccgagtgtgaaagctgcaccgcctgattgtaccagcactgcaggactgggcagacagacggtggctgctgctgccgccaccaccacctcaacagcaacagcagcagcagcagcagcatctgagaagcaagtgcgaacacaacctgtgctgaatgatctgatgccagacatcgcggtgggtgtgtccacactgtcactcaaggacaggaggcttccagagcttgctgtagacacagaattaagccagtcagtttctgaagcaggaccagggcctccccagcatctgtcgtgtattccacagagacatacacacacttctcggaaaaaacacacactagagcaaaaaacagacaccagagaaaatccacaggaatatccggatttctatgacttctcaaatgctgcttgcagaccttctactcctgctctcagcagacgcaccccttccccttcgcaaggtggatattttggtcccgatctgtacagccacaataaggcatcaccaagtggcttaaagtcagcctacctacctggtcagacgtctcctaaaaaacaggaagaagctaggagagaatatccactttcccctgacgggcatctacacagacaaaagaatgagccgatacacctggatgtcgttgagcaacctccccagcggtcagactttcctttggcagccccagaaaatgctagtaccggtccagcccatgtcaggggacgaactgcagtagaaactgacttgacttttgggctgactcctaacagaccttcactttctgcatgtagctctgaagctcccgaagagagatccggtagaagactggcagacagtgagtccctgggccatggagctcagagaaatacagatttggaaagggaagattcaataagcagaggaaggaggtcaccaagcaagccggacttcctctacaaaaagtctgccctctgagagcaacctccaagtcgtctgtgcctgagatgtgaaacatcccattttatgatgtaacccaacaacttacagaccagttcatcaatgccagctgataactcggtttcacatgattttgttctagtttttgtgtatatatgtgtttattagacatggcatgctaagaaggttttgttttttttttttaatgttgcatctgtctaatttgtctttgaacaattatgtcgggaggcatttttaagaacaagcaggctggcactttttatttctctttacaaatgatggaatttttttgcacttgtacatttattttctctgtattgattttatatcagtatgttaaactttattgccacatttaaaggactgtattttcatacttttttgcattttacctttcatctaccaatccatgtgcattggattgcacactaagatgtattttcttacgaaatagttctgtgtttattttttaattatagaaattccaaagaacagcacatcagaatgctcctctcttttcagtaattgttttagttcagagatcttcccgctcagcctccataaatctaatgtcattttttttttaataagtcctaggagctgggcttcattcctccagcgggagtccagtcagggtcctgaagtttgctggttcaggaaagaacaggaaagagaaaagccttctgtgcccaggctaaagctgttacatttccacagtgtggatgcagtcagaatccctgcacattctggtcataaggattagagtcaccagatgaggctctaaacagatcgcatcccttggaattagaaagcagtggagaccgggcgcagtgactcacacctgtgatcggcacttcggaaggccgaggcgggcagatcactgaagctcaggagttcaagaccagcctgggcaacatggcgaaactccatttctataaaaaatacaaaaaaaaaaaaatctagccaggcgtggtggtgcgtgcctgtagtcccagctacttggggggctgaggtggcaggatcgcttgagcctgggaggttgagactgcagtgagccaagattgcaccactgtgctcccacctgggcaacagtgagaccctgtctcaaaaaaaaaaaaaaaggcagtggaaatagagaagtaacttaaaggtcacactgacagaatttctggttctgagcgtcaactctccagctgtgatggcggaactgactgcttgctgcctttaattgtcttgctctctatgggaaaaaaacaaaagggcttcagtctcatggatgttatttggtgtttgtaaagatacgttttcttttaaacgattttcaaaatatgtctaaattttggtgttgtgtaatgcataatgctttctcaccaacagaaaaaaggaaaaaaattgttttcagttaaacactacatgtcctacttgaactccactgggacgctggtttggcatttactaaaccactgagcacatggggtctttcaggatcctctcccttggaagggcaatgtgtgagctaaggactgttttttttcttactctccaatgtaaatatatgagtatttgagtttttaaatcacttcaacattatttgagcatttactttgtatttttacaaacacataaacacacagccgtagcacttagaagaaaagaggctttctaagcattccttcctctgcaggatatttgggatcctcttttctatgtatgtatatatataaaaaactatgaatcactcacactcactcgaaaactatgcagggctagggagcgtttatgagctaccgggtaaatgaattacatgcactttgaagtaaataggttttctattgggtgtcaacaacgctgatttctcccaaaactatagtttctttttttttcccccccctaagttcagagccagggggtaccgag

SEQ ID NO: 364555 - DNA, 2732 bp, Homo sapiens
gccacgtgaccctgagcgggacgacggcaggggagggcgggggctccggccggctccgcagcgccgcgcaggcgccccagggccacgccgaaccgagcccctcctgctccgtctaggagtcaaaatggcggcgaggggaacctggagcagtcccggagcctgagccactgacaggagaggagagggcggcggcggcggtgggaggaggatggccgggggtgctggcgccggtgcggacggcggtgctggtggcggcggcggcggaggcgacggcagcggtcccagcggcagcagcagcggcgggaggagcctccgggaaatggatgaaaagaggctgctggatccagggttgaaggttcataaaggcctctgggattatactctgaagaacccgcagacggaatgcctgagtgactgaagaaaatgggtgctaatgcatctaattatcctcattcatgttccccgagggtagggggaaattcacaggcccaacagacttttatagggacctcatcctattctcagcaaggctatggttgcgaatcaaagttgtatagccttgaccatggccatgagaaaccacaagacaaaaaaaagagaacctctggtcttgccaccctcaaaaagaagtttattaagcgtcggaaatctaataggtctgccgatcatgccaagcagatgcgagaactcctctctgggtgggatgttagagatgtcaatgcattagtggaggaatatgagggaacatcagcattaaaggagctttctctacaagccagtttggctagaccagaagcccggacattgcagaaagatatggctgatctttatgagtacaagtattgtactgatgtagacttaatatttcaagaaacttgttttcctgttcatcgtgccattttggcagcaaggtgtccattttttaaaacactgctttcttcctcaccagagtatggggcagagataataatggacatcaatacagctggtattgatatgcccatgttttctgctttgttacactacctttatacaggagagtttggaatggaggactcaaggtttcaaaatgtcgatatccttgttcagcttagtgaagaatttggaacaccaaattcccttgatgtagatatgcgtggactctttgattacatgtgttattatgatgtcgtccttagtttttcttcagactctgaactggttgaagcttttggtggaaatcagaactgtttagatgaagagctcaaagcccacaaggctgttatttctgcacggtccccattttttcgaaatttattacaaaggaggatacgaactggtgaagaaatcacagaccgaactttgaggactcccacaagaattatattagatgagtccattataccaaaaaaatatgcaacagtgatattacactgtatgtataccgacgtggtggacctctctgttttgcactgtagcccctctgtggggagtctcagtgaagttcaggctctcgtcgcagggaagccaaacatgaccagggcagaagaagccatggaactttaccacatagcactgttcttggaatttaacatgcttgcacaagaggagactacagtcatcaggcctgcctgtgcagcagagctttcaaacagctgcttactgcctcaatcttaaatatgaaaacccatccaaggataactggacatttgaggaaagcttccaaattgagacagagatcagagcaaaaagaacaaagtcctggaggaagcagacaatgaagggagcagaagaaaacttcagtagaatcaaaatatccttatataaaagaactttttatggaatcagtgagacataagcaggatgctattaaagtaaaaacaggagcttttagaaataagatagcagaaatgaaagatataatggaagcattgaaaggtacagttgaggaaatctagaaagtaaataatataataaagagatgagtggagacaaataaaactagagtattcatccagggtctaacatctaacaaatagtggctttagaaatatataccagagaaaagtgaagagaagacagtatctaaggagtaatataagaaatatttccaaaactaaaggaatttctatataaaaagtttctttttcagaacactggggaaaaagagacaattttaaaatgttgcagggaggagaaaaattaggttccatgcaaagaaataggaatcagatggtattgagattttcagtagcaacaactgaataccacaatacagtgaagtagtgtcttccaaaagctgatggaaaattattttaaacacaaaatcctatatttagccaaacagtcaatcaagtgtaaggctaaataaaggcatttttcagtcatacctcgaaaaactgcctgtgtagggatatttcccctgcttccccactcaggcagctgctgggaatgtattccaccaaatgacgaagcaaaccaagaacaaagaagtgaaggatctagaaaatgggctccaacacgggaaggaagcaaagggagatcccacgcatcagccacacagtaggtcttgtgggcattcagtctagcccagaccgggagggtgaaagtctccaaggaaagaggtgtctcggaagaaatcaattactttcaatgtttgaacattaaatagcaaatgacaaagcaattttatggctcttgtggtgcatttatgaagaattagcaataagttcttagaaaatgaagcaaatgga

SEQ ID NO: 364556 - DNA, 775 bp, Homo sapiens
  misc_feature (617)..(617): n is a, c, g, or t
tattcgccttctagaacttgtgatccacacatcacccatttatattagtggtaaaattatctgctaaaatctaattgtaagaaaggcttaccttctgtcatcaagtgattgtatcatcctggatcgtcatttccaaggaactagcctttcttttcctaagcgtctgtatgtgttctaaaacttccagtatatatttatagaacttagaaaaaatgttacattattcagagtagcaagtcttactggagtacctatgtttgttttcttggtttttatttttttttaagtttaaaagtagtaattaaacctatattttgtgattgtttcctggtctgtgtttttaaattcctttccttcagttttcctcatgaagatgtttcagatactgaatttgtttagacattgaatgactttgttaaaggcacaattaatcacattggttgtactctgaagacagacttctttaaaaaaaaaataaacaatttaaaacaacaaaaaaaaaaaaaaaaaaaaaaaaaaaaaaaaaaaaaaaaaaaaaaaaaaaaaaaaaaaaaaaaaaaaaaaaaaaaaaaaaaaaaaaaaaaaaaaattcaatggcccgtgttttacacacgttnggattgcaaaaaccttgcgttcccaacttaattggctttggaaaaatccccttttggcaattgccttattccaaaagggccgaaccgatggctttccaacagtgccaaccttaatgcaaaggcaaatggaggcctatattgggattcgcgtttttggc

SEQ ID NO: 364557 - DNA, 4835 bp, Homo sapiens
  misc_feature (26)..(26): n is a, c, g, or t
taggctaggtacgaggctgggtggtnaatcggccggagaggaggcggtgcggcggtggcgctgcggagacccggtccagacgcctggcggccgccggcacacaaggcgctttctagctccctcccccgagcgcacagcccgcctccttccgcggcgcctgcagtggcaggcttgctctgccctaccgtgacgcgctccggagacgctctgcgggtcctggacaccgggtccgcggcgtggggacgacagacggaggcgaacgccatcggtagccggtccgcgagccatcgttcggggcgcagtcctctccccggctggccctcctttctccggggcattcgccaccgcttccctgggctgagacgaccggttcgtcgcctccttgcccgtgaccgtcgctagaactcagttgtgcgttgcggccagtcgccactgctgagtggaagcaaaatgtcagtcagtgtgcatgagaaccgcaagtccagggccagcagcggctccattaacatctatctgtttcacaagtcctcctacgctgacagcgtcctcactcacctgaatcttttacgccagcagcgtctcttcactgacgtccttctccatgccggaaataggaccttcccttgccaccgggcagtgctggctgcatgcagtcgctactttgaggccatgttcagtggtggcctgaaagagagccaggacagtgaggtcaactttgacaattccatccacccagaagtcttggagctgctgcttgactatgcgtactcctcccgggtcatcatcaatgaagaaaatgcagaatcgctcctggaagctggtgacatgctggagtttcaagacatccgggatgcatgtgcagagttcctggaaaagaacctgcatcccaccaactgcctgggcatgctgctgctgtctgatgcacaccagtgcaccaagctgtacgaactatcttggagaatgtgtctcagcaacttccaaaccatcaggaagaatgaagatttcctccagctgccccaggacatggtagtgcaactcttgtccagtgaagagctggagacagaggatgaaaggcttgtgtacgagtctgcaattaactggatcagctatgacctgaagaagcgctattgctacctcccagaactgttgcagacagtaaggctggcacttctgccagccatctatctcatggagaatgtggccatggaggaactcatcaccaagcagagaaagagtaaggaaattgtggaagaggccatcaggtgcaaactgaaaatcctgcagaatgacggtgtggtaaccagcctctgtgcccgacctcggaaaactggccatgccctcttccttctgggaggacagactttcatgtgtgacaagttgtatctggtagaccagaaggccaaagaaatcattcccaaggctgacattcccagcccaagaaaagagtttagtgcatgtgcgattggctgcaaagtgtacattactggggggcgggggtctgaaaatggggtctcgaaagatgtctgggtttatgataccctgcacgaggagtggtccaaggctgcccccatgctggtggccaggtttggccatggctctgctgaactgaagcactgcctgtatgtggttggggggcacacggccgcaactggctgcctcccggcctccccctcagtctctctaaagcaggtagaacattatgaccccacaatcaacaaatggaccatggtggccccactccgagaaggcgttagcaacgccgcagtagtgagtgccaaacttaagttatttgctttcggaggtaccagtgtcagtcatgacaagctccccaaagttcagtgttacgatcagtgtgaaaacaggtggactgtaccggccacctgtccccagccctggcgttacacagcagcagctgtgctggggaaccagatttttattatggggggtgatacagaattctctgcctgctctgcttataaattcaacagtgagacttaccagtggaccaaggtgggagatgtgacagcaaagcgcatgagctgccatgctgtggcctctggaaacaaactctacgtggttggaggatactttggcattcagcgatgcaagactttggactgctacgatccaacattagacgtgtggaacagcatcaccactgtcccgtactcgctgattcctactgcatttgtcagcacctggaaacatctgccttcttaaatgcagtacattctaaagagagtgagcatgagctcactccatcactcgatgagataatatgagatttctacttcggagaggccaagtctaatgaagagaaaaaaaggaaaagaagttgcaagactcgaataaaatctgctgcaccttgtaaatgctctaactggacatgaaggaaaggggcgagggaggggggtgggatttttggtgcaagtagcacatggtttaaatatgaatgaacaaacctgtgatctagtccttgtcttgtaattgtggattaatgtcaatgttaatcagcccctcaaagggagagaaaagctggaccttttcccttgctgtaccatattcagcatttgatttccatgggccccaccatttatgtgtagaatttgaaatggttgtcacctctctctgaggacagagcttgaagcctccacaccagctgctgctggagattcaaagcccaactgtgggtccgagagggaagctggctgggctggctgaagaatgaagaccactggactctccgttaatctctaaggggtctgctccccaggaacgtttctgaacaatggggactttgttggtagccatttggtagatgttcttttctatttataagtgactttaaactttcccttggctgttaagaagtttgttatagatttagctatttattgttcgatgcctgcatgctgaaacaatgcctacagctgtcttcacatgtatggacgtgtgtgaatggttgtacgttttgcacattttgtggctgttgagatgtgctttgctgcacaaacatgaaaatttttgagttacaatttggagcataactggagggtgggttggggaggggtggatttttaaaatgtcaagacagggaaggatgacaaaatggaaatttaaatgacatcctagaggtagagaaaccgtggagatcgcttttctcagactcaccaacttttaatgggatttcatggggtttggttgtgctgatagggtaaggggaggctgctttctgcccttctccccactcccatctgatttacttaattcagtctcagctgctgaaatttggaaaggaccaaattgctttacagtttttttctttgtgtagtatcttgaaatcctggaaaattctatggaatagttctgtatatagggcacaagtaaaggcattgtccaaagtttatttatttatttattaccctaagaatgctttgccataaccacatttaatgggaaaaacggcagtatcacagatgtaaattaactcaccagatttactgggcctgaactcattctcttcttgctatatgatttagcaagttctagaaggtctccaagacaataattacattggcacaatgtatacttcagtgctcacccgtaggcaaatctctttttaaaaaactctttggtgcacaagtaacacatttggccacaaaacaccaaagaattgtaggcagtggcccctattgagaagttttccggtagagttggaaatcagttgtgaatacattctttgctagttggagtgcttgtttactaagcatgtgccgtcgtaggtattagtgctagtctcaaataggtgcttcccctgaggtgcaggggaagaccaaagtttgcaactcgaactgctttcgtccatgtttctcacattgctgtattttagaaaataggggttaagactgataacaaccttttacattgtgactgtgtttgcattgtctaatgacagataaatccttaacatttctctccaccttagtactttagactaattgtgtttgtccgtccatgccatgaatgagtgggctgtagttgggcctaaataaatgagctgttggaagaaaagaatcacagtactttccagcagtcagtccctggttcctagatgtgttctaagcaatgcaaatgtctaattgtcccccagtgggcatagtcagtgtcgtttatattgtagcagttacagctctgtagtttatgatgcaaatctgccaagagagatgtatgtgtcactgcatggcttctgaaagcaggatgaattttctgcagctgtttcaaagttggggtctgttcttgaatcctctattaattactgtgtgtgagccagagggagctgtggtaagggttgggcccccagcctgtagggaactttctggactcccactctttgaatcgatataggcatttggtctcactacttgaccattctcaccctgtgaaacgtcccacactttgaagcaaatacaattcacagcacagtacacacaaaaaccttggcataagacagagaaggttcttcttattttgtgggctggttgctgtagaaacacataacaaagggcagccctccacttctggtataattgtgtagccccttttctttgggcttgacacctgtcttgaataagagtgattagagctgcataatgtccctctcttggctattgaccatgtggttcacgtacaaaactctgtataagttgaaggaaaatgttcatgttcatatgtacttgtttgctatgactacattttgaggttttgtaaaactgttatttttttttttttcacaatgtgaaactgaaggtcaataaattattagagattttctcttc

SEQ ID NO: 364558 - DNA, 4828 bp, Homo sapiens
gcggggcgcagactgctctggcagccgggagaggaggcggtgcggcggtggcgctgcggagacccggtccagacgcctggcggccgccggcacacaaggcgctttctagctccctcccccgagcgcacagcccgcctccttccgcggcgcctgcagtggcaggcttgctctgccctaccgtgacgcgctccggagacgctctgcgggtcctggacaccgggtccgcggcgtggggacgacagacggaggcgaacgccatcggtagccggtccgcgagccatcgttcggggcgcagtcctctccccggctggccctcctttctccggggcattcgccaccgcttccctgggctgagacgaccggttcgtcgcctccttgcccgtgaccgtcgctagaactcagttgtgcgttgcggccagtcgccactgctgagtggaagcaaaatgtcagtcagtgtgcatgagaaccgcaagtccagggccagcagcggctccattaacatctatctgtttcacaagtcctcctacgctgacagcgtcctcactcacctgaatcttttacgccagcagcgtctcttcactgacgtccttctccatgccggaaataggaccttcccttgccaccgggcagtgctggctgcatgcagtcgctactttgaggccatgttcagtggtggcctgaaagagagccaggacagtgaggtcaactttgacaattccatccacccagaagtcttggagctgctgcttgactatgcgtactcctcccgggtcatcatcaatgaagaaaatgcagaatcgctcctggaagctggtgacatgctggagtttcaagacatccgggatgcatgtgcagagttcctggaaaagaacctgcatcccaccaactgcctgggcatgctgctgctgtctgatgcacaccagtgcaccaagctgtacgaactatcttggagaatgtgtctcagcaacttccaaaccatcaggaagaatgaagatttcctccagctgccccaggacatggtagtgcaactcttgtccagtgaagagctggagacagaggatgaaaggcttgtgtacgagtctgcaattaactggatcagctatgacctgaagaagcgctattgctacctcccagaactgttgcagacagtaaggctggcacttctgccagccatctatctcatggagaatgtggccatggaggaactcatcaccaagcagagaaagagtaaggaaattgtggaagaggccatcaggtgcaaactgaaaatcctgcagaatgacggtgtggtaaccagcctctgtgcccgacctcggaaaactggccatgccctcttccttctgggaggacagactttcatgtgtgacaagttgtatctggtagaccagaaggccaaagaaatcattcccaaggctgacattcccagcccaagaaaagagtttagtgcatgtgcgattggctgcaaagtgtacattactggggggcgggggtctgaaaatggggtctcgaaagatgtctgggtttatgataccctgcacgaggagtggtccaaggctgcccccatgctggtggccaggtttggccatggctctgctgaactgaagcactgcctgtatgtggttggggggcacacggccgcaactggctgcctcccggcctccccctcagtctctctaaagcaggtagaacattatgaccccacaatcaacaaatggaccatggtggccccactccgagaaggcgttagcaacgccgcagtagtgagtgccaaacttaagttatttgctttcggaggtaccagtgtcagtcatgacaagctccccaaagttcagtgttacgatcagtgtgaaaacaggtggactgtaccggccacctgtccccagccctggcgttacacagcagcagctgtgctggggaaccagatttttattatggggggtgatacagaattctctgcctgctctgcttataaattcaacagtgagacttaccagtggaccaaggtgggagatgtgacagcaaagcgcatgagctgccatgctgtggcctctggaaacaaactctacgtggttggaggatactttggcattcagcgatgcaagactttggactgctacgatccaacattagacgtgtggaacagcatcaccactgtcccgtactcgctgattcctactgcatttgtcagcacctggaaacatctgccttcttaaatgcagtacattctaaagagagtgagcatgagctcactccatcactcgatgagataatatgagatttctacttcggagaggccaagtctaatgaagagaaaaaaaggaaaagaagttgcaagactcgaataaaatctgctgcaccttgtaaatgctctaactggacatgaaggaaaggggcgagggaggggggtgggatttttggtgcaagtagcacatggtttaaatatgaatgaacaaacctgtgatctagtccttgtcttgtaattgtggattaatgtcaatgttaatcagcccctcaaagggagagaaaagctggaccttttcccttgctgtaccatattcagcatttgatttccatgggccccaccatttatgtgtagaatttgaaatggttgtcacctctctctgaggacagagcttgaagcctccacaccagctgctgctggagattcaaagcccaactgtgggtccgagagggaagctggctgggctggctgaagaatgaagaccactggactctccgttaatctctaaggggtctgctccccaggaacgtttctgaacaatggggactttgttggtagccatttggtagatgttcttttctatttataagtgactttaaactttcccttggctgttaagaagtttgttatagatttagctatttattgttcgatgcctgcatgctgaaacaatgcctacagctgtcttcacatgtatggacgtgtgtgaatggttgtacgttttgcacattttgtggctgttgagatgtgctttgctgcacaaacatgaaaatttttgagttacaatttggagcataactggagggtgggttggggaggggtggatttttaaaatgtcaagacagggaaggatgacaaaatggaaatttaaatgacatcctagaggtagagaaaccgtggagatcgcttttctcagactcaccaacttttaatgggatttcatggggtttggttgtgctgatagggtaaggggaggctgctttctgcccttctccccactcccatctgatttacttaattcagtctcagctgctgaaatttggaaaggaccaaattgctttacagtttttttctttgtgtagtatcttgaaatcctggaaaattctatggaatagttctgtatatagggcacaagtaaaggcattgtccaaagtttatttatttatttattaccctaagaatgctttgccataaccacatttaatgggaaaaacggcagtatcacagatgtaaattaactcaccagatttactgggcctgaactcattctcttcttgctatatgatttagcaagttctagaaggtctccaagacaataattacattggcacaatgtatacttcagtgctcacccgtaggcaaatctctttttaaaaaactctttggtgcacaagtaacacatttggccacaaaacaccaaagaattgtaggcagtggcccctattgagaagttttccggtagagttggaaatcagttgtgaatacattctttgctagttggagtgcttgtttactaagcatgtgccgtcgtaggtattagtgctagtctcaaataggtgcttcccctgaggtgcaggggaagaccaaagtttgcaactcgaactgctttcgtccatgtttctcacattgctgtattttagaaaataggggttaagactgataacaaccttttacattgtgactgtgtttgcattgtctaatgacagataaatccttaacatttctctccaccttagtactttagactaattgtgtttgtccgtccatgccatgaatgagtgggctgtagttgggcctaaataaatgagctgttggaagaaaagaatcacagtactttccagcagtcagtccctggttcctagatgtgttctaagcaatgcaaatgtctaattgtcccccagtgggcatagtcagtgtcgtttatattgtagcagttacagctctgtagtttatgatgcaaatctgccaagagagatgtatgtgtcactgcatggcttctgaaagcaggatgaattttctgcagctgtttcaaagttggggtctgttcttgaatcctctattaattactgtgtgtgagccagagggagctgtggtaagggttgggcccccagcctgtagggaactttctggactcccactctttgaatcgatataggcatttggtctcactacttgaccattctcaccctgtgaaacgtcccacactttgaagcaaatacaattcacagcacagtacacacaaaaaccttggcataagacagagaaggttcttcttattttgtgggctggttgctgtagaaacacataacaaagggcagccctccacttctggtataattgtgtagccccttttctttgggcttgacacctgtcttgaataagagtgattagagctgcataatgtccctctcttggctattgaccatgtggttcacgtacaaaactctgtataagttgaaggaaaatgttcatgttcatatgtacttgtttgctatgactacattttgaggttttgtaaaactgttatttttttttttttcacaatgtgaaactgaaggtcaataaattattagagattttctcttc

SEQ ID NO: 364559 - DNA, 4781 bp, Homo sapiens
  misc_feature (26)..(26): n is a, c, g, or t
taggctaggtacgaggctgggtggtnaatcggccggagaggaggcggtgcggcggtggcgctgcggagacccggtccagacgcctggcggccgccggcacacaaggcgctttctagctccctcccccgagcgcacagcccgcctccttccgcggcgcctgcagtggcaggcttgctctgccctaccgtgacgcgctccggagacgctctgcgggtcctggacaccgggtccgcggcgtggggacgacagacggaggcgaacgccatcggtagccggtccgcgagccatcgttcggggcgcagtcctctccccggctggccctcctttctccggggcattcgccaccgcttccctgggctgagacgaccggttcgtcgcctccttgcccgtgaccgtcgctagaactcagttgtgcgttgcggccagtcgccactgctgagtggaagcaaaatgtcagtcagtgtgcatgagaaccgcaagtccagggccagcagcggctccattaacatctatctgtttcacaagtcctcctacgctgacagcgtcctcactcacctgaatcttttacgccagcagcgtctcttcactgacgtccttctccatgccggaaataggaccttcccttgccaccgggcagtgctggctgcatgcagtcgctactttgaggccatgttcagtggtggcctgaaagagagccaggacagtgaggtcaactttgacaattccatccacccagaagtcttggagctgctgcttgactatgcgtactcctcccgggtcatcatcaatgaagaaaatgcagaatcgctcctggaagctggtgacatgctggagtttcaagacatccgggatgcatgtgcagagttcctggaaaagaacctgcatcccaccaactgcctgggcatgctgctgctgtctgatgcacaccagtgcaccaagctgtacgaactatcttggagaatgtgtctcagcaacttccaaaccatcaggaagaatgaagatttcctccagctgccccaggacatggtagtgcaactcttgtccagtgaagagctggagacagaggatgaaaggcttgtgtacgagtctgcaattaactggatcagctatgacctgaagaagcgctattgctacctcccagaactgttgcagacagtaaggctggcacttctgccagccatctatctcatggagaatgtggccatggaggaactcatcaccaagcagagaaagagtaaggaaattgtggaagaggccatcaggtgcaaactgaaaatcctgcagaatgacggtgtggtaaccagcctctgtgcccgacctcggaaaactggccatgccctcttccttctgggaggacagactttcatgtgtgacaagttgtatctggtagaccagaaggccaaagaaatcattcccaaggctgacattcccagcccaagaaaagagtttagtgcatgtgcgattggctgcaaagtgtacattactggggggcgggggtctgaaaatggggtctcgaaagatgtctgggtttatgataccctgcacgaggagtggtccaaggctgcccccatgctggtggccaggtttggccatggctctgctgaactgaagcactgcctgtatgtggttggggggcacacggccgcaactggctgcctcccggcctccccctcagtctctctaaagcaggtagaacattatgaccccacaatcaacaaatggaccatggtggccccactccgagaaggcgttagcaacgccgcagtagtgagtgccaaacttaagttatttgctttcggaggtaccagtgtcagtcatgacaagctccccaaagttcagtgttacgatcagtgtgaaaacaggtggactgtaccggccacctgtccccagccctggcgttacacagcagcagctgtgctggggaaccagatttttattatggggggtgatacagaattctctgcctgctctgcttataaattcaacagtgagacttaccagtggaccaaggtgggagatgtgacagcaaagcgcatgagctgccatgctgtggcctctggaaacaaactctacgtggttggaggatactttggcattcagcgatgcaagactttggactgctacgatccaacattagacgtgtggaacagcatcaccactgtcccgtactcgctgattcctactgcatttgtcagcacctggaaacatctgccttcttaaatgcagtacattctaaagagagtgagcatgagctcactccatcactcgatgagataatatgagatttctacttcggagaggccaagtctaatgaagagaaaaaaaggaaaagaagttgcaagactcgaataaaatctgctgcaccttgtaaatgctctaactggacatgaaggaaaggggcgagggaggggggtgggatttttggtgcaagtagcacatggtttaaatatgaatgaacaaacctgtgatctagtccttgtcttgtaattgtggattaatgtcaatgttaatcagcccctcaaagggagagccccaccatttatgtgtagaatttgaaatggttgtcacctctctctgaggacagagcttgaagcctccacaccagctgctgctggagattcaaagcccaactgtgggtccgagagggaagctggctgggctggctgaagaatgaagaccactggactctccgttaatctctaaggggtctgctccccaggaacgtttctgaacaatggggactttgttggtagccatttggtagatgttcttttctatttataagtgactttaaactttcccttggctgttaagaagtttgttatagatttagctatttattgttcgatgcctgcatgctgaaacaatgcctacagctgtcttcacatgtatggacgtgtgtgaatggttgtacgttttgcacattttgtggctgttgagatgtgctttgctgcacaaacatgaaaatttttgagttacaatttggagcataactggagggtgggttggggaggggtggatttttaaaatgtcaagacagggaaggatgacaaaatggaaatttaaatgacatcctagaggtagagaaaccgtggagatcgcttttctcagactcaccaacttttaatgggatttcatggggtttggttgtgctgatagggtaaggggaggctgctttctgcccttctccccactcccatctgatttacttaattcagtctcagctgctgaaatttggaaaggaccaaattgctttacagtttttttctttgtgtagtatcttgaaatcctggaaaattctatggaatagttctgtatatagggcacaagtaaaggcattgtccaaagtttatttatttatttattaccctaagaatgctttgccataaccacatttaatgggaaaaacggcagtatcacagatgtaaattaactcaccagatttactgggcctgaactcattctcttcttgctatatgatttagcaagttctagaaggtctccaagacaataattacattggcacaatgtatacttcagtgctcacccgtaggcaaatctctttttaaaaaactctttggtgcacaagtaacacatttggccacaaaacaccaaagaattgtaggcagtggcccctattgagaagttttccggtagagttggaaatcagttgtgaatacattctttgctagttggagtgcttgtttactaagcatgtgccgtcgtaggtattagtgctagtctcaaataggtgcttcccctgaggtgcaggggaagaccaaagtttgcaactcgaactgctttcgtccatgtttctcacattgctgtattttagaaaataggggttaagactgataacaaccttttacattgtgactgtgtttgcattgtctaatgacagataaatccttaacatttctctccaccttagtactttagactaattgtgtttgtccgtccatgccatgaatgagtgggctgtagttgggcctaaataaatgagctgttggaagaaaagaatcacagtactttccagcagtcagtccctggttcctagatgtgttctaagcaatgcaaatgtctaattgtcccccagtgggcatagtcagtgtcgtttatattgtagcagttacagctctgtagtttatgatgcaaatctgccaagagagatgtatgtgtcactgcatggcttctgaaagcaggatgaattttctgcagctgtttcaaagttggggtctgttcttgaatcctctattaattactgtgtgtgagccagagggagctgtggtaagggttgggcccccagcctgtagggaactttctggactcccactctttgaatcgatataggcatttggtctcactacttgaccattctcaccctgtgaaacgtcccacactttgaagcaaatacaattcacagcacagtacacacaaaaaccttggcataagacagagaaggttcttcttattttgtgggctggttgctgtagaaacacataacaaagggcagccctccacttctggtataattgtgtagccccttttctttgggcttgacacctgtcttgaataagagtgattagagctgcataatgtccctctcttggctattgaccatgtggttcacgtacaaaactctgtataagttgaaggaaaatgttcatgttcatatgtacttgtttgctatgactacattttgaggttttgtaaaactgttatttttttttttttcacaatgtgaaactgaaggtcaataaattattagagattttctcttc

SEQ ID NO: 364560 - DNA, 820 bp, Homo sapiens
  misc_feature (32)..(32): n is a, c, g, or t
ctctctctctctctctctctctctctctctcntcgtgccgaaatcggcacgagaaagaatcacagtactttccagcagtcagtccctggttcctagatgtgttctaagcaatgcaaatgtctaattgtcccccagtgggcatagtcagtgtcgtttatattgtagcagttacagctctgtagtttatgatgcaaatctgccaagagagatgtatgtgtcactgcatggcttctgaaagcaggatgaattttctgcagctgtttcaaagttggggtctgttcttgaatcctctattaattactgtgtgtgagccagagggagctgtggtaagggttgggcccccagcctgtagggaactttctggactcccactctttgaatcgatataggcatttggtctcactacttgaccattctcaccctgtgaaacgtcccacactttgaagcaaatacaattcacagcacagtacacacaaaaaccttggcataagacagagaaggttcttcttattttgtgggctggttgctgtagaaacacataacaaagggcagccctccacttctggtataattgtgtagccccttttctttgggcttgacacctgtcttgaataagagtgattagagctgcataatgtccctctcttggctattgaccatgtggttcacgtacaaaactctgtataagttgaaggaaaatgttcatgttcatatgtacttgtttgctatgactacattttgaggttttgtaaaactgttatttttttttttttcacaatgtgaaactgaaggtcaataaattattagagattttctcttc

SEQ ID NO: 364561 - DNA, 785 bp, Homo sapiens
  misc_feature (765)..(765): n is a, c, g, or t
  misc_feature (775)..(775): n is a, c, g, or t
gcggggcgcagactgctctggcagccgggagaggaggcggtgcggcggtggcgctgcggagacccggtccagacgcctggcggccgccggcacacaaggcgctttctagctccctcccccgagcgcacagcccgcctccttccgcggcgcctgcagtggcaggcttgctctgccctaccgtgacgcgctccggagacgctctgcgggtcctggacaccgggtccgcggcgtggggacgacagacggaggcgaacgccatcggtagccggtccgcgagccatcgttcggggcgcagtcctctccccggctggccctcctttctccggggcattcgccaccgcttccctgggctgagacgaccggttcgtcgcctccttgcccgtgaccgtcgctagaactcagttgtgcgttgcggccagtcgccactgctgagtggaagcaaaatgtcagtcagtgtgcatgagaaccgcaagtccagggccagcagcggctccattaacatctatctgtttcacaagtcctcctacgctgacagcgtcctcactcacctgaatcttttacgccagcagcgtctcttcactgacgtccttctccatgccggaaataggaccttcccttgccaccgggcagtgctggctgcatgcagtcgctactttgaggccatgttcagtggtggcctgaaagagagccaggacagtgaggtcaactttgacaattcatcaccagagtttgactgtgttatatctactctccggcatatatganaatgagatcntctgaatgta

SEQ ID NO: 364562 - DNA, 5118 bp, Homo sapiens
  misc_feature (26)..(26): n is a, c, g, or t
  misc_feature (4960)..(4960): n is a, c, g, or t
taggctaggtacgaggctgggtggtnaatcggccggagaggaggcggtgcggcggtggcgctgcggagacccggtccagacgcctggcggccgccggcacacaaggcgctttctagctccctcccccgagcgcacagcccgcctccttccgcggcgcctgcagtggcaggcttgctctgccctaccgtgacgcgctccggagacgctctgcgggtcctggacaccgggtccgcggcgtggggacgacagacggaggcgaacgccatcggtagccggtccgcgagccatcgttcggggcgcagtcctctccccggctggccctcctttctccggggcattcgccaccgcttccctgggctgagacgaccggttcgtcgcctccttgcccgtgaccgtcgctagaactcagttgtgcgttgcggccagtcgccactgctgagtggaagcaaaatgtcagtcagtgtgcatgagaaccgcaagtccagggccagcagcggctccattaacatctatctgtttcacaagtcctcctacgctgacagcgtcctcactcacctgaatcttttacgccagcagcgtctcttcactgacgtccttctccatgccggaaataggaccttcccttgccaccgggcagtgctggctgcatgcagtcgctactttgaggccatgttcagtggtggcctgaaagagagccaggacagtgaggtcaactttgacaattccatccacccagaagtcttggagctgctgcttgactatgcgtactcctcccgggtcatcatcaatgaagaaaatgcagaatcgctcctggaagctggtgacatgctggagtttcaagacatccgggatgcatgtgcagagttcctggaaaagaacctgcatcccaccaactgcctgggcatgctgctgctgtctgatgcacaccagtgcaccaagctgtacgaactatcttggagaatgtgtctcagcaacttccaaaccatcaggaagaatgaagatttcctccagctgccccaggacatggtagtgcaactcttgtccagtgaagagctggagacagaggatgaaaggcttgtgtacgagtctgcaattaactggatcagctatgacctgaagaagcgctattgctacctcccagaactgttgcagacagtaaggctggcacttctgccagccatctatctcatggagaatgtggccatggaggaactcatcaccaagcagagaaagagtaaggaaattgtggaagaggccatcaggtgcaaactgaaaatcctgcagaatgacggtgtggtaaccagcctctgtgcccgacctcggaaaactggccatgccctcttccttctgggaggacagactttcatgtgtgacaagttgtatctggtagaccagaaggccaaagaaatcattcccaaggctgacattcccagcccaagaaaagagtttagtgcatgtgcgattggctgcaaagtgtacattactggggggcgggggtctgaaaatggggtctcgaaagatgtctgggtttatgataccctgcacgaggagtggtccaaggctgcccccatgctggtggccaggtttggccatggctctgctgaactgaagcactgcctgtatgtggttggggggcacacggccgcaactggctgcctcccggcctccccctcagtctctctaaagcaggtagaacattatgaccccacaatcaacaaatggaccatggtggccccactccgagaaggcgttagcaacgccgcagtagtgagtgccaaacttaagttatttgctttcggaggtaccagtgtcagtcatgacaagctccccaaagttcagtgttacgatcagtgtgaaaacaggtggactgtaccggccacctgtccccagccctggcgttacacagcagcagctgtgctggggaaccagatttttattatggggggtgatacagaattctctgcctgctctgcttataaattcaacagtgagacttaccagtggaccaaggtgggagatgtgacagcaaagcgcatgagctgccatgctgtggcctctggaaacaaactctacgtggttggaggatactttggcattcagcgatgcaagactttggactgctacgatccaacattagacgtgtggaacagcatcaccactgtcccgtactcgctgattcctactgcatttgtcagcacctggaaacatctgccttcttaaatgcagtacattctaaagagagtgagcatgagctcactccatcactcgatgagataatatgagatttctacttcggagaggccaagtctaatgaagagaaaaaaaggaaaagaagttgcaagactcgaataaaatctgctgcaccttgtaaatgctctaactggacatgaaggaaaggggcgagggaggggggtgggatttttggtgcaagtagcacatggtttaaatatgaatgaacaaacctgtgatctagtccttgtcttgtaattgtggattaatgtcaatgttaatcagcccctcaaagggagagaaaagctggaccttttcccttgctgtaccatattcagcatttgatttccatgggccccaccatttatgtgtagaatttgaaatggttgtcacctctctctgaggacagagcttgaagcctccacaccagctgctgctggagattcaaagcccaactgtgggtccgagagggaagctggctgggctggctgaagaatgaagaccactggactctccgttaatctctaaggggtctgctccccaggaacgtttctgaacaatggggactttgttggtagccatttggtagatgttcttttctatttataagtgactttaaactttcccttggctgttaagaagtttgttatagatttagctatttattgttcgatgcctgcatgctgaaacaatgcctacagctgtcttcacatgtatggacgtgtgtgaatggttgtacgttttgcacattttgtggctgttgagatgtgctttgctgcacaaacatgaaaatttttgagttacaatttggagcataactggagggtgggttggggaggggtggatttttaaaatgtcaagacagggaaggatgacaaaatggaaatttaaatgacatcctagaggtagagaaaccgtggagatcgcttttctcagactcaccaacttttaatgggatttcatggggtttggttgtgctgatagggtaaggggaggctgctttctgcccttctccccactcccatctgatttacttaattcagtctcagctgctgaaatttggaaaggaccaaattgctttacagtttttttctttgtgtagtatcttgaaatcctggaaaattctatggaatagttctgtatatagggcacaagtaaaggcattgtccaaagtttatttatttatttattaccctaagaatgctttgccataaccacatttaatgggaaaaacggcagtatcacagatgtaaattaactcaccagatttactgggcctgaactcattctcttcttgctatatgatttagcaagttctagaaggtctccaagacaataattacattggcacaatgtatacttcagtgctcacccgtaggcaaatctctttttaaaaaactctttggtgcacaagtaacacatttggccacaaaacaccaaagaattgtaggcagtggcccctattgagaagttttccggtagagttggaaatcagttgtgaatacattctttgctagttggagtgcttgtttactaagcatgtgccgtcgtaggtattagtgctagtctcaaataggtgcttcccctgaggtgcaggggaagaccaaagtttgcaactcgaactgctttcgtccatgtttctcacattgctgtattttagaaaataggggttaagactgataacaaccttttacattgtgactgtgtttgcattgtctaatgacagataaatccttaacatttctctccaccttagtactttagactaattgtgtttgtccgtccatgccatgaatgagtgggctgtagttgggcctaaataaatgagctgttggaagaaaagaatcacagtactttccagcagtcagtccctggttcctagatgtgttctaagcaatgcaaatgtctaattgtcccccagtgggcatagtcagtgtcgtttatattgtagcagttacagctctgtagtttatgatgcaaatctgccaagagagatgtatgtgtcactgcatggcttctgaaagcaggatgaattttctgcagctgtttcaaagttggggtctgttcttgaatcctctattaattactgtgtgtgagccagagggagctgtggtaagggttgggcccccagcctgtagggaactttctggactcccactctttgaatcgatataggcatttggtctcactacttgaccattctcaccctgtgaaacgtcccacactttgaagcaaatacaattcacagcacagtacacacaaaaaccttggcataagacagagaaggttcttcttattttgtgggctggttgctgtagaaacacataacaaagggcagccctccacttctggtataattgtgtagccccttttctttgggcttgacacctgtcttgaataagagtgattagagctgcataatgtccctctcttggctattgaccatgtggttcacgtacaaaactctgtataagttgaaggaaaatgttcatgttcatatgtacttgtttgctatgactacattttgaggttttgtaaaactgttatttttttttttttcacaatgtgaaactgaaggtcaataaattattagagattttctcttccaaaaaaaaaaaaaaaaaaaaaaaaaaaaaaaaaaaaaaaaaaaaaaaaaaaaaaaaaaaaaaaaaaaaaaaaaaaaaaaaaaaaaaaaaaaaaaaattcaatggcccgtgttttacacacgttnggattgcaaaaaccttgcgttcccaacttaattggctttggaaaaatccccttttggcaattgccttattccaaaagggccgaaccgatggctttccaacagtgccaaccttaatgcaaaggcaaatggaggcctatattgggattcgcgtttttggc

SEQ ID NO: 364563 - DNA, 4767 bp, Homo sapiens
  misc_feature (26)..(26): n is a, c, g, or t
taggctaggtacgaggctgggtggtnaatcggccggagaggaggcggtgcggcggtggcgctgcggagacccggtccagacgcctggcggccgccggcacacaaggcgctttctagctccctcccccgagcgcacagcccgcctccttccgcggcgcctgcagtggcaggcttgctctgccctaccgtgacgcgctccggagacgctctgcgggtcctggacaccgggtccgcggcgtggggacgacagacggaggcgaacgccatcggtagccggtccgcgagccatcgttcggggcgcagtcctctccccggctggccctcctttctccggggcattcgccaccgcttccctgggctgagacgaccggttcgtcgcctccttgcccgtgaccgtcgctagaactcagttgtgcgttgcggccagtcgccactgctgagtggaagcaaaatgtcagtcagtgtgcatgagaaccgcaagtccagggccagcagcggctccattaacatctatctgtttcacaagtcctcctacgctgacagcgtcctcactcacctgaatcttttacgccagcagcgtctcttcactgacgtccttctccatgccggaaataggaccttcccttgccaccgggcagtgctggctgcatgcagtcgctactttgaggccatgttcagtggtggcctgaaagagagccaggacagtgaggtcaactttgacaattccatccacccagaagtcttggagctgctgcttgactatgcgtactcctcccgggtcatcatcaatgaagaaaatgcagaatcgctcctggaagctggtgacatgctggagtttcaagacatccgggatgcatgtgcagagttcctggaaaagaacctgcatcccaccaactgcctgggcatgctgctgctgtctgatgcacaccagtgcaccaagctgtacgaactatcttggagaatgtgtctcagcaacttccaaaccatcaggaagaatgaagatttcctccagctgccccaggacatggtagtgcaactcttgtccagtgaagagctggagacagaggatgaaaggcttgtgtacgagtctgcaattaactggatcagctatgacctgaagaagcgctattgctacctcccagaactgttgcagacagtaaggctggcacttctgccagccatctatctcatggagaatgtggccatggaggaactcatcaccaagcagagaaagagtaaggaaattgtggaagaggccatcaggtgcaaactgaaaatcctgcagaatgacggtgtggtaaccagcctctgtgcccgacctcggaaaactggccatgccctcttccttctgggaggacagactttcatgtgtgacaagttgtatctggtagaccagaaggccaaagaaatcattcccaaggctgacattcccagcccaagaaaagagtttagtgcatgtgcgattggctgcaaagtgtacattactggggggcgggggtctgaaaatggggtctcgaaagatgtctgggtttatgataccctgcacgaggagtggtccaaggctgcccccatgctggtggccaggtttggccatggctctgctgaactgaagcactgcctgtatgtggttggggggcacacggccgcaactggctgcctcccggcctccccctcagtctctctaaagcaggtagaacattatgaccccacaatcaacaaatggaccatggtggccccactccgagaaggcgttagcaacgccgcagtagtgagtgccaaacttaagttatttgctttcggaggtaccagtgtcagtcatgacaagctccccaaagttcagtgttacgatcagtgtgaaaacaggtggactgtaccggccacctgtccccagccctggcgttacacagcagcagctgtgctggggaaccagatttttattatggggggtgatacagaattctctgcctgctctgcttataaattcaacagtgagacttaccagtggaccaaggtgggagatgtgacagcaaagcgcatgagctgccatgctgtggcctctggaaacaaactctacgtggttggaggatactttggcattcagcgatgcaagactttggactgctacgatccaacattagacgtgtggaacagcatcaccactgtcccgtactcgctgattcctactgcatttgtcagcacctggaaacatctgccttcttaaatgcagtacattctaaagagagtgagcatgagctcactccatcactcgatgagataatatgagatttctacttcggagaggccaagtctaatgaagagaaaaaaaggaaaagaagttgcaagactcgaataaaatctgctgcaccttgtaaatgctctaactggacatgaaggaaaggggcgagggaggggggtgggatttttggtgcaagtagcacatggtttaaatatgaatgaacaaacctgtgatctagtccttgtcttgtaattgtggattaatgtcaatgttaatcagcccctcaaagggagagaaaagctggaccttttcccttgctgtaccatattcagcatttgatttccatgggccccaccatttatgtgtagaatttgaaatggttgtcacctctctctgaggacagagcttgaagcctccacaccagctgctgctggagattcaaagcccaactgtgggtccgagagggaagctggctgggctggctgaagaatgaagaccactggactctccgttaatctctaaggggtctgctccccaggaacgtttctgaacaatggggactttgttggtagccatttggtagatgttcttttctatttataagtgactttaaactttcccttggctgttaagaagtttgttatagatttagctatttattgttcgatgcctgcatgctgaaacaatgcctacagctgtcttcacatgtatggacgtgtgtgaatggttgtacgttttgcacattttgtggctgttgagatgtgctttgctgcacaaacatgaaaatttttgagttacaatttggagcataactggagggtgggttggggaggggtggatttttaaaatgtcaagacagggaaggatgacaaaatggaaatttaaatgacatcctagaggtagagaaaccgtggagatcgcttttctcagactcaccaacttttaatgggatttcatggggtttggttgtgctgatagggtaaggggaggctgctttctgcccttctccccactcccatctgatttacttaattcagtctcagctgctgaaatttggaaaggaccaaattgctttacagtttttttctttgtgtagtatcttgaaatcctggaaaattctatggaatagttctgtatatagggcacaagtaaaggcattgtccaaagtttatttatttatttattaccctaagaatgctttgccataaccacatttaatgggaaaaacggcagtatcacagatgtaaattaactcaccagatttactgggcctgaactcattctcttcttgctatatgatttagcaagttctagaaggtctccaagacaataattacattggcacaatgtatacttcagtgctcacccgtaggcaaatctctttttaaaaaactctttggtgcacaagtaacacatttggccacaaaacaccaaagaattgtaggcagtggcccctattgagaagttttccggtagagttggaaatcagttgtgaatacattctttgctagttggagtgcttgtttactaagcatgtgccgtcgtaggtattagtgctagtctcaaataggtgcttcccctgaggtgcaggggaagaccaaagtttgcaactcgaactgctttcgtccatgtttctcacattgctgtattttagaaaataggggttaagactgataacaaccttttacattgtgactgtgtttgcattgtctaatgacagataaatccttaacatttctctccaccttagtactttagactaattgtgtttgtccgtccatgccatgaatgagtgggctgtagttgggcctaaataaatgagctgttggaagataattgtcccccagtgggcatagtcagtgtcgtttatattgtagcagttacagctctgtagtttatgatgcaaatctgccaagagagatgtatgtgtcactgcatggcttctgaaagcaggatgaattttctgcagctgtttcaaagttggggtctgttcttgaatcctctattaattactgtgtgtgagccagagggagctgtggtaagggttgggcccccagcctgtagggaactttctggactcccactctttgaatcgatataggcatttggtctcactacttgaccattctcaccctgtgaaacgtcccacactttgaagcaaatacaattcacagcacagtacacacaaaaaccttggcataagacagagaaggttcttcttattttgtgggctggttgctgtagaaacacataacaaagggcagccctccacttctggtataattgtgtagccccttttctttgggcttgacacctgtcttgaataagagtgattagagctgcataatgtccctctcttggctattgaccatgtggttcacgtacaaaactctgtataagttgaaggaaaatgttcatgttcatatgtacttgtttgctatgactacattttgaggttttgtaaaactgttatttttttttttttcacaatgtgaaactgaaggtcaataaattattagagattttctcttc

SEQ ID NO: 364564 - DNA, 4519 bp, Homo sapiens
  misc_feature (26)..(26): n is a, c, g, or t
taggctaggtacgaggctgggtggtnaatcggccggagaggaggcggtgcggcggtggcgctgcggagacccggtccagacgcctggcggccgccggcacacaaggcgctttctagctccctcccccgagcgcacagcccgcctccttccgcggcgcctgcagtggcaggcttgctctgccctaccgtgacgcgctccggagacgctctgcgggtcctggacaccgggtccgcggcgtggggacgacagacggaggcgaacgccatcggtagccggtccgcgagccatcgttcggggcgcagtcctctccccggctggccctcctttctccggggcattcgccaccgcttccctgggctgagacgaccggttcgtcgcctccttgcccgtgaccgtcgctagaactcagttgtgcgttgcggccagtcgccactgctgagtggaagcaaaatgtcagtcagtgtgcatgagaaccgcaagtccagggccagcagcggctccattaacatctatctgtttcacaagtcctcctacgctgacagcgtcctcactcacctgaatcttttacgccagcagcgtctcttcactgacgtccttctccatgccggaaataggaccttcccttgccaccgggcagtgctggctgcatgcagtcgctactttgaggccatgttcagtggtggcctgaaagagagccaggacagtgaggtcaactttgacaattccatccacccagaagtcttggagctgctgcttgactatgcgtactcctcccgggtcatcatcaatgaagaaaatgcagaatcgctcctggaagctggtgacatgctggagtttcaagacatccgggatgcatgtgcagagttcctggaaaagaacctgcatcccaccaactgcctgggcatgctgctgctgtctgatgcacaccagtgcaccaagctgtacgaactatcttggagaatgtgtctcagcaacttccaaaccatcaggaagaatgaagatttcctccagctgccccaggacatggtagtgcaactcttgtccagtgaagagctggagacagaggatgaaaggcttgtgtacgagtctgcaattaactggatcagctatgacctgaagaagcgctattgctacctcccagaactgttgcagacagtaaggctggcacttctgccagccatctatctcatggagaatgtggccatggaggaactcatcaccaagcagagaaagagtaaggaaattgtggaagaggccatcaggtgcaaactgaaaatcctgcagaatgacggtgtggtaaccagcctctgtgcccgacctcggaaaactggccatgccctcttccttctgggaggacagactttcatgtgtgacaagttgtatctggtagaccagaaggccaaagaaatcattcccaaggctgacattcccagcccaagaaaagagtttagtgcatgtgcgattggctgcaaagtgtacattactggggggcgggggtctgaaaatggggtctcgaaagatgtctgggtttatgataccctgcacgaggagtggtccaaggctgcccccatgctggtggccaggtttggccatggctctgctgaactgaagcactgcctgtatgtggttggggggcacacggccgcaactggctgcctcccggcctccccctcagtctctctaaagcaggtagaacattatgaccccacaatcaacaaatggaccatggtggccccactccgagaaggcgttagcaacgccgcagtagtgagtgccaaacttaagttatttgctttcggaggtaccagtgtcagtcatgacaagctccccaaagttcagtgttacgatcagtgtgaaaacaggtggactgtaccggccacctgtccccagccctggcgttacacagcagcagctgtgctggggaaccagatttttattatggggggtgatacagaattctctgcctgctctgcttataaattcaacagtgagacttaccagtggaccaaggtgggagatgtgacagcaaagcgcatgagctgccatgctgtggcctctggaaacaaactctacgtggttggaggatactttggcattcagcgatgcaagactttggactgctacgatccaacattagacgtgtggaacagcatcaccactgtcccgtactcgctgattcctactgcatttgtcagcacctggaaacatctgccttcttaaatgcagtacattctaaagagagtgagcatgagctcactccatcactcgatgagataatatgagatttctacttcggagaggccaagtctaatgaagagaaaaaaaggaaaagaagttgcaagactcgaataaaatctgctgcaccttgtaaatgctctaactggacatgaaggaaaggggcgagggaggggggtgggatttttggtgcaagtagcacatggtttaaatatgaatgaacaaacctgtgatctagtccttgtcttgtaattgtggattaatgtcaatgttaatcagcccctcaaagggagagaaaagctggaccttttcccttgctgtaccatattcagcatttgatttccatgggccccaccatttatgtgtagaatttgaaatggttgtcacctctctctgaggacagagcttgaagcctccacaccagctgctgctggagattcaaagcccaactgtgggtccgagagggaagctggctgggctggctgaagaatgaagaccactggactctccgttaatctctaaggggtctgctccccaggaacgtttctgaacaatggggactttgttggtagccatttggtagatgttcttttctatttataagtgactttaaactttcccttggctgttaagaagtttgttatagatttagctatttattgttcgatgcctgcatgctgaaacaatgcctacagctgtcttcacatgtatggacgtgtgtgaatggttgtacgttttgcacattttgtggctgttgagatgtgctttgctgcacaaacatgaaaatttttgagttacaatttggagcataactggagggtgggttggggaggggtggatttttaaaatgtcaagacagggaaggatgacaaaatggaaatttaaatgacatcctagaggtagagaaaccgtggagatcgcttttctcagactcaccaacttttaatgggatttcatggggtttggttgtgctgatagggtaaggggaggctgctttctgcccttctccccactcccatctgatttacttaattcagtctcagctgctgaaatttggaaaggaccaaattgctttacagtttttttctttgtgtagtatcttgaaatcctggaaaattctatggaatagttctgtatatagggcacaagtaaaggcattgtccaaagtttatttatttatttattaccctaagaatgctttgccataaccacatttaatgggaaaaacggcagtatcacagatgtaaattaactcaccagatttactgggcctgaactcattctcttcttgctatatgatttagcaagttctagaaggtctccaagacaataattacattggcacaatgtatacttcagtgctcacccgtaggcaaatctctttttaaaaaactctttggtgcacaagtaacacatttggccacaaaacaccaaagaattgtaggcagtggcccctattgagaagttttccggtagagttggaaatcagttgtgaatacattctttgctagttggagtgcttgtttactaagcatgtgccgtcgtaggtattagtgctagtctcaaataggtgcttcccctgaggtgcaggggaagaccaaagtttgcaactcgaactgctttcgtccatgtttctcacattgctgtattttagaaaataggggttaagactgataacaaccttttacattgtgactgtgtttgcattgtctaatgacagataaatccttaacatttctctccaccttagtactttagactaattgtgtttgtccgtccatgccatgaatgagtgggctgtagttgggcctaaataaatgagctgttggaagaaaagaatcacagtactttccagcagtcagtccctggttcctagatgtgttctaagcaatgcaaatgtctaattgtcccccagtgggcatagtcagtgtcgtttatattgtagcagttacagctctgtagtttatgatgcaaatctgccaagagagatgtatgtgtcactgcatggcttctgaaagcaggatgaattttctgcagctgtttcaaagttggggtctgttcttgaatcctctattaattactgtgtgtgagccagagggagctgtggtaagggttgggcccccagcctgtagggaactttctggactcccactctttgaatcgatataggcatttggtctcactacttgaccattctcaccctgtgaaacgtcccacatatgaacatgaacattttccttcaacttatacagagttttgtacatgaaccacatggtcaatagcc

SEQ ID NO: 364565 - DNA, 4699 bp, Homo sapiens
  misc_feature (26)..(26): n is a, c, g, or t
taggctaggtacgaggctgggtggtnaatcggccggagaggaggcggtgcggcggtggcgctgcggagacccggtccagacgcctggcggccgccggcacacaaggcgctttctagctccctcccccgagcgcacagcccgcctccttccgcggcgcctgcagtggcaggcttgctctgccctaccgtgacgcgctccggagacgctctgcgggtcctggacaccgggtccgcggcgtggggacgacagacggaggcgaacgccatcggtagccggtccgcgagccatcgttcggggcgcagtcctctccccggctggccctcctttctccggggcattcgccaccgcttccctgggctgagacgaccggttcgtcgcctccttgcccgtgaccgtcgctagaactcagttgtgcgttgcggccagtcgccactgctcagcgtctcttcactgacgtccttctccatgccggaaataggaccttcccttgccaccgggcagtgctggctgcatgcagtcgctactttgaggccatgttcagtggtggcctgaaagagagccaggacagtgaggtcaactttgacaattccatccacccagaagtcttggagctgctgcttgactatgcgtactcctcccgggtcatcatcaatgaagaaaatgcagaatcgctcctggaagctggtgacatgctggagtttcaagacatccgggatgcatgtgcagagttcctggaaaagaacctgcatcccaccaactgcctgggcatgctgctgctgtctgatgcacaccagtgcaccaagctgtacgaactatcttggagaatgtgtctcagcaacttccaaaccatcaggaagaatgaagatttcctccagctgccccaggacatggtagtgcaactcttgtccagtgaagagctggagacagaggatgaaaggcttgtgtacgagtctgcaattaactggatcagctatgacctgaagaagcgctattgctacctcccagaactgttgcagacagtaaggctggcacttctgccagccatctatctcatggagaatgtggccatggaggaactcatcaccaagcagagaaagagtaaggaaattgtggaagaggccatcaggtgcaaactgaaaatcctgcagaatgacggtgtggtaaccagcctctgtgcccgacctcggaaaactggccatgccctcttccttctgggaggacagactttcatgtgtgacaagttgtatctggtagaccagaaggccaaagaaatcattcccaaggctgacattcccagcccaagaaaagagtttagtgcatgtgcgattggctgcaaagtgtacattactggggggcgggggtctgaaaatggggtctcgaaagatgtctgggtttatgataccctgcacgaggagtggtccaaggctgcccccatgctggtggccaggtttggccatggctctgctgaactgaagcactgcctgtatgtggttggggggcacacggccgcaactggctgcctcccggcctccccctcagtctctctaaagcaggtagaacattatgaccccacaatcaacaaatggaccatggtggccccactccgagaaggcgttagcaacgccgcagtagtgagtgccaaacttaagttatttgctttcggaggtaccagtgtcagtcatgacaagctccccaaagttcagtgttacgatcagtgtgaaaacaggtggactgtaccggccacctgtccccagccctggcgttacacagcagcagctgtgctggggaaccagatttttattatggggggtgatacagaattctctgcctgctctgcttataaattcaacagtgagacttaccagtggaccaaggtgggagatgtgacagcaaagcgcatgagctgccatgctgtggcctctggaaacaaactctacgtggttggaggatactttggcattcagcgatgcaagactttggactgctacgatccaacattagacgtgtggaacagcatcaccactgtcccgtactcgctgattcctactgcatttgtcagcacctggaaacatctgccttcttaaatgcagtacattctaaagagagtgagcatgagctcactccatcactcgatgagataatatgagatttctacttcggagaggccaagtctaatgaagagaaaaaaaggaaaagaagttgcaagactcgaataaaatctgctgcaccttgtaaatgctctaactggacatgaaggaaaggggcgagggaggggggtgggatttttggtgcaagtagcacatggtttaaatatgaatgaacaaacctgtgatctagtccttgtcttgtaattgtggattaatgtcaatgttaatcagcccctcaaagggagagaaaagctggaccttttcccttgctgtaccatattcagcatttgatttccatgggccccaccatttatgtgtagaatttgaaatggttgtcacctctctctgaggacagagcttgaagcctccacaccagctgctgctggagattcaaagcccaactgtgggtccgagagggaagctggctgggctggctgaagaatgaagaccactggactctccgttaatctctaaggggtctgctccccaggaacgtttctgaacaatggggactttgttggtagccatttggtagatgttcttttctatttataagtgactttaaactttcccttggctgttaagaagtttgttatagatttagctatttattgttcgatgcctgcatgctgaaacaatgcctacagctgtcttcacatgtatggacgtgtgtgaatggttgtacgttttgcacattttgtggctgttgagatgtgctttgctgcacaaacatgaaaatttttgagttacaatttggagcataactggagggtgggttggggaggggtggatttttaaaatgtcaagacagggaaggatgacaaaatggaaatttaaatgacatcctagaggtagagaaaccgtggagatcgcttttctcagactcaccaacttttaatgggatttcatggggtttggttgtgctgatagggtaaggggaggctgctttctgcccttctccccactcccatctgatttacttaattcagtctcagctgctgaaatttggaaaggaccaaattgctttacagtttttttctttgtgtagtatcttgaaatcctggaaaattctatggaatagttctgtatatagggcacaagtaaaggcattgtccaaagtttatttatttatttattaccctaagaatgctttgccataaccacatttaatgggaaaaacggcagtatcacagatgtaaattaactcaccagatttactgggcctgaactcattctcttcttgctatatgatttagcaagttctagaaggtctccaagacaataattacattggcacaatgtatacttcagtgctcacccgtaggcaaatctctttttaaaaaactctttggtgcacaagtaacacatttggccacaaaacaccaaagaattgtaggcagtggcccctattgagaagttttccggtagagttggaaatcagttgtgaatacattctttgctagttggagtgcttgtttactaagcatgtgccgtcgtaggtattagtgctagtctcaaataggtgcttcccctgaggtgcaggggaagaccaaagtttgcaactcgaactgctttcgtccatgtttctcacattgctgtattttagaaaataggggttaagactgataacaaccttttacattgtgactgtgtttgcattgtctaatgacagataaatccttaacatttctctccaccttagtactttagactaattgtgtttgtccgtccatgccatgaatgagtgggctgtagttgggcctaaataaatgagctgttggaagaaaagaatcacagtactttccagcagtcagtccctggttcctagatgtgttctaagcaatgcaaatgtctaattgtcccccagtgggcatagtcagtgtcgtttatattgtagcagttacagctctgtagtttatgatgcaaatctgccaagagagatgtatgtgtcactgcatggcttctgaaagcaggatgaattttctgcagctgtttcaaagttggggtctgttcttgaatcctctattaattactgtgtgtgagccagagggagctgtggtaagggttgggcccccagcctgtagggaactttctggactcccactctttgaatcgatataggcatttggtctcactacttgaccattctcaccctgtgaaacgtcccacactttgaagcaaatacaattcacagcacagtacacacaaaaaccttggcataagacagagaaggttcttcttattttgtgggctggttgctgtagaaacacataacaaagggcagccctccacttctggtataattgtgtagccccttttctttgggcttgacacctgtcttgaataagagtgattagagctgcataatgtccctctcttggctattgaccatgtggttcacgtacaaaactctgtataagttgaaggaaaatgttcatgttcatatgtacttgtttgctatgactacattttgaggttttgtaaaactgttatttttttttttttcacaatgtgaaactgaaggtcaataaattattagagattttctcttc

SEQ ID NO: 364566 - DNA, 3674 bp, Homo sapiens
  misc_feature (26)..(26): n is a, c, g, or t
taggctaggtacgaggctgggtggtnaatcggccggagaggaggcggtgcggcggtggcgctgcggagacccggtccagacgcctggcggccgccggcacacaaggcgctttctagctccctcccccgagcgcacagcccgcctccttccgcggcgcctgcagtggcaggcttgctctgccctaccgtgacgcgctccggagacgctctgcgggtcctggacaccgggtccgcggcgtggggacgacagacggaggcgaacgccatcggtagccggtccgcgagccatcgttcggggcgcagtcctctccccggctggccctcctttctccgggggtctgaaaatggggtctcgaaagatgtctgggtttatgataccctgcacgaggagtggtccaaggctgcccccatgctggtggccaggtttggccatggctctgctgaactgaagcactgcctgtatgtggttggggggcacacggccgcaactggctgcctcccggcctccccctcagtctctctaaagcaggtagaacattatgaccccacaatcaacaaatggaccatggtggccccactccgagaaggcgttagcaacgccgcagtagtgagtgccaaacttaagttatttgctttcggaggtaccagtgtcagtcatgacaagctccccaaagttcagtgttacgatcagtgtgaaaacaggtggactgtaccggccacctgtccccagccctggcgttacacagcagcagctgtgctggggaaccagatttttattatggggggtgatacagaattctctgcctgctctgcttataaattcaacagtgagacttaccagtggaccaaggtgggagatgtgacagcaaagcgcatgagctgccatgctgtggcctctggaaacaaactctacgtggttggaggatactttggcattcagcgatgcaagactttggactgctacgatccaacattagacgtgtggaacagcatcaccactgtcccgtactcgctgattcctactgcatttgtcagcacctggaaacatctgccttcttaaatgcagtacattctaaagagagtgagcatgagctcactccatcactcgatgagataatatgagatttctacttcggagaggccaagtctaatgaagagaaaaaaaggaaaagaagttgcaagactcgaataaaatctgctgcaccttgtaaatgctctaactggacatgaaggaaaggggcgagggaggggggtgggatttttggtgcaagtagcacatggtttaaatatgaatgaacaaacctgtgatctagtccttgtcttgtaattgtggattaatgtcaatgttaatcagcccctcaaagggagagaaaagctggaccttttcccttgctgtaccatattcagcatttgatttccatgggccccaccatttatgtgtagaatttgaaatggttgtcacctctctctgaggacagagcttgaagcctccacaccagctgctgctggagattcaaagcccaactgtgggtccgagagggaagctggctgggctggctgaagaatgaagaccactggactctccgttaatctctaaggggtctgctccccaggaacgtttctgaacaatggggactttgttggtagccatttggtagatgttcttttctatttataagtgactttaaactttcccttggctgttaagaagtttgttatagatttagctatttattgttcgatgcctgcatgctgaaacaatgcctacagctgtcttcacatgtatggacgtgtgtgaatggttgtacgttttgcacattttgtggctgttgagatgtgctttgctgcacaaacatgaaaatttttgagttacaatttggagcataactggagggtgggttggggaggggtggatttttaaaatgtcaagacagggaaggatgacaaaatggaaatttaaatgacatcctagaggtagagaaaccgtggagatcgcttttctcagactcaccaacttttaatgggatttcatggggtttggttgtgctgatagggtaaggggaggctgctttctgcccttctccccactcccatctgatttacttaattcagtctcagctgctgaaatttggaaaggaccaaattgctttacagtttttttctttgtgtagtatcttgaaatcctggaaaattctatggaatagttctgtatatagggcacaagtaaaggcattgtccaaagtttatttatttatttattaccctaagaatgctttgccataaccacatttaatgggaaaaacggcagtatcacagatgtaaattaactcaccagatttactgggcctgaactcattctcttcttgctatatgatttagcaagttctagaaggtctccaagacaataattacattggcacaatgtatacttcagtgctcacccgtaggcaaatctctttttaaaaaactctttggtgcacaagtaacacatttggccacaaaacaccaaagaattgtaggcagtggcccctattgagaagttttccggtagagttggaaatcagttgtgaatacattctttgctagttggagtgcttgtttactaagcatgtgccgtcgtaggtattagtgctagtctcaaataggtgcttcccctgaggtgcaggggaagaccaaagtttgcaactcgaactgctttcgtccatgtttctcacattgctgtattttagaaaataggggttaagactgataacaaccttttacattgtgactgtgtttgcattgtctaatgacagataaatccttaacatttctctccaccttagtactttagactaattgtgtttgtccgtccatgccatgaatgagtgggctgtagttgggcctaaataaatgagctgttggaagaaaagaatcacagtactttccagcagtcagtccctggttcctagatgtgttctaagcaatgcaaatgtctaattgtcccccagtgggcatagtcagtgtcgtttatattgtagcagttacagctctgtagtttatgatgcaaatctgccaagagagatgtatgtgtcactgcatggcttctgaaagcaggatgaattttctgcagctgtttcaaagttggggtctgttcttgaatcctctattaattactgtgtgtgagccagagggagctgtggtaagggttgggcccccagcctgtagggaactttctggactcccactctttgaatcgatataggcatttggtctcactacttgaccattctcaccctgtgaaacgtcccacactttgaagcaaatacaattcacagcacagtacacacaaaaaccttggcataagacagagaaggttcttcttattttgtgggctggttgctgtagaaacacataacaaagggcagccctccacttctggtataattgtgtagccccttttctttgggcttgacacctgtcttgaataagagtgattagagctgcataatgtccctctcttggctattgaccatgtggttcacgtacaaaactctgtataagttgaaggaaaatgttcatgttcatatgtacttgtttgctatgactacattttgaggttttgtaaaactgttatttttttttttttcacaatgtgaaactgaaggtcaataaattattagagattttctcttc

SEQ ID NO: 364567 - DNA, 3020 bp, Homo sapiens
  misc_feature (26)..(26): n is a, c, g, or t
taggctaggtacgaggctgggtggtnaatcggccggagaggaggcggtgcggcggtggcgctgcggagacccggtccagacgcctggcggccgccggcacacaaggcgctttctagctccctcccccgagcgcacagcccgcctccttccgcggcgcctgcagtggcaggcttgctctgccctaccgtgacgcgctccggagacgctctgcgggtcctggacaccgggtccgcggcgtggggacgacagacggaggcgaacgccatcggtagccggtccgcgagccatcgttcggggcgcagtcctctccccggctggccctcctttctccggggcattcgccaccgcttccctgggctgagacgaccggttcgtcgcctccttgcccgtgaccgtcgctagaactcagttgtgcgttgcggccagtcgccactgctctcactccatcactcgatgagataatatgagatttctacttcggagaggccaagtctaatgaagagaaaaaaaggaaaagaagttgcaagactcgaataaaatctgctgcaccttgtaaatgctctaactggacatgaaggaaaggggcgagggaggggggtgggatttttggtgcaagtagcacatggtttaaatatgaatgaacaaacctgtgatctagtccttgtcttgtaattgtggattaatgtcaatgttaatcagcccctcaaagggagagaaaagctggaccttttcccttgctgtaccatattcagcatttgatttccatgggccccaccatttatgtgtagaatttgaaatggttgtcacctctctctgaggacagagcttgaagcctccacaccagctgctgctggagattcaaagcccaactgtgggtccgagagggaagctggctgggctggctgaagaatgaagaccactggactctccgttaatctctaaggggtctgctccccaggaacgtttctgaacaatggggactttgttggtagccatttggtagatgttcttttctatttataagtgactttaaactttcccttggctgttaagaagtttgttatagatttagctatttattgttcgatgcctgcatgctgaaacaatgcctacagctgtcttcacatgtatggacgtgtgtgaatggttgtacgttttgcacattttgtggctgttgagatgtgctttgctgcacaaacatgaaaatttttgagttacaatttggagcataactggagggtgggttggggaggggtggatttttaaaatgtcaagacagggaaggatgacaaaatggaaatttaaatgacatcctagaggtagagaaaccgtggagatcgcttttctcagactcaccaacttttaatgggatttcatggggtttggttgtgctgatagggtaaggggaggctgctttctgcccttctccccactcccatctgatttacttaattcagtctcagctgctgaaatttggaaaggaccaaattgctttacagtttttttctttgtgtagtatcttgaaatcctggaaaattctatggaatagttctgtatatagggcacaagtaaaggcattgtccaaagtttatttatttatttattaccctaagaatgctttgccataaccacatttaatgggaaaaacggcagtatcacagatgtaaattaactcaccagatttactgggcctgaactcattctcttcttgctatatgatttagcaagttctagaaggtctccaagacaataattacattggcacaatgtatacttcagtgctcacccgtaggcaaatctctttttaaaaaactctttggtgcacaagtaacacatttggccacaaaacaccaaagaattgtaggcagtggcccctattgagaagttttccggtagagttggaaatcagttgtgaatacattctttgctagttggagtgcttgtttactaagcatgtgccgtcgtaggtattagtgctagtctcaaataggtgcttcccctgaggtgcaggggaagaccaaagtttgcaactcgaactgctttcgtccatgtttctcacattgctgtattttagaaaataggggttaagactgataacaaccttttacattgtgactgtgtttgcattgtctaatgacagataaatccttaacatttctctccaccttagtactttagactaattgtgtttgtccgtccatgccatgaatgagtgggctgtagttgggcctaaataaatgagctgttggaagaaaagaatcacagtactttccagcagtcagtccctggttcctagatgtgttctaagcaatgcaaatgtctaattgtcccccagtgggcatagtcagtgtcgtttatattgtagcagttacagctctgtagtttatgatgcaaatctgccaagagagatgtatgtgtcactgcatggcttctgaaagcaggatgaattttctgcagctgtttcaaagttggggtctgttcttgaatcctctattaattactgtgtgtgagccagagggagctgtggtaagggttgggcccccagcctgtagggaactttctggactcccactctttgaatcgatataggcatttggtctcactacttgaccattctcaccctgtgaaacgtcccacactttgaagcaaatacaattcacagcacagtacacacaaaaaccttggcataagacagagaaggttcttcttattttgtgggctggttgctgtagaaacacataacaaagggcagccctccacttctggtataattgtgtagccccttttctttgggcttgacacctgtcttgaataagagtgattagagctgcataatgtccctctcttggctattgaccatgtggttcacgtacaaaactctgtataagttgaaggaaaatgttcatgttcatatgtacttgtttgctatgactacattttgaggttttgtaaaactgttatttttttttttttcacaatgtgaaactgaaggtcaataaattattagagattttctcttc

SEQ ID NO: 364568 - DNA, 843 bp, Homo sapiens
  misc_feature (26)..(26): n is a, c, g, or t
taggctaggtacgaggctgggtggtnaatcggccggagaggaggcggtgcggcggtggcgctgcggagacccggtccagacgcctggcggccgccggcacacaaggcgctttctagctccctcccccgagcgcacagcccgcctccttccgcggcgcctgcagtggcaggcttgctctgccctaccgtgacgcgctccggagacgctctgcgggtcctggacaccgggtccgcggcgtggggacgacagacggaggcgaacgccatcggtagccggtccgcgagccatcgttcggggcgcagtcctctccccggctggccctcctttctccggggcattcgccaccgcttccctgggctgagacgaccggttcgtcgcctccttgcccgtgaccgtcgctagaactcagttgtgcgttgcggccagtcgccactgctgtgtcagcatttgcaggtatacaggaacagtcctagtgatgcactatttaatcaaaagacggatggatcttttgttcttgcagctggttttccaagaattgatataaagcgggaagaacagaaaacagcagtcataagtatgctactcaaaatattcttctttttatgtgccaaatcctcacattggaagctgtcccgagcaagacaggtagttggtgattatggccagaatttattctgtgctttgactaaaggcttgctgatcaatatatggttaatgttgaaattggggtgcttttaggactcttcagtggtagagctgtctggttagaaattaatctttaagttgggatgccgaggtgggaggatcaggtgaggccaggagtttgagacccggtctctacaa

SEQ ID NO: 364569 - DNA, 648 bp, Homo sapiens
acggcctaaaaaacccaaaccgtggctcaagtagaagtctcaagcattgtgatccccaagttccggtcccgttcaaggtccagttcatttgcattgccaattaacctgtaaataacttgccctgggggcctttttttaaaaaacaaaaaccacaaaaattcccaaaccatacttgctaaaaattctggtaagtatgtgcttttctgtgggggtgggatttggaaggggggttgggttgggctggatatctttgtagatgtggaccaccaaggggttgttgaaaactaattgtattaaatgtcttttgataagccttctgctcacatttttgtgaatgtctgaagtatatagtttgtgtatattgacagagctcttttataactaaagcaaatttaatttttttgtactagaaaaaaatttgaacattttagttcttggttataaaaatgttaattcagaattagtttaatgccttaattaaactaattaatagctttggacacttaaaagagctctaaatttgcttgtacataaaggcttaatttgttttccttgttagggtcaagggtgtcctccactctttaacagctgctggacagacacattagagcagctgtttgttattgataataaaatattataaaacta

SEQ ID NO: 364570 - DNA, 685 bp, Homo sapiens
agcggaagtgacgtaggacgcgccctccattttgtggagcgccagagctgctaagtgcgtcagttgtggagtggcgtagacgagttaagtcctggtctgcgtggaggtcgacgactccgtcgcagactacggacctgtctgggtctcagccgccaaagaccccgtccggtaggtgagtggctcactttgagggcaagccttctcggatcgaggcttcttcatggccgctcagatcgtgagcggccggggctgctctctttgcggaggatggcgtctaatgagcgcagttgattcgggaagtactagccggacatcatgagtggctgtcgggtattcatcgggagactaaatccagcggccagggagaaggacgtggaaagattcttcaagggatatggacggataagagatattgatctgaaaagaggctttggttttgtggaatttgaggatccaagggatgcagatgatgctgtgtatgagcttgatggaaaagaactctgtagtgaaagggtactatcgaacatgctcggtcttgctcacgcggttgtacgagtacgcggaccgtactttgccccgttaagtagctgtagactttgaactgtttgctccgttcccccgctatccgacatccgcctcttcgtcggactttatctctccgcggtttgttgtactgcacttccct

SEQ ID NO: 364571 - DNA, 2548 bp, Homo sapiens
cttttggggtctttgctcttttggggtctttgctcttttggggtctttgctcaagaagttgtaagagagattgaaaaccagaaaacagatgcagctagcaaaccgtttgcggaggtacggatactcagttgtggagagcttgatggaaaagaactctgtagtgaaagggttactattgaacatgctagggctcggtcacgaggtggaagaggtagaggacgatactctgaccgttttagtagtcgcagacctcgaaatgatagacgaaatgctccacctgtaagaacagaaaatcgtcttatagttgagaatttatcctcaagagtcagctggcaggtttgttgaaatacagttttgagttattttgatgtggctttttaaaaaagttaatgggtagctaatgttgtattgttttattaaaagtagttttaaattaatggatttaatggaattgtaattttaaacatttaattaaatgtaatttgggggatattttgaactttaatattagtgatcaaatgtaaatgttttgaggatatttttcttgttttttaaaatcaatttttaaccaaatattaaaccctttatttgccagcctgtctgtgtcgttggccttatgacgaggagtgcctgtgggttatcctaatcgttgtcttggtcactcttggttgggcctggttgactttgccagtcagctcctacagtgatcagttggccacctctagatctgtgtttgccggtctagacgttatcggtgcacttccttgaagtgccaggttgcagcgatcccagagcgttgataacgtgatctgatccctaagttgagacctgtcttcctgtaacgcttccgaataagaggtccggtcgaaaagagttgaaagatacgaaattaggtggtcgttggaatcctgatcgcagtaaagtggtccttggtaactgctcgagtagaacatgtctgcatccgccaatagtccgctaatagggagggctgtgcgattaaaggcttccatcgattgggtagtgtccttcaagtgggtggcgaagagccagtcgggcatatgtcatgaaggtttctccgaccgattaatggtttgctgcttgactagcctagggaaataataataaaggtaaagtaaacttttttaatgacatatggggcacaaaataactggtgtcttgtaaatgttctgtttttttaaataaaacttctctactttagtctttactttaaaaatatgtactgtttccttttttgttgtttttttgtttgtttttttttcttttgtactgagctcagcatagactaatactaccttaatgttaaaatctgaatttcttttagcattttgcttaaaagcaatatgctatttgcttattccgtgccctgacatagataatttttgaattctgatagaatacaagtgtggtaaatgccatgtttgtactttatctaacatcttctctttcagtagtcttgttttttttatatcatgtgattgtttgtgtgtcccctttcctcttctttgcttaacacaattatcttgtgttaaggatctcaaagatttcatgagacaagctggggaagtaacgtttgcggatgcacaccgacctaaattaaatgaaggggtggttgagtttgcctcttatggtgacttaaagaatgctattgaaaaactttctggaaaggaaataaatgggagaaaaataaaattaattgaaggcagcaaaaggcacagtaggtcaagaagcaggtctcgatcccggaccagaagttcctctaggtctcgtagccgatcccgttcccgtagtcgcaaatcttacagccggtcaagaagcaggagcaggagccggagccggagcaagtcccgttctgttagtaggtctcccgtgcctgagaagagccagaaacgtggttcttcaagtagatctaagtctccagcatctgtggatcgccagaggtcccggtcccgatcaaggtccagatcagttgacagtggcaattaaactgtaaataacttgccctgggggcctttttttaaaaaacaaaaaccacaaaaattcccaaaccatacttgctaaaaattctggtaagtatgtgcttttctgtgggggtgggatttggaaggggggttgggttgggctggatatctttgtagatgtggaccaccaaggggttgttgaaaactaattgtattaaatgtcttttgataagccttctgctcacatttttgtgaatgtctgaagtatatagtttgtgtatattgacagagctcttttataactaaagcaaatttaatttttttgtactagaaaaaaatttgaacattttagttcttggttataaaaatgttaattcagaattagtttaatgccttaattaaactaattaatagctttggacacttaaaagagctctaaatttgcttgtacataaaggcttaatttgttttccttgttagggtcaagggtgtcctccactctttaacagctgctggacagacacattagagcagctgtttgttattgataataaaatattataaaacta

SEQ ID NO: 364572 - DNA, 2452 bp, Homo sapiens
cttttggggtctttgctcttttggggtctttgctcttttggggtctttgctcaagaagttgtaagagagattgaaaaccagaaaacagatgcagctagcaaaccgtttgcggaggtacggatactcagttgtggagagcttgatggaaaagaactctgtagtgaaagggttactattgaacatgctagggctcggtcacgaggtggaagaggtagaggacgatactctgaccgttttagtagtcgcagacctcgaaatgatagacggtatgtgaagggtggatggctgcattgaacaattattgtaggggtagcatttaagattcaggagtcattagcagtgatgattttgggtcctgccgtataatctgttcttctattcccacgttagccagttgttcttgatgaatctatatgagtcatagaacacaaatctattgacggaagtcattagaatggcttgtgatatctgatggcttgaacttgcccacagttgaacacaagtgctgtcattgcatttcttccattgtgaatacgaattttcttcctcagaaatgctccacctgtaagaacagaaaatcgtcttatagttgagaatttatcctcaagagtcagctggcaggtttgttgaaatacagttttgagttattttgatgtggctttttaaaaaagttaatgggtagctaatgttgtattgttttattaaaagtagttttaaattaatggatttaatggaattgtaattttaaacatttaattaaatgtaatttgggggatattttgaactttaatattagtgatcaaatgtaaatgttttgaggatatttttcttgttttttgttggccttatgacgaggagtgcctgtgggttatcctaatcgttgtcttggtcactcttggttgggcctggttgactttgccagtcagctcctacagtgatcagttggccacctctagatctgtgtttgccggtctagacgttatcggtgcacttccttgaagtgccaggttgcagcgatcccagagcgttgataacgtgatctgatccctaagttgagacctgtcttcctgtaacgcttccgaataagaggtccggtcgaaaagagttgaaagatacgaaattaggtggtcgttggaatcctgatcgcagtaaagtggtccttggtaactgctcgagtagaacatgtctgcatccgccaatagtccgctaatagggagggctgtgcgattaaaggcttccatcgattgggtagtgtccttcaagtgggtggcgaagagccagtcgggcatatgtcatgaaggtttctccgaccgattaatggtttgctgcttgactagcctagggaaataataataaaggtaaagtaaacttttttaatgacatatggggcacaaaataactggtgtcttgtaaatgttctgtttttttaaataaaacttctctactttagtctttactttaaaaatatgtactgtttccttttttgttgtttttttgtttgtttttttttcttttgtactgagctcagcatagactaatactaccttaatgttaaaatctgaatttcttttagcattttgcttaaaagcaatatgctatttgcttattccgtgccctgacatagataatttttgaattctgatagaatacaagtgtggtaaatgccatgtttgtactttatctaacatcttctctttcagtagtcttgttttttttatatcatgtgattgtttgtgtgtcccctttcctcttctttgcttaacacaattatcttgtgttaaggatctcaaagatttcatgagacaagctggggaagtaacgtttgcggatgcacaccgacctaaattaaatgaaggggtggttgagtttgcctcttatggtgacttaaagaatgctattgaaaaactttctggaaaggaaataaatgggagaaaaataaaattaattgaaggcagcaaaaggcacagtaggtcaagaagcaggtctcgatcccggaccagaagttcctctaggtctcgtagccgatcccgttcccgtagtcgcaaatcttacagccggtcaagaagcaggagcaggagccggagccggagcaagtcccgttctgttagtaggtctcccgtgcctgagaagagccagaaacgtggttcttcaagtagatctaagtctccagcatctgtggatcgccagaggtcccggtcccgatcaaggtccagatcagttgacagtggcaattaaactgtaaataacttgccctgggggcctttttttaaaaaacaaaaaccacaaaaattcccaaaccatacttgctaaaaattctggtaagtatgtgcttttctgtgggggtgggatttggaaggggggttgggttgggctggatatctttgtagatgtggaccaccaaggggttgttgaaaactaattgtattaaatgtcttttgataagccttctgct

SEQ ID NO: 364573 - DNA, 2904 bp, Homo sapiens
cttttggggtctttgctcttttggggtctttgctcttttggggtctttgctcaagaagttgtaagagagattgaaaaccagaaaacagatgcagctagcaaaccgtttgcggaggtacggatactcagttgtggagagcttgatggaaaagaactctgtagtgaaagggttactattgaacatgctagggctcggtcacgaggtggaagaggtagaggacgatactctgaccgttttagtagtcgcagacctcgaaatgatagacgaaatgctccacctgtaagaacagaaaatcgtcttatagttgagaatttatcctcaagagtcagctggcaggtttgttgaaatacagttttgagttattttgatgtggctttttaaaaaagttaatgggtagctaatgttgtattgttttattaaaagtagttttaaattaatggatttaatggaattgtaattttaaacatttaattaaatgtaatttgggggatattttgaactttaatattagtgatcaaatgtaaatgttttgaggatatttttcttgttttttaaaatcaatttttaaccaaatattaaaccctttatttgccagcctgtctgtgtcgttggccttatgacgaggagtgcctgtgggttatcctaatcgttgtcttggtcactcttggttgggcctggttgactttgccagtcagctcctacagtgatcagttggccacctctagatctgtgtttgccggtctagacgttatcggtgcacttccttgaagtgccaggttgcagcgatcccagagcgttgataacgtgatctgatccctaagttgagacctgtcttcctgtaacgcttccgaataagaggtccggtcgaaaagagttgaaagatacgaaattaggtggtcgttggaatcctgatcgcagtaaagtggtccttggtaactgctcgagtagaacatgtctgcatccgccaatagtccgctaatagggagggctgtgcgattaaaggcttccatcgattgggtagtgtccttcaagtgggtggcgaagagccagtcgggcatatgtcatgaaggtttctccgaccgattaatggtttgctgcttgactagcctagggaaataataataaaggtaaagtaaacttttttaatgacatatggggcacaaaataactggtgtcttgtaaatgttctgtttttttaaataaaacttctctactttagtctttactttaaaaatatgtactgtttccttttttgttgtttttttgtttgtttttttttcttttgtactgagctcagcatagactaatactaccttaatgttaaaatctgaatttcttttagcattttgcttaaaagcaatatgctatttgcttattccgtgccctgacatagataatttttgaattctgatagaatacaagtgtggtaaatgccatgtttgtactttatctaacatcttctctttcagtagtcttgttttttttatatcatgtgattgtttgtgtgtcccctttcctcttctttgcttaacacaattatcttgtgttaaggatctcaaagatttcatgagacaagctggggaagtaacgtttgcggatgcacaccgacctaaattaaatgaaggggtggttgagtttgcctcttatggtgacttaaagaatgctattgaaaaactttctggaaaggaaataaatgggagaaaaataaaattaattgaaggcagcaaaaggcacagtaggtcaagaagcaggtctcgatcccggaccagaagttcctctaggtctcgtagccgatcccgttcccgtagtcgcaaatcttacagccggtcaagaagcaggagcaggagccggagccggagcaagtcccgttctgttagtaggtctcccgtgcctgagaagagccagaaacgtggttcttcaagtagatctaagtctccagcatctgtggatcgccagaggtcccggtcccgatcaaggtccagatcagttgacagtggcaattaaactgtaaataacttgccctgggggcctttttttaaaaaacaaaaaccacaaaaattcccaaaccatacttgctaaaaattctggtaagtatgtgcttttctgtgggggtgggatttggaaggggggttgggttgggctggatatctttgtagatgtggaccaccaaggggttgttgaaaactaattgtattaaatgtcttttgataagccttctgctcacatttttgtgaatgtctgaagtatatagtttgtgtatattgacagagctcttttataactaaagcaaatttaatttttttgtactagaaaaaaatttgaacattttagttcttggttataaaaatgttaattcagaattagtttaatgccttaattaaactaattaatagctttggacacttaaaagagctctaaatttgcttgtacataaaggcttaatttgttttccttgttagggtcaagggtgtcctccactctttaacagctgctggacagacacattagagcagctgtttgttattgataataaaatattataaaactaaaaaaaaaaagaaaaaaaaaaaaaaaaaaaaaaaaaaaaaaaaaaaaaaaaaaaaaaaaaaaaaaaaaaaaaaaaaaaaaaaaaaaaaaaaaaaaaaaaaaaaaaaaaaaaaaaaaaaaaaaaaaaaaaaaaggaaaaaaaaaaaaaaaaaaaaaaaattttttttgggccccgaatattggcgttcttttgcccaccccccctttatgggagggtgttattcaaatccgggggcggttttttatcagagtggggggggggaaaaacccgggtggccccaaattttactcctgtggagaaactcctctttgtggggggggggaataataaaaaggcgccccccccgccctttttac

SEQ ID NO: 364574 - DNA, 3002 bp, Homo sapiens
cttttggggtctttgctcttttggggtctttgctcttttggggtctttgctcaagaagttgtaagagagattgaaaaccagaaaacagatgcagctagcaaaccgtttgcggaggtacggatactcagttgtggagagcttgatggaaaagaactctgtagtgaaagggttactattgaacatgctagggctcggtcacgaggtggaagaggtagaggacgatactctgaccgttttagtagtcgcagacctcgaaatgatagacgaaatgctccacctgtaagaacagaaaatcgtcttatagttgagaatttatcctcaagagtcagctggcaggtttgttgaaatacagttttgagttattttgatgtggctttttaaaaaagttaatgggtagctaatgttgtattgttttattaaaagtagttttaaattaatggatttaatggaattgtaattttaaacatttaattaaatgtaatttgggggatattttgaactttaatattagtgatcaaatgtaaatgttttgaggatatttttcttgttttttaaaatcaatttttaaccaaatattaaaccctttatttgccagcctgtctgtgtcgttggccttatgacgaggagtgcctgtgggttatcctaatcgttgtcttggtcactcttggttgggcctggttgactttgccagtcagctcctacagtgatcagttggccacctctagatctgtgtttgccggtctagacgttatcggtgcacttccttgaagtgccaggttgcagcgatcccagagcgttgataacgtgatctgatccctaagttgagacctgtcttcctgtaacgcttccgaataagaggtccggtcgaaaagagttgaaagatacgaaattaggtggtcgttggaatcctgatcgcagtaaagtggtccttggtaactgctcgagtagaacatgtctgcatccgccaatagtccgctaatagggagggctgtgcgattaaaggcttccatcgattgggtagtgtccttcaagtgggtggcgaagagccagtcgggcatatgtcatgaaggtttctccgaccgattaatggtttgctgcttgactagcctagggaaataataataaaggtaaagtaaacttttttaatgacatatggggcacaaaataactggtgtcttgtaaatgttctgtttttttaaataaaacttctctactttagtctttactttaaaaatatgtactgtttccttttttgttgtttttttgtttgtttttttttcttttgtactgagctcagcatagactaatactaccttaatgttaaaatctgaatttcttttagcattttgcttaaaagcaatatgctatttgcttattccgtgccctgacatagataatttttgaattctgatagaatacaagtgtggtaaatgccatgtttgtactttatctaacatcttctctttcagtagtcttgttttttttatatcatgtgattgtttgtgtgtcccctttcctcttctttgcttaacacaattatcttgtgttaaggatctcaaagatttcatgagacaagctggggaagtaacgtttgcggatgcacaccgacctaaattaaatgaagggtatgtactggaaactgtgaaagtctttaaaaatatccggaaaattttactgtgaacttagttttgaggacttaaaatttgaatatgttagaatgcagagattctccagagacaattttgctgcttccctcctcccccccacacctttggcagtgtctggagacaagtttggttgtcacaactggttgagagaggatgctgttggcatgtagtcagtaggggctaggcatcctgctaagcatcccacggtgcatagggaaccccctcaacaatgaattggctcaaagtataacagtgccaaaactttgctcttttaatgctgtgttatccagaaataagactcaatagtagcaatagcaaaagtgaacatagaaacgacttacctagactgctgtgtgcaatgtgtgagactacaggatgtatatactttaaaagtggctgttttccattttagggtggttgagtttgcctcttatggtgacttaaagaatgctattgaaaaactttctggaaaggaaataaatgggagaaaaataaaattaattgaaggcagcaaaaggcacagtaggtcaagaagcaggtctcgatcccggaccagaagttcctctaggtctcgtagccgatcccgttcccgtagtcgcaaatcttacagccggtcaagaagcaggagcaggagccggagccggagcaagtcccgttctgttagtaggtctcccgtgcctgagaagagccagaaacgtggttcttcaagtagatctaagtctccagcatctgtggatcgccagaggtcccggtcccgatcaaggtccagatcagttgacagtggcaattaaactgtaaataacttgccctgggggcctttttttaaaaaacaaaaaccacaaaaattcccaaaccatacttgctaaaaattctggtaagtatgtgcttttctgtgggggtgggatttggaaggggggttgggttgggctggatatctttgtagatgtggaccaccaaggggttgttgaaaactaattgtattaaatgtcttttgataagccttctgctcacatttttgtgaatgtctgaagtatatagtttgtgtatattgacagagctcttttataactaaagcaaatttaatttttttgtactagaaaaaaatttgaacattttagttcttggttataaaaatgttaattcagaattagtttaatgccttaattaaactaattaatagctttggacacttaaaagagctctaaatttgcttgtacataaaggcttaatttgttttccttgttagggtcaagggtgtcctccactctttaacagctgctggacagacacattagagcagctgtttgttattgataataaaatattataaaacta

SEQ ID NO: 364575 - DNA, 1680 bp, Homo sapiens
tacattaatcagctcggtaccgggtggggagtacggaatcctgatcgcagtaaagtggtccttggtaactgctcgagtagaacatgtctgcatccgccaatagtccgctaatagggagggctgtgcgattaaaggcttccatcgattgggtagtgtccttcaagtgggtggcgaagagccagtcgggcatatgtcatgaaggtttctccgaccgattaatggtttgctgcttgactagcctagggaaataataataaaggtaaagtaaacttttttaatgacatatggggcacaaaataactggtgtcttgtaaatgttctgtttttttaaataaaacttctctactttagtctttactttaaaaatatgtactgtttccttttttgttgtttttttgtttgtttttttttcttttgtactgagctcagcatagactaatactaccttaatgttaaaatctgaatttcttttagcattttgcttaaaagcaatatgctatttgcttattccgtgccctgacatagataatttttgaattctgatagaatacaagtgtggtaaatgccatgtttgtactttatctaacatcttctctttcagtagtcttgttttttttatatcatgtgattgtttgtgtgtcccctttcctcttctttgcttaacacaattatcttgtgttaaggatctcaaagatttcatgagacaagctggggaagtaacgtttgcggatgcacaccgacctaaattaaatgaaggggtggttgagtttgcctcttatggtgacttaaagaatgctattgaaaaactttctggaaaggaaataaatgggagaaaaataaaattaattgaaggcagcaaaaggcacagtaggtcaagaagcaggtctcgatcccggaccagaagttcctctaggtctcgtagccgatcccgttcccgtagtcgcaaatcttacagccggtcaagaagcaggagcaggagccggagccggagcaagtcccgttctgttagtaggtctcccgtgcctgagaagagccagaaacgtggttcttcaagtagatctaagtctccagcatctgtggatcgccagaggtcccggtcccgatcaaggtccagatcagttgacagtggcaattaaactgtaaataacttgccctgggggcctttttttaaaaaacaaaaaccacaaaaattcccaaaccatacttgctaaaaattctggtaagtatgtgcttttctgtgggggtgggatttggaaggggggttgggttgggctggatatctttgtagatgtggaccaccaaggggttgttgaaaactaattgtattaaatgtcttttgataagccttctgctcacatttttgtgaatgtctgaagtatatagtttgtgtatattgacagagctcttttataactaaagcaaatttaatttttttgtactagaaaaaaatttgaacattttagttcttggttataaaaatgttaattcagaattagtttaatgccttaattaaactaattaatagctttggacacttaaaagagctctaaatttgcttgtacataaaggcttaatttgttttccttgttagggtcaagggtgtcctccactctttaacagctgctggacagacacattagagcagctgtttgttattgataataaaatattataaaacta

SEQ ID NO: 364576 - DNA, 2124 bp, Homo sapiens
cttttggggtctttgctcttttggggtctttgctcttttggggtctttgctcaagaagttgtaagagagattgaaaaccagaaaacagatgcagctagcaaaccgtttgcggaggtacggatactcagttgtggagagcttgatggaaaagaactctgtagtgaaagggttactattgaacatgctagggctcggtcacgaggtggaagaggtagaggacgatactctgaccgttttagtagtcgcagacctcgaaatgatagacgaaatgctccacctgtaagaacagaaaatcgtcttatagttgagaatttatcctcaagagtcagctggcaggtttgttgaaatacagttttgagttattttgatgtggctttttaaaaaagttaatgggtagctaatgttgtattgttttattaaaagtagttttaaattaatggatttaatggaattgtaattttaaacatttaattaaatgtaatttgggggatattttgaactttaatattagtgatcaaatgtaaatgttttgaggatatttttcttgttttttaaaatcaatttttaaccaaatattaaaccctttatttgccagcctgtctgtgtcgttggccttatgacgaggagtgcctgtgggttatcctaatcgttgtcttggtcactcttggttgggcctggttgactttgccagtcagctcctacagtgatcagttggccacctctagatctgtgtttgccggtctagacgttatcggtgcacttccttgaagtgccaggttgcagcgatcccagagcgttgataacgtgatctgatccctaagttgagacctgtcttcctgtaacgcttccgaataagaggtccggtcgaaaagagttgaaagatacgaaattaggtggtcgttggaatcctgatcgcagtaaagtggtccttggtaactgctcgagtagaacatgtctgcatccgccaatagtccgctaatagggagggctgtgcgattaaaggcttccatcgattgggtagtgtccttcaagtgggtggcgaagagccagtcgggcatatgtcatgaaggtttctccgaccgattaatggtttgctgcttgactagcctagggaaataataataaaggatctcaaagatttcatgagacaagctggggaagtaacgtttgcggatgcacaccgacctaaattaaatgaaggggtggttgagtttgcctcttatggtgacttaaagaatgctattgaaaaactttctggaaaggaaataaatgggagaaaaataaaattaattgaaggcagcaaaaggcacagtaggtcaagaagcaggtctcgatcccggaccagaagttcctctaggtctcgtagccgatcccgttcccgtagtcgcaaatcttacagccggtcaagaagcaggagcaggagccggagccggagcaagtcccgttctgttagtaggtctcccgtgcctgagaagagccagaaacgtggttcttcaagtagatctaagtctccagcatctgtggatcgccagaggtcccggtcccgatcaaggtccagatcagttgacagtggcaattaaactgtaaataacttgccctgggggcctttttttaaaaaacaaaaaccacaaaaattcccaaaccatacttgctaaaaattctggtaagtatgtgcttttctgtgggggtgggatttggaaggggggttgggttgggctggatatctttgtagatgtggaccaccaaggggttgttgaaaactaattgtattaaatgtcttttgataagccttctgctcacatttttgtgaatgtctgaagtatatagtttgtgtatattgacagagctcttttataactaaagcaaatttaatttttttgtactagaaaaaaatttgaacattttagttcttggttataaaaatgttaattcagaattagtttaatgccttaattaaactaattaatagctttggacacttaaaagagctctaaatttgcttgtacataaaggcttaatttgttttccttgttagggtcaagggtgtcctccactctttaacagctgctggacagacacattagagcagctgtttgttattgataataaaatattataaaacta

SEQ ID NO: 364577 - DNA, 2438 bp, Homo sapiens
cttttggggtctttgctcttttggggtctttgctcttttggggtctttgctcaagaagttgtaagagagattgaaaaccagaaaacagatgcagctagcaaaccgtttgcggaggtacggatactcagttgtggagagcttgatggaaaagaactctgtagtgaaagggttactattgaacatgctagggctcggtcacgaggtggaagaggtagaggacgatactctgaccgttttagtagtcgcagacctcgaaatgatagacgaaatgctccacctgtaagaacagaaaatcgtcttatagttgagaatttatcctcaagagtcagctggcaggtttgttgaaatacagttttgagttattttgatgtggctttttaaaaaagttaatgggtagctaatgttgtattgttttattaaaagtagttttaaattaatggatttaatggaattgtaattttaaacatttaattaaatgtaatttgggggatattttgaactttaatattagtgatcaaatgtaaatgttttgaggatatttttcttgttttttaaaatcaatttttaaccaaatattaaaccctttatttgccagcctgtctgtgtcgttggccttatgacgaggagtgcctgtgggttatcctaatcgttgtcttggtcactcttggttgggcctggttgactttgccagtcagctcctacagtgatcagttggccacctctagatctgtgtttgccggtctagacgttatcggtgcacttccttgaagtgccaggttgcagcgatcccagagcgttgataacgtgatctgatccctaagttgagacctgtcttcctgtaacgcttccgaataagaggtccggtcgaaaagagttgaaagatacgaaattaggtggtcgttggaatcctgatcgcagtaaagtggtccttggtaactgctcgagtagaacatgtctgcatccgccaatagtccgctaatagggagggctgtgcgattaaaggcttccatcgattgggtagtgtccttcaagtgggtggcgaagagccagtcgggcatatgtcatgaaggtttctccgaccgattaatggtttgctgcttgactagcctagggaaataataataaaggtaaagtaaacttttttaatgacatatggggcacaaaataactggtgtcttgtaaatgttctgtttttttaaataaaacttctctactttagtctttactttaaaaatatgtactgtttccttttttgttgtttttttgtttgtttttttttcttttgtactgagctcagcatagactaatactaccttaatgttaaaatctgaatttcttttagcattttgcttaaaagcaatatgctatttgcttattccgtgccctgacatagataatttttgaattctgatagaatacaagtgtggtaaatgccatgtttgtactttatctaacatcttctctttcagtagtcttgttttttttatatcatgtgattgtttgtgtgtcccctttcctcttctttgcttaacacaattatcttgtgttaaggatctcaaagatttcatgagacaagctggggaagtaacgtttgcggatgcacaccgacctaaattaaatgaagagtaggtcaagaagcaggtctcgatcccggaccagaagttcctctaggtctcgtagccgatcccgttcccgtagtcgcaaatcttacagccggtcaagaagcaggagcaggagccggagccggagcaagtcccgttctgttagtaggtctcccgtgcctgagaagagccagaaacgtggttcttcaagtagatctaagtctccagcatctgtggatcgccagaggtcccggtcccgatcaaggtccagatcagttgacagtggcaattaaactgtaaataacttgccctgggggcctttttttaaaaaacaaaaaccacaaaaattcccaaaccatacttgctaaaaattctggtaagtatgtgcttttctgtgggggtgggatttggaaggggggttgggttgggctggatatctttgtagatgtggaccaccaaggggttgttgaaaactaattgtattaaatgtcttttgataagccttctgctcacatttttgtgaatgtctgaagtatatagtttgtgtatattgacagagctcttttataactaaagcaaatttaatttttttgtactagaaaaaaatttgaacattttagttcttggttataaaaatgttaattcagaattagtttaatgccttaattaaactaattaatagctttggacacttaaaagagctctaaatttgcttgtacataaaggcttaatttgttttccttgttagggtcaagggtgtcctccactctttaacagctgctggacagacacattagagcagctgtttgttattgataataaaatattataaaacta

SEQ ID NO: 364578 - DNA, 2502 bp, Homo sapiens
cttttggggtctttgctcttttggggtctttgctcttttggggtctttgctcaagaagttgtaagagagattgaaaaccagaaaacagatgcagctagcaaaccgtttgcggaggtacggatactcagttgtggagagcttgatggaaaagaactctgtagtgaaagggttactattgaacatgctagggctcggtcacgaggtggaagaggtagaggacgatactctgaccgttttagtagtcgcagacctcgaaatgatagacgaaatgctccacctgtaagaacagaaaatcgtcttatagttgagaatttatcctcaagagtcagctggcaggtttgttgaaatacagttttgagttattttgatgtggctttttaaaaaagttaatgggtagctaatgttgtattgttttattaaaagtagttttaaattaatggatttaatggaattgtaattttaaacatttaattaaatgtaatttgggggatattttgaactttaatattagtgatcaaatgtaaatgttttgaggatatttttcttgttttttaaaatcaatttttaaccaaatattaaaccctttatttgccagcctgtctgtgtcgttggccttatgacgaggagtgcctgtgggttatcctaatcgttgtcttggtcactcttggttgggcctggttgactttgccagtcagctcctacagtgatcagttggccacctctagatctgtgtttgccggtctagacgttatcggtgcacttccttgaagtgccaggttgcagcgatcccagagcgttgataacgtgatctgatccctaagttgagacctgtcttcctgtaacgcttccgaataagaggtccggtcgaaaagagttgaaagatacgaaattaggtggtcgttggaatcctgatcgcagtaaagtggtccttggtaactgctcgagtagaacatgtctgcatccgccaatagtccgctaatagggagggctgtgcgattaaaggcttccatcgattgggtagtgtccttcaagtgggtggcgaagagccagtcgggcatatgtcatgaaggtttctccgaccgattaatggtttgctgcttgactagcctagggaaataataataaaggtaaagtaaacttttttaatgacatatggggcacaaaataactggtgtcttgtaaatgttctgtttttttaaataaaacttctctactttagtctttactttaaaaatatgtactgtttccttttttgttgtttttttgtttgtttttttttcttttgtactgagctcagcatagactaatactaccttaatgttaaaatctgaatttcttttagcattttgcttaaaagcaatatgctatttgcttattccgtgccctgacatagataatttttgaattctgatagaatacaagtgtggtaaatgccatgtttgtactttatctaacatcttctctttcagtagtcttgttttttttatatcatgtgattgtttgtgtgtcccctttcctcttctttgcttaacacaattatcttgtgttaaggatctcaaagatttcatgagacaagctggggaagtaacgtttgcggatgcacaccgacctaaattaaatgaaggggtggttgagtttgcctcttatggtgacttaaagaatgctattgaaaaactttctggaaaggaaataaatgggagaaaaataaaattaattgaaggcagcaaaaggcacggtctcgtagccgatcccgttcccgtagtcgcaaatcttacagccggtcaagaagcaggagcaggagccggagccggagcaagtcccgttctgttagtaggtctcccgtgcctgagaagagccagaaacgtggttcttcaagtagatctaagtctccagcatctgtggatcgccagaggtcccggtcccgatcaaggtccagatcagttgacagtggcaattaaactgtaaataacttgccctgggggcctttttttaaaaaacaaaaaccacaaaaattcccaaaccatacttgctaaaaattctggtaagtatgtgcttttctgtgggggtgggatttggaaggggggttgggttgggctggatatctttgtagatgtggaccaccaaggggttgttgaaaactaattgtattaaatgtcttttgataagccttctgctcacatttttgtgaatgtctgaagtatatagtttgtgtatattgacagagctcttttataactaaagcaaatttaatttttttgtactagaaaaaaatttgaacattttagttcttggttataaaaatgttaattcagaattagtttaatgccttaattaaactaattaatagctttggacacttaaaagagctctaaatttgcttgtacataaaggcttaatttgttttccttgttagggtcaagggtgtcctccactctttaacagctgctggacagacacattagagcagctgtttgttattgataataaaatattataaaacta

SEQ ID NO: 364579 - DNA, 2494 bp, Homo sapiens
cttttggggtctttgctcttttggggtctttgctcttttggggtctttgctcaagaagttgtaagagagattgaaaaccagaaaacagatgcagctagcaaaccgtttgcggaggtacggatactcagttgtggagagcttgatggaaaagaactctgtagtgaaagggttactattgaacatgctagggctcggtcacgaggtggaagaggtagaggacgatactctgaccgttttagtagtcgcagacctcgaaatgatagacgaaatgctccacctgtaagaacagaaaatcgtcttatagttgagaatttatcctcaagagtcagctggcaggtttgttgaaatacagttttgagttattttgatgtggctttttaaaaaagttaatgggtagctaatgttgtattgttttattaaaagtagttttaaattaatggatttaatggaattgtaattttaaacatttaattaaatgtaatttgggggatattttgaactttaatattagtgatcaaatgtaaatgttttgaggatatttttcttgttttttaaaatcaatttttaaccaaatattaaaccctttatttgccagcctgtctgtgtcgttggccttatgacgaggagtgcctgtgggttatcctaatcgttgtcttggtcactcttggttgggcctggttgactttgccagtcagctcctacagtgatcagttggccacctctagatctgtgtttgccggtctagacgttatcggtgcacttccttgaagtgccaggttgcagcgatcccagagcgttgataacgtgatctgatccctaagttgagacctgtcttcctgtaacgcttccgaataagaggtccggtcgaaaagagttgaaagatacgaaattaggtggtcgttggaatcctgatcgcagtaaagtggtccttggtaactgctcgagtagaacatgtctgcatccgccaatagtccgctaatagggagggctgtgcgattaaaggcttccatcgattgggtagtgtccttcaagtgggtggcgaagagccagtcgggcatatgtcatgaaggtttctccgaccgattaatggtttgctgcttgactagcctagggaaataataataaaggtaaagtaaacttttttaatgacatatggggcacaaaataactggtgtcttgtaaatgttctgtttttttaaataaaacttctctactttagtctttactttaaaaatatgtactgtttccttttttgttgtttttttgtttgtttttttttcttttgtactgagctcagcatagactaatactaccttaatgttaaaatctgaatttcttttagcattttgcttaaaagcaatatgctatttgcttattccgtgccctgacatagataatttttgaattctgatagaatacaagtgtggtaaatgccatgtttgtactttatctaacatcttctctttcagtagtcttgttttttttatatcatgtgattgtttgtgtgtcccctttcctcttctttgcttaacacaattatcttgtgttaaggatctcaaagatttcatgagacaagctggggaagtaacgtttgcggatgcacaccgacctaaattaaatgaaggggtggttgagtttgcctcttatggtgacttaaagaatgctattgaaaaactttctggaaaggaaataaatgggagaaaaataaaattaattgaaggcagcaaaaggcacagtaggtcaagaagcaggtctcgatcccggaccagaagttcctctaggtctcgtagccgatcccgttcccgtagtcgcaaatcttacagccggtcaagaagcaggagcaggagccggagccggagcaagtcccgttctgttagtaggtctcccgtgcctgagaagagccagaaacgtggttcttcaagtagatctaagtctccagcatctgtggatcgccagaggtcccggtcccgatcaaggtccagatcagttgacagtggcaattaaactgtaaataacttgccctgggggcctttttttaaaaaacaaaaaccacaaaaattcccaaaccatacttgctagggttgggctggatatctttgtagatgtggaccaccaaggggttgttgaaaactaattgtattaaatgtcttttgataagccttctgctcacatttttgtgaatgtctgaagtatatagtttgtgtatattgacagagctcttttataactaaagcaaatttaatttttttgtactagaaaaaaatttgaacattttagttcttggttataaaaatgttaattcagaattagtttaatgccttaattaaactaattaatagctttggacacttaaaagagctctaaatttgcttgtacataaaggcttaatttgttttccttgttagggtcaagggtgtcctccactctttaacagctgctggacagacacattagagcagctgtttgttattgataataaaatattataaaacta

SEQ ID NO: 364580 - DNA, 2604 bp, Homo sapiens
cttttggggtctttgctcttttggggtctttgctcttttggggtctttgctcaagaagttgtaagagagattgaaaaccagaaaacagatgcagctagcaaaccgtttgcggaggtacggatactcagttgtggagagcttgatggaaaagaactctgtagtgaaagggttactattgaacatgctagggctcggtcacgaggtggaagaggtagaggacgatactctgaccgttttagtagtcgcagacctcgaaatgatagacgaaatgctccacctgtaagaacagaaaatcgtcttatagttgagaatttatcctcaagagtcagctggcaggtttgttgaaatacagttttgagttattttgatgtggctttttaaaaaagttaatgggtagctaatgttgtattgttttattaaaagtagttttaaattaatggatttaatggaattgtaattttaaacatttaattaaatgtaatttgggggatattttgaactttaatattagtgatcaaatgtaaatgttttgaggatatttttcttgttttttaaaatcaatttttaaccaaatattaaaccctttatttgccagcctgtctgtgtcgttggccttatgacgaggagtgcctgtgggttatcctaatcgttgtcttggtcactcttggttgggcctggttgactttgccagtcagctcctacagtgatcagttggccacctctagatctgtgtttgccggtctagacgttatcggtgcacttccttgaagtgccaggttgcagcgatcccagagcgttgataacgtgatctgatccctaagttgagacctgtcttcctgtaacgcttccgaataagaggtccggtcgaaaagagttgaaagatacgaaattaggtggtcgttggaatcctgatcgcagtaaagtggtccttggtaactgctcgagtagaacatgtctgcatccgccaatagtccgctaatagggagggctgtgcgattaaaggcttccatcgattgggtagtgtccttcaagtgggtggcgaagagccagtcgggcatatgtcatgaaggtttctccgaccgattaatggtttgctgcttgactagcctagggaaataataataaaggtaaagtaaacttttttaatgacatatggggcacaaaataactggtgtcttgtaaatgttctgtttttttaaataaaacttctctactttagtctttactttaaaaatatgtactgtttccttttttgttgtttttttgtttgtttttttttcttttgtactgagctcagcatagactaatactaccttaatgttaaaatctgaatttcttttagcattttgcttaaaagcaatatgctatttgcttattccgtgccctgacatagataatttttgaattctgatagaatacaagtgtggtaaatgccatgtttgtactttatctaacatcttctctttcagtagtcttgttttttttatatcatgtgattgtttgtgtgtcccctttcctcttctttgcttaacacaattatcttgtgttaaggatctcaaagatttcatgagacaagctggggaagtaacgtttgcggatgcacaccgacctaaattaaatgaaggggtggttgagtttgcctcttatggtgacttaaagaatgctattgaaaaactttctggaaaggaaataaatgggagaaaaataaaattaattgaaggcagcaaaaggcacagtaggtcaagaagcaggtctcgatcccggaccagaagttcctctaggtctcgtagccgatcccgttcccgtagtcgcaaatcttacagccggtcaagaagcaggagcaggagccggagccggagcaagtcccgttctgttagtaggtctcccgtgcctgagaagagccagaaacgtggttcttcaagtagatctaagtctccagcatctgtggatcgccagaggtcccggtcccgatcaaggtccagatcagttgacagtggcaattaaactgtaaataacttgccctgggggcctttttttaaaaaacaaaaaccacaaaaattcccaaaccatacttgctaaaaattctggtaagtatgtgcttttctgtgggggtgggatttggaaggggggttgggttgggctggatatctttgtagatgtggaccaccaaggggttgttgaaaactaattgtattaaatgtcttttgataagccttctgctaaaaaaaaaacaaaaattgggacagaaatgtgtgggggctcggagaccgcagaggacattttgagacaacccacacgttagggggccgggggccccccatagtacacagcagggcgaaagaagagcccaagaaaattggtgacaaaacggtgggagtccacaacaaaaacgccgcgggaaccgggggaccgacacacacaaggcgtcgaccagcactggcgtacacagaggccaagacaataaaaccccacgcggcgggaaacacaaggaacggcccaacacgcggcagacgacaagcaagagcagaacacacaaacccgacagacagacgagcccaaaacacacaagaccaaccagaacaaactcagttcacagcctcgtgc

SEQ ID NO: 364581 - DNA, 1006 bp, Homo sapiens
cttttggggtctttgctcttttggggtctttgctcttttggggtctttgctcaagaagttgtaagagagattgaaaaccagaaaacagatgcagctagcaaaccgtttgcggaggtacggatactcagttgtggagagcttgatggaaaagaactctgtagtgaaagggttactattgaacatgctagggctcggtcacgaggtggaagaggtagaggacgatactctgaccgttttagtagtcgcagacctcgaaatgatagacgaaatgctccacctgtaagaacagaaaatcgtcttatagttgagaatttatcctcaagagtcagctggcaggatctcaaagatttcatgagacaagctggggaagtaacgtttgcggatgcacaccgacctaaattaaatgaaggggtggttgagtttgcctcttatggtgacttaaagaatgctattgaaaaactttctggaaaggaaataaatgggagaaaaataaaattaattgaaggcagcaaaaggcacagtaggtcaagaagcaggtctcgatcccggaccagaagttcctctaggtctcgtagccgatcccgttcccgtagtcgcaaatcttacagccggtcaagaagcaggagcaggagccggagccggagcaagtcccgttctgttagtaggtctcccgtgcctgagaagagccagaaacgtggttcttcaagtagatctaagtctccagcatctgtggatcgccagaggtcccggtcccgatcaaggtccagatcagttgacagtggcaattaaactgtaaataacttgccctgggggcctttttttaaaaaacaaaaaccacaaaaattcccaaaccatacttgctaaaaattctggtaagtatgtgcttttctgtgggggtgggatttggaaggggggttgggttgggctggatatctttgtagatgtggaccaccaaggggttgttgaaaactaattgtattaaatgtcttttgataagccttctgct

SEQ ID NO: 364582 - DNA, 2416 bp, Homo sapiens
cttttggggtctttgctcttttggggtctttgctcttttggggtctttgctcaagaagttgtaagagagattgaaaaccagaaaacagatgcagctagcaaaccgtttgcggaggtacggatactcagttgtggagagcttgatggaaaagaactctgtagtgaaagggttactattgaacatgctagggctcggtcacgaggtggaagaggtagaggacgatactctgaccgttttagtagtcgcagacctcgaaatgatagacgaaatgctccacctgtaagaacagaaaatcgtcttatagttgagaatttatcctcaagagtcagctggcaggtttgttgaaatacagttttgagttattttgatgtggctttttaaaaaagttaatgggtagctaatgttgtattgttttattaaaagtagttttaaattaatggatttaatggaattgtaattttaaacatttaattaaatgtaatttgggggatattttgaactttaatattagtgatcaaatgtaaatgttttgaggatatttttcttgttttttaaaatcaatttttaaccaaatattaaaccctttatttgccagcctgtctgtgtcgttggccttatgacgaggagtgcctgtgggttatcctaatcgttgtcttggtcactcttggttgggcctggttgactttgccagtcagctcctacagtgatcagttggccacctctagatctgtgtttgccggtctagacgttatcggtgcacttccttgaagtgccaggttgcagcgatcccagagcgttgataacgtgatctgatccctaagttgagacctgtcttcctgtaacgcttccgaataagaggtccggtcgaaaagagttgaaagatacgaaattaggtggtcgttggaatcctgatcgcagtaaagtggtccttggtaactgctcgagtagaacatgtctgcatccgccaatagtccgctaatagggagggctgtgcgattaaaggcttccatcgattgggtagtgtccttcaagtgggtggcgaagagccagtcgggcatatgtcatgaaggtttctccgaccgattaatggtttgctgcttgactagcctagggaaataataataaaggtaaagtaaacttttttaatgacatatggggcacaaaataactggtgtcttgtaaatgttctgtttttttaaataaaacttctctactttagtctttactttaaaaatatgtactgtttccttttttgttgtttttttgtttgtttttttttcttttgtactgagctcagcatagactaatactaccttaatgttaaaatctgaatttcttttagcattttgcttaaaagcaatatgctatttgcttattccgtgccctgacatagataatttttgaattctgatagaatacaagtgtggtaaatgccatgtttgtactttatctaacatcttctctttcagtagtcttgttttttttatatcatgtgattgtttgtgtgtcccctttcctcttctttgcttaacacaattatcttgtgttaaggatctcaaagatttcatgagacaagctggggaagtaacgtttgcggatgcacaccgacctaaattaaatgaaggggtggttgagtttgcctcttatggtgacttaaagaatgctattgaaaaactttctggaaaggaaataaatgggagaaaaataaaattaattgaaggcagcaaaaggcacagtaggtcaagaagcaggtctcgatcccggaccagaagttcctctaggtctcgtagccgatcccgttcccgtagtcgcaaatcttacagccggtcaagaagcaggagcaggagccggagccggagcaagtcccgttctgttagtaggtctcccgtgcctgagaagagccagaaacgtggttcttcaagtagatctaagtctccagcatctgtggatcgccagaggtcccggtcccgatcaaggtccagatcagttgacagtggcaattaaactgtaaataacttgccctgggggcctttttttaaaaaacaaaaaccacaaaaattcccaaaccatacttgctaaaaattctggtaagtatgtgcttttctgtgggggtgggatttggaaggggggttttgaaaactaattgtattaaatgtcttttgataagccttctgctcacatttttgtgaatgtctgaagtatatagtttgtgtatattgacagagctcttttataactaaagcaaatttaatttttttgtactagaaaaaaatttgaacattttagttcttggttataaaaatgttaattcagaattagtttaatgccttaattaaactaattaatagctttggacacttaataaaaatattatgcattacaattcacttacccttattttccaacatctgacctg

SEQ ID NO: 364583 - DNA, 2204 bp, Homo sapiens
  misc_feature (2139)..(2140): n is a, c, g, or t
  misc_feature (2143)..(2143): n is a, c, g, or t
cttttggggtctttgctcttttggggtctttgctcttttggggtctttgctcaagaagttgtaagagagattgaaaaccagaaaacagatgcagctagcaaaccgtttgcggaggtacggatactcagttgtggagagcttgatggaaaagaactctgtagtgaaagggttactattgaacatgctagggctcggtcacgaggtggaagaggtagaggacgatactctgaccgttttagtagtcgcagacctcgaaatgatagacgaaatgctccacctgtaagaacagaaaatcgtcttatagttgagaatttatcctcaagagtcagctggcaggtttgttgaaatacagttttgagttattttgatgtggctttttaaaaaagttaatgggtagctaatgttgtattgttttattaaaagtagttttaaattaatggatttaatggaattgtaattttaaacatttaattaaatgtaatttgggggatattttgaactttaatattagtgatcaaatgtaaatgttttgaggatatttttcttgttttttaaaatcaatttttaaccaaatattaaaccctttatttgccagcctgtctgtgtcgttggccttatgacgaggagtgcctgtgggttatcctaatcgttgtcttggtcactcttggttgggcctggttgactttgccagtcagctcctacagtgatcagttggccacctctagatctgtgtttgccggtctagacgttatcggtgcacttccttgaagtgccaggttgcagcgatcccagagcgttgataacgtgatctgatccctaagttgagacctgtcttcctgtaacgcttccgaataagaggtccggtcgaaaagagttgaaagatacgaaattaggtggtcgttggaatcctgatcgcagtaaagtggtccttggtaactgctcgagtagaacatgtctgcatccgccaatagtccgctaatagggagggctgtgcgattaaaggcttccatcgattgggtagtgtccttcaagtgggtggcgaagagccagtcgggcatatgtcatgaaggtttctccgaccgattaatggtttgctgcttgactagcctagggaaataataataaaggtaaagtaaacttttttaatgacatatggggcacaaaataactggtgtcttgtaaatgttctgtttttttaaataaaacttctctactttagtctttactttaaaaatatgtactgtttccttttttgttgtttttttgtttgtttttttttcttttgtactgagctcagcatagactaatactaccttaatgttaaaatctgaatttcttttagcattttgcttaaaagcaatatgctatttgcttattccgtgccctgacatagataatttttgaattctgatagaatacaagtgtggtaaatgccatgtttgtactttatctaacatcttctctttcagtagtcttgttttttttatatcatgtgattgtttgtgtgtcccctttcctcttctttgcttaacacaattatcttgtgttaaggatctcaaagatttcatgagacaagctggggaagtaacgtttgcggatgcacaccgacctaaattaaatgaaggggtggttgagtttgcctcttatggtgacttaaagaatgctattgaaaaactttctggaaaggaaataaatgggagaaaaataaaattaattgaaggcagcaaaaggcacagtaggtcaagaagcaggtctcgatcccggaccagaagttcctctaggtctcgtagccgatcccgttcccgtagtcgcaaatcttacagccggtcaagaagcaggagcaggagccggagccggagcaagtcccgttctgttagtaggtctcccgtgcctgagaagagccagaaacgtggttcttcaagtagatctaagtctccagcatctgtggatcgccagaggtcccggtcccgatcaaggtccagatcagttgacagtggcaattaaactgtaaataacttgccctgggggcctttttttaaaaaacaaaaaccacaaaaattcccaaaccatacttgctaaaaattctggtaagtatgtgcttttctgtgggggtgggatttggaaggggggttgtatccnnacncataaagacaaataatgcatgacctcactgatctgtggaatctaaaaaaaaatgcaaagaa

SEQ ID NO: 364584 - DNA, 2171 bp, Homo sapiens
cttttggggtctttgctcttttggggtctttgctcttttggggtctttgctcaagaagttgtaagagagattgaaaaccagaaaacagatgcagctagcaaaccgtttgcggaggtacggatactcagttgtggagagcttgatggaaaagaactctgtagtgaaagggttactattgaacatgctagggctcggtcacgaggtggaagaggtagaggacgatactctgaccgttttagtagtcgcagacctcgaaatgatagacgaaatgctccacctgtaagaacagaaaatcgtcttatagttgagaatttatcctcaagagtcagctggcaggtttgttgaaatacagttttgagttattttgatgtggctttttaaaaaagttaatgggtagctaatgttgtattgttttattaaaagtagttttaaattaatggatttaatggaattgtaattttaaacatttaattaaatgtaatttgggggatattttgaactttaatattagtgatcaaatgtaaatgttttgaggatatttttcttgttttttaaaatcaatttttaaccaaatattaaaccctttatttgccagcctgtctgtgtcgttggccttatgacgaggagtgcctgtgggttatcctaatcgttgtcttggtcactcttggttgggcctggttgactttgccagtcagctcctacagtgatcagttggccacctctagatctgtgtttgccggtctagacgttatcggtgcacttccttgaagtgccaggttgcagcgatcccagagcgttgataacgtgatctgatccctaagttgagacctgtcttcctgtaacgcttccgaataagaggtccggtcgaaaagagttgaaagatacgaaattaggtggtcgttggaatcctgatcgcagtaaagtggtccttggtaactgctcgagtagaacatgtctgcatccgccaatagtccgctaatagggagggctgtgcgattaaaggcttccatcgattgggtagtgtccttcaagtgggtggcgaagagccagtcgggcatatgtcatgaaggtttctccgaccgattaatggtttgctgcttgactagcctagggaaataataataaaggtaaagtaaacttttttaatgacatatggggcacaaaataactggtgtcttgtaaatgttctgtttttttaaataaaacttctctactttagtctttactttaaaaatatgtactgtttccttttttgttgtttttttgtttgtttttttttcttttgtactgagctcagcatagactaatactaccttaatgttaaaatctgaatttcttttagcattttgcttaaaagcaatatgctatttgcttattccgtgccctgacatagataatttttgaattctgatagaatacaagtgtggtaaatgccatgtttgtactttatctaacatcttctctttcagtagtcttgttttttttatatcatgtgattgtttgtgtgtcccctttcctcttctttgcttaacacaattatcttgtgttaaggatctcaaagatttcatgagacaagctggggaagtaacgtttgcggatgcacaccgacctaaattaaatgaaggggtggttgagtttgcctcttatggtgacttaaagaatgctattgaaaaactttctggaaaggaaataaatgggagaaaaataaaattaattgaaggcagcaaaaggcacagtaggtcaagaagcaggtctcgatcccggaccagaagttcctctaggtctcgtagccgatcccgttcccgtagtcgcaaatcttacagccggtcaagaagcaggagcaggagccggagccggagcaagtcccgttctgttagtaggtctcccgtgcctgagaagagccagaaacgtggttcttcaagtagatctaagtctccagcatctgtggatcgccagaggtcccggtcccgatcaaggtccagatcagttgacagtggcaattaaactgtaaataacttgccctgggggcctttttttaaaaaacaaaaaccacaaaaattcccaaaccatacttgctattagggtcaagggtgtcctccactctttaacagctgctggacagacacattagagcagctgtttgttattgataataaaatattataaaacta

SEQ ID NO: 364585 - DNA, 1834 bp, Homo sapiens
cttttggggtctttgctcttttggggtctttgctcttttggggtctttgctcaagaagttgtaagagagattgaaaaccagaaaacagatgcagctagcaaaccgtttgcggaggtacggatactcagttgtggagagcttgatggaaaagaactctgtagtgaaagggttactattgaacatgctagggctcggtcacgaggtggaagaggtagaggacgatactctgaccgttttagtagtcgcagacctcgaaatgatagacgaaatgctccacctgtaagaacagaaaatcgtcttatagttgagaatttatcctcaagagtcagctggcaggtttgttgaaatacagttttgagttattttgatgtggctttttaaaaaagttaatgggtagctaatgttgtattgttttattaaaagtagttttaaattaatggatttaatggaattgtaattttaaacatttaattaaatgtaatttgggggatattttgaactttaatattagtgatcaaatgtaaatgttttgaggatatttttcttgttttttaaaatcaatttttaaccaaatattaaaccctttatttgccagcctgtctgtgtcgttggccttatgacgaggagtgcctgtgggttatcctaatcgttgtcttggtcactcttggttgggcctggttgactttgccagtcagctcctacagtgatcagttggccacctctagatctgtgtttgccggtctagacgttatcggtgcacttccttgaagtgccaggttgcagcgatcccagagcgttgataacgtgatctgatccctaagttgagacctgtcttcctgtaacgcttccgaataagaggtccggtcgaaaagagttgaaagatacgaaattaggtggtcgttggaatcctgatcgcagtaaagtggtccttggtaactgctcgagtagaacatgtctgcatccgccaatagtccgctaatagggagggctgtgcgattaaaggcttccatcgattgggtagtgtccttcaagtgggtggcgaagagccagtcgggcatatgtcatgaaggtttctccgaccgattaatggtttgctgcttgactagcctagggaaataataataaaggtaaagtaaacttttttaatgacatatggggcacaaaataactggtgtcttgtaaatgttctgtttttttaaataaaacttctctactttagtctttactttaaaaatatgtactgtttccttttttgttgtttttttgtttgtttttttttcttttgtactgagctcagcatagactaatactaccttaatgttaaaatctgaatttcttttagcattttgcttaaaagcaatatgctatttgcttattccgtgccctgacatagataatttttgaattctgatagaatacaagtgtggtaaatgccatgtttgtactttatctaacatcttctctttcagtagtcttgttttttttatatcatgtgattgtttgtgtgtcccctttcctcttctttgcttaacacaattatcttgtgttaaggatctcaaagatttcatgagacaagctggggaagtaacgtttgcggatgcacaccgacctaaattaaatgaaggggtggttgagtttgcctcttatggtgacttaaagaatgctattgaaaaactttctggaaaggaaataaatgggagaaaaataaaattaattgaaggcagcaaaaggcaccacaaagcacagtcagaagcagtctcgatccgacagagtcctctagtctcgtagccgatcgttcccgtatccaatctacaccgtcaaatagagcttgcct

SEQ ID NO: 364586 - DNA, 1573 bp, Homo sapiens
cttttggggtctttgctcttttggggtctttgctcttttggggtctttgctcaagaagttgtaagagagattgaaaaccagaaaacagatgcagctagcaaaccgtttgcggaggtacggatactcagttgtggagagcttgatggaaaagaactctgtagtgaaagggttactattgaacatgctagggctcggtcacgaggtggaagaggtagaggacgatactctgaccgttttagtagtcgcagacctcgaaatgatagacgaaatgctccacctgtaagaacagaaaatcgtcttatagttgagaatttatcctcaagagtcagctggcaggtttgttgaaatacagttttgagttattttgatgtggctttttaaaaaagttaatgggtagctaatgttgtattgttttattaaaagtagttttaaattaatggatttaatggaattgtaattttaaacatttaattaaatgtaatttgggggatattttgaactttaatattagtgatcaaatgtaaatgttttgaggatatttttcttgttttttaaaatcaatttttaaccaaatattaaaccctttatttgccagcctgtctgtgtcgttggccttatgacgaggagtgcctgtgggttatcctaatcgttgtcttggtcactcttggttgggcctggttgactttgccagtcagctcctacagtgatcagttggccacctctagatctgtgtttgccggtctagacgttatcggtgcacttccttgaagtgccaggttgcagcgatcccagagcgttgataacgtgatctgatccctaagttgagacctgtcttcctgtaacgcttccgaataagaggtccggtcgaaaagagttgaaagatacgaaattaggtggtcgttggaatcctgatcgcagtaaagtggtccttggtaactgctcgagtagaacatgtctgcatccgccaatagtccgctaatagggagggctgtgcgattaaaggcttccatcgattgggtagtgtccttcaagtgggtggcgaagagccagtcgggcatatgtcatgaaggtttctccgaccgattaatggtttgctgcttgactagcctagggaaataataataaaggtaaagtaaacttttttaatgacatatggggcacaaaataactggtgtcttgtaaatgttctgtttttttaaataaaacttctctactttagtctttactttaaaaatatgtactgtttccttttttgttgtttttttgtttgttttttttttgagatggagtcttgctctgtcgcccaggctggagtgcagtggcgcagtctcggctcactgcaagctccgcctcctgggttcacgctattcttctgtctcagcctcccgagtagctgggactacaggcgcctgccaccacgcccggctaattttttttgtatttttagtagagatggggtttcaccgtgttagccaggatagtctcgatctcctgacctcgtgatccacccgcctgggcctcccaaagtgctgggattacaggcgtgagccaccgcgcccggccaatatatgaa

SEQ ID NO: 364587 - DNA, 1373 bp, Homo sapiens
cttttggggtctttgctcttttggggtctttgctcttttggggtctttgctcaagaagttgtaagagagattgaaaaccagaaaacagatgcagctagcaaaccgtttgcggaggtacggatactcagttgtggagagcttgatggaaaagaactctgtagtgaaagggttactattgaacatgctagggctcggtcacgaggtggaagaggtagaggacgatactctgaccgttttagtagtcgcagacctcgaaatgatagacgaaatgctccacctgtaagaacagaaaatcgtcttatagttgagaatttatcctcaagagtcagctggcaggtttgttgaaatacagttttgagttattttgatgtggctttttaaaaaagttaatgggtagctaatgttgtattgttttattaaaagtagttttaaattaatggatttaatggaattgtaattttaaacatttaattaaatgtaatttgggggatattttgaactttaatattagtgatcaaatgtaaatgttttgaggatatttttcttgttttttaaaatcaatttttaaccaaatattaaaccctttatttgccagcctgtctgtgtcgttggccttatgacgaggagtgcctgtgggttatcctaatcgttgtcttggtcactcttggttgggcctggttgactttgccagtcagctcctacagtgatcagttggccacctctagatctgtgtttgccggtctagacgttatcggtgcacttccttgaagtgccaggttgcagcgatcccagagcgttgataacgtgatctgatccctaagttgagacctgtcttcctgtaacgcttccgaataagaggtccggtcgaaaagagttgaaagatacgaaattaggtggtcgttggaatcctgatcgcagtaaagtggtccttggtaactgctcgagtagaacatgtctgcatccgccaatagtccgctaatagggagggctgtgcgattaaaggcttccatcgattgggtagtgtccttcaagtgggtggcgaagagccagtcgggcatatgtcatgaaggtttctccgaccgattaatggtttgctgcttgactagcctagggaaataataataaaggtaaagtaaacttttttaatgacatatggggcacaaaataactggtgtcttgtaaatgtcattaaaaaattaaatttgctttagttataaaagagctctgtcaatatacacaaactatatacttcagacattcacaaaaatgtgagcagaaggcttatcaaaagacatttaatacaattagttttcaacaaccccttggtgcttgaaaactaattgtattaaatgtcttttgataagccttctgct

SEQ ID NO: 364588 - DNA, 1040 bp, Homo sapiens
cttttggggtctttgctcttttggggtctttgctcttttggggtctttgctcaagaagttgtaagagagattgaaaaccagaaaacagatgcagctagcaaaccgtttgcggaggtacggatactcagttgtggagagcttgatggaaaagaactctgtagtgaaagggttactattgaacatgctagggctcggtcacgaggtggaagaggtagaggacgatactctgaccgttttagtagtcgcagacctcgaaatgatagacgaaatgctccacctgtaagaacagaaaatcgtcttatagttgagaatttatcctcaagagtcagctggcaggtttgttgaaatacagttttgagttattttgatgtggctttttaaaaaagttaatgggtagctaatgttgtattgttttattaaaagtagttttaaattaatggatttaatggaattgtaattttaaacatttaattaaatgtaatttgggggatattttgaactttaatattagtgatcaaatgtaaatgttttgaggatatttttcttgttttttaaaatcaatttttaaccaaatattaaaccctttatttgccagcctgtctgtgtcgttggccttatgacgaggagtgcctgtgggttatcctaatcgttgtcttggtcactcttggttgggcctggttgactttgccagtcagctcctacagtgatcagttggccacctctagatctgtgtttgccggtctagacgttatcggtgcacttccttgaagtgccaggttgcagcgatcccagagcgttgataacgtgatctgatccctaagttgagacctgtcttcctgtaacgcttccgaataagaggtccggtcgaaaagagttgaaagatacgaaattaggtggtcgttggaatcctgatcgcagtaaagtggtccttggtaactgctcgagtagaacatgtctgcatccgccaatagtccgctaatagggagggagattgcgccactgcactctagcctgggcgacagagcgagactctgtctcga

SEQ ID NO: 364589 - DNA, 528 bp, Homo sapiens
cttttggggtctttgctcttttggggtctttgctcttttggggtctttgctcaagaagttgtaagagagattgaaaaccagaaaacagatgcagctagcaaaccgtttgcggaggtacggatactcagttgtggagagcttgatggaaaagaactctgtagtgaaagggttactattgaacatgctagggctcggtcacgaggtggaagaggtagaggacgatactctgaccgttttagtagtcgcagacctcgaaatgatagacgaaatgctccacctgtaagaacagaaaatcgtcttatagttgagaatttatcctcaagagtcagctggcaggatctcaaagatttcatgagacaagctggggaagtaacgtttgcggatgcacaccgacctaaattaaatgaaggggtggttgagtttgcctcttatggtgacttaaagaatgctattgaaaaactttctggaaaggaagtcgagagtacggaagtcgagagtacggaagtcgagagtacggaagtcgagagg

SEQ ID NO: 364590 - DNA, 541 bp, Homo sapiens
ggatatggacggataagagatattgatctgaaaagaggctttggttttgtggtaagtatttagaactgggtgaattatctgctaagtaggtagagttttgataagcagttgttttcgatcttgagtccgggtggaatatttgccttcagaaaatgttacccagccttatgtctgaattttattgaggctgaaaacaactttaacttgccggctcactggaaccccactcccagtggctccttgattaggtttgactgtatggcagtgtcgttaagatactcttcccattctgtctcctgatttcagtgctcttaatgtgttgtagaatactcttctaaagccaatgttaagagtcttatgcttacattttaggaatttgaggatccaagggatgcagatgatgctgtgtatgagcttgatggaaaagaactctgtagtgaaaggtgagattcctgtgtaactagataaccctgggacatagagcagactgggtctgctggcatatttttctaagtagatttatgtagcttaagtgtgtaac

SEQ ID NO: 364591 - DNA, 843 bp, Homo sapiens
agcggaagtgacgtaggacgcgccctccattttgtggagcgccagagctgctaagtgcgtcagttgtggagtggcgtagacgagttaagtcctggtctgcgtggaggtcgacgactccgtcgcagactacggacctgtctgggtctcagccgccaaagaccccgtccggtaggaagtactagccggacatcatgagtggctgtcgggtattcatcgggagactaaatccagcggccagggagaaggacgtggaaagattcttcaagggatatggacggataagagatattgatctgaaaagaggctttggttttgtggaatttgaggatccaagggatgcagatgatgctgtgtatgagcttgatggaaaagaactctgtagtgaaagggttactattgaacatgctagggctcggtcacgaggtggaagaggtagaggacgatactctgaccgttttagtagtcgcagacctcgaaatgatagacgaaatgctccacctgtaagaacagaaaatcgtcttatagttgagaatttatcctcaagagtcagctggcaggatctcaaagatttcatgagacaagctggggaagtaacgtttgcggatgcacaccgacctaaattaaatgaaggggcggggtgaagttgcctcttaagggggatttaaagatggtattcgaaaaactctcttggaaggaaaaaacaatgccccgaaaaaatgacccttgtggggccgcttggcccaaaaggttttagacttgagcaggttattgatgcgggcgcgaattggggtcccttggccaattcgccttttaggaggggttttaaaaaaaaggggggcgttt

SEQ ID NO: 364592 - DNA, 2221 bp, Homo sapiens
cttttggggtctttgctcttttggggtctttgctcttttggggtctttgctcaagaagttgtaagagagattgaaaaccagaaaacagatgcagctagcaaaccgtttgcggaggtacggatactcagttgtggagagcttgatggaaaagaactctgtagtgaaagggttactattgaacatgctagggctcggtcacgaggtggaagaggtagaggacgatactctgaccgttttagtagtcgcagacctcgaaatgatagacgaaatgctccacctgtaagaacagaaaatcgtcttatagttgagaatttatcctcaagagtcagctggcaggtttgttgaaatacagttttgagttattttgatgtggctttttaaaaaagttaatgggtagctaatgttgtattgttttattaaaagtagttttaaattaatggatttaatggaattgtaattttaaacatttaattaaatgtaatttgggggatattttgaactttaatattagtgatcaaatgtaaatgttttgaggatatttttcttgttttttaaaatcaatttttaaccaaatattaaaccctttatttgccagcctgtctgtgtcgttggccttatgacgaggagtgcctgtgggttatcctaatcgttgtcttggtcactcttggttgggcctggttgactttgccagtcagctcctacagtgatcagttggccacctctagatctgtgtttgccggtctagacgttatcggtgcacttccttgaagtgccaggttgcagcgatcccagagcgttgataacgtgatctgatccctaagttgagacctgtcttcctgtaacgcttccgaataagaggtccggtcgaaaagagttgaaagatacgaaattaggtggtcgttggaatcctgatcgcagtaaagtggtccttggtaactgctcgagtagaacatgtctgcatccgccaatagtccgctaatagggagggctgtgcgattaaaggcttccatcgattgggtagtgtccttcaagtgggtggcgaagagccagtcgggcatatgtcatgaaggtttctccgaccgattaatggtttgctgcttgactagcctagggaaataataataaaggtaaagtaaacttttttaatgacatatggggcacaaaataactggtgtcttgtaaatgttctgtttttttaaataaaacttctctactttagtctttactttaaaaatatgtactgtttccttttttgttgtttttttgtttgtttttttttcttttgtactgagctcagcatagactaatactaccttaatgttaaaatctgaatttcttttagcattttgcttaaaagcaatatgctatttgcttattccgtgccctgacatagataatttttgaattctgatagaatacaagtgtggtaaatgccatgtttgtactttatctaacatcttctctttcagtagtcttgttttttttatatcatgtgattgtttgtgtgtcccctttcctcttctttgcttaacacaattatcttgtgttaaggatctcaaagatttcatgagacaagctggggaagtaacgtttgcggatgcacaccgacctaaattaaatgaaggggtggttgagtttgcctcttatggtgacttaaagaatgctattgaaaaactttctggaaaggaaataaatgggagaaaaataaaattaattgaaggcagcaaaaggcacagtaggtcaagaagcaggtctcgatcccggaccagaagttcctctaggtctcgtagccgatcccgttcccgtagtcgcaaatcttacagccggtcaagaagcaggagcaggagccggagccggagcaagtcccgttctgttagtaggtctcccgtgcctgagaagagccagaaacgtggttcttcaagtagatctaagtctccagcatctgtggatcgccagaggtcccggtcccgatcaaggtccagatcagttgacagtggcaattaaactgtaaataacttgccctgggggcctttttttaaaaaacaaaaaccacaaaaattcccaaaccatacttgctaaaaattctggtaagtatgtgcttttctgtgggggtgggatttggaaggggggttgggttgggctggatatctttgtagatgtggaccaccaaggggttgttgaaaactaattgtattaaatgtcttttgataagccttctgct

SEQ ID NO: 364593 - DNA, 2506 bp, Homo sapiens
cttttggggtctttgctcttttggggtctttgctcttttggggtctttgctcaagaagttgtaagagagattgaaaaccagaaaacagatgcagctagcaaaccgtttgcggaggtacggatactcagttgtggagagcttgatggaaaagaactctgtagtgaaagggttactattgaacatgctagggctcggtcacgaggtggaagaggtagaggacgatactctgaccgttttagtagtcgcagacctcgaaatgatagacggtatgtgaagggtggatggctgcattgaacaattattgtaggggtagcatttaagattcaggagtcattagcagtgatgattttgggtcctgccgtataatctgttcttctattcccacgttagccagttgttcttgatgaatctatatgagtcatagaacacaaatctattgacggaagtcattagaatggcttgtgatatctgatggcttgaacttgcccacagttgaacacaagtgctgtcattgcatttcttccattgtgaatacgaattttcttcctcagaaatgctccacctgtaagaacagaaaatcgtcttatagttgagaatttatcctcaagagtcagctggcaggtttgttgaaatacagttttgagttattttgatgtggctttttaaaaaagttaatgggtagctaatgttgtattgttttattaaaagtagttttaaattaatggatttaatggaattgtaattttaaacatttaattaaatgtaatttgggggatattttgaactttaatattagtgatcaaatgtaaatgttttgaggatatttttcttgttttttaaaatcaatttttaaccaaatattaaaccctttatttgccagcctgtctgtgtcgttggccttatgacgaggagtgcctgtgggttatcctaatcgttgtcttggtcactcttggttgggcctggttgactttgccagtcagctcctacagtgatcagttggccacctctagatctgtgtttgccggtctagacgttatcggtgcacttccttgaagtgccaggttgcagcgatcccagagcgttgataacgtgatctgatccctaagttgagacctgtcttcctgtaacgcttccgaataagaggtccggtcgaaaagagttgaaagatacgaaattaggtggtcgttggaatcctgatcgcagtaaagtggtccttggtaactgctcgagtagaacatgtctgcatccgccaatagtccgctaatagggagggctgtgcgattaaaggcttccatcgattgggtagtgtccttcaagtgggtggcgaagagccagtcgggcatatgtcatgaaggtttctccgaccgattaatggtttgctgcttgactagcctagggaaataataataaaggtaaagtaaacttttttaatgacatatggggcacaaaataactggtgtcttgtaaatgttctgtttttttaaataaaacttctctactttagtctttactttaaaaatatgtactgtttccttttttgttgtttttttgtttgtttttttttcttttgtactgagctcagcatagactaatactaccttaatgttaaaatctgaatttcttttagcattttgcttaaaagcaatatgctatttgcttattccgtgccctgacatagataatttttgaattctgatagaatacaagtgtggtaaatgccatgtttgtactttatctaacatcttctctttcagtagtcttgttttttttatatcatgtgattgtttgtgtgtcccctttcctcttctttgcttaacacaattatcttgtgttaaggatctcaaagatttcatgagacaagctggggaagtaacgtttgcggatgcacaccgacctaaattaaatgaaggggtggttgagtttgcctcttatggtgacttaaagaatgctattgaaaaactttctggaaaggaaataaatgggagaaaaataaaattaattgaaggcagcaaaaggcacagtaggtcaagaagcaggtctcgatcccggaccagaagttcctctaggtctcgtagccgatcccgttcccgtagtcgcaaatcttacagccggtcaagaagcaggagcaggagccggagccggagcaagtcccgttctgttagtaggtctcccgtgcctgagaagagccagaaacgtggttcttcaagtagatctaagtctccagcatctgtggatcgccagaggtcccggtcccgatcaaggtccagatcagttgacagtggcaattaaactgtaaataacttgccctgggggcctttttttaaaaaacaaaaaccacaaaaattcccaaaccatacttgctaaaaattctggtaagtatgtgcttttctgtgggggtgggatttggaaggggggttgggttgggctggatatctttgtagatgtggaccaccaaggggttgttgaaaactaattgtattaaatgtcttttgataagccttctgct

SEQ ID NO: 364594 - DNA, 2494 bp, Homo sapiens
cttttggggtctttgctcttttggggtctttgctcttttggggtctttgctcaagaagttgtaagagagattgaaaaccagaaaacagatgcagctagcaaaccgtttgcggaggtacggatactcagttgtggagagcttgatggaaaagaactctgtagtgaaagggttactattgaacatgctagggctcggtcacgaggtggaagaggtagaggacgatactctgaccgttttagtagtcgcagacctcgaaatgatagacgaaatgctccacctgtaagaacagaaaatcgtcttatagttgagaatttatcctcaagagtcagctggcaggtttgttgaaatacagttttgagttattttgatgtggctttttaaaaaagttaatgggtagctaatgttgtattgttttattaaaagtagttttaaattaatggatttaatggaattgtaattttaaacatttaattaaatgtaatttgggggatattttgaactttaatattagtgatcaaatgtaaatgttttgaggatatttttcttgttttttaaaatcaatttttaaccaaatattaaaccctttatttgccagcctgtctgtgtcgttggccttatgacgaggagtgcctgtgggttatcctaatcgttgtcttggtcactcttggttgggcctggttgactttgccagtcagctcctacagtgatcagttggccacctctagatctgtgtttgccggtctagacgttatcggtgcacttccttgaagtgccaggttgcagcgatcccagagcgttgataacgtgatctgatccctaagttgagacctgtcttcctgtaacgcttccgaataagaggtccggtcgagtggtccttggtaactgctcgagtagaacatgtctgcatccgccaatagtccgctaatagggagggctgtgcgattaaaggcttccatcgattgggtagtgtccttcaagtgggtggcgaagagccagtcgggcatatgtcatgaaggtttctccgaccgattaatggtttgctgcttgactagcctagggaaataataataaaggtaaagtaaacttttttaatgacatatggggcacaaaataactggtgtcttgtaaatgttctgtttttttaaataaaacttctctactttagtctttactttaaaaatatgtactgtttccttttttgttgtttttttgtttgtttttttttcttttgtactgagctcagcatagactaatactaccttaatgttaaaatctgaatttcttttagcattttgcttaaaagcaatatgctatttgcttattccgtgccctgacatagataatttttgaattctgatagaatacaagtgtggtaaatgccatgtttgtactttatctaacatcttctctttcagtagtcttgttttttttatatcatgtgattgtttgtgtgtcccctttcctcttctttgcttaacacaattatcttgtgttaaggatctcaaagatttcatgagacaagctggggaagtaacgtttgcggatgcacaccgacctaaattaaatgaaggggtggttgagtttgcctcttatggtgacttaaagaatgctattgaaaaactttctggaaaggaaataaatgggagaaaaataaaattaattgaaggcagcaaaaggcacagtaggtcaagaagcaggtctcgatcccggaccagaagttcctctaggtctcgtagccgatcccgttcccgtagtcgcaaatcttacagccggtcaagaagcaggagcaggagccggagccggagcaagtcccgttctgttagtaggtctcccgtgcctgagaagagccagaaacgtggttcttcaagtagatctaagtctccagcatctgtggatcgccagaggtcccggtcccgatcaaggtccagatcagttgacagtggcaattaaactgtaaataacttgccctgggggcctttttttaaaaaacaaaaaccacaaaaattcccaaaccatacttgctaaaaattctggtaagtatgtgcttttctgtgggggtgggatttggaaggggggttgggttgggctggatatctttgtagatgtggaccaccaaggggttgttgaaaactaattgtattaaatgtcttttgataagccttctgctcacatttttgtgaatgtctgaagtatatagtttgtgtatattgacagagctcttttataactaaagcaaatttaatttttttgtactagaaaaaaatttgaacattttagttcttggttataaaaatgttaattcagaattagtttaatgccttaattaaactaattaatagctttggacacttaaaagagctctaaatttgcttgtacataaaggcttaatttgttttccttgttagggtcaagggtgtcctccactctttaacagctgctggacagacacattagagcagctgtttgttattgataataaaatattataaaacta

SEQ ID NO: 364595 - DNA, 2820 bp, Homo sapiens
cttttggggtctttgctcttttggggtctttgctcttttggggtctttgctcaagaagttgtaagagagattgaaaaccagaaaacagatgcagctagcaaaccgtttgcggaggtacggatactcagttgtggagagcttgatggaaaagaactctgtagtgaaagggttactattgaacatgctagggctcggtcacgaggtggaagaggtagaggacgatactctgaccgttttagtagtcgcagacctcgaaatgatagacgaaatgctccacctgtaagaacagaaaatcgtcttatagttgagaatttatcctcaagagtcagctggcaggtttgttgaaatacagttttgagttattttgatgtggctttttaaaaaagttaatgggtagctaatgttgtattgttttattaaaagtagttttaaattaatggatttaatggaattgtaattttaaacatttaattaaatgtaatttgggggatattttgaactttaatattagtgatcaaatgtaaatgttttgaggatatttttcttgttttttaaaatcaatttttaaccaaatattaaaccctttatttgccagcctgtctgtgtcgttggccttatgacgaggagtgcctgtgggttatcctaatcgttgtcttggtcactcttggttgggcctggttgactttgccagtcagctcctacagtgatcagttggccacctctagatctgtgtttgccggtctagacgttatcggtgcacttccttgaagtgccaggttgcagcgatcccagagcgttgataacgtgatctgatccctaagttgagacctgtcttcctgtaacgcttccgaataagaggtccggtcgaaaagagttgaaagatacgaaattaggtggtcgttggaatcctgatcgcagtaaagtggtccttggtaactgctcgagtagaacatgtctgcatccgccaatagtccgctaatagggagggctgtgcgattaaaggcttccatcgattgggtagtgtccttcaagtgggtggcgaagagccagtcgggcatatgtcatgaaggtttctccgaccgattaatggtttgctgcttgactagcctagggaaataataataaaggtaaagtaaacttttttaatgacatatggggcacaaaataactggtgtcttgtaaatgttctgtttttttaaataaaacttctctactttagtctttactttaaaaatatgtactgtttccttttttgttgtttttttgtttgtttttttttcttttgtactgagctcagcatagactaatactaccttaatgttaaaatctgaatttcttttagcattttgcttaaaagcaatatgctatttgcttattccgtgccctgacatagataatttttgaattctgatagaatacaagtgtggtaaatgccatgtttgtactttatctaacatcttctctttcagtagtcttgttttttttatatcatgtgattgtttgtgtgtcccctttcctcttctttgcttaacacaattatcttgtgttaaggatctcaaagatttcatgagacaagctggggaagtaacgtttgcggatgcacaccgacctaaattaaatgaaggggtggttgagtttgcctcttatggtgacttaaagaatgctattgaaaaactttctggaaaggaaataaatgggagaaaaataaaattaattgaaggcagcaaaaggcacagtaggtcaagaagcaggtctcgatcccggaccagaagttcctctaggtctcgtagccgatcccgttcccgtagtcgcaaatcttacagccggtcaagaagcaggagcaggagccggagccggagcaagtcccgttctgttagtaggtctcccgtgcctgagaagagccagaaacgtggttcttcaagtagatctaagtctccagcatctgtggatcgccagaggtcccggtcccgatcaaggtccagatcagttgacagtggcaattaaactgtaaataacttgccctgggggcctttttttaaaaaacaaaaaccacaaaaattcccaaaccatacttgctaaaaattctggtaagtatgtgcttttctgtgggggtgggatttggaaggggggttgggttgggctggatatctttgtagatgtggaccaccaaggggttgttgaaaactaattgtattaaatgtcttttgataagccttctgctcacatttttgtgaatgtctgaagtatatagtttgtgtatattgacagagctcttttataactaaagcaaatttaatttttttgtactagaaaaaaatttgaacattttagttcttggttataaaaatgttaattcagaattagtttaatgccttaattaaactaattaatagctttggacacttaaaaaaaaaaaaaaaaaaaaaaaaaaaaaaaaaaaaaaaaaaaaaaaggaaaaaaaaaaaaaaaaaaaaaaaaaaaaaaaaaataagataaaaaaaaaaatgcaaggggggccaaaagggccgagtttggcaaaaaaagggcgaaatccaaataaatggccgagtattaaaaccctgttaattgagaaaacattggagttaacaaacttaaaccttttgcaaaaaataacatttgtgcaaactggatgaaaaatgagaaatcccaagcggaacgcctttgcaaaaagttgcgctaaattatgggcaaatggaatcttgtaagaaccaatatgccggtaaattcagcgttaatttttattaaaaaaaaatcattatttcacgaaatgacgtaaatacgaaaagaccctaaagaacc

SEQ ID NO: 364596 - DNA, 3090 bp, Homo sapiens
cttttggggtctttgctcttttggggtctttgctcttttggggtctttgctcaagaagttgtaagagagattgaaaaccagaaaacagatgcagctagcaaaccgtttgcggaggtacggatactcagttgtggagagcttgatggaaaagaactctgtagtgaaagggttactattgaacatgctagggctcggtcacgaggtggaagaggtagaggacgatactctgaccgttttagtagtcgcagacctcgaaatgatagacgaaatgctccacctgtaagaacagaaaatcgtcttatagttgagaatttatcctcaagagtcagctggcaggtttgttgaaatacagttttgagttattttgatgtggctttttaaaaaagttaatgggtagctaatgttgtattgttttattaaaagtagttttaaattaatggatttaatggaattgtaattttaaacatttaattaaatgtaatttgggggatattttgaactttaatattagtgatcaaatgtaaatgttttgaggatatttttcttgttttttaaaatcaatttttaaccaaatattaaaccctttatttgccagcctgtctgtgtcgttggccttatgacgaggagtgcctgtgggttatcctaatcgttgtcttggtcactcttggttgggcctggttgactttgccagtcagctcctacagtgatcagttggccacctctagatctgtgtttgccggtctagacgttatcggtgcacttccttgaagtgccaggttgcagcgatcccagagcgttgataacgtgatctgatccctaagttgagacctgtcttcctgtaacgcttccgaataagaggtccggtcgaaaagagttgaaagatacgaaattaggtggtcgttggaatcctgatcgcagtaaagtggtccttggtaactgctcgagtagaacatgtctgcatccgccaatagtccgctaatagggagggctgtgcgattaaaggcttccatcgattgggtagtgtccttcaagtgggtggcgaagagccagtcgggcatatgtcatgaaggtttctccgaccgattaatggtttgctgcttgactagcctagggaaataataataaaggtaaagtaaacttttttaatgacatatggggcacaaaataactggtgtcttgtaaatgttctgtttttttaaataaaacttctctactttagtctttactttaaaaatatgtactgtttccttttttgttgtttttttgtttgtttttttttcttttgtactgagctcagcatagactaatactaccttaatgttaaaatctgaatttcttttagcattttgcttaaaagcaatatgctatttgcttattccgtgccctgacatagataatttttgaattctgatagaatacaagtgtggtaaatgccatgtttgtactttatctaacatcttctctttcagtagtcttgttttttttatatcatgtgattgtttgtgtgtcccctttcctcttctttgcttaacacaattatcttgtgttaaggatctcaaagatttcatgagacaagctggggaagtaacgtttgcggatgcacaccgacctaaattaaatgaagggtatgtactggaaactgtgaaagtctttaaaaatatccggaaaattttactgtgaacttagttttgaggacttaaaatttgaatatgttagaatgcagagattctccagagacaattttgctgcttccctcctcccccccacacctttggcagtgtctggagacaagtttggttgtcacaactggttgagagaggatgctgttggcatgtagtcagtaggggctaggcatcctgctaagcatcccacggtgcatagggaaccccctcaacaatgaattggctcaaagtataacagtgccaaaactttgctcttttaatgctgtgttatccagaaataagactcaatagtagcaatagcaaaagtgaacatagaaacgacttacctagactgctgtgtgcaatgtgtgagactacaggatgtatatactttaaaagtggctgttttccattttagggtggttgagtttgcctcttatggtgacttaaagaatgctattgaaaaactttctggaaaggaaataaatgggagaaaaataaaattaattgaaggcagcaaaaggcacaggtatctctaattttttaaagtcaaaagttgtatttaatgggtttgttgtagagtcttatctaggctgatttcttttcatttttcatagtaggtcaagaagcaggtctcgatcccggaccagaagttcctctaggtctcgtagccgatcccgttcccgtagtcgcaaatcttacagccggtcaagaagcaggagcaggagccggagccggagcaagtcccgttctgttagtaggtctcccgtgcctgagaagagccagaaacgtggttcttcaagtagatctaagtctccagcatctgtggatcgccagaggtcccggtcccgatcaaggtccagatcagttgacagtggcaattaaactgtaaataacttgccctgggggcctttttttaaaaaacaaaaaccacaaaaattcccaaaccatacttgctaaaaattctggtaagtatgtgcttttctgtgggggtgggatttggaaggggggttgggttgggctggatatctttgtagatgtggaccaccaaggggttgttgaaaactaattgtattaaatgtcttttgataagccttctgctcacatttttgtgaatgtctgaagtatatagtttgtgtatattgacagagctcttttataactaaagcaaatttaatttttttgtactagaaaaaaatttgaacattttagttcttggttataaaaatgttaattcagaattagtttaatgccttaattaaactaattaatagctttggacacttaaaagagctctaaatttgcttgtacataaaggcttaatttgttttccttgttagggtcaagggtgtcctccactctttaacagctgctggacagacacattagagcagctgtttgttattgataataaaatattataaaacta

SEQ ID NO: 364597 - DNA, 1333 bp, Homo sapiens
cttttggggtctttgctcttttggggtctttgctcttttggggtctttgctcaagaagttgtaagagagattgaaaaccagaaaacagatgcagctagcaaaccgtttgcggaggtacggatactcagttgtggagagcttgatggaaaagaactctgtagtgaaagggttactattgaacatgctagggctcggtcacgaggtggaagaggtagaggacgatactctgaccgttttagtagtcgcagacctcgaaatgatagacgaaatgctccacctgtaagaacagaaaatcgtcttatagttgagaatttatcctcaagagtcagctggcaggatctcaaagatttcatgagacaagctggggaagtaacgtttgcggatgcacaccgacctaaattaaatgaaggggtggttgagtttgcctcttatggtgacttaaagaatgctattgaaaaactttctggaaaggaaataaatgggagaaaaataaaattaattgaaggcagcaaaaggcacagtaggtcaagaagcaggtctcgatcccggaccagaagttcctctaggtctcgtagccgatcccgttcccgtagtcgcaaatcttacagccggtcaagaagcaggagcaggagccggagccggagcaagtcccgttctgttagtaggtctcccgtgcctgagaagagccagaaacgtggttcttcaagtagatctaagtctccagcatctgtggatcgccagaggtcccggtcccgatcaaggtccagatcagttgacagtggcaattaaactgtaaataacttgccctgggggcctttttttaaaaaacaaaaaccacaaaaattcccaaaccatacttgctaaaaattctggtaagtatgtgcttttctgtgggggtgggatttggaaggggggttgggttgggctggatatctttgtagatgtggaccaccaaggggttgttgaaaactaattgtattaaatgtcttttgataagccttctgctcacatttttgtgaatgtctgaagtatatagtttgtgtatattgacagagctcttttataactaaagcaaatttaatttttttgtactagaaaaaaatttgaacattttagttcttggttataaaaatgttaattcagaattagtttaatgccttaattaaactaattaatagctttggacacttaaaagagctctaaatttgcttgtacataaaggcttaatttgttttccttgttagggtcaagggtgtcctccactctttaacagctgctggacagacacattagagcagctgtttgttattgataataaaatattataaaacta

SEQ ID NO: 364598 - DNA, 2629 bp, Homo sapiens
cttttggggtctttgctcttttggggtctttgctcttttggggtctttgctcaagaagttgtaagagagattgaaaaccagaaaacagatgcagctagcaaaccgtttgcggaggtacggatactcagttgtggagagcttgatggaaaagaactctgtagtgaaagggttactattgaacatgctagggctcggtcacgaggtggaagaggtagaggacgatactctgaccgttttagtagtcgcagacctcgaaatgatagacgaaatgctccacctgtaagaacagaaaatcgtcttatagttgagaatttatcctcaagagtcagctggcaggtttgttgaaatacagttttgagttattttgatgtggctttttaaaaaagttaatgggtagctaatgttgtattgttttattaaaagtagttttaaattaatggatttaatggaattgtaattttaaacatttaattaaatgtaatttgggggatattttgaactttaatattagtgatcaaatgtaaatgttttgaggatatttttcttgttttttaaaatcaatttttaaccaaatattaaaccctttatttgccagcctgtctgtgtcgttggccttatgacgaggagtgcctgtgggttatcctaatcgttgtcttggtcactcttggttgggcctggttgactttgccagtcagctcctacagtgatcagttggccacctctagatctgtgtttgccggtctagacgttatcggtgcacttccttgaagtgccaggttgcagcgatcccagagcgttgataacgtgatctgatccctaagttgagacctgtcttcctgtaacgcttccgaataagaggtccggtcgaaaagagttgaaagatacgaaattaggtggtcgttggaatcctgatcgcagtaaagtggtccttggtaactgctcgagtagaacatgtctgcatccgccaatagtccgctaatagggagggctgtgcgattaaaggcttccatcgattgggtagtgtccttcaagtgggtggcgaagagccagtcgggcatatgtcatgaaggtttctccgaccgattaatggtttgctgcttgactagcctagggaaataataataaaggtaaagtaaacttttttaatgacatatggggcacaaaataactggtgtcttgtaaatgttctgtttttttaaataaaacttctctactttagtctttactttaaaaatatgtactgtttccttttttgttgtttttttgtttgtttttttttcttttgtactgagctcagcatagactaatactaccttaatgttaaaatctgaatttcttttagcattttgcttaaaagcaatatgctatttgcttattccgtgccctgacatagataatttttgaattctgatagaatacaagtgtggtaaatgccatgtttgtactttatctaacatcttctctttcagtagtcttgttttttttatatcatgtgattgtttgtgtgtcccctttcctcttctttgcttaacacaattatcttgtgttaaggatctcaaagatttcatgagacaagctggggaagtaacgtttgcggatgcacaccgacctaaattaaatgaaggggtggttgagtttgcctcttatggtgacttaaagaatgctattgaaaaactttctggaaaggaaataaatgggagaaaaataaaattaattgaaggcagcaaaaggcacagtaggtcaagaagcaggtctcgatcccggaccagaagttcctctaggtctcgtagccgatcccgttcccgtagtcgcaaatcttacagccggtcaagaagcaggagcaggagccggagccggagcaagtcccgttctgttagtaggtctcccgtgcctgagaagagccagaaacgtggttcttcaagtagatctaagtctccagcatctgtggatcgccagaggtcccggtcccgatcaaggtccagatcagttgacagtggcaattaaactgtaaataacttgccctgggggcctttttttaaaaaacaaaaaccacaaaaattcccaaaccatacttgctaaaaattctggtaagtatgtgcttttctgtgggggtgggatttggaaggggggttgggttgggctggatatctttgtagatgtggaccaccaaggggttgttgaaaactaattgtattaaatgtcttttgataagccttctgctaaaaaaaaaagaaaaaaaaaaaaaaaaaaaaaaaaaaaaaaaaaaaaaaaaaaaaaaaaaaaaaaaaaaaaaaaaaaaaaaaaaaagtgggggggggggggggcaaaaaagatgcttttaaacaaaacaactcggggtgggggggcggcggcgccacaccagggagaagaaagaaggaagagaggaggacaaagaggcgcttgtaccgaagagaaaagcgcgggcgcaaaaaaaaggggcggggagtccatctccacacagaaaaaaaaaaaagacgccgcgcgggggaacaacaacgcgggttgttgttagaaaaacaacgcgagagggggggtgacgagggtgactctatgggggggttatacaaccagagggaggaaacaggagaaggggaaaaaaaaaaaagcg

SEQ ID NO: 364599 - DNA, 2675 bp, Homo sapiens
cttttggggtctttgctcttttggggtctttgctcttttggggtctttgctcaagaagttgtaagagagattgaaaaccagaaaacagatgcagctagcaaaccgtttgcggaggtacggatactcagttgtggagagcttgatggaaaagaactctgtagtgaaagggttactattgaacatgctagggctcggtcacgaggtggaagaggtagaggacgatactctgaccgttttagtagtcgcagacctcgaaatgatagacgaaatgctccacctgtaagaacagaaaatcgtcttatagttgagaatttatcctcaagagtcagctggcaggtttgttgaaatacagttttgagttattttgatgtggctttttaaaaaagttaatgggtagctaatgttgtattgttttattaaaagtagttttaaattaatggatttaatggaattgtaattttaaacatttaattaaatgtaatttgggggatattttgaactttaatattagtgatcaaatgtaaatgttttgaggatatttttcttgttttttaaaatcaatttttaaccaaatattaaaccctttatttgccagcctgtctgtgtcgttggccttatgacgaggagtgcctgtgggttatcctaatcgttgtcttggtcactcttggttgggcctggttgactttgccagtcagctcctacagtgatcagttggccacctctagatctgtgtttgccggtctagacgttatcggtgcacttccttgaagtgccaggttgcagcgatcccagagcgttgataacgtgatctgatccctaagttgagacctgtcttcctgtaacgcttccgaataagaggtccggtcgaaaagagttgaaagatacgaaattaggtggtcgttggaatcctgatcgcagtaaagtggtccttggtaactgctcgagtagaacatgtctgcatccgccaatagtccgctaatagggagggctgtgcgattaaaggcttccatcgattgggtagtgtccttcaagtgggtggcgaagagccagtcgggcatatgtcatgaaggtttctccgaccgattaatggtttgctgcttgactagcctagggaaataataataaaggtaaagtaaacttttttaatgacatatggggcacaaaataactggtgtcttgtaaatgttctgtttttttaaataaaacttctctactttagtctttactttaaaaatatgtactgtttccttttttgttgtttttttgtttgtttttttttcttttgtactgagctcagcatagactaatactaccttaatgttaaaatctgaatttcttttagcattttgcttaaaagcaatatgctatttgcttattccgtgccctgacatagataatttttgaattctgatagaatacaagtgtggtaaatgccatgtttgtactttatctaacatcttctctttcagtagtcttgttttttttatatcatgtgattgtttgtgtgtcccctttcctcttctttgcttaacacaattatcttgtgttaaggatctcaaagatttcatgagacaagctggggaagtaacgtttgcggatgcacaccgacctaaattaaatgaagggtatgtactggaaactgtgaaagtctttaaaaatatccggaaaattttactgtgaacttagttttgaggacttaaaatttgaatatgttagaatgcagagattctccagagacaattttgctgcttccctcctcccccccacacctttggcagtgtctggagacaagtttggttgtcacaactggttgagagaggatgctgttggcatgtagtcagtaggggctaggcatcctgctaagcatcccacggtgcatagggaaccccctcaacaatgaattggctcaaagtataacagtgccaaaactttgctcttttaatgctgtgttatccagaaataagactcaatagtagcaatagcaaaagtgaacatagaaacgacttacctagactgctgtgtgcaatgtgtgagactacaggatgtatatactttaaaagtggctgttttccattttagggtggttgagtttgcctcttatggtgacttaaagaatgctattgaaaaactttctggaaaggaaataaatgggagaaaaataaaattaattgaaggcagcaaaaggcacaggtatctctaattttttaaagtcaaaagttgtatttaatgggtttgttgtagagtcttatctaggctgatttcttttcatttttcatagtaggtcaagaagcaggtctcgatcccggaccagaagttcctctaggtctcgtagccgatcccgttcccgtagtcgcaaatcttacagccggtcaagaagcaggagcaggagccggagccggagcaagtcccgttctgttagtaggtctcccgtgccccttgggagtcttgaatttctcatagcaccaaaatatggcaatgaggagaagcccttctccaagctggaaaatcatgtagaggaggggaaagaagaaaagtggtccaatgacttcaggtggaaaggccacattgaggatggtggaacagagttggacattttggcatccagtctccatgctgacagtgcgtctgcacccgtccattgaggcagaagagagcagagagaacataacccagca

SEQ ID NO: 364600 - DNA, 1755 bp, Homo sapiens
cttttggggtctttgctcttttggggtctttgctcttttggggtctttgctcaagaagttgtaagagagattgaaaaccagaaaacagatgcagctagcaaaccgtttgcggaggtacggatactcagttgtggagagcttgatggaaaagaactctgtagtgaaagggttactattgaacatgctagggctcggtcacgaggtggaagaggtagaggacgatactctgaccgttttagtagtcgcagacctcgaaatgatagacgaaatgctccacctgtaagaacagaaaatcgtcttatagttgagaatttatcctcaagagtcagctggcaggtttgttgaaatacagttttgagttattttgatgtggctttttaaaaaagttaatgggtagctaatgttgtattgttttattaaaagtagttttaaattaatggatttaatggaattgtaattttaaacatttaattaaatgtaatttgggggatattttgaactttaatattagtgatcaaatgtaaatgttttgaggatatttttcttgttttttaaaatcaatttttaaccaaatattaaaccctttatttgccagcctgtctgtgtcgttggccttatgacgaggagtgcctgtgggttatcctaatcgttgtcttggtcactcttggttgggcctggttgactttgccagtcagctcctacagtgatcagttggccacctctagatctgtgtttgccggtctagacgttatcggtgcacttccttgaagtgccaggttgcagcgatcccagagcgttgataacgtgatctgatccctaagttgagacctgtcttcctgtaacgcttccgaataagaggtccggtcgaaaagagttgaaagatacgaaattaggtggtcgttggaatcctgatcgcagtaaagtggtccttggtaactgctcgagtagaacatgtctgcatccgccaatagtccgctaatagggagggctgtgcgattaaaggcttccatcgattgggtagtgtccttcaagtgggtggcgaagagccagtcgggcatatgtcatgaaggtttctccgaccgattaatggtttgctgcttgactagcctagggaaataataataaaggtaaagtaaacttttttaatgacatatggggcacaaaataactggtgtcttgtaaatgttctgtttttttaaataaaacttctctactttagtctttactttaaaaatatgtactgtttccttttttgttgtttttttgtttgtttttttttcttttgtactgagctcagcatagactaatactaccttaatgttaaaatctgaatttcttttagcattttgcttaaaagcaatatgctatttgcttattccgtgccctgacatagataatttttgaattctgatagaatacaagtgtggtaaatgccatgtttgtactttatctaacatcttctctttcagtagtcttgttttttttatatcatgtgattgtttgtgtgtcccctttcctcttctttgcttaacacaattatcttgtgttaaggatctcaaagatttcatgagacaagctggggaagtaacgtttgcggatgcacaccgacctaaattaaatgaaggggtggttgagtttgcctcttatggtgacttaaagaatgctattgaaaaactttctggaaaggaaatcaatgggaggaccattaattcatttgaagctcagcttaacggatcactaggggtcctctagaac

SEQ ID NO: 364601 - DNA, 1419 bp, Homo sapiens
cttttggggtctttgctcttttggggtctttgctcttttggggtctttgctcaagaagttgtaagagagattgaaaaccagaaaacagatgcagctagcaaaccgtttgcggaggtacggatactcagttgtggagagcttgatggaaaagaactctgtagtgaaagggttactattgaacatgctagggctcggtcacgaggtggaagaggtagaggacgatactctgaccgttttagtagtcgcagacctcgaaatgatagacgaaatgctccacctgtaagaacagaaaatcgtcttatagttgagaatttatcctcaagagtcagctggcaggtttgttgaaatacagttttgagttattttgatgtggctttttaaaaaagttaatgggtagctaatgttgtattgttttattaaaagtagttttaaattaatggatttaatggaattgtaattttaaacatttaattaaatgtaatttgggggatattttgaactttaatattagtgatcaaatgtaaatgttttgaggatatttttcttgttttttaaaatcaatttttaaccaaatattaaaccctttatttgccagcctgtctgtgtcgttggccttatgacgaggagtgcctgtgggttatcctaatcgttgtcttggtcactcttggttgggcctggttgactttgccagtcagctcctacagtgatcagttggccacctctagatctgtgtttgccggtctagacgttatcggtgcacttccttgaagtgccaggttgcagcgatcccagagcgttgataacgtgatctgatccctaagttgagacctgtcttcctgtaacgcttccgaataagaggtccggtcgaaaagagttgaaagatacgaaattaggtggtcgttggaatcctgatcgcagtaaagtggtccttggtaactgctcgagtagaacatgtctgcatccgccaatagtccgctaatagggagggctgtgcgattaaaggcttccatcgattgggtagtgtccttcaagtgggtggcgaagagccagtcgggcatatgtcatgaaggtttctccgaccgattaatggtttgctgcttgactagcctagggaaataataataaaggtaaagtaaacttttttaatgacatatggggcacaaaataactggtgtcttgtaaatgttctgtttttttaaataaaacttctctactttagtctttactttaaaaatatgtactgtgcctttggctgccttcaagtaattttagtgttctcccatgtagtgcccttccagaaaggttttcaatagcattctttaagtcaccattaagaggcaaactcaaccgaccccttcagataatttagggcggtgtggatccgctacgttactgccccagcttgtctcatggaatcgg

SEQ ID NO: 364602 - DNA, 967 bp, Homo sapiens
  misc_feature (912)..(912): n is a, c, g, or t
cttttggggtctttgctcttttggggtctttgctcttttggggtctttgctcaagaagttgtaagagagattgaaaaccagaaaacagatgcagctagcaaaccgtttgcggaggtacggatactcagttgtggagagcttgatggaaaagaactctgtagtgaaagggttactattgaacatgctagggctcggtcacgaggtggaagaggtagaggacgatactctgaccgttttagtagtcgcagacctcgaaatgatagacgaaatgctccacctgtaagaacagaaaatcgtcttatagttgagaatttatcctcaagagtcagctggcaggtttgttgaaatacagttttgagttattttgatgtggctttttaaaaaagttaatgggtagctaatgttgtattgttttattaaaagtagttttaaattaatggatttaatggaattgtaattttaaacatttaattaaatgtaatttgggggatattttgaactttaatattagtgatcaaatgtaaatgttttgaggatatttttcttgttttttaaaatcaatttttaaccaaatattaaaccctttatttgccagcctgtctgtgtcgttggccttatgacgaggagtgcctgtgggttatcctaatcgttgtcttggtcactcttggttgggcctggttgactttgccagtcagctcctacagtgatcagttggccacctctagatctgtgtttgccggtctagacgttatcggtgcacttccttgaagtgccaggttgcagcgatcccagagcgttgataacgtgatctgatccctaagttgagacctgtcttcctgtaacgctttccgataaaaagtccggtcgagagttgaagatacgttaagtggtcggtggaatcctgatcgcagncgttatagggagggctgtgccgaatggctttcatcgtgggtgggggccctctggg

SEQ ID NO: 364603 - DNA, 295 bp, Homo sapiens
ctcactcaaaatgcagtcactctggttttaacgcctctgacacaatgagtgtatgctagcatttaacgtttttgtccttttatatttagcaactcattttcctattaagaagttatagatggaaaaacctctgctagatcaccgtgtccagagtcctttttctgtaaatgtcttatttttgaccattcatgttgtgttttgttgatctcacacaataagaacagaatagccatttcattcaccaagttccagtagtaaaaaacaccttgaaatgtaaatgacctttaaaatatta

SEQ ID NO: 364604 - DNA, 351 bp, Homo sapiens
aagccgagcagtgtggcaggtgcctgtaagtgctagctacctagctactcgggaaactgagaaatcacaggtgggaggatggctgaagcccaggagtttgagttcagcctgggcagcatagcaagacctatctctaaaaaataagtaagtaagtaaataaataaataacaaaacaagcagactaaaaaatcagtaaagatagagaaataagggccaggtgcagtggctcacacctgtaatcccagctactcgggaggcttaggcaggagaatcactcgaacccaggaggtggaggttgcagtgagctgagatggcaccattgcaccctggccgaggcgacaacagcaaaac

SEQ ID NO: 364605 - DNA, 13886 bp, Homo sapiens
caaggggcttagatctcagtcatcagactatacaggacatgttcatcctggaacttacacaaataccttagaacgtctagtgaaggaaatggaagacacacaaaggctagatgaactgcagaagcaactacaagaagacataaggcaaggccgaggcattaaatccccaatcagaattggagaagaagacagtacagatgatgaggatggcctcttagaagagcacaaggaatttctaaagaaattttcagttacaattgatgctattcctgatcatcatccaggtgaagaaatatttaatttcctcaattctggaaaaattttcaatcagtataccttggatttaagagactctggttttattggacaaagtgctgtagaaaaacttattcttaaatcgggaaaaacagatcagatttttttgacaacacaaggtttccttacgtctgcttatcactatgtccagtgtcctgtccctgtgttaaagtggctgtttcggatgatgtcagttcatacagactgtattgtgtcagtgcagattttaagtacattgatggaaataacaattagaaatgataccttcagtgactcaccagtttggccatggatcccatcattgtctgatgtagcagctgtgtttttcaatatggggattgattttagatctttgtttcccctggagaatcttcagccagactttaatgaagactatctagtttctgaaacacagacaacatcaagggggaaagaaagtgaagattcatcttataagccaattttttcaacacttcctgaaaccaacattttaaatgtggttaagtttctaggcttgtgtacatctatacatccagaaggttaccaggatcgtgaaataatgttgctgattttaatgttatttaaaatgagtttggaaaaacagctgaaacagattcctttagtagactttcaaagcctcctgataaacctgatgaaaaacatcagagattggaacacaaaggtgcctgaactctgtctgggcataaatgaactctccagtcatccccacaacctcctgtggttggtacagctggtccctaattggacatcacgtggaaggcaactgagacagtgcctcagtctagtgattatttcaaagcttttggatgagaaacacgaagatgttcctaatgccagtaatctgcaggtatcagtcctacatcgctatcttgtgcagatgaagccttctgatttgttaaagaaaatggtcttgaagaaaaaggctgaacaaccagatggcattattgatgacagtcttcatttagaacttgaaaagcaggcatattacctgacctacattcttcttcatttagtcggtgaagttagttgttctcattctttttcttctggacaacggaaacactttgtgctactctgtggggctttggaaaagcatgttaaatgtgatattagggaagatgcaagacttttttacagaactaaggtgaaagacttggtcgccaggatacatggaaaatggcaggaaataatccagaactgtcggcctactcaggggcagcttcatgacttctgggtaccagattcttaataggagttgcagcagcaaaaatatgaaccaagagaaattcaataagagcctttcatagaggagtagaaaggattattacagaatccaatgaatgccaagaaaatgtacagcaaatgtgccacttgaatatctagtatgaagctggtaatgaagaaattgccatttctgaagcagatatgaaatatgatctgcttaattgttaaggcaactgacctttcaaaagtgcagagtcttattaaaagaggggaggggtagaagcagaataatagtcatatgtctaacctgccccagttaactcctcttgttaaattataagccagttatcttttttagatagtatttttgtcacttggataatcacaggaaatatataagaaaagagcttggactaacttgagaagttggacatggaaagcaagaccaagttccagttgggtttaattttccctcttggttattttcggacacaaagggaatgcttaaaactgagtttagtaataaaaagcataaatctcttctgtaacttttataaaccacagggaggtttcaatccatgcattttccttcattactcaagattataaatctgtttttaaaatacatctaaacaaacagttgagaaacaaaagtttggcatgttgtcagatccccttaagaggaagaggttaagctgtaaagtagtggccctgttttgatgccagaacattcatatgctgtttgttctggatttcttttaaatgcatgtattttaaatactggttaaatcttagaatcttggctatatcttagaattctggctcttggtaaccatattacagaagtctatattgtaaaagcctaaagatctggacaagtttccaacaaccttgtttccatgagtatataattttggcagacacctgaattctttgggacactgtgtctgtgtatgtgtgtgtgtgtgtgtgtgtgtgtgtgcgcttgtatcttgaagttgttgcacttcaaaaccacagctgctgtaaattcttaaacactggagagccatcctttggtttaaatggtagagggttagtggaagtgcacacgttgtttttagcccaggggtagtaacaaactcttactagccaactagaaaattattttgttgacgagatgtcccttttaggagggtttgtttcctgaaagaatgccaactttttttgttgttctttcagtattggcttgagtgacctgttctcctgagtgctctagtgtctccagttgtgggggggaaagatgatggaggggaacagaaactggacttgatgtttgcggtttgagaggcaagaaaataaaataactttctacctctaaattgaggcttaggagtaaaaagcattttgtcctaaatttatcatttaaaatagcatcagtaacttttgagctcatgtcaatcaagcattggcagtcagagattttatagggaagactaagtaaatccagtttccaagaacctaaactgattgaggctccaagagtcagaccaacaaaagttttattctgtgttgtttactggtaagaatattattatcttgatactacctctcaagggtattgttacaaaatgccacttatggttaaagagatagatacaaagagttctatttgacagaagcttgaaactctggcatctatctgcccaacgatgggggctttcgttctgtaatttaatcctttgtagatacattatttgtgtgtaattttatacgtgttcatatttttctcattttgcattgtgtaaagtgtacaaaatctcaaagtataaaatactgcttatattgcttgtaatttacagtgtgtaaatattttctaattgtgtacattgatgggggggacaagtgggttattcaggtttttttttaatgacccttttgtattgcagtttcaacagataactgtccatcaaatttaaaaccactttgatacatttttatttaacagttccaataagaaaaaaatctctatttttaattatatttctcctttagaaaaaaaatacttcatggtccctctaaaataaatggccagacctcagtttaggcccttgtatttatgactctggtagaggtcttcagactccaggtcatagtccagtcagtatttgcatttgggttctcatgaaaactttgtgactctcttttagcacaagtagcccatggtttttcttccaaatcaagtattttacttctcccttgagtccccatgctttgtctccctcctgctgctattgcccggtgaatgggatggtagagagggagaaatgttcattgcacagagaatgtcaggccactttggggacttggcaaacgaagcttgcactgagtggtggtgtgtttggcaatattactgtgccaaaaatcaccttgtctaattttatggatatgtatggcaaacttattacccttcttgcaagctgcacattaaggtacttgtaagtgtttatgcttttgtgtgtaactgtttgccttttctaactgcttttcttgttactgaaaatataattctactagttttatcacattaagaggctctccatgcacaaaatgcattgatgtagccgtaaagtaacagcatttgtacattttctatctcctgatggcagtggtgcctttgtcaccttttggaaggtttgcattttgtttctgctttcaagcgcaaatagtagcttgctttcagcttcacaaaaatctcctcaaatgtaaaagatacaaaatggcgtgttatcatccaggcttagttggagtatttgcatttttatttttatcaaaacaaatataattggtggggactggccagtaataatgtgtggcgtctttaagccaagagtaatttttaaattaaaaatgaaaattttaagaggtagcccattaaacaagctactgagttggagaattaggggatgactgtggtggtttgtcgctaaggaggcaacagtagggtccaggcggcggggcacgtagagcagttagcatgatccatggttattccttactcatgaacagtgtcggcgcacctcattatctgtgcatttgtttttcctgggcagtcctgtcagccagttaatccaccagctcttaggaagtaaatacagatttttttctttccttttttttttttttaaagattttatactacatcttgttaaagtcctatgaatgtgtgtgtgtgtgtgctattaaaactgctttttctcagtttgaacatgtgtttggtaatatttgtttgggagttggggaggctaagttatctggaatgccctgttccctcagcccaccccagtcccctggcttttaaacatttcttcttgctttggattgtccagttttttagcttgatgtctcctgtttctggaaaacataaagccaccattgtacacagttcacttttatataacccagttaattgctgtatactttgcaatcaggaattcagtaatctcattcttacctcattcactatgttcattccaccattcattctaacaattgagtctcaactacatactaggcactctttttaggattcagtaaggatttgatggtgaacaacatagagaactcatgaatcttacctcctggtatccaggttaaaatactttctgttcttgggcaaagagaattagaaacaaatacccttaacctgactcccttgttcttgagcccaggaccaagaaagaagaagctgtacaatgcagaagcagggcttgagatcacctccaacctgccaagcagatagagatctgggtatgccaacttgggaggcagaggttgaaacctcataggaggaactttggagctcatagaaggccttggcattgtcagaggccttgagttccaaaaccatgccagtatttctgccttctgacaggctggctagaaagagactaaatgggagcatttttctctgacagtggggcggagggatgaggggatgacagcccaggaagaagcagagacattgccataagtacttactagagggcaggcagcacagctttatgcaagttaagggccttgaccttgccccaaggcctgacctcagatcccagattcatcatactagccttttgatctttgccaaattacttaaactcactgtttcctcatctgttgaataatggtgtctacctcagggtttgtgaggactaagcgagctaatgcatgaaaagtgcctagtacagtgcctggcatatagcaagaactcagcaaatgcttgctgctctaacgaggcgtttctctgatgacagatttgatcttaagcagacacctcagggtgtactgacatctgagcaaaccatatctccaaaaattatagttgtaagtgtgccctatttctttggataccgggagctggagcttctctgtccagctatctctgctgattttttttaattaaaattttcactttttaaaagccagcatgctaaagctgagaaattggtgatgggtggtggttttccagcatttgtgggaatgtcctgacactccctttcccttactaaccattccctaggctggagtcaagagagggcaaaccagaaggcccagctttgggtctgactccaagacgactggctgggaggaaaactaaacaggcttctgaggcacagtggaatagtgagacttccgcattgttgcactggtgacagcccctacagaagaagcacctcagctgtatatatagccaaaataaagaccacaccacctaaagggaaagtgctgggcaaaccagagatggagatggcaaagcaggaacagaaatgctgccacattgaacagtaagcaggacaacttgactaggccagagttctcttgcttcagggaacctgctcaagtttcaggaattcatacccacccccttcacctaggatccctgctacagtaagtaactgttctgtgcaaagtggagctaaactctggtgtgtaagtggctgacaatcactgctgaagacggccagcactaccctcagccactttcttacagcaaagttggggaaaatagactagcaaaaacaaaactcatacttttctgtgtgtgtgaagttctccagaaggtttccaaatggaatcctctcacagccaccctgcgaagcagccagggtagtgaccttatggatgagtgacagcctgttcaaagaatgacctgcctgtgtcccaggatgcagatttatggctgggttagggttaatttctttagttgatttccagttttcttttccactgtctgtcagtattcccccgttcttattttaccagctggatttgcagagagacatactgtcaatcaaaagggcttcctatgggcagctccattaattgcttttacatctgatactctcattaggtttagagattttactgggaggctagcagaaggaaatggattgtggtctgctatcaaaagtactgaagtaactgcccagtgatcattgaaatcacacattttgctcatttaacaatgtctgagtttgccatcagcacctcagaggagcaaagcttggttcataaagtgaagttgagtgatactgagcctaccacactggcctactcgccacctccagagctatctgaagtcagcactgcaggttctgtgaacatttgggaagctgtgcctcttagccccctgggcccctacagtttaattgctctcctatctgctactgaaggaccagcagtcttcctaccctgcctccactgttaccaccaacccactttttgataaggactgcagatttatctttcttagccctgccttgactggtcttcccacctcagacgtccttactcagtccatcatctctttcaggattttcttctgtggtctttttcaaactactagctgacttttcccttttatttcccactaggaacccctccccgcccccccccccccagccatttcatcaaatcaaactcactgccctctttcatgccccttccttagttccccaacacaagcctgtgcataagcttgaacatttctacctttgccaatggtatttccccttctggcttaccctgcttcctccttctcagacttttccagtcttgattgtcctctccataaacacaagaatgaacttcaaggcaagttacttaatgtcttagagcctgtttccccatccataaaatggggctataaattcctcaggatgggatgagggtacaaataaaaaatgaagcaggatattctttgtaaaagtgtgtgtacattttttattgtgtttctccccagctaccttccctctccccgccacacacatcctatttgcagagtgttgggggaggtggaactgtgatgtgggccctgctgtctagcagtctgcagtcacacacagccatccaaactacgagattgtatatgattcagtgccaaactgtgagctttggggaatccagaaagaaggatgaagcctttcccaagtttcctttagttaaatgtgccacttgaatcctgttctgactcctaggcacatgcaagagtcaatcacatatgttcctgtggcctttatcattttggtccatctcttgagcccacatgaatactgtcatggatggaggaggaaggaccaggctgggtcagggcctgaatgcaggttttgtttggactataggggctaagttcactttaataggctgtgacctattaaaggaggcaggaaccaagtttgcacagaaggaccatcctagttgagttaaaggagttggggagttgattgtgaggggtttcctagattgctgctgggtaaggtgattgaatctgggaaggatagggtacttgattgcctagaagggtgcactctaagttctggataagaatggtgcccaagatgagctggaggggaaggcaagtgtttgaatgacccagtccctgaggtgagcctaggttagggttaagatttggtgagtgaacaggtgcaaacgcttgtggcttatttatccagaaaaagcattttctgtgtgcctttcaggtcaggctgttactttatccccttcaggcctgaccccatctcccccacgcatagctcaagctgaacagcccctgaagctgggaatcaagcccctaccttgtgttcagagcttccctaacgtccagtcgccacctagggtagccttccctccacaccctaggccgagagcagaagcgggtggcaggagcacagggagtgaggtccaggttagaggacaggccagaaggccctccgagagggtcccccaaccccgcaacgccaggacaggtttgcacgtccccagcagtaggcaagtcaggggggtcctagggttacagcggaggagaggacgggctataagcatgtggagggtgcacggggtggcgaggccaccaccagggggcgatttcagggccgcagcgcctagaggtggggggtcgcccgatggccgaaggctgtgtgtgagcctcgccctcaaaccgcctctattgtgctagagtagggggcgcaaagaagagagtggcgaccttcccctcaccccacccagtcggccccgcctttcaggaccccgccccacccccggctccgcctccaccacccccccccgccccgcctccagccgcggccccttcctctcgcagctggtgctgtggggccgcggagccgcgcgtcgctgtctctatggccccggatccgagcgcaaagctgggccaggcctttctcaccaccaagtcccccggtcctgcatgacggctctagaggggcgcgggccaggcctcgggctgcgcggggtgcaaaccggccaccacggagtcggggaccagcgcggggagggggccgcgtggcgaacagtgttccccaggatctgggtcacgtctcccggcgtccggcgggatcgaaggagagcttgtcctcgagctgcagcagtagagactgagaaaacggacctcagaaaaccaggactagctctactgtcgggggcagggtgaccccatcagtaacctacaacccctctagaacttcacaactccctctcaccatggagtttgcatttgatgcagaaaggcatgtgatccctccctccttctgacctcttagctggggattccatggccacacaaccctgtgactccatgtccccccgattccaggaccccccatggccccatgattccttgactcctatgaccttatgacccctgaccttccaagtgacttccttggactttgacccctgtgactgtgcttcccattccccgcccccacaacctgtgactctggctccctttgggggtcttgttagtctgggcctccccaggaagatgtgggggaggctctggcccctcctcctcagcatcctcacagcaactgcagtcccaggaccctcactgcggagaccgtctagagaactagatgccacccctcggatgaccataccctatgaagagctctctgggacccggcacttcaagggccaagcccagaactactcaacactgctgctggaggaggcctcagcaaggctgctggtgggagcccgaggtgccctgttctctctcagtgccaacgacataggagatggggctcacaaagagatccactgggaagcctccccagagatgcaaagcaaatgtcatcaaaaagggaaaaacaaccagacggagtgctttaaccatgtgcggttcctgcagcggctcaattctacccacctctatgcatgtgggactcacgccttccagcccctctgtgcagccattgatgctgaggccttcaccttgccaaccagcttcgaggaggggaaggagaagtgtccttatgacccagcccgtggcttcacaggcctcatcattgatggaggcctctacacagccactaggtatgaattccggagcattcctgacatccgccggagccgccacccacactccctgagaactgaggagacaccaatgcattggctcaatgatgcggagtttgtgttctccgtcctcgtgcgggagagcaaggccagtgcagtgggtgatgatgacaaggtgtactacttcttcacggagcgtgccactgaggagggctctggcagcttcactcagagccgcagcagtcaccgtgtggcccgtgtggctcgtgtctgcaagggagacctgggagggaagaagatcctgcagaagaagtggacttccttcctgaaagcccgtctcatctgccacattccactgtatgagacactgcgtggggtctgcagcctggatgctgaaacctcaagccgtacacacttctatgcagccttcacgctgagcacacagtggaagaccctggaggcctcagccatctgccgctatgacctggcagagatccaggctgtctttgcaggaccctatatggaataccaggatggttcccggcgctggggtcgctatgagggtggggtgcctgagccccggcctggctcgtgtatcacagattcattgcgcagccaaggctacaattcatcccaagacttgccatccctggtcctggactttgtaaagttgcacccactgatggctcggcccgttgtgcccacacgtggacggcccctgctgctcaagcgcaacatacgctacacacaccttacagggacacctgtcaccacgcctgctggacctacctatgacctgctctttctgggcacagctgatggctggatccacaaggccgtagtcctgggctctgggatgcacattattgaagagacacaagtgttcagggagtcccagtctgtggaaaatctagtcatctctctattgcgcacagcctctatgtgggggctcctagcggagtcatccagctaccactctccagctgctcccgctaccgatcctgctatgactgcatcttggcccgagacccctactgtggctgggaccctggcacccatgcctgcgcagcagccaccaccatagccaacaggtcccaggacagcactgatacaggacatagagagaggaaatcgaggctgtgagagcagcagggatacagggccaccaccaccactgaagacccgctctgtgctccggggtgatgatgtcctcctgccctgtgaccagccatccaacctggcccgggccttgtggctactcaatgggagcatgggcctgagcgatgggcagggtggctaccgtgtgggcgtggacgggctgctggttacagatgcacagcctgagcacagtggcaactatggctgctatgccgaggaaaatggcctccgcaccctgctggcctcctatagtctcacagtccggccagccactcctgccccagctccaaaagcccctgccacacctggggcacagctggcacctgatgtgagactgctctatgtgctagccattgccgcgcttggtggcctctgcctcatcctggcctcctccctcctctatgtggcctgtctgcgggaaggcagacgagggcgccgacggaaatactcactgggtcgggccagccgggcaggaggatctgcggtgcaactgcagacagtctcaggccagtgtcctggagaggaagatgagggtgatgatgagggggctgggggcctggagggcagctgtctccagatcatccctggggagggagccccagccccaccacccccaccgcccccaccgccaccggctgagctgaccaatggcttggtggcactgcccagccggctgcggaggatgaatggcaatagctatgtgcttctgaggcagagcaacaatggagtaccagcagggccctgctccttcgccgaggaactcagccgcatcctggaaaaaaggaagcacacgcagctcgtggagcagctagatgagagctctgtctgagcccagcctcccagaacaaatgctcttccaagccagcctatctgtcccaggctgggccactgcctccctaacacagccaccctcccttcattacccccactccatacccttctcccaactttttgatgtccctgtagggctggccagtcaggcccagccaaagccccctcctcagtctccacagacccacatgtgagcagcccaggcccatcggtgctcctcagaggtaggtgctccctcaggatcaggtgccctgcagacccagagccagttcctatcccctaacctaaacacttataggtgaggactccatcctcctgttccattcatctgcccaaaccctttctctttctcccaggcagggctctgcaggtccatatgggctcaatgtcaccaccctctgcatggccctgtgtgctggatggtcctgaaaccagacaagacctctgccagccacctaagccctgcgtacattcacatgcacacatggaagaatgtttatcggctgggctgcagtgcccccaccctcaccttctcctggtgcattcttgtttcatccctgcttctggacttggggtaccctcccaattgccacatcctatctggtcctcttccccagccccatgtggtgacctctttgtcaagagcttgggaacgggccagcctggggaggtaagactgcatcactcccctcctctcccttcctgtgtggcccttgtgaatcagcctccccactctccttggtcattctcaagagtatgagagacagagctccaggcatgtcccatccccatgcacatgtggtaacacacacctgtatcacacatgtgcttacatttccactcacatgcacctctgagcctcccttgctgtcttggacctgtctgttgggtttagtccgtggacatttcagagggagatccccctcccatttaactgtcctcacaggcccttgcctaggatggatgaccaacactgcactcaatgagccagcctctcttttgggggaatcaagcatttgcttcctctagactacagcagggaaagggaggagaaatctgatgtctcaactggcacatgaagcccattcttggaactatgcaaagggcagaggctgggagtttggacgcttagctcctacccctgtcctacctcaccggggcactttcaggggccaggggcctctgaagtctctaggcctatatgggacaatcaattctgactgagctcccccattcccctcgggtgaggatgactgttatttttgtagctgagaacgtggaatcccacgggtttttactgcccttcacccaacctctcccacctccaccccacaatgaatgtatttattgtgagaatggctacacttctttaggaatgcccccacttacaaccaggtgggtggaacaggcatgtgacagagtggggagcctgggctcagctcctccccctgccgttggttaataaacaccctttttccccacaa

SEQ ID NO: 364606 - DNA, 13986 bp, Homo sapiens
caaggggcttagatctcagtcatcagactatacaggacatgttcatcctggaacttacacaaataccttagaacgtctagtgaaggaaatggaagacacacaaaggctagatgaactgcagaagcaactacaagaagacataaggcaaggccgaggcattaaatccccaatcagaattggagaagaagacagtacagatgatgaggatggcctcttagaagagcacaaggaatttctaaagaaattttcagttacaattgatgctattcctgatcatcatccaggtgaagaaatatttaatttcctcaattctggaaaaattttcaatcagtataccttggatttaagagactctggttttattggacaaagtgctgtagaaaaacttattcttaaatcgggaaaaacagatcagatttttttgacaacacaaggtttccttacgtctgcttatcactatgtccagtgtcctgtccctgtgttaaagtggctgtttcggatgatgtcagttcatacagactgtattgtgtcagtgcagattttaagtacattgatggaaataacaattagaaatgataccttcagtgactcaccagtttggccatggatcccatcattgtctgatgtagcagctgtgtttttcaatatggggattgattttagatctttgtttcccctggagaatcttcagccagactttaatgaagactatctagtttctgaaacacagacaacatcaagggggaaagaaagtgaagattcatcttataagccaattttttcaacacttcctgaaaccaacattttaaatgtggttaagtttctaggcttgtgtacatctatacatccagaaggttaccaggatcgtgaaataatgttgctgattttaatgttatttaaaatgagtttggaaaaacagctgaaacagattcctttagtagactttcaaagcctcctgataaacctgatgaaaaacatcagagattggaacacaaaggtgcctgaactctgtctgggcataaatgaactctccagtcatccccacaacctcctgtggttggtacagctggtccctaattggacatcacgtggaaggcaactgagacagtgcctcagtctagtgattatttcaaagcttttggatgagaaacacgaagatgttcctaatgccagtaatctgcaggtatcagtcctacatcgctatcttgtgcagatgaagccttctgatttgttaaagaaaatggtcttgaagaaaaaggctgaacaaccagatggcattattgatgacagtcttcatttagaacttgaaaagcaggcatattacctgacctacattcttcttcatttagtcggtgaagttagttgttctcattctttttcttctggacaacggaaacactttgtgctactctgtggggctttggaaaagcatgttaaatgtgatattagggaagatgcaagacttttttacagaactaaggtgaaagacttggtcgccaggatacatggaaaatggcaggaaataatccagaactgtcggcctactcaggggcagcttcatgacttctgggtaccagattcttaataggagttgcagcagcaaaaatatgaaccaagagaaattcaataagagcctttcatagaggagtagaaaggattattacagaatccaatgaatgccaagaaaatgtacagcaaatgtgccacttgaatatctagtatgaagctggtaatgaagaaattgccatttctgaagcagatatgaaatatgatctgcttaattgttaaggcaactgacctttcaaaagtgcagagtcttattaaaagaggggaggggtagaagcagaataatagtcatatgtctaacctgccccagttaactcctcttgttaaattataagccagttatcttttttagatagtatttttgtcacttggataatcacaggaaatatataagaaaagagcttggactaacttgagaagttggacatggaaagcaagaccaagttccagttgggtttaattttccctcttggttattttcggacacaaagggaatgcttaaaactgagtttagtaataaaaagcataaatctcttctgtaacttttataaaccacagggaggtttcaatccatgcattttccttcattactcaagattataaatctgtttttaaaatacatctaaacaaacagttgagaaacaaaagtttggcatgttgtcagatccccttaagaggaagaggttaagctgtaaagtagtggccctgttttgatgccagaacattcatatgctgtttgttctggatttcttttaaatgcatgtattttaaatactggttaaatcttagaatcttggctatatcttagaattctggctcttggtaaccatattacagaagtctatattgtaaaagcctaaagatctggacaagtttccaacaaccttgtttccatgagtatataattttggcagacacctgaattctttgggacactgtgtctgtgtatgtgtgtgtgtgtgtgtgtgtgtgtgtgcgcttgtatcttgaagttgttgcacttcaaaaccacagctgctgtaaattcttaaacactggagagccatcctttggtttaaatggtagagggttagtggaagtgcacacgttgtttttagcccaggggtagtaacaaactcttactagccaactagaaaattattttgttgacgagatgtcccttttaggagggtttgtttcctgaaagaatgccaactttttttgttgttctttcagtattggcttgagtgacctgttctcctgagtgctctagtgtctccagttgtgggggggaaagatgatggaggggaacagaaactggacttgatgtttgcggtttgagaggcaagaaaataaaataactttctacctctaaattgaggcttaggagtaaaaagcattttgtcctaaatttatcatttaaaatagcatcagtaacttttgagctcatgtcaatcaagcattggcagtcagagattttatagggaagactaagtaaatccagtttccaagaacctaaactgattgaggctccaagagtcagaccaacaaaagttttattctgtgttgtttactggtaagaatattattatcttgatactacctctcaagggtattgttacaaaatgccacttatggttaaagagatagatacaaagagttctatttgacagaagcttgaaactctggcatctatctgcccaacgatgggggctttcgttctgtaatttaatcctttgtagatacattatttgtgtgtaattttatacgtgttcatatttttctcattttgcattgtgtaaagtgtacaaaatctcaaagtataaaatactgcttatattgcttgtaatttacagtgtgtaaatattttctaattgtgtacattgatgggggggacaagtgggttattcaggtttttttttaatgacccttttgtattgcagtttcaacagataactgtccatcaaatttaaaaccactttgatacatttttatttaacagttccaataagaaaaaaatctctatttttaattatatttctcctttagaaaaaaaatacttcatggtccctctaaaataaatggccagacctcagtttaggcccttgtatttatgactctggtagaggtcttcagactccaggtcatagtccagtcagtatttgcatttgggttctcatgaaaactttgtgactctcttttagcacaagtagcccatggtttttcttccaaatcaagtattttacttctcccttgagtccccatgctttgtctccctcctgctgctattgcccggtgaatgggatggtagagagggagaaatgttcattgcacagagaatgtcaggccactttggggacttggcaaacgaagcttgcactgagtggtggtgtgtttggcaatattactgtgccaaaaatcaccttgtctaattttatggatatgtatggcaaacttattacccttcttgcaagctgcacattaaggtacttgtaagtgtttatgcttttgtgtgtaactgtttgccttttctaactgcttttcttgttactgaaaatataattctactagttttatcacattaagaggctctccatgcacaaaatgcattgatgtagccgtaaagtaacagcatttgtacattttctatctcctgatggcagtggtgcctttgtcaccttttggaaggtttgcattttgtttctgctttcaagcgcaaatagtagcttgctttcagcttcacaaaaatctcctcaaatgtaaaagatacaaaatggcgtgttatcatccaggcttagttggagtatttgcatttttatttttatcaaaacaaatataattggtggggactggccagtaataatgtgtggcgtctttaagccaagagtaatttttaaattaaaaatgaaaattttaagaggtagcccattaaacaagctactgagttggagaattaggggatgactgtggtggtttgtcgctaaggaggcaacagtagggtccaggcggcggggcacgtagagcagttagcatgatccatggttattccttactcatgaacagtgtcggcgcacctcattatctgtgcatttgtttttcctgggcagtcctgtcagccagttaatccaccagctcttaggaagtaaatacagatttttttctttccttttttttttttttaaagattttatactacatcttgttaaagtcctatgaatgtgtgtgtgtgtgtgctattaaaactgctttttctcagtttgaacatgtgtttggtaatatttgtttgggagttggggaggctaagttatctggaatgccctgttccctcagcccaccccagtcccctggcttttaaacatttcttcttgctttggattgtccagttttttagcttgatgtctcctgtttctggaaaacataaagccaccattgtacacagttcacttttatataacccagttaattgctgtatactttgcaatcaggaattcagtaatctcattcttacctcattcactatgttcattccaccattcattctaacaattgagtctcaactacatactaggcactctttttaggattcagtaaggatttgatggtgaacaacatagagaactcatgaatcttacctcctggtatccaggttaaaatactttctgttcttgggcaaagagaattagaaacaaatacccttaacctgactcccttgttcttgagcccaggaccaagaaagaagaagctgtacaatgcagaagcagggcttgagatcacctccaacctgccaagcagatagagatctgggtatgccaacttgggaggcagaggttgaaacctcataggaggaactttggagctcatagaaggccttggcattgtcagaggccttgagttccaaaaccatgccagtatttctgccttctgacaggctggctagaaagagactaaatgggagcatttttctctgacagtggggcggagggatgaggggatgacagcccaggaagaagcagagacattgccataagtacttactagagggcaggcagcacagctttatgcaagttaagggccttgaccttgccccaaggcctgacctcagatcccagattcatcatactagccttttgatctttgccaaattacttaaactcactgtttcctcatctgttgaataatggtgtctacctcagggtttgtgaggactaagcgagctaatgcatgaaaagtgcctagtacagtgcctggcatatagcaagaactcagcaaatgcttgctgctctaacgaggcgtttctctgatgacagatttgatcttaagcagacacctcagggtgtactgacatctgagcaaaccatatctccaaaaattatagttgtaagtgtgccctatttctttggataccgggagctggagcttctctgtccagctatctctgctgattttttttaattaaaattttcactttttaaaagccagcatgctaaagctgagaaattggtgatgggtggtggttttccagcatttgtgggaatgtcctgacactccctttcccttactaaccattccctaggctggagtcaagagagggcaaaccagaaggcccagctttgggtctgactccaagacgactggctgggaggaaaactaaacaggcttctgaggcacagtggaatagtgagacttccgcattgttgcactggtgacagcccctacagaagaagcacctcagctgtatatatagccaaaataaagaccacaccacctaaagggaaagtgctgggcaaaccagagatggagatggcaaagcaggaacagaaatgctgccacattgaacagtaagcaggacaacttgactaggccagagttctcttgcttcagggaacctgctcaagtttcaggaattcatacccacccccttcacctaggatccctgctacagtaagtaactgttctgtgcaaagtggagctaaactctggtgtgtaagtggctgacaatcactgctgaagacggccagcactaccctcagccactttcttacagcaaagttggggaaaatagactagcaaaaacaaaactcatacttttctgtgtgtgtgaagttctccagaaggtttccaaatggaatcctctcacagccaccctgcgaagcagccagggtagtgaccttatggatgagtgacagcctgttcaaagaatgacctgcctgtgtcccaggatgcagatttatggctgggttagggttaatttctttagttgatttccagttttcttttccactgtctgtcagtattcccccgttcttattttaccagctggatttgcagagagacatactgtcaatcaaaagggcttcctatgggcagctccattaattgcttttacatctgatactctcattaggtttagagattttactgggaggctagcagaaggaaatggattgtggtctgctatcaaaagtactgaagtaactgcccagtgatcattgaaatcacacattttgctcatttaacaatgtctgagtttgccatcagcacctcagaggagcaaagcttggttcataaagtgaagttgagtgatactgagcctaccacactggcctactcgccacctccagagctatctgaagtcagcactgcaggttctgtgaacatttgggaagctgtgcctcttagccccctgggcccctacagtttaattgctctcctatctgctactgaaggaccagcagtcttcctaccctgcctccactgttaccaccaacccactttttgataaggactgcagatttatctttcttagccctgccttgactggtcttcccacctcagacgtccttactcagtccatcatctctttcaggattttcttctgtggtctttttcaaactactagctgacttttcccttttatttcccactaggaacccctccccgcccccccccccccagccatttcatcaaatcaaactcactgccctctttcatgccccttccttagttccccaacacaagcctgtgcataagcttgaacatttctacctttgccaatggtatttccccttctggcttaccctgcttcctccttctcagacttttccagtcttgattgtcctctccataaacacaagaatgaacttcaaggcaagttacttaatgtcttagagcctgtttccccatccataaaatggggctataaattcctcaggatgggatgagggtacaaataaaaaatgaagcaggatattctttgtaaaagtgtgtgtacattttttattgtgtttctccccagctaccttccctctccccgccacacacatcctatttgcagagtgttgggggaggtggaactgtgatgtgggccctgctgtctagcagtctgcagtcacacacagccatccaaactacgagattgtatatgattcagtgccaaactgtgagctttggggaatccagaaagaaggatgaagcctttcccaagtttcctttagttaaatgtgccacttgaatcctgttctgactcctaggcacatgcaagagtcaatcacatatgttcctgtggcctttatcattttggtccatctcttgagcccacatgaatactgtcatggatggaggaggaaggaccaggctgggtcagggcctgaatgcaggttttgtttggactataggggctaagttcactttaataggctgtgacctattaaaggaggcaggaaccaagtttgcacagaaggaccatcctagttgagttaaaggagttggggagttgattgtgaggggtttcctagattgctgctgggtaaggtgattgaatctgggaaggatagggtacttgattgcctagaagggtgcactctaagttctggataagaatggtgcccaagatgagctggaggggaaggcaagtgtttgaatgacccagtccctgaggtgagcctaggttagggttaagatttggtgagtgaacaggtgcaaacgcttgtggcttatttatccagaaaaagcattttctgtgtgcctttcaggtcaggctgttactttatccccttcaggcctgaccccatctcccccacgcatagctcaagctgaacagcccctgaagctgggaatcaagcccctaccttgtgttcagagcttccctaacgtccagtcgccacctagggtagccttccctccacaccctaggccgagagcagaagcgggtggcaggagcacagggagtgaggtccaggttagaggacaggccagaaggccctccgagagggtcccccaaccccgcaacgccaggacaggtttgcacgtccccagcagtaggcaagtcaggggggtcctagggttacagcggaggagaggacgggctataagcatgtggagggtgcacggggtggcgaggccaccaccagggggcgatttcagggccgcagcgcctagaggtggggggtcgcccgatggccgaaggctgtgtgtgagcctcgccctcaaaccgcctctattgtgctagagtagggggcgcaaagaagagagtggcgaccttcccctcaccccacccagtcggccccgcctttcaggaccccgccccacccccggctccgcctccaccacccccccccgccccgcctccagccgcggccccttcctctcgcagctggtgctgtggggccgcggagccgcgcgtcgctgtctctatggccccggatccgagcgcaaaggtgagcaaggcgaggagtgcgggcggcgccctggcgtgagcctggggctgcgggccgggggtcgggcaaggcctcccccacgtccattctaccctccaagctgggccaggcctttctcaccaccaagtcccccggtcctgcatgacggctctagaggggcgcgggccaggcctcgggctgcgcggggtgcaaaccggccaccacggagtcggggaccagcgcggggagggggccgcgtggcgaacagtgttccccaggatctgggtcacgtctcccggcgtccggcgggatcgaaggagagcttgtcctcgagctgcagcagtagagactgagaaaacggacctcagaaaaccaggactagctctactgtcgggggcagggtgaccccatcagtaacctacaacccctctagaacttcacaactccctctcaccatggagtttgcatttgatgcagaaaggcatgtgatccctccctccttctgacctcttagctggggattccatggccacacaaccctgtgactccatgtccccccgattccaggaccccccatggccccatgattccttgactcctatgaccttatgacccctgaccttccaagtgacttccttggactttgacccctgtgactgtgcttcccattccccgcccccacaacctgtgactctggctccctttgggggtcttgttagtctgggcctccccaggaagatgtgggggaggctctggcccctcctcctcagcatcctcacagcaactgcagtcccaggaccctcactgcggagaccgtctagagaactagatgccacccctcggatgaccataccctatgaagagctctctgggacccggcacttcaagggccaagcccagaactactcaacactgctgctggaggaggcctcagcaaggctgctggtgggagcccgaggtgccctgttctctctcagtgccaacgacataggagatggggctcacaaagagatccactgggaagcctccccagagatgcaaagcaaatgtcatcaaaaagggaaaaacaaccagacggagtgctttaaccatgtgcggttcctgcagcggctcaattctacccacctctatgcatgtgggactcacgccttccagcccctctgtgcagccattgatgctgaggccttcaccttgccaaccagcttcgaggaggggaaggagaagtgtccttatgacccagcccgtggcttcacaggcctcatcattgatggaggcctctacacagccactaggtatgaattccggagcattcctgacatccgccggagccgccacccacactccctgagaactgaggagacaccaatgcattggctcaatgatgcggagtttgtgttctccgtcctcgtgcgggagagcaaggccagtgcagtgggtgatgatgacaaggtgtactacttcttcacggagcgtgccactgaggagggctctggcagcttcactcagagccgcagcagtcaccgtgtggcccgtgtggctcgtgtctgcaagggagacctgggagggaagaagatcctgcagaagaagtggacttccttcctgaaagcccgtctcatctgccacattccactgtatgagacactgcgtggggtctgcagcctggatgctgaaacctcaagccgtacacacttctatgcagccttcacgctgagcacacagtggaagaccctggaggcctcagccatctgccgctatgacctggcagagatccaggctgtctttgcaggaccctatatggaataccaggatggttcccggcgctggggtcgctatgagggtggggtgcctgagccccggcctggctcgtgtatcacagattcattgcgcagccaaggctacaattcatcccaagacttgccatccctggtcctggactttgtaaagttgcacccactgatggctcggcccgttgtgcccacacgtggacggcccctgctgctcaagcgcaacatacgctacacacaccttacagggacacctgtcaccacgcctgctggacctacctatgacctgctctttctgggcacagctgatggctggatccacaaggccgtagtcctgggctctgggatgcacattattgaagagacacaagtgttcagggagtcccagtctgtggaaaatctagtcatctctctattgcgcacagcctctatgtgggggctcctagcggagtcatccagctaccactctccagctgctcccgctaccgatcctgctatgactgcatcttggcccgagacccctactgtggctgggaccctggcacccatgcctgcgcagcagccaccaccatagccaacaggtcccaggacagcactgatacaggacatagagagaggaaatcgaggctgtgagagcagcagggatacagggccaccaccaccactgaagacccgctctgtgctccggggtgatgatgtcctcctgccctgtgaccagccatccaacctggcccgggccttgtggctactcaatgggagcatgggcctgagcgatgggcagggtggctaccgtgtgggcgtggacgggctgctggttacagatgcacagcctgagcacagtggcaactatggctgctatgccgaggaaaatggcctccgcaccctgctggcctcctatagtctcacagtccggccagccactcctgccccagctccaaaagcccctgccacacctggggcacagctggcacctgatgtgagactgctctatgtgctagccattgccgcgcttggtggcctctgcctcatcctggcctcctccctcctctatgtggcctgtctgcgggaaggcagacgagggcgccgacggaaatactcactgggtcgggccagccgggcaggaggatctgcggtgcaactgcagacagtctcaggccagtgtcctggagaggaagatgagggtgatgatgagggggctgggggcctggagggcagctgtctccagatcatccctggggagggagccccagccccaccacccccaccgcccccaccgccaccggctgagctgaccaatggcttggtggcactgcccagccggctgcggaggatgaatggcaatagctatgtgcttctgaggcagagcaacaatggagtaccagcagggccctgctccttcgccgaggaactcagccgcatcctggaaaaaaggaagcacacgcagctcgtggagcagctagatgagagctctgtctgagcccagcctcccagaacaaatgctcttccaagccagcctatctgtcccaggctgggccactgcctccctaacacagccaccctcccttcattacccccactccatacccttctcccaactttttgatgtccctgtagggctggccagtcaggcccagccaaagccccctcctcagtctccacagacccacatgtgagcagcccaggcccatcggtgctcctcagaggtaggtgctccctcaggatcaggtgccctgcagacccagagccagttcctatcccctaacctaaacacttataggtgaggactccatcctcctgttccattcatctgcccaaaccctttctctttctcccaggcagggctctgcaggtccatatgggctcaatgtcaccaccctctgcatggccctgtgtgctggatggtcctgaaaccagacaagacctctgccagccacctaagccctgcgtacattcacatgcacacatggaagaatgtttatcggctgggctgcagtgcccccaccctcaccttctcctggtgcattcttgtttcatccctgcttctggacttggggtaccctcccaattgccacatcctatctggtcctcttccccagccccatgtggtgacctctttgtcaagagcttgggaacgggccagcctggggaggtaagactgcatcactcccctcctctcccttcctgtgtggcccttgtgaatcagcctccccactctccttggtcattctcaagagtatgagagacagagctccaggcatgtcccatccccatgcacatgtggtaacacacacctgtatcacacatgtgcttacatttccactcacatgcacctctgagcctcccttgctgtcttggacctgtctgttgggtttagtccgtggacatttcagagggagatccccctcccatttaactgtcctcacaggcccttgcctaggatggatgaccaacactgcactcaatgagccagcctctcttttgggggaatcaagcatttgcttcctctagactacagcagggaaagggaggagaaatctgatgtctcaactggcacatgaagcccattcttggaactatgcaaagggcagaggctgggagtttggacgcttagctcctacccctgtcctacctcaccggggcactttcaggggccaggggcctctgaagtctctaggcctatatgggacaatcaattctgactgagctcccccattcccctcgggtgaggatgactgttatttttgtagctgagaacgtggaatcccacgggtttttactgcccttcacccaacctctcccacctccaccccacaatgaatgtatttattgtgagaatggctacacttctttaggaatgcccccacttacaaccaggtgggtggaacaggcatgtgacagagtggggagcctgggctcagctcctccccctgccgttggttaataaacaccctttttccccacaa

SEQ ID NO: 364607 - DNA, 13653 bp, Homo sapiens
caaggggcttagatctcagtcatcagactatacaggacatgttcatcctggaacttacacaaataccttagaacgtctagtgaaggaaatggaagacacacaaaggctagatgaactgcagaagcaactacaagaagacataaggcaaggccgaggcattaaatccccaatcagaattggagaagaagacagtacagatgatgaggatggcctcttagaagagcacaaggaatttctaaagaaattttcagttacaattgatgctattcctgatcatcatccaggtgaagaaatatttaatttcctcaattctggaaaaattttcaatcagtataccttggatttaagagactctggttttattggacaaagtgctgtagaaaaacttattcttaaatcgggaaaaacagatcagatttttttgacaacacaaggtttccttacgtctgcttatcactatgtccagtgtcctgtccctgtgttaaagtggctgtttcggatgatgtcagttcatacagactgtattgtgtcagtgcagattttaagtacattgatggaaataacaattagaaatgataccttcagtgactcaccagtttggccatggatcccatcattgtctgatgtagcagctgtgtttttcaatatggggattgattttagatctttgtttcccctggagaatcttcagccagactttaatgaagactatctagtttctgaaacacagacaacatcaagggggaaagaaagtgaagattcatcttataagccaattttttcaacacttcctgaaaccaacattttaaatgtggttaagtttctaggcttgtgtacatctatacatccagaaggttaccaggatcgtgaaataatgttgctgattttaatgttatttaaaatgagtttggaaaaacagctgaaacagattcctttagtagactttcaaagcctcctgataaacctgatgaaaaacatcagagattggaacacaaaggtgcctgaactctgtctgggcataaatgaactctccagtcatccccacaacctcctgtggttggtacagctggtccctaattggacatcacgtggaaggcaactgagacagtgcctcagtctagtgattatttcaaagcttttggatgagaaacacgaagatgttcctaatgccagtaatctgcaggtatcagtcctacatcgctatcttgtgcagatgaagccttctgatttgttaaagaaaatggtcttgaagaaaaaggctgaacaaccagatggcattattgatgacagtcttcatttagaacttgaaaagcaggcatattacctgacctacattcttcttcatttagtcggtgaagttagttgttctcattctttttcttctggacaacggaaacactttgtgctactctgtggggctttggaaaagcatgttaaatgtgatattagggaagatgcaagacttttttacagaactaaggtgaaagacttggtcgccaggatacatggaaaatggcaggaaataatccagaactgtcggcctactcaggggcagcttcatgacttctgggtaccagattcttaataggagttgcagcagcaaaaatatgaaccaagagaaattcaataagagcctttcatagaggagtagaaaggattattacagaatccaatgaatgccaagaaaatgtacagcaaatgtgccacttgaatatctagtatgaagctggtaatgaagaaattgccatttctgaagcagatatgaaatatgatctgcttaattgttaaggcaactgacctttcaaaagtgcagagtcttattaaaagaggggaggggtagaagcagaataatagtcatatgtctaacctgccccagttaactcctcttgttaaattataagccagttatcttttttagatagtatttttgtcacttggataatcacaggaaatatataagaaaagagcttggactaacttgagaagttggacatggaaagcaagaccaagttccagttgggtttaattttccctcttggttattttcggacacaaagggaatgcttaaaactgagtttagtaataaaaagcataaatctcttctgtaacttttataaaccacagggaggtttcaatccatgcattttccttcattactcaagattataaatctgtttttaaaatacatctaaacaaacagttgagaaacaaaagtttggcatgttgtcagatccccttaagaggaagaggttaagctgtaaagtagtggccctgttttgatgccagaacattcatatgctgtttgttctggatttcttttaaatgcatgtattttaaatactggttaaatcttagaatcttggctatatcttagaattctggctcttggtaaccatattacagaagtctatattgtaaaagcctaaagatctggacaagtttccaacaaccttgtttccatgagtatataattttggcagacacctgaattctttgggacactgtgtctgtgtatgtgtgtgtgtgtgtgtgtgtgtgtgtgcgcttgtatcttgaagttgttgcacttcaaaaccacagctgctgtaaattcttaaacactggagagccatcctttggtttaaatggtagagggttagtggaagtgcacacgttgtttttagcccaggggtagtaacaaactcttactagccaactagaaaattattttgttgacgagatgtcccttttaggagggtttgtttcctgaaagaatgccaactttttttgttgttctttcagtattggcttgagtgacctgttctcctgagtgctctagtgtctccagttgtgggggggaaagatgatggaggggaacagaaactggacttgatgtttgcggtttgagaggcaagaaaataaaataactttctacctctaaattgaggcttaggagtaaaaagcattttgtcctaaatttatcatttaaaatagcatcagtaacttttgagctcatgtcaatcaagcattggcagtcagagattttatagggaagactaagtaaatccagtttccaagaacctaaactgattgaggctccaagagtcagaccaacaaaagttttattctgtgttgtttactggtaagaatattattatcttgatactacctctcaagggtattgttacaaaatgccacttatggttaaagagatagatacaaagagttctatttgacagaagcttgaaactctggcatctatctgcccaacgatgggggctttcgttctgtaatttaatcctttgtagatacattatttgtgtgtaattttatacgtgttcatatttttctcattttgcattgtgtaaagtgtacaaaatctcaaagtataaaatactgcttatattgcttgtaatttacagtgtgtaaatattttctaattgtgtacattgatgggggggacaagtgggttattcaggtttttttttaatgacccttttgtattgcagtttcaacagataactgtccatcaaatttaaaaccactttgatacatttttatttaacagttccaataagaaaaaaatctctatttttaattatatttctcctttagaaaaaaaatacttcatggtccctctaaaataaatggccagacctcagtttaggcccttgtatttatgactctggtagaggtcttcagactccaggtcatagtccagtcagtatttgcatttgggttctcatgaaaactttgtgactctcttttagcacaagtagcccatggtttttcttccaaatcaagtattttacttctcccttgagtccccatgctttgtctccctcctgctgctattgcccggtgaatgggatggtagagagggagaaatgttcattgcacagagaatgtcaggccactttggggacttggcaaacgaagcttgcactgagtggtggtgtgtttggcaatattactgtgccaaaaatcaccttgtctaattttatggatatgtatggcaaacttattacccttcttgcaagctgcacattaaggtacttgtaagtgtttatgcttttgtgtgtaactgtttgccttttctaactgcttttcttgttactgaaaatataattctactagttttatcacattaagaggctctccatgcacaaaatgcattgatgtagccgtaaagtaacagcatttgtacattttctatctcctgatggcagtggtgcctttgtcaccttttggaaggtttgcattttgtttctgctttcaagcgcaaatagtagcttgctttcagcttcacaaaaatctcctcaaatgtaaaagatacaaaatggcgtgttatcatccaggcttagttggagtatttgcatttttatttttatcaaaacaaatataattggtggggactggccagtaataatgtgtggcgtctttaagccaagagtaatttttaaattaaaaatgaaaattttaagaggtagcccattaaacaagctactgagttggagaattaggggatgactgtggtggtttgtcgctaaggaggcaacagtagggtccaggcggcggggcacgtagagcagttagcatgatccatggttattccttactcatgaacagtgtcggcgcacctcattatctgtgcatttgtttttcctgggcagtcctgtcagccagttaatccaccagctcttaggaagtaaatacagatttttttctttccttttttttttttttaaagattttatactacatcttgttaaagtcctatgaatgtgtgtgtgtgtgtgctattaaaactgctttttctcagtttgaacatgtgtttggtaatatttgtttgggagttggggaggctaagttatctggaatgccctgttccctcagcccaccccagtcccctggcttttaaacatttcttcttgctttggattgtccagttttttagcttgatgtctcctgtttctggaaaacataaagccaccattgtacacagttcacttttatataacccagttaattgctgtatactttgcaatcaggaattcagtaatctcattcttacctcattcactatgttcattccaccattcattctaacaattgagtctcaactacatactaggcactctttttaggattcagtaaggatttgatggtgaacaacatagagaactcatgaatcttacctcctggtatccaggttaaaatactttctgttcttgggcaaagagaattagaaacaaatacccttaacctgactcccttgttcttgagcccaggaccaagaaagaagaagctgtacaatgcagaagcagggcttgagatcacctccaacctgccaagcagatagagatctgggtatgccaacttgggaggcagaggttgaaacctcataggaggaactttggagctcatagaaggccttggcattgtcagaggccttgagttccaaaaccatgccagtatttctgccttctgacaggctggctagaaagagactaaatgggagcatttttctctgacagtggggcggagggatgaggggatgacagcccaggaagaagcagagacattgccataagtacttactagagggcaggcagcacagctttatgcaagttaagggccttgaccttgccccaaggcctgacctcagatcccagattcatcatactagccttttgatctttgccaaattacttaaactcactgtttcctcatctgttgaataatggtgtctacctcagggtttgtgaggactaagcgagctaatgcatgaaaagtgcctagtacagtgcctggcatatagcaagaactcagcaaatgcttgctgctctaacgaggcgtttctctgatgacagatttgatcttaagcagacacctcagggtgtactgacatctgagcaaaccatatctccaaaaattatagttgtaagtgtgccctatttctttggataccgggagctggagcttctctgtccagctatctctgctgattttttttaattaaaattttcactttttaaaagccagcatgctaaagctgagaaattggtgatgggtggtggttttccagcatttgtgggaatgtcctgacactccctttcccttactaaccattccctaggctggagtcaagagagggcaaaccagaaggcccagctttgggtctgactccaagacgactggctgggaggaaaactaaacaggcttctgaggcacagtggaatagtgagacttccgcattgttgcactggtgacagcccctacagaagaagcacctcagctgtatatatagccaaaataaagaccacaccacctaaagggaaagtgctgggcaaaccagagatggagatggcaaagcaggaacagaaatgctgccacattgaacagtaagcaggacaacttgactaggccagagttctcttgcttcagggaacctgctcaagtttcaggaattcatacccacccccttcacctaggatccctgctacagtaagtaactgttctgtgcaaagtggagctaaactctggtgtgtaagtggctgacaatcactgctgaagacggccagcactaccctcagccactttcttacagcaaagttggggaaaatagactagcaaaaacaaaactcatacttttctgtgtgtgtgaagttctccagaaggtttccaaatggaatcctctcacagccaccctgcgaagcagccagggtagtgaccttatggatgagtgacagcctgttcaaagaatgacctgcctgtgtcccaggatgcagatttatggctgggttagggttaatttctttagttgatttccagttttcttttccactgtctgtcagtattcccccgttcttattttaccagctggatttgcagagagacatactgtcaatcaaaagggcttcctatgggcagctccattaattgcttttacatctgatactctcattaggtttagagattttactgggaggctagcagaaggaaatggattgtggtctgctatcaaaagtactgaagtaactgcccagtgatcattgaaatcacacattttgctcatttaacaatgtctgagtttgccatcagcacctcagaggagcaaagcttggttcataaagtgaagttgagtgatactgagcctaccacactggcctactcgccacctccagagctatctgaagtcagcactgcaggttctgtgaacatttgggaagctgtgcctcttagccccctgggcccctacagtttaattgctctcctatctgctactgaaggaccagcagtcttcctaccctgcctccactgttaccaccaacccactttttgataaggactgcagatttatctttcttagccctgccttgactggtcttcccacctcagacgtccttactcagtccatcatctctttcaggattttcttctgtggtctttttcaaactactagctgacttttcccttttatttcccactaggaacccctccccgcccccccccccccagccatttcatcaaatcaaactcactgccctctttcatgccccttccttagttccccaacacaagcctgtgcataagcttgaacatttctacctttgccaatggtatttccccttctggcttaccctgcttcctccttctcagacttttccagtcttgattgtcctctccataaacacaagaatgaacttcaaggcaagttacttaatgtcttagagcctgtttccccatccataaaatggggctataaattcctcaggatgggatgagggtacaaataaaaaatgaagcaggatattctttgtaaaagtgtgtgtacattttttattgtgtttctccccagctaccttccctctccccgccacacacatcctatttgcagagtgttgggggaggtggaactgtgatgtgggccctgctgtctagcagtctgcagtcacacacagccatccaaactacgagattgtatatgattcagtgccaaactgtgagctttggggaatccagaaagaaggatgaagcctttcccaagtttcctttagttaaatgtgccacttgaatcctgttctgactcctaggcacatgcaagagtcaatcacatatgttcctgtggcctttatcattttggtccatctcttgagcccacatgaatactgtcatggatggaggaggaaggaccaggctgggtcagggcctgaatgcaggttttgtttggactataggggctaagttcactttaataggctgtgacctattaaaggaggcaggaaccaagtttgcacagaaggaccatcctagttgagttaaaggagttggggagttgattgtgaggggtttcctagattgctgctgggtaaggtgattgaatctgggaaggatagggtacttgattgcctagaagggtgcactctaagttctggataagaatggtgcccaagatgagctggaggggaaggcaagtgtttgaatgacccagtccctgaggtgagcctaggttagggttaagatttggtgagtgaacaggtgcaaacgcttgtggcttatttatccagaaaaagcattttctgtgtgcctttcaggtcaggctgttactttatccccttcaggcctgaccccatctcccccacgcatagctcaagctgaacagcccctgaagctgggaatcaagcccctaccttgtgttcagagcttccctaacgtccagtcgccacctagggtagccttccctccacaccctaggccgagagcagaagcgggtggcaggagcacagggagtgaggtccaggttagaggacaggccagaaggccctccgagagggtcccccaaccccgcaacgccaggacaggtttgcacgtccccagcagtaggcaagtcaggggggtcctagggttacagcggaggagaggacgggctataagcatgtggagggtgcacggggtggcgaggccaccaccagggggcgatttcagggccgcagcgcctagaggtggggggtcgcccgatggccgaaggctgtgtgtgagcctcgccctcaaaccgcctctattgtgctagagtagggggcgcaaagaagagagtggcgaccttcccctcaccccacccagtcggccccgcctttcaggaccccgccccacccccggctccgcctccaccacccccccccgccccgcctccagccgcggccccttcctctcgcagctggtgctgtggggccgcggagccgcgcgtcgctgtctctatggccccggatccgagcgcaaagaaaacggacctcagaaaaccaggactagctctactgtcgggggcagggtgaccccatcagtaacctacaacccctctagaacttcacaactccctctcaccatggagtttgcatttgatgcagaaaggcatgtgatccctccctccttctgacctcttagctggggattccatggccacacaaccctgtgactccatgtccccccgattccaggaccccccatggccccatgattccttgactcctatgaccttatgacccctgaccttccaagtgacttccttggactttgacccctgtgactgtgcttcccattccccgcccccacaacctgtgactctggctccctttgggggtcttgttagtctgggcctccccaggaagatgtgggggaggctctggcccctcctcctcagcatcctcacagcaactgcagtcccaggaccctcactgcggagaccgtctagagaactagatgccacccctcggatgaccataccctatgaagagctctctgggacccggcacttcaagggccaagcccagaactactcaacactgctgctggaggaggcctcagcaaggctgctggtgggagcccgaggtgccctgttctctctcagtgccaacgacataggagatggggctcacaaagagatccactgggaagcctccccagagatgcaaagcaaatgtcatcaaaaagggaaaaacaaccagacggagtgctttaaccatgtgcggttcctgcagcggctcaattctacccacctctatgcatgtgggactcacgccttccagcccctctgtgcagccattgatgctgaggccttcaccttgccaaccagcttcgaggaggggaaggagaagtgtccttatgacccagcccgtggcttcacaggcctcatcattgatggaggcctctacacagccactaggtatgaattccggagcattcctgacatccgccggagccgccacccacactccctgagaactgaggagacaccaatgcattggctcaatgatgcggagtttgtgttctccgtcctcgtgcgggagagcaaggccagtgcagtgggtgatgatgacaaggtgtactacttcttcacggagcgtgccactgaggagggctctggcagcttcactcagagccgcagcagtcaccgtgtggcccgtgtggctcgtgtctgcaagggagacctgggagggaagaagatcctgcagaagaagtggacttccttcctgaaagcccgtctcatctgccacattccactgtatgagacactgcgtggggtctgcagcctggatgctgaaacctcaagccgtacacacttctatgcagccttcacgctgagcacacagtggaagaccctggaggcctcagccatctgccgctatgacctggcagagatccaggctgtctttgcaggaccctatatggaataccaggatggttcccggcgctggggtcgctatgagggtggggtgcctgagccccggcctggctcgtgtatcacagattcattgcgcagccaaggctacaattcatcccaagacttgccatccctggtcctggactttgtaaagttgcacccactgatggctcggcccgttgtgcccacacgtggacggcccctgctgctcaagcgcaacatacgctacacacaccttacagggacacctgtcaccacgcctgctggacctacctatgacctgctctttctgggcacagctgatggctggatccacaaggccgtagtcctgggctctgggatgcacattattgaagagacacaagtgttcagggagtcccagtctgtggaaaatctagtcatctctctattgcgcacagcctctatgtgggggctcctagcggagtcatccagctaccactctccagctgctcccgctaccgatcctgctatgactgcatcttggcccgagacccctactgtggctgggaccctggcacccatgcctgcgcagcagccaccaccatagccaacaggtcccaggacagcactgatacaggacatagagagaggaaatcgaggctgtgagagcagcagggatacagggccaccaccaccactgaagacccgctctgtgctccggggtgatgatgtcctcctgccctgtgaccagccatccaacctggcccgggccttgtggctactcaatgggagcatgggcctgagcgatgggcagggtggctaccgtgtgggcgtggacgggctgctggttacagatgcacagcctgagcacagtggcaactatggctgctatgccgaggaaaatggcctccgcaccctgctggcctcctatagtctcacagtccggccagccactcctgccccagctccaaaagcccctgccacacctggggcacagctggcacctgatgtgagactgctctatgtgctagccattgccgcgcttggtggcctctgcctcatcctggcctcctccctcctctatgtggcctgtctgcgggaaggcagacgagggcgccgacggaaatactcactgggtcgggccagccgggcaggaggatctgcggtgcaactgcagacagtctcaggccagtgtcctggagaggaagatgagggtgatgatgagggggctgggggcctggagggcagctgtctccagatcatccctggggagggagccccagccccaccacccccaccgcccccaccgccaccggctgagctgaccaatggcttggtggcactgcccagccggctgcggaggatgaatggcaatagctatgtgcttctgaggcagagcaacaatggagtaccagcagggccctgctccttcgccgaggaactcagccgcatcctggaaaaaaggaagcacacgcagctcgtggagcagctagatgagagctctgtctgagcccagcctcccagaacaaatgctcttccaagccagcctatctgtcccaggctgggccactgcctccctaacacagccaccctcccttcattacccccactccatacccttctcccaactttttgatgtccctgtagggctggccagtcaggcccagccaaagccccctcctcagtctccacagacccacatgtgagcagcccaggcccatcggtgctcctcagaggtaggtgctccctcaggatcaggtgccctgcagacccagagccagttcctatcccctaacctaaacacttataggtgaggactccatcctcctgttccattcatctgcccaaaccctttctctttctcccaggcagggctctgcaggtccatatgggctcaatgtcaccaccctctgcatggccctgtgtgctggatggtcctgaaaccagacaagacctctgccagccacctaagccctgcgtacattcacatgcacacatggaagaatgtttatcggctgggctgcagtgcccccaccctcaccttctcctggtgcattcttgtttcatccctgcttctggacttggggtaccctcccaattgccacatcctatctggtcctcttccccagccccatgtggtgacctctttgtcaagagcttgggaacgggccagcctggggaggtaagactgcatcactcccctcctctcccttcctgtgtggcccttgtgaatcagcctccccactctccttggtcattctcaagagtatgagagacagagctccaggcatgtcccatccccatgcacatgtggtaacacacacctgtatcacacatgtgcttacatttccactcacatgcacctctgagcctcccttgctgtcttggacctgtctgttgggtttagtccgtggacatttcagagggagatccccctcccatttaactgtcctcacaggcccttgcctaggatggatgaccaacactgcactcaatgagccagcctctcttttgggggaatcaagcatttgcttcctctagactacagcagggaaagggaggagaaatctgatgtctcaactggcacatgaagcccattcttggaactatgcaaagggcagaggctgggagtttggacgcttagctcctacccctgtcctacctcaccggggcactttcaggggccaggggcctctgaagtctctaggcctatatgggacaatcaattctgactgagctcccccattcccctcgggtgaggatgactgttatttttgtagctgagaacgtggaatcccacgggtttttactgcccttcacccaacctctcccacctccaccccacaatgaatgtatttattgtgagaatggctacacttctttaggaatgcccccacttacaaccaggtgggtggaacaggcatgtgacagagtggggagcctgggctcagctcctccccctgccgttggttaataaacaccctttttccccacaa

SEQ ID NO: 364608 - DNA, 14119 bp, Homo sapiens
caaggggcttagatctcagtcatcagactatacaggacatgttcatcctggaacttacacaaataccttagaacgtctagtgaaggaaatggaagacacacaaaggctagatgaactgcagaagcaactacaagaagacataaggcaaggccgaggcattaaatccccaatcagaattggagaagaagacagtacagatgatgaggatggcctcttagaagagcacaaggaatttctaaagaaattttcagttacaattgatgctattcctgatcatcatccaggtgaagaaatatttaatttcctcaattctggaaaaattttcaatcagtataccttggatttaagagactctggttttattggacaaagtgctgtagaaaaacttattcttaaatcgggaaaaacagatcagatttttttgacaacacaaggtttccttacgtctgcttatcactatgtccagtgtcctgtccctgtgttaaagtggctgtttcggatgatgtcagttcatacagactgtattgtgtcagtgcagattttaagtacattgatggaaataacaattagaaatgataccttcagtgactcaccagtttggccatggatcccatcattgtctgatgtagcagctgtgtttttcaatatggggattgattttagatctttgtttcccctggagaatcttcagccagactttaatgaagactatctagtttctgaaacacagacaacatcaagggggaaagaaagtgaagattcatcttataagccaattttttcaacacttcctgaaaccaacattttaaatgtggttaagtttctaggcttgtgtacatctatacatccagaaggttaccaggatcgtgaaataatgttgctgattttaatgttatttaaaatgagtttggaaaaacagctgaaacagattcctttagtagactttcaaagcctcctgataaacctgatgaaaaacatcagagattggaacacaaaggtgcctgaactctgtctgggcataaatgaactctccagtcatccccacaacctcctgtggttggtacagctggtccctaattggacatcacgtggaaggcaactgagacagtgcctcagtctagtgattatttcaaagcttttggatgagaaacacgaagatgttcctaatgccagtaatctgcaggtatcagtcctacatcgctatcttgtgcagatgaagccttctgatttgttaaagaaaatggtcttgaagaaaaaggctgaacaaccagatggcattattgatgacagtcttcatttagaacttgaaaagcaggcatattacctgacctacattcttcttcatttagtcggtgaagttagttgttctcattctttttcttctggacaacggaaacactttgtgctactctgtggggctttggaaaagcatgttaaatgtgatattagggaagatgcaagacttttttacagaactaaggtgaaagacttggtcgccaggatacatggaaaatggcaggaaataatccagaactgtcggcctactcaggggcagcttcatgacttctgggtaccagattcttaataggagttgcagcagcaaaaatatgaaccaagagaaattcaataagagcctttcatagaggagtagaaaggattattacagaatccaatgaatgccaagaaaatgtacagcaaatgtgccacttgaatatctagtatgaagctggtaatgaagaaattgccatttctgaagcagatatgaaatatgatctgcttaattgttaaggcaactgacctttcaaaagtgcagagtcttattaaaagaggggaggggtagaagcagaataatagtcatatgtctaacctgccccagttaactcctcttgttaaattataagccagttatcttttttagatagtatttttgtcacttggataatcacaggaaatatataagaaaagagcttggactaacttgagaagttggacatggaaagcaagaccaagttccagttgggtttaattttccctcttggttattttcggacacaaagggaatgcttaaaactgagtttagtaataaaaagcataaatctcttctgtaacttttataaaccacagggaggtttcaatccatgcattttccttcattactcaagattataaatctgtttttaaaatacatctaaacaaacagttgagaaacaaaagtttggcatgttgtcagatccccttaagaggaagaggttaagctgtaaagtagtggccctgttttgatgccagaacattcatatgctgtttgttctggatttcttttaaatgcatgtattttaaatactggttaaatcttagaatcttggctatatcttagaattctggctcttggtaaccatattacagaagtctatattgtaaaagcctaaagatctggacaagtttccaacaaccttgtttccatgagtatataattttggcagacacctgaattctttgggacactgtgtctgtgtatgtgtgtgtgtgtgtgtgtgtgtgtgtgcgcttgtatcttgaagttgttgcacttcaaaaccacagctgctgtaaattcttaaacactggagagccatcctttggtttaaatggtagagggttagtggaagtgcacacgttgtttttagcccaggggtagtaacaaactcttactagccaactagaaaattattttgttgacgagatgtcccttttaggagggtttgtttcctgaaagaatgccaactttttttgttgttctttcagtattggcttgagtgacctgttctcctgagtgctctagtgtctccagttgtgggggggaaagatgatggaggggaacagaaactggacttgatgtttgcggtttgagaggcaagaaaataaaataactttctacctctaaattgaggcttaggagtaaaaagcattttgtcctaaatttatcatttaaaatagcatcagtaacttttgagctcatgtcaatcaagcattggcagtcagagattttatagggaagactaagtaaatccagtttccaagaacctaaactgattgaggctccaagagtcagaccaacaaaagttttattctgtgttgtttactggtaagaatattattatcttgatactacctctcaagggtattgttacaaaatgccacttatggttaaagagatagatacaaagagttctatttgacagaagcttgaaactctggcatctatctgcccaacgatgggggctttcgttctgtaatttaatcctttgtagatacattatttgtgtgtaattttatacgtgttcatatttttctcattttgcattgtgtaaagtgtacaaaatctcaaagtataaaatactgcttatattgcttgtaatttacagtgtgtaaatattttctaattgtgtacattgatgggggggacaagtgggttattcaggtttttttttaatgacccttttgtattgcagtttcaacagataactgtccatcaaatttaaaaccactttgatacatttttatttaacagttccaataagaaaaaaatctctatttttaattatatttctcctttagaaaaaaaatacttcatggtccctctaaaataaatggccagacctcagtttaggcccttgtatttatgactctggtagaggtcttcagactccaggtcatagtccagtcagtatttgcatttgggttctcatgaaaactttgtgactctcttttagcacaagtagcccatggtttttcttccaaatcaagtattttacttctcccttgagtccccatgctttgtctccctcctgctgctattgcccggtgaatgggatggtagagagggagaaatgttcattgcacagagaatgtcaggccactttggggacttggcaaacgaagcttgcactgagtggtggtgtgtttggcaatattactgtgccaaaaatcaccttgtctaattttatggatatgtatggcaaacttattacccttcttgcaagctgcacattaaggtacttgtaagtgtttatgcttttgtgtgtaactgtttgccttttctaactgcttttcttgttactgaaaatataattctactagttttatcacattaagaggctctccatgcacaaaatgcattgatgtagccgtaaagtaacagcatttgtacattttctatctcctgatggcagtggtgcctttgtcaccttttggaaggtttgcattttgtttctgctttcaagcgcaaatagtagcttgctttcagcttcacaaaaatctcctcaaatgtaaaagatacaaaatggcgtgttatcatccaggcttagttggagtatttgcatttttatttttatcaaaacaaatataattggtggggactggccagtaataatgtgtggcgtctttaagccaagagtaatttttaaattaaaaatgaaaattttaagaggtagcccattaaacaagctactgagttggagaattaggggatgactgtggtggtttgtcgctaaggaggcaacagtagggtccaggcggcggggcacgtagagcagttagcatgatccatggttattccttactcatgaacagtgtcggcgcacctcattatctgtgcatttgtttttcctgggcagtcctgtcagccagttaatccaccagctcttaggaagtaaatacagatttttttctttccttttttttttttttaaagattttatactacatcttgttaaagtcctatgaatgtgtgtgtgtgtgtgctattaaaactgctttttctcagtttgaacatgtgtttggtaatatttgtttgggagttggggaggctaagttatctggaatgccctgttccctcagcccaccccagtcccctggcttttaaacatttcttcttgctttggattgtccagttttttagcttgatgtctcctgtttctggaaaacataaagccaccattgtacacagttcacttttatataacccagttaattgctgtatactttgcaatcaggaattcagtaatctcattcttacctcattcactatgttcattccaccattcattctaacaattgagtctcaactacatactaggcactctttttaggattcagtaaggatttgatggtgaacaacatagagaactcatgaatcttacctcctggtatccaggttaaaatactttctgttcttgggcaaagagaattagaaacaaatacccttaacctgactcccttgttcttgagcccaggaccaagaaagaagaagctgtacaatgcagaagcagggcttgagatcacctccaacctgccaagcagatagagatctgggtatgccaacttgggaggcagaggttgaaacctcataggaggaactttggagctcatagaaggccttggcattgtcagaggccttgagttccaaaaccatgccagtatttctgccttctgacaggctggctagaaagagactaaatgggagcatttttctctgacagtggggcggagggatgaggggatgacagcccaggaagaagcagagacattgccataagtacttactagagggcaggcagcacagctttatgcaagttaagggccttgaccttgccccaaggcctgacctcagatcccagattcatcatactagccttttgatctttgccaaattacttaaactcactgtttcctcatctgttgaataatggtgtctacctcagggtttgtgaggactaagcgagctaatgcatgaaaagtgcctagtacagtgcctggcatatagcaagaactcagcaaatgcttgctgctctaacgaggcgtttctctgatgacagatttgatcttaagcagacacctcagggtgtactgacatctgagcaaaccatatctccaaaaattatagttgtaagtgtgccctatttctttggataccgggagctggagcttctctgtccagctatctctgctgattttttttaattaaaattttcactttttaaaagccagcatgctaaagctgagaaattggtgatgggtggtggttttccagcatttgtgggaatgtcctgacactccctttcccttactaaccattccctaggctggagtcaagagagggcaaaccagaaggcccagctttgggtctgactccaagacgactggctgggaggaaaactaaacaggcttctgaggcacagtggaatagtgagacttccgcattgttgcactggtgacagcccctacagaagaagcacctcagctgtatatatagccaaaataaagaccacaccacctaaagggaaagtgctgggcaaaccagagatggagatggcaaagcaggaacagaaatgctgccacattgaacagtaagcaggacaacttgactaggccagagttctcttgcttcagggaacctgctcaagtttcaggaattcatacccacccccttcacctaggatccctgctacagtaagtaactgttctgtgcaaagtggagctaaactctggtgtgtaagtggctgacaatcactgctgaagacggccagcactaccctcagccactttcttacagcaaagttggggaaaatagactagcaaaaacaaaactcatacttttctgtgtgtgtgaagttctccagaaggtttccaaatggaatcctctcacagccaccctgcgaagcagccagggtagtgaccttatggatgagtgacagcctgttcaaagaatgacctgcctgtgtcccaggatgcagatttatggctgggttagggttaatttctttagttgatttccagttttcttttccactgtctgtcagtattcccccgttcttattttaccagctggatttgcagagagacatactgtcaatcaaaagggcttcctatgggcagctccattaattgcttttacatctgatactctcattaggtttagagattttactgggaggctagcagaaggaaatggattgtggtctgctatcaaaagtactgaagtaactgcccagtgatcattgaaatcacacattttgctcatttaacaatgtctgagtttgccatcagcacctcagaggagcaaagcttggttcataaagtgaagttgagtgatactgagcctaccacactggcctactcgccacctccagagctatctgaagtcagcactgcaggttctgtgaacatttgggaagctgtgcctcttagccccctgggcccctacagtttaattgctctcctatctgctactgaaggaccagcagtcttcctaccctgcctccactgttaccaccaacccactttttgataaggactgcagatttatctttcttagccctgccttgactggtcttcccacctcagacgtccttactcagtccatcatctctttcaggattttcttctgtggtctttttcaaactactagctgacttttcccttttatttcccactaggaacccctccccgcccccccccccccagccatttcatcaaatcaaactcactgccctctttcatgccccttccttagttccccaacacaagcctgtgcataagcttgaacatttctacctttgccaatggtatttccccttctggcttaccctgcttcctccttctcagacttttccagtcttgattgtcctctccataaacacaagaatgaacttcaaggcaagttacttaatgtcttagagcctgtttccccatccataaaatggggctataaattcctcaggatgggatgagggtacaaataaaaaatgaagcaggatattctttgtaaaagtgtgtgtacattttttattgtgtttctccccagctaccttccctctccccgccacacacatcctatttgcagagtgttgggggaggtggaactgtgatgtgggccctgctgtctagcagtctgcagtcacacacagccatccaaactacgagattgtatatgattcagtgccaaactgtgagctttggggaatccagaaagaaggatgaagcctttcccaagtttcctttagttaaatgtgccacttgaatcctgttctgactcctaggcacatgcaagagtcaatcacatatgttcctgtggcctttatcattttggtccatctcttgagcccacatgaatactgtcatggatggaggaggaaggaccaggctgggtcagggcctgaatgcaggttttgtttggactataggggctaagttcactttaataggctgtgacctattaaaggaggcaggaaccaagtttgcacagaaggaccatcctagttgagttaaaggagttggggagttgattgtgaggggtttcctagattgctgctgggtaaggtgattgaatctgggaaggatagggtacttgattgcctagaagggtgcactctaagttctggataagaatggtgcccaagatgagctggaggggaaggcaagtgtttgaatgacccagtccctgaggtgagcctaggttagggttaagatttggtgagtgaacaggtgcaaacgcttgtggcttatttatccagaaaaagcattttctgtgtgcctttcaggtcaggctgttactttatccccttcaggcctgaccccatctcccccacgcatagctcaagctgaacagcccctgaagctgggaatcaagcccctaccttgtgttcagagcttccctaacgtccagtcgccacctagggtagccttccctccacaccctaggccgagagcagaagcgggtggcaggagcacagggagtgaggtccaggttagaggacaggccagaaggccctccgagagggtcccccaaccccgcaacgccaggacaggtttgcacgtccccagcagtaggcaagtcaggggggtcctagggttacagcggaggagaggacgggctataagcatgtggagggtgcacggggtggcgaggccaccaccagggggcgatttcagggccgcagcgcctagaggtggggggtcgcccgatggccgaaggctgtgtgtgagcctcgccctcaaaccgcctctattgtgctagagtagggggcgcaaagaagagagtggcgaccttcccctcaccccacccagtcggccccgcctttcaggaccccgccccacccccggctccgcctccaccacccccccccgccccgcctccagccgcggccccttcctctcgcagctggtgctgtggggccgcggagccgcgcgtcgctgtctctatggccccggatccgagcgcaaagctgggccaggcctttctcaccaccaagtcccccggtcctgcatgacggctctagaggggcgcgggccaggcctcgggctgcgcggggtgcaaaccggccaccacggagtcggggaccagcgcggggagggggccgcgtggcgaacagtgttccccaggatctgggtcacgtctcccggcgtccggcgggatcgaaggagagcttgtcctcgagctgcagcagtagagactgagaaaacggacctcagaaaaccaggactagctctactgtcgggggcagggtgaccccatcagtaacctacaacccctctagaacttcacaactccctctcaccatggagtttgcatttgatgcagaaaggcatgtgatccctccctccttctgacctcttagctggggattccatggccacacaaccctgtgactccatgtccccccgattccaggaccccccatggccccatgattccttgactcctatgaccttatgacccctgaccttccaagtgacttccttggactttgacccctgtgactgtgcttcccattccccgcccccacaacctgtgactctggctccctttgggggtcttgttagtctgggcctccccaggaagatgtgggggaggctctggcccctcctcctcagcatcctcacagcaactgcagtcccaggaccctcactgcggagaccgtctagagaactagatgccacccctcggatgaccataccctatgaagagctctctgggacccggcacttcaagggccaagcccagaactactcaacactgctgctggaggaggcctcagcaaggctgctggtgggagcccgaggtgccctgttctctctcagtgccaacgacataggagatggggctcacaaagagatccactgggaagcctccccagagatgcaaagcaaatgtcatcaaaaagggaaaaacaaccagacggagtgctttaaccatgtgcggttcctgcagcggctcaattctacccacctctatgcatgtgggactcacgccttccagcccctctgtgcagccattgatgctgaggccttcaccttgccaaccagcttcgaggaggggaaggagaagtgtccttatgacccagcccgtggcttcacaggcctcatcattgatggaggcctctacacagccactaggtatgaattccggagcattcctgacatccgccggagccgccacccacactccctgagaactgaggagacaccaatgcattggctcaatgatgcggagtttgtgttctccgtcctcgtgcgggagagcaaggccagtgcagtgggtgatgatgacaaggtgtactacttcttcacggagcgtgccactgaggagggctctggcagcttcactcagagccgcagcagtcaccgtgtggcccgtgtggctcgtgtctgcaagggagacctgggagggaagaagatcctgcagaagaagtggacttccttcctgaaagcccgtctcatctgccacattccactgtatgagacactgcgtggggtctgcagcctggatgctgaaacctcaagccgtacacacttctatgcagccttcacgctgagcacacagtggaagaccctggaggcctcagccatctgccgctatgacctggcagagatccaggctgtctttgcaggaccctatatggaataccaggatggttcccggcgctggggtcgctatgagggtggggtgcctgagccccggcctggctcgtgtatcacagattcattgcgcagccaaggctacaattcatcccaagacttgccatccctggtcctggactttgtaaagttgcacccactgatggctcggcccgttgtgcccacacgtggacggcccctgctgctcaagcgcaacatacgctacacacaccttacagggacacctgtcaccacgcctgctggacctacctatgacctgctctttctgggcacaggtgcttctgatcccaatccctgatccctgttggccctgatcactaatgcttctgaatccattaattcctgccatgactagtctggagttcccagtgtcctgagggtccactgctcctggctgagtccttgttctggacctcaggactcctgagctgttcgtattaggcctcttgcagggtgctgagagcagatcccatagttggggtctaactctctgctctttccataccagctgatggctggatccacaaggccgtagtcctgggctctgggatgcacattattgaagagacacaagtgttcagggagtcccagtctgtggaaaatctagtcatctctctattgcgcacagcctctatgtgggggctcctagcggagtcatccagctaccactctccagctgctcccgctaccgatcctgctatgactgcatcttggcccgagacccctactgtggctgggaccctggcacccatgcctgcgcagcagccaccaccatagccaacaggtcccaggacagcactgatacaggacatagagagaggaaatcgaggctgtgagagcagcagggatacagggccaccaccaccactgaagacccgctctgtgctccggggtgatgatgtcctcctgccctgtgaccagccatccaacctggcccgggccttgtggctactcaatgggagcatgggcctgagcgatgggcagggtggctaccgtgtgggcgtggacgggctgctggttacagatgcacagcctgagcacagtggcaactatggctgctatgccgaggaaaatggcctccgcaccctgctggcctcctatagtctcacagtccggccagccactcctgccccagctccaaaagcccctgccacacctggggcacagctggcacctgatgtgagactgctctatgtgctagccattgccgcgcttggtggcctctgcctcatcctggcctcctccctcctctatgtggcctgtctgcgggaaggcagacgagggcgccgacggaaatactcactgggtcgggccagccgggcaggaggatctgcggtgcaactgcagacagtctcaggccagtgtcctggagaggaagatgagggtgatgatgagggggctgggggcctggagggcagctgtctccagatcatccctggggagggagccccagccccaccacccccaccgcccccaccgccaccggctgagctgaccaatggcttggtggcactgcccagccggctgcggaggatgaatggcaatagctatgtgcttctgaggcagagcaacaatggagtaccagcagggccctgctccttcgccgaggaactcagccgcatcctggaaaaaaggaagcacacgcagctcgtggagcagctagatgagagctctgtctgagcccagcctcccagaacaaatgctcttccaagccagcctatctgtcccaggctgggccactgcctccctaacacagccaccctcccttcattacccccactccatacccttctcccaactttttgatgtccctgtagggctggccagtcaggcccagccaaagccccctcctcagtctccacagacccacatgtgagcagcccaggcccatcggtgctcctcagaggtaggtgctccctcaggatcaggtgccctgcagacccagagccagttcctatcccctaacctaaacacttataggtgaggactccatcctcctgttccattcatctgcccaaaccctttctctttctcccaggcagggctctgcaggtccatatgggctcaatgtcaccaccctctgcatggccctgtgtgctggatggtcctgaaaccagacaagacctctgccagccacctaagccctgcgtacattcacatgcacacatggaagaatgtttatcggctgggctgcagtgcccccaccctcaccttctcctggtgcattcttgtttcatccctgcttctggacttggggtaccctcccaattgccacatcctatctggtcctcttccccagccccatgtggtgacctctttgtcaagagcttgggaacgggccagcctggggaggtaagactgcatcactcccctcctctcccttcctgtgtggcccttgtgaatcagcctccccactctccttggtcattctcaagagtatgagagacagagctccaggcatgtcccatccccatgcacatgtggtaacacacacctgtatcacacatgtgcttacatttccactcacatgcacctctgagcctcccttgctgtcttggacctgtctgttgggtttagtccgtggacatttcagagggagatccccctcccatttaactgtcctcacaggcccttgcctaggatggatgaccaacactgcactcaatgagccagcctctcttttgggggaatcaagcatttgcttcctctagactacagcagggaaagggaggagaaatctgatgtctcaactggcacatgaagcccattcttggaactatgcaaagggcagaggctgggagtttggacgcttagctcctacccctgtcctacctcaccggggcactttcaggggccaggggcctctgaagtctctaggcctatatgggacaatcaattctgactgagctcccccattcccctcgggtgaggatgactgttatttttgtagctgagaacgtggaatcccacgggtttttactgcccttcacccaacctctcccacctccaccccacaatgaatgtatttattgtgagaatggctacacttctttaggaatgcccccacttacaaccaggtgggtggaacaggcatgtgacagagtggggagcctgggctcagctcctccccctgccgttggttaataaacaccctttttccccacaa

SEQ ID NO: 364609 - DNA, 14405 bp, Homo sapiens
cttgcaagttactttgcttttctaatgttggttttcttatctataaaatgcgttataaactactacatggagttgttgtaagggttaaaagacgttaatatataaagcccttagtgcagtgcctgtcacatattaagtgctcggtaaatgttaggtgttgtgatgatgatgacagtgacaactactgctgctagaaagcctagttaacttatcaggttgttgggcatctagaacccagtgaactttaaagagtagagaggataatcaaattagtgatgtttattctttgccatttttcctttcccattctgtgagtggtttggacagatcattcttgaagttctagctttatggaaatcctcaagtcttttatgcagtggaacactattctaatgccacactggtaactgggtaaaagcctagcacctgaaatatatctgttttcatgaaaattgtacgtcgtgatgtatttgggagacataatttgaccgatagtataacaaaatttgttatataccagggtacttaataagggttttctttgtgctgcttttagatataaactaaagactttttaaaaatatttttagagtaaactgttataacattctttccaattctcaggctagatgaactgcagaagcaactacaagaagacataaggcaaggccgaggcattaaatccccaatcagaattggagaagaagacagtacagatgatgaggatggcctcttagaagagcacaaggaatttctaaagaaattttcagttacaattgatgctattcctgatcatcatccaggtgaagaaatatttaatttcctcaattctggaaaaattttcaatcagtataccttggatttaagagactctggttttattggacaaagtgctgtagaaaaacttattcttaaatcgggaaaaacagatcagatttttttgacaacacaaggtttccttacgtctgcttatcactatgtccagtgtcctgtccctgtgttaaagtggctgtttcggatgatgtcagttcatacagactgtattgtgtcagtgcagattttaagtacattgatggaaataacaattagaaatgataccttcagtgactcaccagtttggccatggatcccatcattgtctgatgtagcagctgtgtttttcaatatggggattgattttagatctttgtttcccctggagaatcttcagccagactttaatgaagactatctagtttctgaaacacagacaacatcaagggggaaagaaagtgaagattcatcttataagccaattttttcaacacttcctgaaaccaacattttaaatgtggttaagtttctaggcttgtgtacatctatacatccagaaggttaccaggatcgtgaaataatgttgctgattttaatgttatttaaaatgagtttggaaaaacagctgaaacagattcctttagtagactttcaaagcctcctgataaacctgatgaaaaacatcagagattggaacacaaaggtgcctgaactctgtctgggcataaatgaactctccagtcatccccacaacctcctgtggttggtacagctggtccctaattggacatcacgtggaaggcaactgagacagtgcctcagtctagtgattatttcaaagcttttggatgagaaacacgaagatgttcctaatgccagtaatctgcaggtatcagtcctacatcgctatcttgtgcagatgaagccttctgatttgttaaagaaaatggtcttgaagaaaaaggctgaacaaccagatggcattattgatgacagtcttcatttagaacttgaaaagcaggcatattacctgacctacattcttcttcatttagtcggtgaagttagttgttctcattctttttcttctggacaacggaaacactttgtgctactctgtggggctttggaaaagcatgttaaatgtgatattagggaagatgcaagacttttttacagaactaaggtgaaagacttggtcgccaggatacatggaaaatggcaggaaataatccagaactgtcggcctactcaggggcagcttcatgacttctgggtaccagattcttaataggagttgcagcagcaaaaatatgaaccaagagaaattcaataagagcctttcatagaggagtagaaaggattattacagaatccaatgaatgccaagaaaatgtacagcaaatgtgccacttgaatatctagtatgaagctggtaatgaagaaattgccatttctgaagcagatatgaaatatgatctgcttaattgttaaggcaactgacctttcaaaagtgcagagtcttattaaaagaggggaggggtagaagcagaataatagtcatatgtctaacctgccccagttaactcctcttgttaaattataagccagttatcttttttagatagtatttttgtcacttggataatcacaggaaatatataagaaaagagcttggactaacttgagaagttggacatggaaagcaagaccaagttccagttgggtttaattttccctcttggttattttcggacacaaagggaatgcttaaaactgagtttagtaataaaaagcataaatctcttctgtaacttttataaaccacagggaggtttcaatccatgcattttccttcattactcaagattataaatctgtttttaaaatacatctaaacaaacagttgagaaacaaaagtttggcatgttgtcagatccccttaagaggaagaggttaagctgtaaagtagtggccctgttttgatgccagaacattcatatgctgtttgttctggatttcttttaaatgcatgtattttaaatactggttaaatcttagaatcttggctatatcttagaattctggctcttggtaaccatattacagaagtctatattgtaaaagcctaaagatctggacaagtttccaacaaccttgtttccatgagtatataattttggcagacacctgaattctttgggacactgtgtctgtgtatgtgtgtgtgtgtgtgtgtgtgtgtgtgcgcttgtatcttgaagttgttgcacttcaaaaccacagctgctgtaaattcttaaacactggagagccatcctttggtttaaatggtagagggttagtggaagtgcacacgttgtttttagcccaggggtagtaacaaactcttactagccaactagaaaattattttgttgacgagatgtcccttttaggagggtttgtttcctgaaagaatgccaactttttttgttgttctttcagtattggcttgagtgacctgttctcctgagtgctctagtgtctccagttgtgggggggaaagatgatggaggggaacagaaactggacttgatgtttgcggtttgagaggcaagaaaataaaataactttctacctctaaattgaggcttaggagtaaaaagcattttgtcctaaatttatcatttaaaatagcatcagtaacttttgagctcatgtcaatcaagcattggcagtcagagattttatagggaagactaagtaaatccagtttccaagaacctaaactgattgaggctccaagagtcagaccaacaaaagttttattctgtgttgtttactggtaagaatattattatcttgatactacctctcaagggtattgttacaaaatgccacttatggttaaagagatagatacaaagagttctatttgacagaagcttgaaactctggcatctatctgcccaacgatgggggctttcgttctgtaatttaatcctttgtagatacattatttgtgtgtaattttatacgtgttcatatttttctcattttgcattgtgtaaagtgtacaaaatctcaaagtataaaatactgcttatattgcttgtaatttacagtgtgtaaatattttctaattgtgtacattgatgggggggacaagtgggttattcaggtttttttttaatgacccttttgtattgcagtttcaacagataactgtccatcaaatttaaaaccactttgatacatttttatttaacagttccaataagaaaaaaatctctatttttaattatatttctcctttagaaaaaaaatacttcatggtccctctaaaataaatggccagacctcagtttaggcccttgtatttatgactctggtagaggtcttcagactccaggtcatagtccagtcagtatttgcatttgggttctcatgaaaactttgtgactctcttttagcacaagtagcccatggtttttcttccaaatcaagtattttacttctcccttgagtccccatgctttgtctccctcctgctgctattgcccggtgaatgggatggtagagagggagaaatgttcattgcacagagaatgtcaggccactttggggacttggcaaacgaagcttgcactgagtggtggtgtgtttggcaatattactgtgccaaaaatcaccttgtctaattttatggatatgtatggcaaacttattacccttcttgcaagctgcacattaaggtacttgtaagtgtttatgcttttgtgtgtaactgtttgccttttctaactgcttttcttgttactgaaaatataattctactagttttatcacattaagaggctctccatgcacaaaatgcattgatgtagccgtaaagtaacagcatttgtacattttctatctcctgatggcagtggtgcctttgtcaccttttggaaggtttgcattttgtttctgctttcaagcgcaaatagtagcttgctttcagcttcacaaaaatctcctcaaatgtaaaagatacaaaatggcgtgttatcatccaggcttagttggagtatttgcatttttatttttatcaaaacaaatataattggtggggactggccagtaataatgtgtggcgtctttaagccaagagtaatttttaaattaaaaatgaaaattttaagaggtagcccattaaacaagctactgagttggagaattaggggatgactgtggtggtttgtcgctaaggaggcaacagtagggtccaggcggcggggcacgtagagcagttagcatgatccatggttattccttactcatgaacagtgtcggcgcacctcattatctgtgcatttgtttttcctgggcagtcctgtcagccagttaatccaccagctcttaggaagtaaatacagatttttttctttccttttttttttttttaaagattttatactacatcttgttaaagtcctatgaatgtgtgtgtgtgtgtgctattaaaactgctttttctcagtttgaacatgtgtttggtaatatttgtttgggagttggggaggctaagttatctggaatgccctgttccctcagcccaccccagtcccctggcttttaaacatttcttcttgctttggattgtccagttttttagcttgatgtctcctgtttctggaaaacataaagccaccattgtacacagttcacttttatataacccagttaattgctgtatactttgcaatcaggaattcagtaatctcattcttacctcattcactatgttcattccaccattcattctaacaattgagtctcaactacatactaggcactctttttaggattcagtaaggatttgatggtgaacaacatagagaactcatgaatcttacctcctggtatccaggttaaaatactttctgttcttgggcaaagagaattagaaacaaatacccttaacctgactcccttgttcttgagcccaggaccaagaaagaagaagctgtacaatgcagaagcagggcttgagatcacctccaacctgccaagcagatagagatctgggtatgccaacttgggaggcagaggttgaaacctcataggaggaactttggagctcatagaaggccttggcattgtcagaggccttgagttccaaaaccatgccagtatttctgccttctgacaggctggctagaaagagactaaatgggagcatttttctctgacagtggggcggagggatgaggggatgacagcccaggaagaagcagagacattgccataagtacttactagagggcaggcagcacagctttatgcaagttaagggccttgaccttgccccaaggcctgacctcagatcccagattcatcatactagccttttgatctttgccaaattacttaaactcactgtttcctcatctgttgaataatggtgtctacctcagggtttgtgaggactaagcgagctaatgcatgaaaagtgcctagtacagtgcctggcatatagcaagaactcagcaaatgcttgctgctctaacgaggcgtttctctgatgacagatttgatcttaagcagacacctcagggtgtactgacatctgagcaaaccatatctccaaaaattatagttgtaagtgtgccctatttctttggataccgggagctggagcttctctgtccagctatctctgctgattttttttaattaaaattttcactttttaaaagccagcatgctaaagctgagaaattggtgatgggtggtggttttccagcatttgtgggaatgtcctgacactccctttcccttactaaccattccctaggctggagtcaagagagggcaaaccagaaggcccagctttgggtctgactccaagacgactggctgggaggaaaactaaacaggcttctgaggcacagtggaatagtgagacttccgcattgttgcactggtgacagcccctacagaagaagcacctcagctgtatatatagccaaaataaagaccacaccacctaaagggaaagtgctgggcaaaccagagatggagatggcaaagcaggaacagaaatgctgccacattgaacagtaagcaggacaacttgactaggccagagttctcttgcttcagggaacctgctcaagtttcaggaattcatacccacccccttcacctaggatccctgctacagtaagtaactgttctgtgcaaagtggagctaaactctggtgtgtaagtggctgacaatcactgctgaagacggccagcactaccctcagccactttcttacagcaaagttggggaaaatagactagcaaaaacaaaactcatacttttctgtgtgtgtgaagttctccagaaggtttccaaatggaatcctctcacagccaccctgcgaagcagccagggtagtgaccttatggatgagtgacagcctgttcaaagaatgacctgcctgtgtcccaggatgcagatttatggctgggttagggttaatttctttagttgatttccagttttcttttccactgtctgtcagtattcccccgttcttattttaccagctggatttgcagagagacatactgtcaatcaaaagggcttcctatgggcagctccattaattgcttttacatctgatactctcattaggtttagagattttactgggaggctagcagaaggaaatggattgtggtctgctatcaaaagtactgaagtaactgcccagtgatcattgaaatcacacattttgctcatttaacaatgtctgagtttgccatcagcacctcagaggagcaaagcttggttcataaagtgaagttgagtgatactgagcctaccacactggcctactcgccacctccagagctatctgaagtcagcactgcaggttctgtgaacatttgggaagctgtgcctcttagccccctgggcccctacagtttaattgctctcctatctgctactgaaggaccagcagtcttcctaccctgcctccactgttaccaccaacccactttttgataaggactgcagatttatctttcttagccctgccttgactggtcttcccacctcagacgtccttactcagtccatcatctctttcaggattttcttctgtggtctttttcaaactactagctgacttttcccttttatttcccactaggaacccctccccgcccccccccccccagccatttcatcaaatcaaactcactgccctctttcatgccccttccttagttccccaacacaagcctgtgcataagcttgaacatttctacctttgccaatggtatttccccttctggcttaccctgcttcctccttctcagacttttccagtcttgattgtcctctccataaacacaagaatgaacttcaaggcaagttacttaatgtcttagagcctgtttccccatccataaaatggggctataaattcctcaggatgggatgagggtacaaataaaaaatgaagcaggatattctttgtaaaagtgtgtgtacattttttattgtgtttctccccagctaccttccctctccccgccacacacatcctatttgcagagtgttgggggaggtggaactgtgatgtgggccctgctgtctagcagtctgcagtcacacacagccatccaaactacgagattgtatatgattcagtgccaaactgtgagctttggggaatccagaaagaaggatgaagcctttcccaagtttcctttagttaaatgtgccacttgaatcctgttctgactcctaggcacatgcaagagtcaatcacatatgttcctgtggcctttatcattttggtccatctcttgagcccacatgaatactgtcatggatggaggaggaaggaccaggctgggtcagggcctgaatgcaggttttgtttggactataggggctaagttcactttaataggctgtgacctattaaaggaggcaggaaccaagtttgcacagaaggaccatcctagttgagttaaaggagttggggagttgattgtgaggggtttcctagattgctgctgggtaaggtgattgaatctgggaaggatagggtacttgattgcctagaagggtgcactctaagttctggataagaatggtgcccaagatgagctggaggggaaggcaagtgtttgaatgacccagtccctgaggtgagcctaggttagggttaagatttggtgagtgaacaggtgcaaacgcttgtggcttatttatccagaaaaagcattttctgtgtgcctttcaggtcaggctgttactttatccccttcaggcctgaccccatctcccccacgcatagctcaagctgaacagcccctgaagctgggaatcaagcccctaccttgtgttcagagcttccctaacgtccagtcgccacctagggtagccttccctccacaccctaggccgagagcagaagcgggtggcaggagcacagggagtgaggtccaggttagaggacaggccagaaggccctccgagagggtcccccaaccccgcaacgccaggacaggtttgcacgtccccagcagtaggcaagtcaggggggtcctagggttacagcggaggagaggacgggctataagcatgtggagggtgcacggggtggcgaggccaccaccagggggcgatttcagggccgcagcgcctagaggtggggggtcgcccgatggccgaaggctgtgtgtgagcctcgccctcaaaccgcctctattgtgctagagtagggggcgcaaagaagagagtggcgaccttcccctcaccccacccagtcggccccgcctttcaggaccccgccccacccccggctccgcctccaccacccccccccgccccgcctccagccgcggccccttcctctcgcagctggtgctgtggggccgcggagccgcgcgtcgctgtctctatggccccggatccgagcgcaaagctgggccaggcctttctcaccaccaagtcccccggtcctgcatgacggctctagaggggcgcgggccaggcctcgggctgcgcggggtgcaaaccggccaccacggagtcggggaccagcgcggggagggggccgcgtggcgaacagtgttccccaggatctgggtcacgtctcccggcgtccggcgggatcgaaggagagcttgtcctcgagctgcagcagtagagactgagaaaacggacctcagaaaaccaggactagctctactgtcgggggcagggtgaccccatcagtaacctacaacccctctagaacttcacaactccctctcaccatggagtttgcatttgatgcagaaaggcatgtgatccctccctccttctgacctcttagctggggattccatggccacacaaccctgtgactccatgtccccccgattccaggaccccccatggccccatgattccttgactcctatgaccttatgacccctgaccttccaagtgacttccttggactttgacccctgtgactgtgcttcccattccccgcccccacaacctgtgactctggctccctttgggggtcttgttagtctgggcctccccaggaagatgtgggggaggctctggcccctcctcctcagcatcctcacagcaactgcagtcccaggaccctcactgcggagaccgtctagagaactagatgccacccctcggatgaccataccctatgaagagctctctgggacccggcacttcaagggccaagcccagaactactcaacactgctgctggaggaggcctcagcaaggctgctggtgggagcccgaggtgccctgttctctctcagtgccaacgacataggagatggggctcacaaagagatccactgggaagcctccccagagatgcaaagcaaatgtcatcaaaaagggaaaaacaaccagacggagtgctttaaccatgtgcggttcctgcagcggctcaattctacccacctctatgcatgtgggactcacgccttccagcccctctgtgcagccattgatgctgaggccttcaccttgccaaccagcttcgaggaggggaaggagaagtgtccttatgacccagcccgtggcttcacaggcctcatcattgatggaggcctctacacagccactaggtatgaattccggagcattcctgacatccgccggagccgccacccacactccctgagaactgaggagacaccaatgcattggctcaatgatgcggagtttgtgttctccgtcctcgtgcgggagagcaaggccagtgcagtgggtgatgatgacaaggtgtactacttcttcacggagcgtgccactgaggagggctctggcagcttcactcagagccgcagcagtcaccgtgtggcccgtgtggctcgtgtctgcaagggagacctgggagggaagaagatcctgcagaagaagtggacttccttcctgaaagcccgtctcatctgccacattccactgtatgagacactgcgtggggtctgcagcctggatgctgaaacctcaagccgtacacacttctatgcagccttcacgctgagcacacagtggaagaccctggaggcctcagccatctgccgctatgacctggcagagatccaggctgtctttgcaggaccctatatggaataccaggatggttcccggcgctggggtcgctatgagggtggggtgcctgagccccggcctggctcgtgtatcacagattcattgcgcagccaaggctacaattcatcccaagacttgccatccctggtcctggactttgtaaagttgcacccactgatggctcggcccgttgtgcccacacgtggacggcccctgctgctcaagcgcaacatacgctacacacaccttacagggacacctgtcaccacgcctgctggacctacctatgacctgctctttctgggcacagctgatggctggatccacaaggccgtagtcctgggctctgggatgcacattattgaagagacacaagtgttcagggagtcccagtctgtggaaaatctagtcatctctctattgcgcacagcctctatgtgggggctcctagcggagtcatccagctaccactctccagctgctcccgctaccgatcctgctatgactgcatcttggcccgagacccctactgtggctgggaccctggcacccatgcctgcgcagcagccaccaccatagccaacaggtcccaggacagcactgatacaggacatagagagaggaaatcgaggctgtgagagcagcagggatacagggccaccaccaccactgaagacccgctctgtgctccggggtgatgatgtcctcctgccctgtgaccagccatccaacctggcccgggccttgtggctactcaatgggagcatgggcctgagcgatgggcagggtggctaccgtgtgggcgtggacgggctgctggttacagatgcacagcctgagcacagtggcaactatggctgctatgccgaggaaaatggcctccgcaccctgctggcctcctatagtctcacagtccggccagccactcctgccccagctccaaaagcccctgccacacctggggcacagctggcacctgatgtgagactgctctatgtgctagccattgccgcgcttggtggcctctgcctcatcctggcctcctccctcctctatgtggcctgtctgcgggaaggcagacgagggcgccgacggaaatactcactgggtcgggccagccgggcaggaggatctgcggtgcaactgcagacagtctcaggccagtgtcctggagaggaagatgagggtgatgatgagggggctgggggcctggagggcagctgtctccagatcatccctggggagggagccccagccccaccacccccaccgcccccaccgccaccggctgagctgaccaatggcttggtggcactgcccagccggctgcggaggatgaatggcaatagctatgtgcttctgaggcagagcaacaatggagtaccagcagggccctgctccttcgccgaggaactcagccgcatcctggaaaaaaggaagcacacgcagctcgtggagcagctagatgagagctctgtctgagcccagcctcccagaacaaatgctcttccaagccagcctatctgtcccaggctgggccactgcctccctaacacagccaccctcccttcattacccccactccatacccttctcccaactttttgatgtccctgtagggctggccagtcaggcccagccaaagccccctcctcagtctccacagacccacatgtgagcagcccaggcccatcggtgctcctcagaggtaggtgctccctcaggatcaggtgccctgcagacccagagccagttcctatcccctaacctaaacacttataggtgaggactccatcctcctgttccattcatctgcccaaaccctttctctttctcccaggcagggctctgcaggtccatatgggctcaatgtcaccaccctctgcatggccctgtgtgctggatggtcctgaaaccagacaagacctctgccagccacctaagccctgcgtacattcacatgcacacatggaagaatgtttatcggctgggctgcagtgcccccaccctcaccttctcctggtgcattcttgtttcatccctgcttctggacttggggtaccctcccaattgccacatcctatctggtcctcttccccagccccatgtggtgacctctttgtcaagagcttgggaacgggccagcctggggaggtaagactgcatcactcccctcctctcccttcctgtgtggcccttgtgaatcagcctccccactctccttggtcattctcaagagtatgagagacagagctccaggcatgtcccatccccatgcacatgtggtaacacacacctgtatcacacatgtgcttacatttccactcacatgcacctctgagcctcccttgctgtcttggacctgtctgttgggtttagtccgtggacatttcagagggagatccccctcccatttaactgtcctcacaggcccttgcctaggatggatgaccaacactgcactcaatgagccagcctctcttttgggggaatcaagcatttgcttcctctagactacagcagggaaagggaggagaaatctgatgtctcaactggcacatgaagcccattcttggaactatgcaaagggcagaggctgggagtttggacgcttagctcctacccctgtcctacctcaccggggcactttcaggggccaggggcctctgaagtctctaggcctatatgggacaatcaattctgactgagctcccccattcccctcgggtgaggatgactgttatttttgtagctgagaacgtggaatcccacgggtttttactgcccttcacccaacctctcccacctccaccccacaatgaatgtatttattgtgagaatggctacacttctttaggaatgcccccacttacaaccaggtgggtggaacaggcatgtgacagagtggggagcctgggctcagctcctccccctgccgttggttaataaacaccctttttccccacaa

SEQ ID NO: 364610 - DNA, 13541 bp, Homo sapiens
gagccatcttctacatagctctctaacaccaacagcaatgaggatagtaccatataaaaagtagcttgttcaagagaaaactgatgcataatgatagaaatcattagtgtttgccttgagtcagggatagcagattgacttggatttggcataaagagacttttgaggggaatggaaatgttctatttcttgatttggatggtggttacattagtatatatgattatcaaaacttaaaatgggtacattccttttattgtatgtaaattatacctcgataaaacatagtttttaaaaagtagcccagaatttcttaaagtgagttatatattttgtgcctaacttcacattgctttactcacttctcaatagttctgaaacacagacaacatcaagggggaaagaaagtgaagattcatcttataagccaattttttcaacacttcctgaaaccaacattttaaatgtggttaagtttctaggcttgtgtacatctatacatccagaaggttaccaggatcgtgaaataatgttgctgattttaatgttatttaaaatgagtttggaaaaacagctgaaacagattcctttagtagactttcaaagcctcctgataaacctgatgaaaaacatcagagattggaacacaaaggtgcctgaactctgtctgggcataaatgaactctccagtcatccccacaacctcctgtggttggtacagctggtccctaattggacatcacgtggaaggcaactgagacagtgcctcagtctagtgattatttcaaagcttttggatgagaaacacgaagatgttcctaatgccagtaatctgcaggtatcagtcctacatcgctatcttgtgcagatgaagccttctgatttgttaaagaaaatggtcttgaagaaaaaggctgaacaaccagatggcattattgatgacagtcttcatttagaacttgaaaagcaggcatattacctgacctacattcttcttcatttagtcggtgaagttagttgttctcattctttttcttctggacaacggaaacactttgtgctactctgtggggctttggaaaagcatgttaaatgtgatattagggaagatgcaagacttttttacagaactaaggtgaaagacttggtcgccaggatacatggaaaatggcaggaaataatccagaactgtcggcctactcaggggcagcttcatgacttctgggtaccagattcttaataggagttgcagcagcaaaaatatgaaccaagagaaattcaataagagcctttcatagaggagtagaaaggattattacagaatccaatgaatgccaagaaaatgtacagcaaatgtgccacttgaatatctagtatgaagctggtaatgaagaaattgccatttctgaagcagatatgaaatatgatctgcttaattgttaaggcaactgacctttcaaaagtgcagagtcttattaaaagaggggaggggtagaagcagaataatagtcatatgtctaacctgccccagttaactcctcttgttaaattataagccagttatcttttttagatagtatttttgtcacttggataatcacaggaaatatataagaaaagagcttggactaacttgagaagttggacatggaaagcaagaccaagttccagttgggtttaattttccctcttggttattttcggacacaaagggaatgcttaaaactgagtttagtaataaaaagcataaatctcttctgtaacttttataaaccacagggaggtttcaatccatgcattttccttcattactcaagattataaatctgtttttaaaatacatctaaacaaacagttgagaaacaaaagtttggcatgttgtcagatccccttaagaggaagaggttaagctgtaaagtagtggccctgttttgatgccagaacattcatatgctgtttgttctggatttcttttaaatgcatgtattttaaatactggttaaatcttagaatcttggctatatcttagaattctggctcttggtaaccatattacagaagtctatattgtaaaagcctaaagatctggacaagtttccaacaaccttgtttccatgagtatataattttggcagacacctgaattctttgggacactgtgtctgtgtatgtgtgtgtgtgtgtgtgtgtgtgtgtgcgcttgtatcttgaagttgttgcacttcaaaaccacagctgctgtaaattcttaaacactggagagccatcctttggtttaaatggtagagggttagtggaagtgcacacgttgtttttagcccaggggtagtaacaaactcttactagccaactagaaaattattttgttgacgagatgtcccttttaggagggtttgtttcctgaaagaatgccaactttttttgttgttctttcagtattggcttgagtgacctgttctcctgagtgctctagtgtctccagttgtgggggggaaagatgatggaggggaacagaaactggacttgatgtttgcggtttgagaggcaagaaaataaaataactttctacctctaaattgaggcttaggagtaaaaagcattttgtcctaaatttatcatttaaaatagcatcagtaacttttgagctcatgtcaatcaagcattggcagtcagagattttatagggaagactaagtaaatccagtttccaagaacctaaactgattgaggctccaagagtcagaccaacaaaagttttattctgtgttgtttactggtaagaatattattatcttgatactacctctcaagggtattgttacaaaatgccacttatggttaaagagatagatacaaagagttctatttgacagaagcttgaaactctggcatctatctgcccaacgatgggggctttcgttctgtaatttaatcctttgtagatacattatttgtgtgtaattttatacgtgttcatatttttctcattttgcattgtgtaaagtgtacaaaatctcaaagtataaaatactgcttatattgcttgtaatttacagtgtgtaaatattttctaattgtgtacattgatgggggggacaagtgggttattcaggtttttttttaatgacccttttgtattgcagtttcaacagataactgtccatcaaatttaaaaccactttgatacatttttatttaacagttccaataagaaaaaaatctctatttttaattatatttctcctttagaaaaaaaatacttcatggtccctctaaaataaatggccagacctcagtttaggcccttgtatttatgactctggtagaggtcttcagactccaggtcatagtccagtcagtatttgcatttgggttctcatgaaaactttgtgactctcttttagcacaagtagcccatggtttttcttccaaatcaagtattttacttctcccttgagtccccatgctttgtctccctcctgctgctattgcccggtgaatgggatggtagagagggagaaatgttcattgcacagagaatgtcaggccactttggggacttggcaaacgaagcttgcactgagtggtggtgtgtttggcaatattactgtgccaaaaatcaccttgtctaattttatggatatgtatggcaaacttattacccttcttgcaagctgcacattaaggtacttgtaagtgtttatgcttttgtgtgtaactgtttgccttttctaactgcttttcttgttactgaaaatataattctactagttttatcacattaagaggctctccatgcacaaaatgcattgatgtagccgtaaagtaacagcatttgtacattttctatctcctgatggcagtggtgcctttgtcaccttttggaaggtttgcattttgtttctgctttcaagcgcaaatagtagcttgctttcagcttcacaaaaatctcctcaaatgtaaaagatacaaaatggcgtgttatcatccaggcttagttggagtatttgcatttttatttttatcaaaacaaatataattggtggggactggccagtaataatgtgtggcgtctttaagccaagagtaatttttaaattaaaaatgaaaattttaagaggtagcccattaaacaagctactgagttggagaattaggggatgactgtggtggtttgtcgctaaggaggcaacagtagggtccaggcggcggggcacgtagagcagttagcatgatccatggttattccttactcatgaacagtgtcggcgcacctcattatctgtgcatttgtttttcctgggcagtcctgtcagccagttaatccaccagctcttaggaagtaaatacagatttttttctttccttttttttttttttaaagattttatactacatcttgttaaagtcctatgaatgtgtgtgtgtgtgtgctattaaaactgctttttctcagtttgaacatgtgtttggtaatatttgtttgggagttggggaggctaagttatctggaatgccctgttccctcagcccaccccagtcccctggcttttaaacatttcttcttgctttggattgtccagttttttagcttgatgtctcctgtttctggaaaacataaagccaccattgtacacagttcacttttatataacccagttaattgctgtatactttgcaatcaggaattcagtaatctcattcttacctcattcactatgttcattccaccattcattctaacaattgagtctcaactacatactaggcactctttttaggattcagtaaggatttgatggtgaacaacatagagaactcatgaatcttacctcctggtatccaggttaaaatactttctgttcttgggcaaagagaattagaaacaaatacccttaacctgactcccttgttcttgagcccaggaccaagaaagaagaagctgtacaatgcagaagcagggcttgagatcacctccaacctgccaagcagatagagatctgggtatgccaacttgggaggcagaggttgaaacctcataggaggaactttggagctcatagaaggccttggcattgtcagaggccttgagttccaaaaccatgccagtatttctgccttctgacaggctggctagaaagagactaaatgggagcatttttctctgacagtggggcggagggatgaggggatgacagcccaggaagaagcagagacattgccataagtacttactagagggcaggcagcacagctttatgcaagttaagggccttgaccttgccccaaggcctgacctcagatcccagattcatcatactagccttttgatctttgccaaattacttaaactcactgtttcctcatctgttgaataatggtgtctacctcagggtttgtgaggactaagcgagctaatgcatgaaaagtgcctagtacagtgcctggcatatagcaagaactcagcaaatgcttgctgctctaacgaggcgtttctctgatgacagatttgatcttaagcagacacctcagggtgtactgacatctgagcaaaccatatctccaaaaattatagttgtaagtgtgccctatttctttggataccgggagctggagcttctctgtccagctatctctgctgattttttttaattaaaattttcactttttaaaagccagcatgctaaagctgagaaattggtgatgggtggtggttttccagcatttgtgggaatgtcctgacactccctttcccttactaaccattccctaggctggagtcaagagagggcaaaccagaaggcccagctttgggtctgactccaagacgactggctgggaggaaaactaaacaggcttctgaggcacagtggaatagtgagacttccgcattgttgcactggtgacagcccctacagaagaagcacctcagctgtatatatagccaaaataaagaccacaccacctaaagggaaagtgctgggcaaaccagagatggagatggcaaagcaggaacagaaatgctgccacattgaacagtaagcaggacaacttgactaggccagagttctcttgcttcagggaacctgctcaagtttcaggaattcatacccacccccttcacctaggatccctgctacagtaagtaactgttctgtgcaaagtggagctaaactctggtgtgtaagtggctgacaatcactgctgaagacggccagcactaccctcagccactttcttacagcaaagttggggaaaatagactagcaaaaacaaaactcatacttttctgtgtgtgtgaagttctccagaaggtttccaaatggaatcctctcacagccaccctgcgaagcagccagggtagtgaccttatggatgagtgacagcctgttcaaagaatgacctgcctgtgtcccaggatgcagatttatggctgggttagggttaatttctttagttgatttccagttttcttttccactgtctgtcagtattcccccgttcttattttaccagctggatttgcagagagacatactgtcaatcaaaagggcttcctatgggcagctccattaattgcttttacatctgatactctcattaggtttagagattttactgggaggctagcagaaggaaatggattgtggtctgctatcaaaagtactgaagtaactgcccagtgatcattgaaatcacacattttgctcatttaacaatgtctgagtttgccatcagcacctcagaggagcaaagcttggttcataaagtgaagttgagtgatactgagcctaccacactggcctactcgccacctccagagctatctgaagtcagcactgcaggttctgtgaacatttgggaagctgtgcctcttagccccctgggcccctacagtttaattgctctcctatctgctactgaaggaccagcagtcttcctaccctgcctccactgttaccaccaacccactttttgataaggactgcagatttatctttcttagccctgccttgactggtcttcccacctcagacgtccttactcagtccatcatctctttcaggattttcttctgtggtctttttcaaactactagctgacttttcccttttatttcccactaggaacccctccccgcccccccccccccagccatttcatcaaatcaaactcactgccctctttcatgccccttccttagttccccaacacaagcctgtgcataagcttgaacatttctacctttgccaatggtatttccccttctggcttaccctgcttcctccttctcagacttttccagtcttgattgtcctctccataaacacaagaatgaacttcaaggcaagttacttaatgtcttagagcctgtttccccatccataaaatggggctataaattcctcaggatgggatgagggtacaaataaaaaatgaagcaggatattctttgtaaaagtgtgtgtacattttttattgtgtttctccccagctaccttccctctccccgccacacacatcctatttgcagagtgttgggggaggtggaactgtgatgtgggccctgctgtctagcagtctgcagtcacacacagccatccaaactacgagattgtatatgattcagtgccaaactgtgagctttggggaatccagaaagaaggatgaagcctttcccaagtttcctttagttaaatgtgccacttgaatcctgttctgactcctaggcacatgcaagagtcaatcacatatgttcctgtggcctttatcattttggtccatctcttgagcccacatgaatactgtcatggatggaggaggaaggaccaggctgggtcagggcctgaatgcaggttttgtttggactataggggctaagttcactttaataggctgtgacctattaaaggaggcaggaaccaagtttgcacagaaggaccatcctagttgagttaaaggagttggggagttgattgtgaggggtttcctagattgctgctgggtaaggtgattgaatctgggaaggatagggtacttgattgcctagaagggtgcactctaagttctggataagaatggtgcccaagatgagctggaggggaaggcaagtgtttgaatgacccagtccctgaggtgagcctaggttagggttaagatttggtgagtgaacaggtgcaaacgcttgtggcttatttatccagaaaaagcattttctgtgtgcctttcaggtcaggctgttactttatccccttcaggcctgaccccatctcccccacgcatagctcaagctgaacagcccctgaagctgggaatcaagcccctaccttgtgttcagagcttccctaacgtccagtcgccacctagggtagccttccctccacaccctaggccgagagcagaagcgggtggcaggagcacagggagtgaggtccaggttagaggacaggccagaaggccctccgagagggtcccccaaccccgcaacgccaggacaggtttgcacgtccccagcagtaggcaagtcaggggggtcctagggttacagcggaggagaggacgggctataagcatgtggagggtgcacggggtggcgaggccaccaccagggggcgatttcagggccgcagcgcctagaggtggggggtcgcccgatggccgaaggctgtgtgtgagcctcgccctcaaaccgcctctattgtgctagagtagggggcgcaaagaagagagtggcgaccttcccctcaccccacccagtcggccccgcctttcaggaccccgccccacccccggctccgcctccaccacccccccccgccccgcctccagccgcggccccttcctctcgcagctggtgctgtggggccgcggagccgcgcgtcgctgtctctatggccccggatccgagcgcaaagctgggccaggcctttctcaccaccaagtcccccggtcctgcatgacggctctagaggggcgcgggccaggcctcgggctgcgcggggtgcaaaccggccaccacggagtcggggaccagcgcggggagggggccgcgtggcgaacagtgttccccaggatctgggtcacgtctcccggcgtccggcgggatcgaaggagagcttgtcctcgagctgcagcagtagagactgagaaaacggacctcagaaaaccaggactagctctactgtcgggggcagggtgaccccatcagtaacctacaacccctctagaacttcacaactccctctcaccatggagtttgcatttgatgcagaaaggcatgtgatccctccctccttctgacctcttagctggggattccatggccacacaaccctgtgactccatgtccccccgattccaggaccccccatggccccatgattccttgactcctatgaccttatgacccctgaccttccaagtgacttccttggactttgacccctgtgactgtgcttcccattccccgcccccacaacctgtgactctggctccctttgggggtcttgttagtctgggcctccccaggaagatgtgggggaggctctggcccctcctcctcagcatcctcacagcaactgcagtcccaggaccctcactgcggagaccgtctagagaactagatgccacccctcggatgaccataccctatgaagagctctctgggacccggcacttcaagggccaagcccagaactactcaacactgctgctggaggaggcctcagcaaggctgctggtgggagcccgaggtgccctgttctctctcagtgccaacgacataggagatggggctcacaaagagatccactgggaagcctccccagagatgcaaagcaaatgtcatcaaaaagggaaaaacaaccagacggagtgctttaaccatgtgcggttcctgcagcggctcaattctacccacctctatgcatgtgggactcacgccttccagcccctctgtgcagccattgatgctgaggccttcaccttgccaaccagcttcgaggaggggaaggagaagtgtccttatgacccagcccgtggcttcacaggcctcatcattgatggaggcctctacacagccactaggtatgaattccggagcattcctgacatccgccggagccgccacccacactccctgagaactgaggagacaccaatgcattggctcaatgatgcggagtttgtgttctccgtcctcgtgcgggagagcaaggccagtgcagtgggtgatgatgacaaggtgtactacttcttcacggagcgtgccactgaggagggctctggcagcttcactcagagccgcagcagtcaccgtgtggcccgtgtggctcgtgtctgcaagggagacctgggagggaagaagatcctgcagaagaagtggacttccttcctgaaagcccgtctcatctgccacattccactgtatgagacactgcgtggggtctgcagcctggatgctgaaacctcaagccgtacacacttctatgcagccttcacgctgagcacacagtggaagaccctggaggcctcagccatctgccgctatgacctggcagagatccaggctgtctttgcaggaccctatatggaataccaggatggttcccggcgctggggtcgctatgagggtggggtgcctgagccccggcctggctcgtgtatcacagattcattgcgcagccaaggctacaattcatcccaagacttgccatccctggtcctggactttgtaaagttgcacccactgatggctcggcccgttgtgcccacacgtggacggcccctgctgctcaagcgcaacatacgctacacacaccttacagggacacctgtcaccacgcctgctggacctacctatgacctgctctttctgggcacagctgatggctggatccacaaggccgtagtcctgggctctgggatgcacattattgaagagacacaagtgttcagggagtcccagtctgtggaaaatctagtcatctctctattgcgcacagcctctatgtgggggctcctagcggagtcatccagctaccactctccagctgctcccgctaccgatcctgctatgactgcatcttggcccgagacccctactgtggctgggaccctggcacccatgcctgcgcagcagccaccaccatagccaacaggtcccaggacagcactgatacaggacatagagagaggaaatcgaggctgtgagagcagcagggatacagggccaccaccaccactgaagacccgctctgtgctccggggtgatgatgtcctcctgccctgtgaccagccatccaacctggcccgggccttgtggctactcaatgggagcatgggcctgagcgatgggcagggtggctaccgtgtgggcgtggacgggctgctggttacagatgcacagcctgagcacagtggcaactatggctgctatgccgaggaaaatggcctccgcaccctgctggcctcctatagtctcacagtccggccagccactcctgccccagctccaaaagcccctgccacacctggggcacagctggcacctgatgtgagactgctctatgtgctagccattgccgcgcttggtggcctctgcctcatcctggcctcctccctcctctatgtggcctgtctgcgggaaggcagacgagggcgccgacggaaatactcactgggtcgggccagccgggcaggaggatctgcggtgcaactgcagacagtctcaggccagtgtcctggagaggaagatgagggtgatgatgagggggctgggggcctggagggcagctgtctccagatcatccctggggagggagccccagccccaccacccccaccgcccccaccgccaccggctgagctgaccaatggcttggtggcactgcccagccggctgcggaggatgaatggcaatagctatgtgcttctgaggcagagcaacaatggagtaccagcagggccctgctccttcgccgaggaactcagccgcatcctggaaaaaaggaagcacacgcagctcgtggagcagctagatgagagctctgtctgagcccagcctcccagaacaaatgctcttccaagccagcctatctgtcccaggctgggccactgcctccctaacacagccaccctcccttcattacccccactccatacccttctcccaactttttgatgtccctgtagggctggccagtcaggcccagccaaagccccctcctcagtctccacagacccacatgtgagcagcccaggcccatcggtgctcctcagaggtaggtgctccctcaggatcaggtgccctgcagacccagagccagttcctatcccctaacctaaacacttataggtgaggactccatcctcctgttccattcatctgcccaaaccctttctctttctcccaggcagggctctgcaggtccatatgggctcaatgtcaccaccctctgcatggccctgtgtgctggatggtcctgaaaccagacaagacctctgccagccacctaagccctgcgtacattcacatgcacacatggaagaatgtttatcggctgggctgcagtgcccccaccctcaccttctcctggtgcattcttgtttcatccctgcttctggacttggggtaccctcccaattgccacatcctatctggtcctcttccccagccccatgtggtgacctctttgtcaagagcttgggaacgggccagcctggggaggtaagactgcatcactcccctcctctcccttcctgtgtggcccttgtgaatcagcctccccactctccttggtcattctcaagagtatgagagacagagctccaggcatgtcccatccccatgcacatgtggtaacacacacctgtatcacacatgtgcttacatttccactcacatgcacctctgagcctcccttgctgtcttggacctgtctgttgggtttagtccgtggacatttcagagggagatccccctcccatttaactgtcctcacaggcccttgcctaggatggatgaccaacactgcactcaatgagccagcctctcttttgggggaatcaagcatttgcttcctctagactacagcagggaaagggaggagaaatctgatgtctcaactggcacatgaagcccattcttggaactatgcaaagggcagaggctgggagtttggacgcttagctcctacccctgtcctacctcaccggggcactttcaggggccaggggcctctgaagtctctaggcctatatgggacaatcaattctgactgagctcccccattcccctcgggtgaggatgactgttatttttgtagctgagaacgtggaatcccacgggtttttactgcccttcacccaacctctcccacctccaccccacaatgaatgtatttattgtgagaatggctacacttctttaggaatgcccccacttacaaccaggtgggtggaacaggcatgtgacagagtggggagcctgggctcagctcctccccctgccgttggttaataaacaccctttttccccacaa

SEQ ID NO: 364611 - DNA, 13016 bp, Homo sapiens
gcacggtggtgcatgcctgtaatcctagctaatcaggaggctgagactggaggagcacttgagctggggagttcaagggtgcagtgagctataattgtgccactgcactccagcctggcaccagagccagaccccatttctttaaaaaatttttttctttttttttttttaaaaggctagccgttgtctgaatattttgttagcgagtatgttaaaggaaggactctttaaatttctgagtactatattacccagttagagctctggggttaattttcattaatgcgagttaatgcatagcaaaacaacttttgttacagtgtgtattttttaaactagtaatcttattgtcatggaagcagctttcactgatacaactactgttacgttgaatagttaatatcagtcattgctaacaggaataatagatttttaaatgatttagttgttctagctgcataatttctttgttaatttgtaatgcttcagaattgttttcatcccttgcatttgttttgcacagaaacactttgtgctactctgtggggctttggaaaagcatgttaaatgtgatattagggaagatgcaagacttttttacagaactaaggtgaaagacttggtcgccaggatacatggaaaatggcaggaaataatccagaactgtcggcctactcaggggcagcttcatgacttctgggtaccagattcttaataggagttgcagcagcaaaaatatgaaccaagagaaattcaataagagcctttcatagaggagtagaaaggattattacagaatccaatgaatgccaagaaaatgtacagcaaatgtgccacttgaatatctagtatgaagctggtaatgaagaaattgccatttctgaagcagatatgaaatatgatctgcttaattgttaaggcaactgacctttcaaaagtgcagagtcttattaaaagaggggaggggtagaagcagaataatagtcatatgtctaacctgccccagttaactcctcttgttaaattataagccagttatcttttttagatagtatttttgtcacttggataatcacaggaaatatataagaaaagagcttggactaacttgagaagttggacatggaaagcaagaccaagttccagttgggtttaattttccctcttggttattttcggacacaaagggaatgcttaaaactgagtttagtaataaaaagcataaatctcttctgtaacttttataaaccacagggaggtttcaatccatgcattttccttcattactcaagattataaatctgtttttaaaatacatctaaacaaacagttgagaaacaaaagtttggcatgttgtcagatccccttaagaggaagaggttaagctgtaaagtagtggccctgttttgatgccagaacattcatatgctgtttgttctggatttcttttaaatgcatgtattttaaatactggttaaatcttagaatcttggctatatcttagaattctggctcttggtaaccatattacagaagtctatattgtaaaagcctaaagatctggacaagtttccaacaaccttgtttccatgagtatataattttggcagacacctgaattctttgggacactgtgtctgtgtatgtgtgtgtgtgtgtgtgtgtgtgtgtgcgcttgtatcttgaagttgttgcacttcaaaaccacagctgctgtaaattcttaaacactggagagccatcctttggtttaaatggtagagggttagtggaagtgcacacgttgtttttagcccaggggtagtaacaaactcttactagccaactagaaaattattttgttgacgagatgtcccttttaggagggtttgtttcctgaaagaatgccaactttttttgttgttctttcagtattggcttgagtgacctgttctcctgagtgctctagtgtctccagttgtgggggggaaagatgatggaggggaacagaaactggacttgatgtttgcggtttgagaggcaagaaaataaaataactttctacctctaaattgaggcttaggagtaaaaagcattttgtcctaaatttatcatttaaaatagcatcagtaacttttgagctcatgtcaatcaagcattggcagtcagagattttatagggaagactaagtaaatccagtttccaagaacctaaactgattgaggctccaagagtcagaccaacaaaagttttattctgtgttgtttactggtaagaatattattatcttgatactacctctcaagggtattgttacaaaatgccacttatggttaaagagatagatacaaagagttctatttgacagaagcttgaaactctggcatctatctgcccaacgatgggggctttcgttctgtaatttaatcctttgtagatacattatttgtgtgtaattttatacgtgttcatatttttctcattttgcattgtgtaaagtgtacaaaatctcaaagtataaaatactgcttatattgcttgtaatttacagtgtgtaaatattttctaattgtgtacattgatgggggggacaagtgggttattcaggtttttttttaatgacccttttgtattgcagtttcaacagataactgtccatcaaatttaaaaccactttgatacatttttatttaacagttccaataagaaaaaaatctctatttttaattatatttctcctttagaaaaaaaatacttcatggtccctctaaaataaatggccagacctcagtttaggcccttgtatttatgactctggtagaggtcttcagactccaggtcatagtccagtcagtatttgcatttgggttctcatgaaaactttgtgactctcttttagcacaagtagcccatggtttttcttccaaatcaagtattttacttctcccttgagtccccatgctttgtctccctcctgctgctattgcccggtgaatgggatggtagagagggagaaatgttcattgcacagagaatgtcaggccactttggggacttggcaaacgaagcttgcactgagtggtggtgtgtttggcaatattactgtgccaaaaatcaccttgtctaattttatggatatgtatggcaaacttattacccttcttgcaagctgcacattaaggtacttgtaagtgtttatgcttttgtgtgtaactgtttgccttttctaactgcttttcttgttactgaaaatataattctactagttttatcacattaagaggctctccatgcacaaaatgcattgatgtagccgtaaagtaacagcatttgtacattttctatctcctgatggcagtggtgcctttgtcaccttttggaaggtttgcattttgtttctgctttcaagcgcaaatagtagcttgctttcagcttcacaaaaatctcctcaaatgtaaaagatacaaaatggcgtgttatcatccaggcttagttggagtatttgcatttttatttttatcaaaacaaatataattggtggggactggccagtaataatgtgtggcgtctttaagccaagagtaatttttaaattaaaaatgaaaattttaagaggtagcccattaaacaagctactgagttggagaattaggggatgactgtggtggtttgtcgctaaggaggcaacagtagggtccaggcggcggggcacgtagagcagttagcatgatccatggttattccttactcatgaacagtgtcggcgcacctcattatctgtgcatttgtttttcctgggcagtcctgtcagccagttaatccaccagctcttaggaagtaaatacagatttttttctttccttttttttttttttaaagattttatactacatcttgttaaagtcctatgaatgtgtgtgtgtgtgtgctattaaaactgctttttctcagtttgaacatgtgtttggtaatatttgtttgggagttggggaggctaagttatctggaatgccctgttccctcagcccaccccagtcccctggcttttaaacatttcttcttgctttggattgtccagttttttagcttgatgtctcctgtttctggaaaacataaagccaccattgtacacagttcacttttatataacccagttaattgctgtatactttgcaatcaggaattcagtaatctcattcttacctcattcactatgttcattccaccattcattctaacaattgagtctcaactacatactaggcactctttttaggattcagtaaggatttgatggtgaacaacatagagaactcatgaatcttacctcctggtatccaggttaaaatactttctgttcttgggcaaagagaattagaaacaaatacccttaacctgactcccttgttcttgagcccaggaccaagaaagaagaagctgtacaatgcagaagcagggcttgagatcacctccaacctgccaagcagatagagatctgggtatgccaacttgggaggcagaggttgaaacctcataggaggaactttggagctcatagaaggccttggcattgtcagaggccttgagttccaaaaccatgccagtatttctgccttctgacaggctggctagaaagagactaaatgggagcatttttctctgacagtggggcggagggatgaggggatgacagcccaggaagaagcagagacattgccataagtacttactagagggcaggcagcacagctttatgcaagttaagggccttgaccttgccccaaggcctgacctcagatcccagattcatcatactagccttttgatctttgccaaattacttaaactcactgtttcctcatctgttgaataatggtgtctacctcagggtttgtgaggactaagcgagctaatgcatgaaaagtgcctagtacagtgcctggcatatagcaagaactcagcaaatgcttgctgctctaacgaggcgtttctctgatgacagatttgatcttaagcagacacctcagggtgtactgacatctgagcaaaccatatctccaaaaattatagttgtaagtgtgccctatttctttggataccgggagctggagcttctctgtccagctatctctgctgattttttttaattaaaattttcactttttaaaagccagcatgctaaagctgagaaattggtgatgggtggtggttttccagcatttgtgggaatgtcctgacactccctttcccttactaaccattccctaggctggagtcaagagagggcaaaccagaaggcccagctttgggtctgactccaagacgactggctgggaggaaaactaaacaggcttctgaggcacagtggaatagtgagacttccgcattgttgcactggtgacagcccctacagaagaagcacctcagctgtatatatagccaaaataaagaccacaccacctaaagggaaagtgctgggcaaaccagagatggagatggcaaagcaggaacagaaatgctgccacattgaacagtaagcaggacaacttgactaggccagagttctcttgcttcagggaacctgctcaagtttcaggaattcatacccacccccttcacctaggatccctgctacagtaagtaactgttctgtgcaaagtggagctaaactctggtgtgtaagtggctgacaatcactgctgaagacggccagcactaccctcagccactttcttacagcaaagttggggaaaatagactagcaaaaacaaaactcatacttttctgtgtgtgtgaagttctccagaaggtttccaaatggaatcctctcacagccaccctgcgaagcagccagggtagtgaccttatggatgagtgacagcctgttcaaagaatgacctgcctgtgtcccaggatgcagatttatggctgggttagggttaatttctttagttgatttccagttttcttttccactgtctgtcagtattcccccgttcttattttaccagctggatttgcagagagacatactgtcaatcaaaagggcttcctatgggcagctccattaattgcttttacatctgatactctcattaggtttagagattttactgggaggctagcagaaggaaatggattgtggtctgctatcaaaagtactgaagtaactgcccagtgatcattgaaatcacacattttgctcatttaacaatgtctgagtttgccatcagcacctcagaggagcaaagcttggttcataaagtgaagttgagtgatactgagcctaccacactggcctactcgccacctccagagctatctgaagtcagcactgcaggttctgtgaacatttgggaagctgtgcctcttagccccctgggcccctacagtttaattgctctcctatctgctactgaaggaccagcagtcttcctaccctgcctccactgttaccaccaacccactttttgataaggactgcagatttatctttcttagccctgccttgactggtcttcccacctcagacgtccttactcagtccatcatctctttcaggattttcttctgtggtctttttcaaactactagctgacttttcccttttatttcccactaggaacccctccccgcccccccccccccagccatttcatcaaatcaaactcactgccctctttcatgccccttccttagttccccaacacaagcctgtgcataagcttgaacatttctacctttgccaatggtatttccccttctggcttaccctgcttcctccttctcagacttttccagtcttgattgtcctctccataaacacaagaatgaacttcaaggcaagttacttaatgtcttagagcctgtttccccatccataaaatggggctataaattcctcaggatgggatgagggtacaaataaaaaatgaagcaggatattctttgtaaaagtgtgtgtacattttttattgtgtttctccccagctaccttccctctccccgccacacacatcctatttgcagagtgttgggggaggtggaactgtgatgtgggccctgctgtctagcagtctgcagtcacacacagccatccaaactacgagattgtatatgattcagtgccaaactgtgagctttggggaatccagaaagaaggatgaagcctttcccaagtttcctttagttaaatgtgccacttgaatcctgttctgactcctaggcacatgcaagagtcaatcacatatgttcctgtggcctttatcattttggtccatctcttgagcccacatgaatactgtcatggatggaggaggaaggaccaggctgggtcagggcctgaatgcaggttttgtttggactataggggctaagttcactttaataggctgtgacctattaaaggaggcaggaaccaagtttgcacagaaggaccatcctagttgagttaaaggagttggggagttgattgtgaggggtttcctagattgctgctgggtaaggtgattgaatctgggaaggatagggtacttgattgcctagaagggtgcactctaagttctggataagaatggtgcccaagatgagctggaggggaaggcaagtgtttgaatgacccagtccctgaggtgagcctaggttagggttaagatttggtgagtgaacaggtgcaaacgcttgtggcttatttatccagaaaaagcattttctgtgtgcctttcaggtcaggctgttactttatccccttcaggcctgaccccatctcccccacgcatagctcaagctgaacagcccctgaagctgggaatcaagcccctaccttgtgttcagagcttccctaacgtccagtcgccacctagggtagccttccctccacaccctaggccgagagcagaagcgggtggcaggagcacagggagtgaggtccaggttagaggacaggccagaaggccctccgagagggtcccccaaccccgcaacgccaggacaggtttgcacgtccccagcagtaggcaagtcaggggggtcctagggttacagcggaggagaggacgggctataagcatgtggagggtgcacggggtggcgaggccaccaccagggggcgatttcagggccgcagcgcctagaggtggggggtcgcccgatggccgaaggctgtgtgtgagcctcgccctcaaaccgcctctattgtgctagagtagggggcgcaaagaagagagtggcgaccttcccctcaccccacccagtcggccccgcctttcaggaccccgccccacccccggctccgcctccaccacccccccccgccccgcctccagccgcggccccttcctctcgcagctggtgctgtggggccgcggagccgcgcgtcgctgtctctatggccccggatccgagcgcaaagctgggccaggcctttctcaccaccaagtcccccggtcctgcatgacggctctagaggggcgcgggccaggcctcgggctgcgcggggtgcaaaccggccaccacggagtcggggaccagcgcggggagggggccgcgtggcgaacagtgttccccaggatctgggtcacgtctcccggcgtccggcgggatcgaaggagagcttgtcctcgagctgcagcagtagagactgagaaaacggacctcagaaaaccaggactagctctactgtcgggggcagggtgaccccatcagtaacctacaacccctctagaacttcacaactccctctcaccatggagtttgcatttgatgcagaaaggcatgtgatccctccctccttctgacctcttagctggggattccatggccacacaaccctgtgactccatgtccccccgattccaggaccccccatggccccatgattccttgactcctatgaccttatgacccctgaccttccaagtgacttccttggactttgacccctgtgactgtgcttcccattccccgcccccacaacctgtgactctggctccctttgggggtcttgttagtctgggcctccccaggaagatgtgggggaggctctggcccctcctcctcagcatcctcacagcaactgcagtcccaggaccctcactgcggagaccgtctagagaactagatgccacccctcggatgaccataccctatgaagagctctctgggacccggcacttcaagggccaagcccagaactactcaacactgctgctggaggaggcctcagcaaggctgctggtgggagcccgaggtgccctgttctctctcagtgccaacgacataggagatggggctcacaaagagatccactgggaagcctccccagagatgcaaagcaaatgtcatcaaaaagggaaaaacaaccagacggagtgctttaaccatgtgcggttcctgcagcggctcaattctacccacctctatgcatgtgggactcacgccttccagcccctctgtgcagccattgatgctgaggccttcaccttgccaaccagcttcgaggaggggaaggagaagtgtccttatgacccagcccgtggcttcacaggcctcatcattgatggaggcctctacacagccactaggtatgaattccggagcattcctgacatccgccggagccgccacccacactccctgagaactgaggagacaccaatgcattggctcaatgatgcggagtttgtgttctccgtcctcgtgcgggagagcaaggccagtgcagtgggtgatgatgacaaggtgtactacttcttcacggagcgtgccactgaggagggctctggcagcttcactcagagccgcagcagtcaccgtgtggcccgtgtggctcgtgtctgcaagggagacctgggagggaagaagatcctgcagaagaagtggacttccttcctgaaagcccgtctcatctgccacattccactgtatgagacactgcgtggggtctgcagcctggatgctgaaacctcaagccgtacacacttctatgcagccttcacgctgagcacacagtggaagaccctggaggcctcagccatctgccgctatgacctggcagagatccaggctgtctttgcaggaccctatatggaataccaggatggttcccggcgctggggtcgctatgagggtggggtgcctgagccccggcctggctcgtgtatcacagattcattgcgcagccaaggctacaattcatcccaagacttgccatccctggtcctggactttgtaaagttgcacccactgatggctcggcccgttgtgcccacacgtggacggcccctgctgctcaagcgcaacatacgctacacacaccttacagggacacctgtcaccacgcctgctggacctacctatgacctgctctttctgggcacagctgatggctggatccacaaggccgtagtcctgggctctgggatgcacattattgaagagacacaagtgttcagggagtcccagtctgtggaaaatctagtcatctctctattgcgcacagcctctatgtgggggctcctagcggagtcatccagctaccactctccagctgctcccgctaccgatcctgctatgactgcatcttggcccgagacccctactgtggctgggaccctggcacccatgcctgcgcagcagccaccaccatagccaacaggtcccaggacagcactgatacaggacatagagagaggaaatcgaggctgtgagagcagcagggatacagggccaccaccaccactgaagacccgctctgtgctccggggtgatgatgtcctcctgccctgtgaccagccatccaacctggcccgggccttgtggctactcaatgggagcatgggcctgagcgatgggcagggtggctaccgtgtgggcgtggacgggctgctggttacagatgcacagcctgagcacagtggcaactatggctgctatgccgaggaaaatggcctccgcaccctgctggcctcctatagtctcacagtccggccagccactcctgccccagctccaaaagcccctgccacacctggggcacagctggcacctgatgtgagactgctctatgtgctagccattgccgcgcttggtggcctctgcctcatcctggcctcctccctcctctatgtggcctgtctgcgggaaggcagacgagggcgccgacggaaatactcactgggtcgggccagccgggcaggaggatctgcggtgcaactgcagacagtctcaggccagtgtcctggagaggaagatgagggtgatgatgagggggctgggggcctggagggcagctgtctccagatcatccctggggagggagccccagccccaccacccccaccgcccccaccgccaccggctgagctgaccaatggcttggtggcactgcccagccggctgcggaggatgaatggcaatagctatgtgcttctgaggcagagcaacaatggagtaccagcagggccctgctccttcgccgaggaactcagccgcatcctggaaaaaaggaagcacacgcagctcgtggagcagctagatgagagctctgtctgagcccagcctcccagaacaaatgctcttccaagccagcctatctgtcccaggctgggccactgcctccctaacacagccaccctcccttcattacccccactccatacccttctcccaactttttgatgtccctgtagggctggccagtcaggcccagccaaagccccctcctcagtctccacagacccacatgtgagcagcccaggcccatcggtgctcctcagaggtaggtgctccctcaggatcaggtgccctgcagacccagagccagttcctatcccctaacctaaacacttataggtgaggactccatcctcctgttccattcatctgcccaaaccctttctctttctcccaggcagggctctgcaggtccatatgggctcaatgtcaccaccctctgcatggccctgtgtgctggatggtcctgaaaccagacaagacctctgccagccacctaagccctgcgtacattcacatgcacacatggaagaatgtttatcggctgggctgcagtgcccccaccctcaccttctcctggtgcattcttgtttcatccctgcttctggacttggggtaccctcccaattgccacatcctatctggtcctcttccccagccccatgtggtgacctctttgtcaagagcttgggaacgggccagcctggggaggtaagactgcatcactcccctcctctcccttcctgtgtggcccttgtgaatcagcctccccactctccttggtcattctcaagagtatgagagacagagctccaggcatgtcccatccccatgcacatgtggtaacacacacctgtatcacacatgtgcttacatttccactcacatgcacctctgagcctcccttgctgtcttggacctgtctgttgggtttagtccgtggacatttcagagggagatccccctcccatttaactgtcctcacaggcccttgcctaggatggatgaccaacactgcactcaatgagccagcctctcttttgggggaatcaagcatttgcttcctctagactacagcagggaaagggaggagaaatctgatgtctcaactggcacatgaagcccattcttggaactatgcaaagggcagaggctgggagtttggacgcttagctcctacccctgtcctacctcaccggggcactttcaggggccaggggcctctgaagtctctaggcctatatgggacaatcaattctgactgagctcccccattcccctcgggtgaggatgactgttatttttgtagctgagaacgtggaatcccacgggtttttactgcccttcacccaacctctcccacctccaccccacaatgaatgtatttattgtgagaatggctacacttctttaggaatgcccccacttacaaccaggtgggtggaacaggcatgtgacagagtggggagcctgggctcagctcctccccctgccgttggttaataaacaccctttttccccacaa

SEQ ID NO: 364612 - DNA, 13290 bp, Homo sapiens
caaggggcttagatctcagtcatcagactatacaggacatgttcatcctggaacttacacaaataccttagaacgtctagtgaaggaaatggaagacacacaaaggctagatgaactgcagaagcaactacaagaagacataaggcaaggccgaggcattaaatccccaatcagaattggagaagaagacagtacagatgatgaggatggcctcttagaagagcacaaggaatttctaaagaaattttcagttacaattgatgctattcctgatcatcatccaggtgaagaaatatttaatttcctcaattctggaaaaattttcaatcagtataccttggatttaagagactctggttttattggacaaagtgctgtagaaaaacttattcttaaatcgggaaaaacagatcagatttttttgacaacacaaggtttccttacgtctgcttatcactatgtccagtgtcctgtccctgtgttaaagtggctgtttcggatgatgtcagttcatacagactgtattgtgtcagtgcagattttaagtacattgatggaaataacaattagaaatgataccttcagtgactcaccagtttggccatggatcccatcattgtctgatgtagcagctgtgtttttcaatatggggattgattttagatctttgtttcccctggagaatcttcagccagactttaatgaagactatctagtttctgaaacacagacaacatcaagggggaaagaaagtgaagattcatcttataagccaattttttcaacacttcctgaaaccaacattttaaatgtggttaagtttctaggcttgtgtacatctatacatccagaaggttaccaggatcgtgaaataatgttgctgattttaatgttatttaaaatgagtttggaaaaacagctgaaacagattcctttagtagactttcaaagcctcctgataaacctgatgaaaaacatcagagattggaacacaaaggtgcctgaactctgtctgggcataaatgaactctccagtcatccccacaacctcctgtggttggtacagctggtccctaattggacatcacgtggaaggcaactgagacagtgcctcagtctagtgattatttcaaagcttttggatgagaaacacgaagatgttcctaatgccagtaatctgcaggtatcagtcctacatcgctatcttgtgcagatgaagccttctgatttgttaaagaaaatggtcttgaagaaaaaggctgaacaaccagatggcattattgatgacagtcttcatttagaacttgaaaagcaggcatattacctgacctacattcttcttcatttagtcggtgaagttagttgttctcattctttttcttctggacaacggaaacactttgtgctactctgtggggctttggaaaagcatgttaaatgtgatattagggaagatgcaagacttttttacagaactaaggtgaaagacttggtcgccaggatacatggaaaatggcaggaaataatccagaactgtcggcctactcaggggcagcttcatgacttctgggtaccagattcttaataggagttgcagcagcaaaaatatgaaccaagagaaattcaataagagcctttcatagaggagtagaaaggattattacagaatccaatgaatgccaagaaaatgtacagcaaatgtgccacttgaatatctagtatgaagctggtaatgaagaaattgccatttctgaagcagatatgaaatatgatctgcttaattgttaaggcaactgacctttcaaaagtgcagagtcttattaaaagaggggaggggtagaagcagaataatagtcatatgtctaacctgccccagttaactcctcttgttaaattataagccagttatcttttttagatagtatttttgtcacttggataatcacaggaaatatataagaaaagagcttggactaacttgagaagttggacatggaaagcaagaccaagttccagttgggtttaattttccctcttggttattttcggacacaaagggaatgcttaaaactgagtttagtaataaaaagcataaatctcttctgtaacttttataaaccacagggaggtttcaatccatgcattttccttcattactcaagattataaatctgtttttaaaatacatctaaacaaacagttgagaaacaaaagtttggcatgttgtcagatccccttaagaggaagaggttaagctgtaaagtagtggccctgttttgatgccagaacattcatatgctgtttgttctggatttcttttaaatgcatgtattttaaatactggttaaatcttagaatcttggctatatcttagaattctggctcttggtaaccatattacagaagtctatattgtaaaagcctaaagatctggacaagtttccaacaaccttgtttccatgagtatataattttggcagacacctgaattctttgggacactgtgtctgtgtatgtgtgtgtgtgtgtgtgtgtgtgtgtgcgcttgtatcttgaagttgttgcacttcaaaaccacagctgctgtaaattcttaaacactggagagccatcctttggtttaaatggtagagggttagtggaagtgcacacgttgtttttagcccaggggtagtaacaaactcttactagccaactagaaaattattttgttgacgagatgtcccttttaggagggtttgtttcctgaaagaatgccaactttttttgttgttctttcagtattggcttgagtgacctgttctcctgagtgctctagtgtctccagttgtgggggggaaagatgatggaggggaacagaaactggacttgatgtttgcggtttgagaggcaagaaaataaaataactttctacctctaaattgaggcttaggagtaaaaagcattttgtcctaaatttatcatttaaaatagcatcagtaacttttgagctcatgtcaatcaagcattggcagtcagagattttatagggaagactaagtaaatccagtttccaagaacctaaactgattgaggctccaagagtcagaccaacaaaagttttattctgtgttgtttactggtaagaatattattatcttgatactacctctcaagggtattgttacaaaatgccacttatggttaaagagatagatacaaagagttctatttgacagaagcttgaaactctggcatctatctgcccaacgatgggggctttcgttctgtaatttaatcctttgtagatacattatttgtgtgtaattttatacgtgttcatatttttctcattttgcattgtgtaaagtgtacaaaatctcaaagtataaaatactgcttatattgcttgtaatttacagtgtgtaaatattttctaattgtgtacattgatgggggggacaagtgggttattcaggtttttttttaatgacccttttgtattgcagtttcaacagataactgtccatcaaatttaaaaccactttgatacatttttatttaacagttccaataagaaaaaaatctctatttttaattatatttctcctttagaaaaaaaatacttcatggtccctctaaaataaatggccagacctcagtttaggcccttgtatttatgactctggtagaggtcttcagactccaggtcatagtccagtcagtatttgcatttgggttctcatgaaaactttgtgactctcttttagcacaagtagcccatggtttttcttccaaatcaagtattttacttctcccttgagtccccatgctttgtctccctcctgctgctattgcccggtgaatgggatggtagagagggagaaatgttcattgcacagagaatgtcaggccactttggggacttggcaaacgaagcttgcactgagtggtggtgtgtttggcaatattactgtgccaaaaatcaccttgtctaattttatggatatgtatggcaaacttattacccttcttgcaagctgcacattaaggtacttgtaagtgtttatgcttttgtgtgtaactgtttgccttttctaactgcttttcttgttactgaaaatataattctactagttttatcacattaagaggctctccatgcacaaaatgcattgatgtagccgtaaagtaacagcatttgtacattttctatctcctgatggcagtggtgcctttgtcaccttttggaaggtttgcattttgtttctgctttcaagcgcaaatagtagcttgctttcagcttcacaaaaatctcctcaaatgtaaaagatacaaaatggcgtgttatcatccaggcttagttggagtatttgcatttttatttttatcaaaacaaatataattggtggggactggccagtaataatgtgtggcgtctttaagccaagagtaatttttaaattaaaaatgaaaattttaagaggtagcccattaaacaagctactgagttggagaattaggggatgactgtggtggtttgtcgctaaggaggcaacagtagggtccaggcggcggggcacgtagagcagttagcatgatccatggttattccttactcatgaacagtgtcggcgcacctcattatctgtgcatttgtttttcctgggcagtcctgtcagccagttaatccaccagctcttaggaagtaaatacagatttttttctttccttttttttttttttaaagattttatactacatcttgttaaagtcctatgaatgtgtgtgtgtgtgtgctattaaaactgctttttctcagtttgaacatgtgtttggtaatatttgtttgggagttggggaggctaagttatctggaatgccctgttccctcagcccaccccagtcccctggcttttaaacatttcttcttgctttggattgtccagttttttagcttgatgtctcctgtttctggaaaacataaagccaccattgtacacagttcacttttatataacccagttaattgctgtatactttgcaatcaggaattcagtaatctcattcttacctcattcactatgttcattccaccattcattctaacaattgagtctcaactacatactaggcactctttttaggattcagtaaggatttgatggtgaacaacatagagaactcatgaatcttacctcctggtatccaggttaaaatactttctgttcttgggcaaagagaattagaaacaaatacccttaacctgactcccttgttcttgagcccaggaccaagaaagaagaagctgtacaatgcagaagcagggcttgagatcacctccaacctgccaagcagatagagatctgggtatgccaacttgggaggcagaggttgaaacctcataggaggaactttggagctcatagaaggccttggcattgtcagaggccttgagttccaaaaccatgccagtatttctgccttctgacaggctggctagaaagagactaaatgggagcatttttctctgacagtggggcggagggatgaggggatgacagcccaggaagaagcagagacattgccataagtacttactagagggcaggcagcacagctttatgcaagttaagggccttgaccttgccccaaggcctgacctcagatcccagattcatcatactagccttttgatctttgccaaattacttaaactcactgtttcctcatctgttgaataatggtgtctacctcagggtttgtgaggactaagcgagctaatgcatgaaaagtgcctagtacagtgcctggcatatagcaagaactcagcaaatgcttgctgctctaacgaggcgtttctctgatgacagatttgatcttaagcagacacctcagggtgtactgacatctgagcaaaccatatctccaaaaattatagttgtaagtgtgccctatttctttggataccgggagctggagcttctctgtccagctatctctgctgattttttttaattaaaattttcactttttaaaagccagcatgctaaagctgagaaattggtgatgggtggtggttttccagcatttgtgggaatgtcctgacactccctttcccttactaaccattccctaggctggagtcaagagagggcaaaccagaaggcccagctttgggtctgactccaagacgactggctgggaggaaaactaaacaggcttctgaggcacagtggaatagtgagacttccgcattgttgcactggtgacagcccctacagaagaagcacctcagctgtatatatagccaaaataaagaccacaccacctaaagggaaagtgctgggcaaaccagagatggagatggcaaagcaggaacagaaatgctgccacattgaacagtaagcaggacaacttgactaggccagagttctcttgcttcagggaacctgctcaagtttcaggaattcatacccacccccttcacctaggatccctgctacagtaagtaactgttctgtgcaaagtggagctaaactctggtgtgtaagtggctgacaatcactgctgaagacggccagcactaccctcagccactttcttacagcaaagttggggaaaatagactagcaaaaacaaaactcatacttttctgtgtgtgtgaagttctccagaaggtttccaaatggaatcctctcacagccaccctgcgaagcagccagggtagtgaccttatggatgagtgacagcctgttcaaagaatgacctgcctgtgtcccaggatgcagatttatggctgggttagggttaatttctttagttgatttccagttttcttttccactgtctgtcagtattcccccgttcttattttaccagctggatttgcagagagacatactgtcaatcaaaagggcttcctatgggcagctccattaattgcttttacatctgatactctcattaggtttagagattttactgggaggctagcagaaggaaatggattgtggtctgctatcaaaagtactgaagtaactgcccagtgatcattgaaatcacacattttgctcatttaacaatgtctgagtttgccatcagcacctcagaggagcaaagcttggttcataaagtgaagttgagtgatactgagcctaccacactggcctactcgccacctccagagctatctgaagtcagcactgcaggttctgtgaacatttgggaagctgtgcctcttagccccctgggcccctacagtttaattgctctcctatctgctactgaaggaccagcagtcttcctaccctgcctccactgttaccaccaacccactttttgataaggactgcagatttatctttcttagccctgccttgactggtcttcccacctcagacgtccttactcagtccatcatctctttcaggattttcttctgtggtctttttcaaactactagctgacttttcccttttatttcccactaggaacccctccccgcccccccccccccagccatttcatcaaatcaaactcactgccctctttcatgccccttccttagttccccaacacaagcctgtgcataagcttgaacatttctacctttgccaatggtatttccccttctggcttaccctgcttcctccttctcagacttttccagtcttgattgtcctctccataaacacaagaatgaacttcaaggcaagttacttaatgtcttagagcctgtttccccatccataaaatggggctataaattcctcaggatgggatgagggtacaaataaaaaatgaagcaggatattctttgtaaaagtgtgtgtacattttttattgtgtttctccccagctaccttccctctccccgccacacacatcctatttgcagagtgttgggggaggtggaactgtgatgtgggccctgctgtctagcagtctgcagtcacacacagccatccaaactacgagattgtatatgattcagtgccaaactgtgagctttggggaatccagaaagaaggatgaagcctttcccaagtttcctttagttaaatgtgccacttgaatcctgttctgactcctaggcacatgcaagagtcaatcacatatgttcctgtggcctttatcattttggtccatctcttgagcccacatgaatactgtcatggatggaggaggaaggaccaggctgggtcagggcctgaatgcaggttttgtttggactataggggctaagttcactttaataggctgtgacctattaaaggaggcaggaaccaagtttgcacagaaggaccatcctagttgagttaaaggagttggggagttgattgtgaggggtttcctagattgctgctgggtaaggtgattgaatctgggaaggatagggtacttgattgcctagaagggtgcactctaagttctggataagaatggtgcccaagatgagctggaggggaaggcaagtgtttgaatgacccagtccctgaggtgagcctaggttagggttaagatttggtgagtgaacaggtgcaaacgcttgtggcttatttatccagaaaaagcattttctgtgtgcctttcaggtcaggctgttactttatccccttcaggcctgaccccatctcccccacgcatagctcaagctgaacagcccctgaagctgggaatcaagcccctaccttgtgttcagagcttccctaacgtccagtcgccacctagggtagccttccctccacaccctaggccgagagcagaagcgggtggcaggagcacagggagtgaggtccaggttagaggacaggccagaaggccctccgagagggtcccccaaccccgcaacgccaggacaggtttgcacgtccccagcagtaggcaagtcaggggggtcctagggttacagcggaggagaggacgggctataagcatgtggagggtgcacggggtggcgaggccaccaccagggggcgatttcagggccgcagcgcctagaggtggggggtcgcccgatggccgaaggctgtgtgtgagcctcgccctcaaaccgcctctattgtgctagagtagggggcgcaaagaagagagtggcgaccttcccctcaccccacccagtcggccccgcctttcaggaccccgccccacccccggctccgcctccaccacccccccccgccccgcctccagccgcggccccttcctctcgcagctggtgctgtggggccgcggagccgcgcgtcgctgtctctatggccccggatccgagcgcaaagctgggccaggcctttctcaccaccaagtcccccggtcctgcatgacggctctagaggggcgcgggccaggcctcgggctgcgcggggtgcaaaccggccaccacggagtcggggaccagcgcggggagggggccgcgtggcgaacagtgttccccaggatctgggtcacgtctcccggcgtccggcgggatcgaaggagagcttgtcctcgagctgcagcagtagagactgagaaaacggacctcagaaaaccaggactagctctactgtcgggggcagggtgaccccatcagtaacctacaacccctctagaacttcacaactccctctcaccatggagtttgcatttgatgcagaaaggcatgtgatccctccctccttctgacctcttagctggggattccatggccacacaaccctgtgactccatgtccccccgattccaggaccccccatggccccatgattccttgactcctatgaccttatgacccctgaccttccaagtgacttccttggactttgacccctgtgactgtgcttcccattccccgcccccacaacctgtgactctggctccctttgggggtcttgttagtctgggcctccccaggaagatgtgggggaggctctggcccctcctcctcagcatcctcacagcaactgcagtcccaggaccctcactgcggagaccgtctagagaactagatgccacccctcggatgaccataccctatgaagagctctctgggacccggcacttcaagggccaagcccagaactactcaacactgctgctggaggaggcctcagcaaggctgctggtgggagcccgaggtgccctgttctctctcagtgccaacgacataggagatggggctcacaaagagatccactgggaagcctccccagagatgcaaagcaaatgtcatcaaaaagggaaaaacaaccagacggagtgctttaaccatgtgcggttcctgcagcggctcaattctacccacctctatgcatgtgggactcacgccttccagcccctctgtgcagccattgatgctgaggccttcaccttgccaaccagcttcgaggaggggaaggagaagtgtccttatgacccagcccgtggcttcacaggcctcatcattgatggaggcctctacacagccactaggtatgaattccggagcattcctgacatccgccggagccgccacccacactccctgagaactgaggagacaccaatgcattggctcaatgatgcggagtttgtgttctccgtcctcgtgcgggagagcaaggccagtgcagtgggtgatgatgacaaggtgtactacttcttcacggagcgtgccactgaggagggctctggcagcttcactcagagccgcagcagtcaccgtgtggcccgtgtggctcgtgtctgcaagggagacctgggagggaagaagatcctgcagaagaagtggacttccttcctgaaagcccgtctcatctgccacattccactgtatgagacactgcgtggggtctgcagcctggatgctgaaacctcaagccgtacacacttctatgcagccttcacgctgagcacacagtggaagaccctggaggcctcagccatctgccgctatgacctggcagagatccaggctgtctttgcaggaccctatatggaataccaggatggttcccggcgctggggtcgctatgagggtggggtgcctgagccccggcctggctcgtgtatcacagattcattgcgcagccaaggctacaattcatcccaagacttgccatccctggtcctggactttgtaaagttgcacccactgatggctcggcccgttgtgcccacacgtggacggcccctgctgctcaagcgcaacatacgctacacacaccttacagggacacctgtcaccacgcctgctggacctacctatgacctgctctttctgggcacagctgatggctggatccacaaggccgtagtcctgggctctgggatgcacattattgaagagacacaagtgttcagggagtcccagtctgtggaaaatctagtcatctctctattgcgcacagcctctatgtgggggctcctagcggagtcatccagctaccactctccagctgctcccgctaccgatcctgctatgactgcatcttggcccgagacccctactgtggctgggaccctggcacccatgcctgcgcagcagccaccaccatagccaacaggtcccaggacagcactgatacaggacatagagagaggaaatcgaggctgtgagagcagcagggatacagggccaccaccaccactgaagacccgctctgtgctccggggtgatgatgtcctcctgccctgtgaccagccatccaacctggcccgggccttgtggctactcaatgggagcatgggcctgagcgatgggcagggtggctaccgtgtgggcgtggacgggctgctggttacagatgcacagcctgagcacagtggcaactatggctgctatgccgaggatgaatggcaatagctatgtgcttctgaggcagagcaacaatggagtaccagcagggccctgctccttcgccgaggaactcagccgcatcctggaaaaaaggaagcacacgcagctcgtggagcagctagatgagagctctgtctgagcccagcctcccagaacaaatgctcttccaagccagcctatctgtcccaggctgggccactgcctccctaacacagccaccctcccttcattacccccactccatacccttctcccaactttttgatgtccctgtagggctggccagtcaggcccagccaaagccccctcctcagtctccacagacccacatgtgagcagcccaggcccatcggtgctcctcagaggcagggctctgcaggtccatatgggctcaatgtcaccaccctctgcatggccctgtgtgctggatggtcctgaaaccagacaagacctctgccagccacctaagccctgcgtacattcacatgcacacatggaagaatgtttatcggctgggctgcagtgcccccaccctcaccttctcctggtgcattcttgtttcatccctgcttctggacttggggtaccctcccaattgccacatcctatctggtcctcttccccagccccatgtggtgacctctttgtcaagagcttgggaacgggccagcctggggaggtaagactgcatcactcccctcctctcccttcctgtgtggcccttgtgaatcagcctccccactctccttggtcattctcaagagtatgagagacagagctccaggcatgtcccatccccatgcacatgtggtaacacacacctgtatcacacatgtgcttacatttccactcacatgcacctctgagcctcccttgctgtcttggacctgtctgttgggtttagtccgtggacatttcagagggagatccccctcccatttaactgtcctcacaggcccttgcctaggatggatgaccaacactgcactcaatgagccagcctctcttttgggggaatcaagcatttgcttcctctagactacagcagggaaagggaggagaaatctgatgtctcaactggcacatgaagcccattcttggaactatgcaaagggcagaggctgggagtttggacgcttagctcctacccctgtcctacctcaccggggcactttcaggggccaggggcctctgaagtctctaggcctatatgggacaatcaattctgactgagctcccccattcccctcgggtgaggatgactgttatttttgtagctgagaacgtggaatcccacgggtttttactgcccttcacccaacctctcccacctccaccccacaatgaatgtatttattgtgagaatggctacacttctttaggaatgcccccacttacaaccaggtgggtggaacaggcatgtgacagagtggggagcctgggctcagctcctccccctgccgttggttaataaacaccctttttccccacaa

SEQ ID NO: 364613 - DNA, 13673 bp, Homo sapiens
caaggggcttagatctcagtcatcagactatacaggacatgttcatcctggaacttacacaaataccttagaacgtctagtgaaggaaatggaagacacacaaaggctagatgaactgcagaagcaactacaagaagacataaggcaaggccgaggcattaaatccccaatcagaattggagaagaagacagtacagatgatgaggatggcctcttagaagagcacaaggaatttctaaagaaattttcagttacaattgatgctattcctgatcatcatccaggtgaagaaatatttaatttcctcaattctggaaaaattttcaatcagtataccttggatttaagagactctggttttattggacaaagtgctgtagaaaaacttattcttaaatcgggaaaaacagatcagatttttttgacaacacaaggtttccttacgtctgcttatcactatgtccagtgtcctgtccctgtgttaaagtggctgtttcggatgatgtcagttcatacagactgtattgtgtcagtgcagattttaagtacattgatggaaataacaattagaaatgataccttcagtgactcaccagtttggccatggatcccatcattgtctgatgtagcagctgtgtttttcaatatggggattgattttagatctttgtttcccctggagaatcttcagccagactttaatgaagactatctagtttctgaaacacagacaacatcaagggggaaagaaagtgaagattcatcttataagccaattttttcaacacttcctgaaaccaacattttaaatgtggttaagtttctaggcttgtgtacatctatacatccagaaggttaccaggatcgtgaaataatgttgctgattttaatgttatttaaaatgagtttggaaaaacagctgaaacagattcctttagtagactttcaaagcctcctgataaacctgatgaaaaacatcagagattggaacacaaaggtgcctgaactctgtctgggcataaatgaactctccagtcatccccacaacctcctgtggttggtacagctggtccctaattggacatcacgtggaaggcaactgagacagtgcctcagtctagtgattatttcaaagcttttggatgagaaacacgaagatgttcctaatgccagtaatctgcaggtatcagtcctacatcgctatcttgtgcagatgaagccttctgatttgttaaagaaaatggtcttgaagaaaaaggctgaacaaccagatggcattattgatgacagtcttcatttagaacttgaaaagcaggcatattacctgacctacattcttcttcatttagtcggtgaagttagttgttctcattctttttcttctggacaacggaaacactttgtgctactctgtggggctttggaaaagcatgttaaatgtgatattagggaagatgcaagacttttttacagaactaaggtgaaagacttggtcgccaggatacatggaaaatggcaggaaataatccagaactgtcggcctactcaggggcagcttcatgacttctgggtaccagattcttaataggagttgcagcagcaaaaatatgaaccaagagaaattcaataagagcctttcatagaggagtagaaaggattattacagaatccaatgaatgccaagaaaatgtacagcaaatgtgccacttgaatatctagtatgaagctggtaatgaagaaattgccatttctgaagcagatatgaaatatgatctgcttaattgttaaggcaactgacctttcaaaagtgcagagtcttattaaaagaggggaggggtagaagcagaataatagtcatatgtctaacctgccccagttaactcctcttgttaaattataagccagttatcttttttagatagtatttttgtcacttggataatcacaggaaatatataagaaaagagcttggactaacttgagaagttggacatggaaagcaagaccaagttccagttgggtttaattttccctcttggttattttcggacacaaagggaatgcttaaaactgagtttagtaataaaaagcataaatctcttctgtaacttttataaaccacagggaggtttcaatccatgcattttccttcattactcaagattataaatctgtttttaaaatacatctaaacaaacagttgagaaacaaaagtttggcatgttgtcagatccccttaagaggaagaggttaagctgtaaagtagtggccctgttttgatgccagaacattcatatgctgtttgttctggatttcttttaaatgcatgtattttaaatactggttaaatcttagaatcttggctatatcttagaattctggctcttggtaaccatattacagaagtctatattgtaaaagcctaaagatctggacaagtttccaacaaccttgtttccatgagtatataattttggcagacacctgaattctttgggacactgtgtctgtgtatgtgtgtgtgtgtgtgtgtgtgtgtgtgcgcttgtatcttgaagttgttgcacttcaaaaccacagctgctgtaaattcttaaacactggagagccatcctttggtttaaatggtagagggttagtggaagtgcacacgttgtttttagcccaggggtagtaacaaactcttactagccaactagaaaattattttgttgacgagatgtcccttttaggagggtttgtttcctgaaagaatgccaactttttttgttgttctttcagtattggcttgagtgacctgttctcctgagtgctctagtgtctccagttgtgggggggaaagatgatggaggggaacagaaactggacttgatgtttgcggtttgagaggcaagaaaataaaataactttctacctctaaattgaggcttaggagtaaaaagcattttgtcctaaatttatcatttaaaatagcatcagtaacttttgagctcatgtcaatcaagcattggcagtcagagattttatagggaagactaagtaaatccagtttccaagaacctaaactgattgaggctccaagagtcagaccaacaaaagttttattctgtgttgtttactggtaagaatattattatcttgatactacctctcaagggtattgttacaaaatgccacttatggttaaagagatagatacaaagagttctatttgacagaagcttgaaactctggcatctatctgcccaacgatgggggctttcgttctgtaatttaatcctttgtagatacattatttgtgtgtaattttatacgtgttcatatttttctcattttgcattgtgtaaagtgtacaaaatctcaaagtataaaatactgcttatattgcttgtaatttacagtgtgtaaatattttctaattgtgtacattgatgggggggacaagtgggttattcaggtttttttttaatgacccttttgtattgcagtttcaacagataactgtccatcaaatttaaaaccactttgatacatttttatttaacagttccaataagaaaaaaatctctatttttaattatatttctcctttagaaaaaaaatacttcatggtccctctaaaataaatggccagacctcagtttaggcccttgtatttatgactctggtagaggtcttcagactccaggtcatagtccagtcagtatttgcatttgggttctcatgaaaactttgtgactctcttttagcacaagtagcccatggtttttcttccaaatcaagtattttacttctcccttgagtccccatgctttgtctccctcctgctgctattgcccggtgaatgggatggtagagagggagaaatgttcattgcacagagaatgtcaggccactttggggacttggcaaacgaagcttgcactgagtggtggtgtgtttggcaatattactgtgccaaaaatcaccttgtctaattttatggatatgtatggcaaacttattacccttcttgcaagctgcacattaaggtacttgtaagtgtttatgcttttgtgtgtaactgtttgccttttctaactgcttttcttgttactgaaaatataattctactagttttatcacattaagaggctctccatgcacaaaatgcattgatgtagccgtaaagtaacagcatttgtacattttctatctcctgatggcagtggtgcctttgtcaccttttggaaggtttgcattttgtttctgctttcaagcgcaaatagtagcttgctttcagcttcacaaaaatctcctcaaatgtaaaagatacaaaatggcgtgttatcatccaggcttagttggagtatttgcatttttatttttatcaaaacaaatataattggtggggactggccagtaataatgtgtggcgtctttaagccaagagtaatttttaaattaaaaatgaaaattttaagaggtagcccattaaacaagctactgagttggagaattaggggatgactgtggtggtttgtcgctaaggaggcaacagtagggtccaggcggcggggcacgtagagcagttagcatgatccatggttattccttactcatgaacagtgtcggcgcacctcattatctgtgcatttgtttttcctgggcagtcctgtcagccagttaatccaccagctcttaggaagtaaatacagatttttttctttccttttttttttttttaaagattttatactacatcttgttaaagtcctatgaatgtgtgtgtgtgtgtgctattaaaactgctttttctcagtttgaacatgtgtttggtaatatttgtttgggagttggggaggctaagttatctggaatgccctgttccctcagcccaccccagtcccctggcttttaaacatttcttcttgctttggattgtccagttttttagcttgatgtctcctgtttctggaaaacataaagccaccattgtacacagttcacttttatataacccagttaattgctgtatactttgcaatcaggaattcagtaatctcattcttacctcattcactatgttcattccaccattcattctaacaattgagtctcaactacatactaggcactctttttaggattcagtaaggatttgatggtgaacaacatagagaactcatgaatcttacctcctggtatccaggttaaaatactttctgttcttgggcaaagagaattagaaacaaatacccttaacctgactcccttgttcttgagcccaggaccaagaaagaagaagctgtacaatgcagaagcagggcttgagatcacctccaacctgccaagcagatagagatctgggtatgccaacttgggaggcagaggttgaaacctcataggaggaactttggagctcatagaaggccttggcattgtcagaggccttgagttccaaaaccatgccagtatttctgccttctgacaggctggctagaaagagactaaatgggagcatttttctctgacagtggggcggagggatgaggggatgacagcccaggaagaagcagagacattgccataagtacttactagagggcaggcagcacagctttatgcaagttaagggccttgaccttgccccaaggcctgacctcagatcccagattcatcatactagccttttgatctttgccaaattacttaaactcactgtttcctcatctgttgaataatggtgtctacctcagggtttgtgaggactaagcgagctaatgcatgaaaagtgcctagtacagtgcctggcatatagcaagaactcagcaaatgcttgctgctctaacgaggcgtttctctgatgacagatttgatcttaagcagacacctcagggtgtactgacatctgagcaaaccatatctccaaaaattatagttgtaagtgtgccctatttctttggataccgggagctggagcttctctgtccagctatctctgctgattttttttaattaaaattttcactttttaaaagccagcatgctaaagctgagaaattggtgatgggtggtggttttccagcatttgtgggaatgtcctgacactccctttcccttactaaccattccctaggctggagtcaagagagggcaaaccagaaggcccagctttgggtctgactccaagacgactggctgggaggaaaactaaacaggcttctgaggcacagtggaatagtgagacttccgcattgttgcactggtgacagcccctacagaagaagcacctcagctgtatatatagccaaaataaagaccacaccacctaaagggaaagtgctgggcaaaccagagatggagatggcaaagcaggaacagaaatgctgccacattgaacagtaagcaggacaacttgactaggccagagttctcttgcttcagggaacctgctcaagtttcaggaattcatacccacccccttcacctaggatccctgctacagtaagtaactgttctgtgcaaagtggagctaaactctggtgtgtaagtggctgacaatcactgctgaagacggccagcactaccctcagccactttcttacagcaaagttggggaaaatagactagcaaaaacaaaactcatacttttctgtgtgtgtgaagttctccagaaggtttccaaatggaatcctctcacagccaccctgcgaagcagccagggtagtgaccttatggatgagtgacagcctgttcaaagaatgacctgcctgtgtcccaggatgcagatttatggctgggttagggttaatttctttagttgatttccagttttcttttccactgtctgtcagtattcccccgttcttattttaccagctggatttgcagagagacatactgtcaatcaaaagggcttcctatgggcagctccattaattgcttttacatctgatactctcattaggtttagagattttactgggaggctagcagaaggaaatggattgtggtctgctatcaaaagtactgaagtaactgcccagtgatcattgaaatcacacattttgctcatttaacaatgtctgagtttgccatcagcacctcagaggagcaaagcttggttcataaagtgaagttgagtgatactgagcctaccacactggcctactcgccacctccagagctatctgaagtcagcactgcaggttctgtgaacatttgggaagctgtgcctcttagccccctgggcccctacagtttaattgctctcctatctgctactgaaggaccagcagtcttcctaccctgcctccactgttaccaccaacccactttttgataaggactgcagatttatctttcttagccctgccttgactggtcttcccacctcagacgtccttactcagtccatcatctctttcaggattttcttctgtggtctttttcaaactactagctgacttttcccttttatttcccactaggaacccctccccgcccccccccccccagccatttcatcaaatcaaactcactgccctctttcatgccccttccttagttccccaacacaagcctgtgcataagcttgaacatttctacctttgccaatggtatttccccttctggcttaccctgcttcctccttctcagacttttccagtcttgattgtcctctccataaacacaagaatgaacttcaaggcaagttacttaatgtcttagagcctgtttccccatccataaaatggggctataaattcctcaggatgggatgagggtacaaataaaaaatgaagcaggatattctttgtaaaagtgtgtgtacattttttattgtgtttctccccagctaccttccctctccccgccacacacatcctatttgcagagtgttgggggaggtggaactgtgatgtgggccctgctgtctagcagtctgcagtcacacacagccatccaaactacgagattgtatatgattcagtgccaaactgtgagctttggggaatccagaaagaaggatgaagcctttcccaagtttcctttagttaaatgtgccacttgaatcctgttctgactcctaggcacatgcaagagtcaatcacatatgttcctgtggcctttatcattttggtccatctcttgagcccacatgaatactgtcatggatggaggaggaaggaccaggctgggtcagggcctgaatgcaggttttgtttggactataggggctaagttcactttaataggctgtgacctattaaaggaggcaggaaccaagtttgcacagaaggaccatcctagttgagttaaaggagttggggagttgattgtgaggggtttcctagattgctgctgggtaaggtgattgaatctgggaaggatagggtacttgattgcctagaagggtgcactctaagttctggataagaatggtgcccaagatgagctggaggggaaggcaagtgtttgaatgacccagtccctgaggtgagcctaggttagggttaagatttggtgagtgaacaggtgcaaacgcttgtggcttatttatccagaaaaagcattttctgtgtgcctttcaggtcaggctgttactttatccccttcaggcctgaccccatctcccccacgcatagctcaagctgaacagcccctgaagctgggaatcaagcccctaccttgtgttcagagcttccctaacgtccagtcgccacctagggtagccttccctccacaccctaggccgagagcagaagcgggtggcaggagcacagggagtgaggtccaggttagaggacaggccagaaggccctccgagagggtcccccaaccccgcaacgccaggacaggtttgcacgtccccagcagtaggcaagtcaggggggtcctagggttacagcggaggagaggacgggctataagcatgtggagggtgcacggggtggcgaggccaccaccagggggcgatttcagggccgcagcgcctagaggtggggggtcgcccgatggccgaaggctgtgtgtgagcctcgccctcaaaccgcctctattgtgctagagtagggggcgcaaagaagagagtggcgaccttcccctcaccccacccagtcggccccgcctttcaggaccccgccccacccccggctccgcctccaccacccccccccgccccgcctccagccgcggccccttcctctcgcagctggtgctgtggggccgcggagccgcgcgtcgctgtctctatggccccggatccgagcgcaaagctgggccaggcctttctcaccaccaagtcccccggtcctgcatgacggctctagaggggcgcgggccaggcctcgggctgcgcggggtgcaaaccggccaccacggagtcggggaccagcgcggggagggggccgcgtggcgaacagtgttccccaggatctgggtcacgtctcccggcgtccggcgggatcgaaggagagcttgtcctcgagctgcagcagtagagactgagaaaacggacctcagaaaaccaggactagctctactgtcgggggcagggtgaccccatcagtaacctacaacccctctagaacttcacaactccctctcaccatggagtttgcatttgatgcagaaaggcatgtgatccctccctccttctgacctcttagctggggattccatggccacacaaccctgtgactccatgtccccccgattccaggaccccccatggccccatgattccttgactcctatgaccttatgacccctgaccttccaagtgacttccttggactttgacccctgtgactgtgcttcccattccccgcccccacaacctgtgactctggctccctttgggggtcttgttagtctgggcctccccaggaagatgtgggggaggctctggcccctcctcctcagcatcctcacagcaactgcagtcccaggaccctcactgcggagaccgtctagagaactagatgccacccctcggatgaccataccctatgaagagctctctgggacccggcacttcaagggccaagcccagaactactcaacactgctgctggaggaggcctcagcaaggctgctggtgggagcccgaggtgccctgttctctctcagtgccaacgacataggagatggggctcacaaagagatccactgggaagcctccccagagatgcaaagcaaatgtcatcaaaaagggaaaaacaaccagacggagtgctttaaccatgtgcggttcctgcagcggctcaattctacccacctctatgcatgtgggactcacgccttccagcccctctgtgcagccattgatgctgaggccttcaccttgccaaccagcttcgaggaggggaaggagaagtgtccttatgacccagcccgtggcttcacaggcctcatcattgatggaggcctctacacagccactaggtatgaattccggagcattcctgacatccgccggagccgccacccacactccctgagaactgaggagacaccaatgcattggctcaatgatgcggagtttgtgttctccgtcctcgtgcgggagagcaaggccagtgcagtgggtgatgatgacaaggtgtactacttcttcacggagcgtgccactgaggagggctctggcagcttcactcagagccgcagcagtcaccgtgtggcccgtgtggctcgtgtctgcaagggagacctgggagggaagaagatcctgcagaagaagtggacttccttcctgaaagcccgtctcatctgccacattccactgtatgagacactgcgtggggtctgcagcctggatgctgaaacctcaagccgtacacacttctatgcagccttcacgctgagcacacagtggaagaccctggaggcctcagccatctgccgctatgacctggcagagatccaggctgtctttgcaggaccctatatggaataccaggatggttcccggcgctggggtcgctatgagggtggggtgcctgagccccggcctggctcgtgtatcacagattcattgcgcagccaaggctacaattcatcccaagacttgccatccctggtcctggactttgtaaagttgcacccactgatggctcggcccgttgtgcccacacgtggacggcccctgctgctcaagcgcaacatacgctacacacaccttacagggacacctgtcaccacgcctgctggacctacctatgacctgctctttctgggcacagctgatggctggatccacaaggccgtagtcctgggctctgggatgcacattattgaagagacacaagtgttcagggagtcccagtctgtggaaaatctagtcatctctctattgcgcacagcctctatgtgggggctcctagcggagtcatccagctaccactctccagctgctcccgctaccgatcctgctatgactgcatcttggcccgagacccctactgtggctgggaccctggcacccatgcctgcgcagcagccaccaccatagccaacaggtcccaggacagcactgatacaggacatagagagaggaaatcgaggctgtgagagcagcagggatacagggccaccaccaccactgaagacccgctctgtgctccggggtgatgatgtcctcctgccctgtgaccagccatccaacctggcccgggccttgtggctactcaatgggagcatgggcctgagcgatgggcagggtggctaccgtgtgggcgtggacgggctgctggttacagatgcacagcctgagcacagtggcaactatggctgctatgccgaggatgaatggcaatagctatgtgcttctgaggcagagcaacaatggagtaccagcagggccctgctccttcgccgaggaactcagccgcatcctggaaaaaaggaagcacacgcagctcgtggagcagctagatgagagctctgtctgagcccagcctcccagaacaaatgctcttccaagccagcctatctgtcccaggctgggccactgcctccctaacacagccaccctcccttcattacccccactccatacccttctcccaactttttgatgtccctgtagggctggccagtcaggcccagccaaagccccctcctcagtctccacagacccacatgtgagcagcccaggcccatcggtgctcctcagaggcagggctctgcaggtccatatgggctcaatgtcaccaccctctgcatggccctgtgtgctggatggtcctgaaaccagacaagacctctgccagccacctaagccctgcgtacattcacatgcacacatggaagaatgtttatcggctgggctgcagtgcccccaccctcaccttctcctggtgcattcttgtttcatccctgcttctggacttggggtaccctcccaattgccacatcctatctggtcctcttccccagccccatgtggtgacctctttgtcaagagcttgggaacgggccagcctggggaggtaagactgcatcactcccctcctctcccttcctgtgtggcccttgtgaatcagcctccccactctccttggtcattctcaagagtatgagagacagagctccaggcatgtcccatccccatgcacatgtggtaacacacacctgtatcacacatgtgcttacatttccactcacatgcacctctgagcctcccttgctgtcttggacctgtctgttgggtttagtccgtggacatttcagagggagatccccctcccatttaactgtcctcacaggcccttgcctaggatggatgaccaacactgcactcaatgagccagcctctcttttgggggaatcaagcatttgcttcctctagactacagcagggaaagggaggagaaatctgatgtctcaactggcacatgaagcccattcttggaactatgcaaagggcagaggctgggagtttggacgcttagctcctacccctgtcctacctcaccggggcactttcaggggccaggggcctctgaagtctctaggcctatatgggacaatcaattctgactgagctcccccattcccctcgggtgaggatgactgttatttttgtagctgagaacgtggaatcccacgggtttttactgcccttcacccaacctctcccacctccaccccacaatgaatgtatttattgtgagaatggctacacttctttaggaatgcccccacttacaaccaggtgggtggaacaggcatgtgacagagtggggagcctgggctcagctcctccccctgccgttggttaataaacaccctttttccccacaactatgactagtctgcttcatctagatgcgcccacccctgatcaccaggggacaggctcctgagcctatacagaaggtgatatctgcctccaggattggctctgctccccaatacaactatttgcagaggaaattgggatcctccgcttccatcctgactccttggcaggcacacaggcctctttagtaaggttcacactattcattgatcatggtgttagggcatgacaagaaaatgacaacagttcaagaattcttacaggggtttctagattttcatttcctgcctctcatttccccaccatcccccctttttaaactaagattagaaaatactcattaatatcagccttcctgcccttccccaaggttctcagcaccccc

SEQ ID NO: 364614 - DNA, 9822 bp, Homo sapiens
  misc_feature (9796)..(9797): n is a, c, g, or t
  misc_feature (9799)..(9799): n is a, c, g, or t
caaggggcttagatctcagtcatcagactatacaggacatgttcatcctggaacttacacaaataccttagaacgtctagtgaaggaaatggaagacacacaaaggctagatgaactgcagaagcaactacaagaagacataaggcaaggccgaggcattaaatccccaatcagaattggagaagaagacagtacagatgatgaggatggcctcttagaagagcacaaggaatttctaaagaaattttcagttacaattgatgctattcctgatcatcatccaggtgaagaaatatttaatttcctcaattctggaaaaattttcaatcagtataccttggatttaagagactctggttttattggacaaagtgctgtagaaaaacttattcttaaatcgggaaaaacagatcagatttttttgacaacacaaggtttccttacgtctgcttatcactatgtccagtgtcctgtccctgtgttaaagtggctgtttcggatgatgtcagttcatacagactgtattgtgtcagtgcagattttaagtacattgatggaaataacaattagaaatgataccttcagtgactcaccagtttggccatggatcccatcattgtctgatgtagcagctgtgtttttcaatatggggattgattttagatctttgtttcccctggagaatcttcagccagactttaatgaagactatctagtttctgaaacacagacaacatcaagggggaaagaaagtgaagattcatcttataagccaattttttcaacacttcctgaaaccaacattttaaatgtggttaagtttctaggcttgtgtacatctatacatccagaaggttaccaggatcgtgaaataatgttgctgattttaatgttatttaaaatgagtttggaaaaacagctgaaacagattcctttagtagactttcaaagcctcctgataaacctgatgaaaaacatcagagattggaacacaaaggtgcctgaactctgtctgggcataaatgaactctccagtcatccccacaacctcctgtggttggtacagctggtccctaattggacatcacgtggaaggcaactgagacagtgcctcagtctagtgattatttcaaagcttttggatgagaaacacgaagatgttcctaatgccagtaatctgcaggtatcagtcctacatcgctatcttgtgcagatgaagccttctgatttgttaaagaaaatggtcttgaagaaaaaggctgaacaaccagatggcattattgatgacagtcttcatttagaacttgaaaagcaggcatattacctgacctacattcttcttcatttagtcggtgaagttagttgttctcattctttttcttctggacaacggaaacactttgtgctactctgtggggctttggaaaagcatgttaaatgtgatattagggaagatgcaagacttttttacagaactaaggtgaaagacttggtcgccaggatacatggaaaatggcaggaaataatccagaactgtcggcctactcaggggcagcttcatgacttctgggtaccagattcttaataggagttgcagcagcaaaaatatgaaccaagagaaattcaataagagcctttcatagaggagtagaaaggattattacagaatccaatgaatgccaagaaaatgtacagcaaatgtgccacttgaatatctagtatgaagctggtaatgaagaaattgccatttctgaagcagatatgaaatatgatctgcttaattgttaaggcaactgacctttcaaaagtgcagagtcttattaaaagaggggaggggtagaagcagaataatagtcatatgtctaacctgccccagttaactcctcttgttaaattataagccagttatcttttttagatagtatttttgtcacttggataatcacaggaaatatataagaaaagagcttggactaacttgagaagttggacatggaaagcaagaccaagttccagttgggtttaattttccctcttggttattttcggacacaaagggaatgcttaaaactgagtttagtaataaaaagcataaatctcttctgtaacttttataaaccacagggaggtttcaatccatgcattttccttcattactcaagattataaatctgtttttaaaatacatctaaacaaacagttgagaaacaaaagtttggcatgttgtcagatccccttaagaggaagaggttaagctgtaaagtagtggccctgttttgatgccagaacattcatatgctgtttgttctggatttcttttaaatgcatgtattttaaatactggttaaatcttagaatcttggctatatcttagaattctggctcttggtaaccatattacagaagtctatattgtaaaagcctaaagatctggacaagtttccaacaaccttgtttccatgagtatataattttggcagacacctgaattctttgggacactgtgtctgtgtatgtgtgtgtgtgtgtgtgtgtgtgtgtgcgcttgtatcttgaagttgttgcacttcaaaaccacagctgctgtaaattcttaaacactggagagccatcctttggtttaaatggtagagggttagtggaagtgcacacgttgtttttagcccaggggtagtaacaaactcttactagccaactagaaaattattttgttgacgagatgtcccttttaggagggtttgtttcctgaaagaatgccaactttttttgttgttctttcagtattggcttgagtgacctgttctcctgagtgctctagtgtctccagttgtgggggggaaagatgatggaggggaacagaaactggacttgatgtttgcggtttgagaggcaagaaaataaaataactttctacctctaaattgaggcttaggagtaaaaagcattttgtcctaaatttatcatttaaaatagcatcagtaacttttgagctcatgtcaatcaagcattggcagtcagagattttatagggaagactaagtaaatccagtttccaagaacctaaactgattgaggctccaagagtcagaccaacaaaagttttattctgtgttgtttactggtaagaatattattatcttgatactacctctcaagggtattgttacaaaatgccacttatggttaaagagatagatacaaagagttctatttgacagaagcttgaaactctggcatctatctgcccaacgatgggggctttcgttctgtaatttaatcctttgtagatacattatttgtgtgtaattttatacgtgttcatatttttctcattttgcattgtgtaaagtgtacaaaatctcaaagtataaaatactgcttatattgcttgtaatttacagtgtgtaaatattttctaattgtgtacattgatgggggggacaagtgggttattcaggtttttttttaatgacccttttgtattgcagtttcaacagataactgtccatcaaatttaaaaccactttgatacatttttatttaacagttccaataagaaaaaaatctctatttttaattatatttctcctttagaaaaaaaatacttcatggtccctctaaaataaatggccagacctcagtttaggcccttgtatttatgactctggtagaggtcttcagactccaggtcatagtccagtcagtatttgcatttgggttctcatgaaaactttgtgactctcttttagcacaagtagcccatggtttttcttccaaatcaagtattttacttctcccttgagtccccatgctttgtctccctcctgctgctattgcccggtgaatgggatggtagagagggagaaatgttcattgcacagagaatgtcaggccactttggggacttggcaaacgaagcttgcactgagtggtggtgtgtttggcaatattactgtgccaaaaatcaccttgtctaattttatggatatgtatggcaaacttattacccttcttgcaagctgcacattaaggtacttgtaagtgtttatgcttttgtgtgtaactgtttgccttttctaactgcttttcttgttactgaaaatataattctactagttttatcacattaagaggctctccatgcacaaaatgcattgatgtagccgtaaagtaacagcatttgtacattttctatctcctgatggcagtggtgcctttgtcaccttttggaaggtttgcattttgtttctgctttcaagcgcaaatagtagcttgctttcagcttcacaaaaatctcctcaaatgtaaaagatacaaaatggcgtgttatcatccaggcttagttggagtatttgcatttttatttttatcaaaacaaatataattggtggggactggccagtaataatgtgtggcgtctttaagccaagagtaatttttaaattaaaaatgaaaattttaagaggtagcccattaaacaagctactgagttggagaattaggggatgactgtggtggtttgtcgctaaggaggcaacagtagggtccaggcggcggggcacgtagagcagttagcatgatccatggttattccttactcatgaacagtgtcggcgcacctcattatctgtgcatttgtttttcctgggcagtcctgtcagccagttaatccaccagctcttaggaagtaaatacagatttttttctttccttttttttttttttaaagattttatactacatcttgttaaagtcctatgaatgtgtgtgtgtgtgtgctattaaaactgctttttctcagtttgaacatgtgtttggtaatatttgtttgggagttggggaggctaagttatctggaatgccctgttccctcagcccaccccagtcccctggcttttaaacatttcttcttgctttggattgtccagttttttagcttgatgtctcctgtttctggaaaacataaagccaccattgtacacagttcacttttatataacccagttaattgctgtatactttgcaatcaggaattcagtaatctcattcttacctcattcactatgttcattccaccattcattctaacaattgagtctcaactacatactaggcactctttttaggattcagtaaggatttgatggtgaacaacatagagaactcatgaatcttacctcctggtatccaggttaaaatactttctgttcttgggcaaagagaattagaaacaaatacccttaacctgactcccttgttcttgagcccaggaccaagaaagaagaagctgtacaatgcagaagcagggcttgagatcacctccaacctgccaagcagatagagatctgggtatgccaacttgggaggcagaggttgaaacctcataggaggaactttggagctcatagaaggccttggcattgtcagaggccttgagttccaaaaccatgccagtatttctgccttctgacaggctggctagaaagagactaaatgggagcatttttctctgacagtggggcggagggatgaggggatgacagcccaggaagaagcagagacattgccataagtacttactagagggcaggcagcacagctttatgcaagttaagggccttgaccttgccccaaggcctgacctcagatcccagattcatcatactagccttttgatctttgccaaattacttaaactcactgtttcctcatctgttgaataatggtgtctacctcagggtttgtgaggactaagcgagctaatgcatgaaaagtgcctagtacagtgcctggcatatagcaagaactcagcaaatgcttgctgctctaacgaggcgtttctctgatgacagatttgatcttaagcagacacctcagggtgtactgacatctgagcaaaccatatctccaaaaattatagttgtaagtgtgccctatttctttggataccgggagctggagcttctctgtccagctatctctgctgattttttttaattaaaattttcactttttaaaagccagcatgctaaagctgagaaattggtgatgggtggtggttttccagcatttgtgggaatgtcctgacactccctttcccttactaaccattccctaggctggagtcaagagagggcaaaccagaaggcccagctttgggtctgactccaagacgactggctgggaggaaaactaaacaggcttctgaggcacagtggaatagtgagacttccgcattgttgcactggtgacagcccctacagaagaagcacctcagctgtatatatagccaaaataaagaccacaccacctaaagggaaagtgctgggcaaaccagagatggagatggcaaagcaggaacagaaatgctgccacattgaacagtaagcaggacaacttgactaggccagagttctcttgcttcagggaacctgctcaagtttcaggaattcatacccacccccttcacctaggatccctgctacagtaagtaactgttctgtgcaaagtggagctaaactctggtgtgtaagtggctgacaatcactgctgaagacggccagcactaccctcagccactttcttacagcaaagttggggaaaatagactagcaaaaacaaaactcatacttttctgtgtgtgtgaagttctccagaaggtttccaaatggaatcctctcacagccaccctgcgaagcagccagggtagtgaccttatggatgagtgacagcctgttcaaagaatgacctgcctgtgtcccaggatgcagatttatggctgggttagggttaatttctttagttgatttccagttttcttttccactgtctgtcagtattcccccgttcttattttaccagctggatttgcagagagacatactgtcaatcaaaagggcttcctatgggcagctccattaattgcttttacatctgatactctcattaggtttagagattttactgggaggctagcagaaggaaatggattgtggtctgctatcaaaagtactgaagtaactgcccagtgatcattgaaatcacacattttgctcatttaacaatgtctgagtttgccatcagcacctcagaggagcaaagcttggttcataaagtgaagttgagtgatactgagcctaccacactggcctactcgccacctccagagctatctgaagtcagcactgcaggttctgtgaacatttgggaagctgtgcctcttagccccctgggcccctacagtttaattgctctcctatctgctactgaaggaccagcagtcttcctaccctgcctccactgttaccaccaacccactttttgataaggactgcagatttatctttcttagccctgccttgactggtcttcccacctcagacgtccttactcagtccatcatctctttcaggattttcttctgtggtctttttcaaactactagctgacttttcccttttatttcccactaggaacccctccccgcccccccccccccagccatttcatcaaatcaaactcactgccctctttcatgccccttccttagttccccaacacaagcctgtgcataagcttgaacatttctacctttgccaatggtatttccccttctggcttaccctgcttcctccttctcagacttttccagtcttgattgtcctctccataaacacaagaatgaacttcaaggcaagttacttaatgtcttagagcctgtttccccatccataaaatggggctataaattcctcaggatgggatgagggtacaaataaaaaatgaagcaggatattctttgtaaaagtgtgtgtacattttttattgtgtttctccccagctaccttccctctccccgccacacacatcctatttgcagagtgttgggggaggtggaactgtgatgtgggccctgctgtctagcagtctgcagtcacacacagccatccaaactacgagattgtatatgattcagtgccaaactgtgagctttggggaatccagaaagaaggatgaagcctttcccaagtttcctttagttaaatgtgccacttgaatcctgttctgactcctaggcacatgcaagagtcaatcacatatgttcctgtggcctttatcattttggtccatctcttgagcccacatgaatactgtcatggatggaggaggaaggaccaggctgggtcagggcctgaatgcaggttttgtttggactataggggctaagttcactttaataggctgtgacctattaaaggaggcaggaaccaagtttgcacagaaggaccatcctagttgagttaaaggagttggggagttgattgtgaggggtttcctagattgctgctgggtaaggtgattgaatctgggaaggatagggtacttgattgcctagaagggtgcactctaagttctggataagaatggtgcccaagatgagctggaggggaaggcaagtgtttgaatgacccagtccctgaggtgagcctaggttagggttaagatttggtgagtgaacaggtgcaaacgcttgtggcttatttatccagaaaaagcattttctgtgtgcctttcaggtcaggctgttactttatccccttcaggcctgaccccatctcccccacgcatagctcaagctgaacagcccctgaagctgggaatcaagcccctaccttgtgttcagagcttccctaacgtccagtcgccacctagggtagccttccctccacaccctaggccgagagcagaagcgggtggcaggagcacagggagtgaggtccaggttagaggacaggccagaaggccctccgagagggtcccccaaccccgcaacgccaggacaggtttgcacgtccccagcagtaggcaagtcaggggggtcctagggttacagcggaggagaggacgggctataagcatgtggagggtgcacggggtggcgaggccaccaccagggggcgatttcagggccgcagcgcctagaggtggggggtcgcccgatggccgaaggctgtgtgtgagcctcgccctcaaaccgcctctattgtgctagagtagggggcgcaaagaagagagtggcgaccttcccctcaccccacccagtcggccccgcctttcaggaccccgccccacccccggctccgcctccaccacccccccccgccccgcctccagccgcggccccttcctctcgcagctggtgctgtggggccgcggagccgcgcgtcgctgtctctatggccccggatccgagcgcaaaggtgagcaaggcgaggagtgcgggcggcgccctggcgtgagcctggggctgcgggccgggggtcgggcaaggcctcccccacgtccattctaccctccaagctgggccaggcctttctcaccaccaagtcccccggtcctgcatgacggctctagaggggcgcgggccaggcctcgggctgcgcggggtgcaaaccggccaccacggagtcggggaccagcgcggggagggggccgcgtggcgaacagtgttccccaggatctgggtcacgtctcccggcgtccggcgggatcgaaggagagcttgtcctcgagctgcagcagtagagactgaggttagacctgacgaagggagaggaccgcggactgtccaggatgttggagggagggggtcccgggggaggggctctctcaagccaggagagaccgccatcctactaggcagagggaaataccgcctacactaggcaggtggacatctgggatgaaggtcgagagcctgctgatcctccattgatcctgtttgaagggtctctcnncncagttccctccaccccaagatct

SEQ ID NO: 364615 - DNA, 12859 bp, Homo sapiens
caaggggcttagatctcagtcatcagactatacaggacatgttcatcctggaacttacacaaataccttagaacgtctagtgaaggaaatggaagacacacaaaggctagatgaactgcagaagcaactacaagaagacataaggcaaggccgaggcattaaatccccaatcagaattggagaagaagacagtacagatgatgaggatggcctcttagaagagcacaaggaatttctaaagaaattttcagttacaattgatgctattcctgatcatcatccaggtgaagaaatatttaatttcctcaattctggaaaaattttcaatcagtataccttggatttaagagactctggttttattggacaaagtgctgtagaaaaacttattcttaaatcgggaaaaacagatcagatttttttgacaacacaaggtttccttacgtctgcttatcactatgtccagtgtcctgtccctgtgttaaagtggctgtttcggatgatgtcagttcatacagactgtattgtgtcagtgcagattttaagtacattgatggaaataacaattagaaatgataccttcagtgactcaccagtttggccatggatcccatcattgtctgatgtagcagctgtgtttttcaatatggggattgattttagatctttgtttcccctggagaatcttcagccagactttaatgaagactatctagtttctgaaacacagacaacatcaagggggaaagaaagtgaagattcatcttataagccaattttttcaacacttcctgaaaccaacattttaaatgtggttaagtttctaggcttgtgtacatctatacatccagaaggttaccaggatcgtgaaataatgttgctgattttaatgttatttaaaatgagtttggaaaaacagctgaaacagattcctttagtagactttcaaagcctcctgataaacctgatgaaaaacatcagagattggaacacaaaggtgcctgaactctgtctgggcataaatgaactctccagtcatccccacaacctcctgtggttggtacagctggtccctaattggacatcacgtggaaggcaactgagacagtgcctcagtctagtgattatttcaaagcttttggatgagaaacacgaagatgttcctaatgccagtaatctgcaggtatcagtcctacatcgctatcttgtgcagatgaagccttctgatttgttaaagaaaatggtcttgaagaaaaaggctgaacaaccagatggcattattgatgacagtcttcatttagaacttgaaaagcaggcatattacctgacctacattcttcttcatttagtcggtgaagttagttgttctcattctttttcttctggacaacggaaacactttgtgctactctgtggggctttggaaaagcatgttaaatgtgatattagggaagatgcaagacttttttacagaactaaggtgaaagacttggtcgccaggatacatggaaaatggcaggaaataatccagaactgtcggcctactcaggggcagcttcatgacttctgggtaccagattcttaataggagttgcagcagcaaaaatatgaaccaagagaaattcaataagagcctttcatagaggagtagaaaggattattacagaatccaatgaatgccaagaaaatgtacagcaaatgtgccacttgaatatctagtatgaagctggtaatgaagaaattgccatttctgaagcagatatgaaatatgatctgcttaattgttaaggcaactgacctttcaaaagtgcagagtcttattaaaagaggggaggggtagaagcagaataatagtcatatgtctaacctgccccagttaactcctcttgttaaattataagccagttatcttttttagatagtatttttgtcacttggataatcacaggaaatatataagaaaagagcttggactaacttgagaagttggacatggaaagcaagaccaagttccagttgggtttaattttccctcttggttattttcggacacaaagggaatgcttaaaactgagtttagtaataaaaagcataaatctcttctgtaacttttataaaccacagggaggtttcaatccatgcattttccttcattactcaagattataaatctgtttttaaaatacatctaaacaaacagttgagaaacaaaagtttggcatgttgtcagatccccttaagaggaagaggttaagctgtaaagtagtggccctgttttgatgccagaacattcatatgctgtttgttctggatttcttttaaatgcatgtattttaaatactggttaaatcttagaatcttggctatatcttagaattctggctcttggtaaccatattacagaagtctatattgtaaaagcctaaagatctggacaagtttccaacaaccttgtttccatgagtatataattttggcagacacctgaattctttgggacactgtgtctgtgtatgtgtgtgtgtgtgtgtgtgtgtgtgtgcgcttgtatcttgaagttgttgcacttcaaaaccacagctgctgtaaattcttaaacactggagagccatcctttggtttaaatggtagagggttagtggaagtgcacacgttgtttttagcccaggggtagtaacaaactcttactagccaactagaaaattattttgttgacgagatgtcccttttaggagggtttgtttcctgaaagaatgccaactttttttgttgttctttcagtattggcttgagtgacctgttctcctgagtgctctagtgtctccagttgtgggggggaaagatgatggaggggaacagaaactggacttgatgtttgcggtttgagaggcaagaaaataaaataactttctacctctaaattgaggcttaggagtaaaaagcattttgtcctaaatttatcatttaaaatagcatcagtaacttttgagctcatgtcaatcaagcattggcagtcagagattttatagggaagactaagtaaatccagtttccaagaacctaaactgattgaggctccaagagtcagaccaacaaaagttttattctgtgttgtttactggtaagaatattattatcttgatactacctctcaagggtattgttacaaaatgccacttatggttaaagagatagatacaaagagttctatttgacagaagcttgaaactctggcatctatctgcccaacgatgggggctttcgttctgtaatttaatcctttgtagatacattatttgtgtgtaattttatacgtgttcatatttttctcattttgcattgtgtaaagtgtacaaaatctcaaagtataaaatactgcttatattgcttgtaatttacagtgtgtaaatattttctaattgtgtacattgatgggggggacaagtgggttattcaggtttttttttaatgacccttttgtattgcagtttcaacagataactgtccatcaaatttaaaaccactttgatacatttttatttaacagttccaataagaaaaaaatctctatttttaattatatttctcctttagaaaaaaaatacttcatggtccctctaaaataaatggccagacctcagtttaggcccttgtatttatgactctggtagaggtcttcagactccaggtcatagtccagtcagtatttgcatttgggttctcatgaaaactttgtgactctcttttagcacaagtagcccatggtttttcttccaaatcaagtattttacttctcccttgagtccccatgctttgtctccctcctgctgctattgcccggtgaatgggatggtagagagggagaaatgttcattgcacagagaatgtcaggccactttggggacttggcaaacgaagcttgcactgagtggtggtgtgtttggcaatattactgtgccaaaaatcaccttgtctaattttatggatatgtatggcaaacttattacccttcttgcaagctgcacattaaggtacttgtaagtgtttatgcttttgtgtgtaactgtttgccttttctaactgcttttcttgttactgaaaatataattctactagttttatcacattaagaggctctccatgcacaaaatgcattgatgtagccgtaaagtaacagcatttgtacattttctatctcctgatggcagtggtgcctttgtcaccttttggaaggtttgcattttgtttctgctttcaagcgcaaatagtagcttgctttcagcttcacaaaaatctcctcaaatgtaaaagatacaaaatggcgtgttatcatccaggcttagttggagtatttgcatttttatttttatcaaaacaaatataattggtggggactggccagtaataatgtgtggcgtctttaagccaagagtaatttttaaattaaaaatgaaaattttaagaggtagcccattaaacaagctactgagttggagaattaggggatgactgtggtggtttgtcgctaaggaggcaacagtagggtccaggcggcggggcacgtagagcagttagcatgatccatggttattccttactcatgaacagtgtcggcgcacctcattatctgtgcatttgtttttcctgggcagtcctgtcagccagttaatccaccagctcttaggaagtaaatacagatttttttctttccttttttttttttttaaagattttatactacatcttgttaaagtcctatgaatgtgtgtgtgtgtgtgctattaaaactgctttttctcagtttgaacatgtgtttggtaatatttgtttgggagttggggaggctaagttatctggaatgccctgttccctcagcccaccccagtcccctggcttttaaacatttcttcttgctttggattgtccagttttttagcttgatgtctcctgtttctggaaaacataaagccaccattgtacacagttcacttttatataacccagttaattgctgtatactttgcaatcaggaattcagtaatctcattcttacctcattcactatgttcattccaccattcattctaacaattgagtctcaactacatactaggcactctttttaggattcagtaaggatttgatggtgaacaacatagagaactcatgaatcttacctcctggtatccaggttaaaatactttctgttcttgggcaaagagaattagaaacaaatacccttaacctgactcccttgttcttgagcccaggaccaagaaagaagaagctgtacaatgcagaagcagggcttgagatcacctccaacctgccaagcagatagagatctgggtatgccaacttgggaggcagaggttgaaacctcataggaggaactttggagctcatagaaggccttggcattgtcagaggccttgagttccaaaaccatgccagtatttctgccttctgacaggctggctagaaagagactaaatgggagcatttttctctgacagtggggcggagggatgaggggatgacagcccaggaagaagcagagacattgccataagtacttactagagggcaggcagcacagctttatgcaagttaagggccttgaccttgccccaaggcctgacctcagatcccagattcatcatactagccttttgatctttgccaaattacttaaactcactgtttcctcatctgttgaataatggtgtctacctcagggtttgtgaggactaagcgagctaatgcatgaaaagtgcctagtacagtgcctggcatatagcaagaactcagcaaatgcttgctgctctaacgaggcgtttctctgatgacagatttgatcttaagcagacacctcagggtgtactgacatctgagcaaaccatatctccaaaaattatagttgtaagtgtgccctatttctttggataccgggagctggagcttctctgtccagctatctctgctgattttttttaattaaaattttcactttttaaaagccagcatgctaaagctgagaaattggtgatgggtggtggttttccagcatttgtgggaatgtcctgacactccctttcccttactaaccattccctaggctggagtcaagagagggcaaaccagaaggcccagctttgggtctgactccaagacgactggctgggaggaaaactaaacaggcttctgaggcacagtggaatagtgagacttccgcattgttgcactggtgacagcccctacagaagaagcacctcagctgtatatatagccaaaataaagaccacaccacctaaagggaaagtgctgggcaaaccagagatggagatggcaaagcaggaacagaaatgctgccacattgaacagtaagcaggacaacttgactaggccagagttctcttgcttcagggaacctgctcaagtttcaggaattcatacccacccccttcacctaggatccctgctacagtaagtaactgttctgtgcaaagtggagctaaactctggtgtgtaagtggctgacaatcactgctgaagacggccagcactaccctcagccactttcttacagcaaagttggggaaaatagactagcaaaaacaaaactcatacttttctgtgtgtgtgaagttctccagaaggtttccaaatggaatcctctcacagccaccctgcgaagcagccagggtagtgaccttatggatgagtgacagcctgttcaaagaatgacctgcctgtgtcccaggatgcagatttatggctgggttagggttaatttctttagttgatttccagttttcttttccactgtctgtcagtattcccccgttcttattttaccagctggatttgcagagagacatactgtcaatcaaaagggcttcctatgggcagctccattaattgcttttacatctgatactctcattaggtttagagattttactgggaggctagcagaaggaaatggattgtggtctgctatcaaaagtactgaagtaactgcccagtgatcattgaaatcacacattttgctcatttaacaatgtctgagtttgccatcagcacctcagaggagcaaagcttggttcataaagtgaagttgagtgatactgagcctaccacactggcctactcgccacctccagagctatctgaagtcagcactgcaggttctgtgaacatttgggaagctgtgcctcttagccccctgggcccctacagtttaattgctctcctatctgctactgaaggaccagcagtcttcctaccctgcctccactgttaccaccaacccactttttgataaggactgcagatttatctttcttagccctgccttgactggtcttcccacctcagacgtccttactcagtccatcatctctttcaggattttcttctgtggtctttttcaaactactagctgacttttcccttttatttcccactaggaacccctccccgcccccccccccccagccatttcatcaaatcaaactcactgccctctttcatgccccttccttagttccccaacacaagcctgtgcataagcttgaacatttctacctttgccaatggtatttccccttctggcttaccctgcttcctccttctcagacttttccagtcttgattgtcctctccataaacacaagaatgaacttcaaggcaagttacttaatgtcttagagcctgtttccccatccataaaatggggctataaattcctcaggatgggatgagggtacaaataaaaaatgaagcaggatattctttgtaaaagtgtgtgtacattttttattgtgtttctccccagctaccttccctctccccgccacacacatcctatttgcagagtgttgggggaggtggaactgtgatgtgggccctgctgtctagcagtctgcagtcacacacagccatccaaactacgagattgtatatgattcagtgccaaactgtgagctttggggaatccagaaagaaggatgaagcctttcccaagtttcctttagttaaatgtgccacttgaatcctgttctgactcctaggcacatgcaagagtcaatcacatatgttcctgtggcctttatcattttggtccatctcttgagcccacatgaatactgtcatggatggaggaggaaggaccaggctgggtcagggcctgaatgcaggttttgtttggactataggggctaagttcactttaataggctgtgacctattaaaggaggcaggaaccaagtttgcacagaaggaccatcctagttgagttaaaggagttggggagttgattgtgaggggtttcctagattgctgctgggtaaggtgattgaatctgggaaggatagggtacttgattgcctagaagggtgcactctaagttctggataagaatggtgcccaagatgagctggaggggaaggcaagtgtttgaatgacccagtccctgaggtgagcctaggttagggttaagatttggtgagtgaacaggtgcaaacgcttgtggcttatttatccagaaaaagcattttctgtgtgcctttcaggtcaggctgttactttatccccttcaggcctgaccccatctcccccacgcatagctcaagctgaacagcccctgaagctgggaatcaagcccctaccttgtgttcagagcttccctaacgtccagtcgccacctagggtagccttccctccacaccctaggccgagagcagaagcgggtggcaggagcacagggagtgaggtccaggttagaggacaggccagaaggccctccgagagggtcccccaaccccgcaacgccaggacaggtttgcacgtccccagcagtaggcaagtcaggggggtcctagggttacagcggaggagaggacgggctataagcatgtggagggtgcacggggtggcgaggccaccaccagggggcgatttcagggccgcagcgcctagaggtggggggtcgcccgatggccgaaggctgtgtgtgagcctcgccctcaaaccgcctctattgtgctagagtagggggcgcaaagaagagagtggcgaccttcccctcaccccacccagtcggccccgcctttcaggaccccgccccacccccggctccgcctccaccacccccccccgccccgcctccagccgcggccccttcctctcgcagctggtgctgtggggccgcggagccgcgcgtcgctgtctctatggccccggatccgagcgcaaagctgggccaggcctttctcaccaccaagtcccccggtcctgcatgacggctctagaggggcgcgggccaggcctcgggctgcgcggggtgcaaaccggccaccacggagtcggggaccagcgcggggagggggccgcgtggcgaacagtgttccccaggatctgggtcacgtctcccggcgtccggcgggatcgaaggagagcttgtcctcgagctgcagcagtagagactgagaaaacggacctcagaaaaccaggactagctctactgtcgggggcagggtgaccccatcagtaacctacaacccctctagaacttcacaactccctctcaccatggagtttgcatttgatgcagaaaggcatgtgatccctccctccttctgacctcttagctggggattccatggccacacaaccctgtgactccatgtccccccgattccaggaccccccatggccccatgattccttgactcctatgaccttatgacccctgaccttccaagtgacttccttggactttgacccctgtgactgtgcttcccattccccgcccccacaacctgtgactctggctccctttgggggtcttgttagtctgggcctccccaggaagatgtgggggaggctctggcccctcctcctcagcatcctcacagcaactgcagtcccaggaccctcactgcggagaccgtctagagaactagatgccacccctcggatgaccataccctatgaagagctctctgggacccggcacttcaagggccaagcccagaactactcaacactgctgctggaggaggcctcagcaaggctgctggtgggagcccgaggtgccctgttctctctcagtgccaacgacataggagatggggctcacaaagagatccactgggaagcctccccagagatgcaaagcaaatgtcatcaaaaagggaaaaacaaccagacggagtgctttaaccatgtgcggttcctgcagcggctcaattctacccacctctatgcatgtgggactcacgccttccagcccctctgtgcagccattgatgctgaggccttcaccttgccaaccagcttcgaggaggggaaggagaagtgtccttatgacccagcccgtggcttcacaggcctcatcattgatggaggcctctacacagccactaggtatgaattccggagcattcctgacatccgccggagccgccacccacactccctgagaactgaggagacaccaatgcattggctcaatgatgcggagtttgtgttctccgtcctcgtgcgggagagcaaggccagtgcagtgggtgatgatgacaaggtgtactacttcttcacggagcgtgccactgaggagggctctggcagcttcactcagagccgcagcagtcaccgtgtggcccgtgtggctcgtgtctgcaagggagacctgggagggaagaagatcctgcagaagaagtggacttccttcctgaaagcccgtctcatctgccacattccactgtatgagacactgcgtggggtctgcagcctggatgctgaaacctcaagccgtacacacttctatgcagccttcacgctgagcacacagtggaagaccctggaggcctcagccatctgccgctatgacctggcagagatccaggctgtctttgcaggaccctatatggaataccaggatggttcccggcgctggggtcgctatgagggtggggtgcctgagccccggcctggctcgtgtatcacagattcattgcgcagccaaggctacaattcatcccaagacttgccatccctggtcctggactttgtaaagttgcacccactgatggctcggcccgttgtgcccacacgtggacggcccctgctgctcaagcgcaacatacgctacacacaccttacagggacacctgtcaccacgcctgctggacctacctatgacctgctctttctgggcacagctgatggctggatccacaaggccgtagtcctgggctctgggatgcacattattgaagagacacaagtgttcagggagtcccagtctgtggaaaatctagtcatctctctattgcgcacagcctctatgtgggggctcctagcggagtcatccagctaccactctccagctgctcccgctaccgatcctgctatgactgcatcttggcccgagacccctactgtggctgggaccctggcacccatgcctgcgcagcagccaccaccatagccaacaggtcccaggacagcactgatacaggacatagagagaggaaatcgaggctgtgagagcagcagggatacagggccaccaccaccactgaagacccgctctgtgctccggggtgatgatgtcctcctgccctgtgaccagccatccaacctggcccgggccttgtggctactcaatgggagcatgggcctgagcgatgggcagggtggctaccgtgtgggcgtggacgggctgctggttacagatgcacagcctgagcacagtggcaactatggctgctatgccgaggatgaatggcaatagctatgtgcttctgaggcagagcaacaatggagtaccagcagggccctgctccttcgccgaggaactcagccgcatcctggaaaaaaggaagcacacgcagctcgtggagcagctagatgagagctctgtctgagcccagcctcccagaacaaatgctcttccaagccagcctatctgtcccaggctgggccactgcctccctaacacagccaccctcccttcattacccccactccatacccttctcccaactttttgatgtccctgtagggctggccagtcaggcccagccaaagccccctcctcagtctccacagacccacatgtgagcagcccaggcccatcggtgctcctcagaggcagggctctgcaggtccatatgggctcaatgtcaccaccctctgcatggccctgtgtgctggatggtcctgaaaccagacaagacctctgccagccacctaagccctgcgtacattcacatgcacacatggaagaatgtttatcggctgggctgcagtgcccccaccctcaccttctcctggtgcattcttgtttcatccctgcttctggacttggggtaccctcccaattgccacatcctatctggtcctcttccccagccccatgtggtgacctctttgtcaagagcttgggaacgggccagcctggggagctatgactagtctgcttcatctagatgcgcccacccctgatcaccaggggacaggctcctgagcctatacagaaggtgatatctgcctccaggattggctctgctccccaatacaactatttgcagaggaaattgggatcctccgcttccatcctgactccttggcaggcacacaggcctctttagtaaggttcacactattcattgatcatggtgttagggcatgacaagaaaatgacaacagttcaagaattcttacaggggtttctagattttcatttcctgcctctcatttccccaccatcccccctttttaaactaagattagaaaatactcattaatatcagccttcctgcccttccccaaggttctcagcaccccc

SEQ ID NO: 364616 - DNA, 11771 bp, Homo sapiens
caaggggcttagatctcagtcatcagactatacaggacatgttcatcctggaacttacacaaataccttagaacgtctagtgaaggaaatggaagacacacaaaggctagatgaactgcagaagcaactacaagaagacataaggcaaggccgaggcattaaatccccaatcagaattggagaagaagacagtacagatgatgaggatggcctcttagaagagcacaaggaatttctaaagaaattttcagttacaattgatgctattcctgatcatcatccaggtgaagaaatatttaatttcctcaattctggaaaaattttcaatcagtataccttggatttaagagactctggttttattggacaaagtgctgtagaaaaacttattcttaaatcgggaaaaacagatcagatttttttgacaacacaaggtttccttacgtctgcttatcactatgtccagtgtcctgtccctgtgttaaagtggctgtttcggatgatgtcagttcatacagactgtattgtgtcagtgcagattttaagtacattgatggaaataacaattagaaatgataccttcagtgactcaccagtttggccatggatcccatcattgtctgatgtagcagctgtgtttttcaatatggggattgattttagatctttgtttcccctggagaatcttcagccagactttaatgaagactatctagtttctgaaacacagacaacatcaagggggaaagaaagtgaagattcatcttataagccaattttttcaacacttcctgaaaccaacattttaaatgtggttaagtttctaggcttgtgtacatctatacatccagaaggttaccaggatcgtgaaataatgttgctgattttaatgttatttaaaatgagtttggaaaaacagctgaaacagattcctttagtagactttcaaagcctcctgataaacctgatgaaaaacatcagagattggaacacaaaggtgcctgaactctgtctgggcataaatgaactctccagtcatccccacaacctcctgtggttggtacagctggtccctaattggacatcacgtggaaggcaactgagacagtgcctcagtctagtgattatttcaaagcttttggatgagaaacacgaagatgttcctaatgccagtaatctgcaggtatcagtcctacatcgctatcttgtgcagatgaagccttctgatttgttaaagaaaatggtcttgaagaaaaaggctgaacaaccagatggcattattgatgacagtcttcatttagaacttgaaaagcaggcatattacctgacctacattcttcttcatttagtcggtgaagttagttgttctcattctttttcttctggacaacggaaacactttgtgctactctgtggggctttggaaaagcatgttaaatgtgatattagggaagatgcaagacttttttacagaactaaggtgaaagacttggtcgccaggatacatggaaaatggcaggaaataatccagaactgtcggcctactcaggggcagcttcatgacttctgggtaccagattcttaataggagttgcagcagcaaaaatatgaaccaagagaaattcaataagagcctttcatagaggagtagaaaggattattacagaatccaatgaatgccaagaaaatgtacagcaaatgtgccacttgaatatctagtatgaagctggtaatgaagaaattgccatttctgaagcagatatgaaatatgatctgcttaattgttaaggcaactgacctttcaaaagtgcagagtcttattaaaagaggggaggggtagaagcagaataatagtcatatgtctaacctgccccagttaactcctcttgttaaattataagccagttatcttttttagatagtatttttgtcacttggataatcacaggaaatatataagaaaagagcttggactaacttgagaagttggacatggaaagcaagaccaagttccagttgggtttaattttccctcttggttattttcggacacaaagggaatgcttaaaactgagtttagtaataaaaagcataaatctcttctgtaacttttataaaccacagggaggtttcaatccatgcattttccttcattactcaagattataaatctgtttttaaaatacatctaaacaaacagttgagaaacaaaagtttggcatgttgtcagatccccttaagaggaagaggttaagctgtaaagtagtggccctgttttgatgccagaacattcatatgctgtttgttctggatttcttttaaatgcatgtattttaaatactggttaaatcttagaatcttggctatatcttagaattctggctcttggtaaccatattacagaagtctatattgtaaaagcctaaagatctggacaagtttccaacaaccttgtttccatgagtatataattttggcagacacctgaattctttgggacactgtgtctgtgtatgtgtgtgtgtgtgtgtgtgtgtgtgtgcgcttgtatcttgaagttgttgcacttcaaaaccacagctgctgtaaattcttaaacactggagagccatcctttggtttaaatggtagagggttagtggaagtgcacacgttgtttttagcccaggggtagtaacaaactcttactagccaactagaaaattattttgttgacgagatgtcccttttaggagggtttgtttcctgaaagaatgccaactttttttgttgttctttcagtattggcttgagtgacctgttctcctgagtgctctagtgtctccagttgtgggggggaaagatgatggaggggaacagaaactggacttgatgtttgcggtttgagaggcaagaaaataaaataactttctacctctaaattgaggcttaggagtaaaaagcattttgtcctaaatttatcatttaaaatagcatcagtaacttttgagctcatgtcaatcaagcattggcagtcagagattttatagggaagactaagtaaatccagtttccaagaacctaaactgattgaggctccaagagtcagaccaacaaaagttttattctgtgttgtttactggtaagaatattattatcttgatactacctctcaagggtattgttacaaaatgccacttatggttaaagagatagatacaaagagttctatttgacagaagcttgaaactctggcatctatctgcccaacgatgggggctttcgttctgtaatttaatcctttgtagatacattatttgtgtgtaattttatacgtgttcatatttttctcattttgcattgtgtaaagtgtacaaaatctcaaagtataaaatactgcttatattgcttgtaatttacagtgtgtaaatattttctaattgtgtacattgatgggggggacaagtgggttattcaggtttttttttaatgacccttttgtattgcagtttcaacagataactgtccatcaaatttaaaaccactttgatacatttttatttaacagttccaataagaaaaaaatctctatttttaattatatttctcctttagaaaaaaaatacttcatggtccctctaaaataaatggccagacctcagtttaggcccttgtatttatgactctggtagaggtcttcagactccaggtcatagtccagtcagtatttgcatttgggttctcatgaaaactttgtgactctcttttagcacaagtagcccatggtttttcttccaaatcaagtattttacttctcccttgagtccccatgctttgtctccctcctgctgctattgcccggtgaatgggatggtagagagggagaaatgttcattgcacagagaatgtcaggccactttggggacttggcaaacgaagcttgcactgagtggtggtgtgtttggcaatattactgtgccaaaaatcaccttgtctaattttatggatatgtatggcaaacttattacccttcttgcaagctgcacattaaggtacttgtaagtgtttatgcttttgtgtgtaactgtttgccttttctaactgcttttcttgttactgaaaatataattctactagttttatcacattaagaggctctccatgcacaaaatgcattgatgtagccgtaaagtaacagcatttgtacattttctatctcctgatggcagtggtgcctttgtcaccttttggaaggtttgcattttgtttctgctttcaagcgcaaatagtagcttgctttcagcttcacaaaaatctcctcaaatgtaaaagatacaaaatggcgtgttatcatccaggcttagttggagtatttgcatttttatttttatcaaaacaaatataattggtggggactggccagtaataatgtgtggcgtctttaagccaagagtaatttttaaattaaaaatgaaaattttaagaggtagcccattaaacaagctactgagttggagaattaggggatgactgtggtggtttgtcgctaaggaggcaacagtagggtccaggcggcggggcacgtagagcagttagcatgatccatggttattccttactcatgaacagtgtcggcgcacctcattatctgtgcatttgtttttcctgggcagtcctgtcagccagttaatccaccagctcttaggaagtaaatacagatttttttctttccttttttttttttttaaagattttatactacatcttgttaaagtcctatgaatgtgtgtgtgtgtgtgctattaaaactgctttttctcagtttgaacatgtgtttggtaatatttgtttgggagttggggaggctaagttatctggaatgccctgttccctcagcccaccccagtcccctggcttttaaacatttcttcttgctttggattgtccagttttttagcttgatgtctcctgtttctggaaaacataaagccaccattgtacacagttcacttttatataacccagttaattgctgtatactttgcaatcaggaattcagtaatctcattcttacctcattcactatgttcattccaccattcattctaacaattgagtctcaactacatactaggcactctttttaggattcagtaaggatttgatggtgaacaacatagagaactcatgaatcttacctcctggtatccaggttaaaatactttctgttcttgggcaaagagaattagaaacaaatacccttaacctgactcccttgttcttgagcccaggaccaagaaagaagaagctgtacaatgcagaagcagggcttgagatcacctccaacctgccaagcagatagagatctgggtatgccaacttgggaggcagaggttgaaacctcataggaggaactttggagctcatagaaggccttggcattgtcagaggccttgagttccaaaaccatgccagtatttctgccttctgacaggctggctagaaagagactaaatgggagcatttttctctgacagtggggcggagggatgaggggatgacagcccaggaagaagcagagacattgccataagtacttactagagggcaggcagcacagctttatgcaagttaagggccttgaccttgccccaaggcctgacctcagatcccagattcatcatactagccttttgatctttgccaaattacttaaactcactgtttcctcatctgttgaataatggtgtctacctcagggtttgtgaggactaagcgagctaatgcatgaaaagtgcctagtacagtgcctggcatatagcaagaactcagcaaatgcttgctgctctaacgaggcgtttctctgatgacagatttgatcttaagcagacacctcagggtgtactgacatctgagcaaaccatatctccaaaaattatagttgtaagtgtgccctatttctttggataccgggagctggagcttctctgtccagctatctctgctgattttttttaattaaaattttcactttttaaaagccagcatgctaaagctgagaaattggtgatgggtggtggttttccagcatttgtgggaatgtcctgacactccctttcccttactaaccattccctaggctggagtcaagagagggcaaaccagaaggcccagctttgggtctgactccaagacgactggctgggaggaaaactaaacaggcttctgaggcacagtggaatagtgagacttccgcattgttgcactggtgacagcccctacagaagaagcacctcagctgtatatatagccaaaataaagaccacaccacctaaagggaaagtgctgggcaaaccagagatggagatggcaaagcaggaacagaaatgctgccacattgaacagtaagcaggacaacttgactaggccagagttctcttgcttcagggaacctgctcaagtttcaggaattcatacccacccccttcacctaggatccctgctacagtaagtaactgttctgtgcaaagtggagctaaactctggtgtgtaagtggctgacaatcactgctgaagacggccagcactaccctcagccactttcttacagcaaagttggggaaaatagactagcaaaaacaaaactcatacttttctgtgtgtgtgaagttctccagaaggtttccaaatggaatcctctcacagccaccctgcgaagcagccagggtagtgaccttatggatgagtgacagcctgttcaaagaatgacctgcctgtgtcccaggatgcagatttatggctgggttagggttaatttctttagttgatttccagttttcttttccactgtctgtcagtattcccccgttcttattttaccagctggatttgcagagagacatactgtcaatcaaaagggcttcctatgggcagctccattaattgcttttacatctgatactctcattaggtttagagattttactgggaggctagcagaaggaaatggattgtggtctgctatcaaaagtactgaagtaactgcccagtgatcattgaaatcacacattttgctcatttaacaatgtctgagtttgccatcagcacctcagaggagcaaagcttggttcataaagtgaagttgagtgatactgagcctaccacactggcctactcgccacctccagagctatctgaagtcagcactgcaggttctgtgaacatttgggaagctgtgcctcttagccccctgggcccctacagtttaattgctctcctatctgctactgaaggaccagcagtcttcctaccctgcctccactgttaccaccaacccactttttgataaggactgcagatttatctttcttagccctgccttgactggtcttcccacctcagacgtccttactcagtccatcatctctttcaggattttcttctgtggtctttttcaaactactagctgacttttcccttttatttcccactaggaacccctccccgcccccccccccccagccatttcatcaaatcaaactcactgccctctttcatgccccttccttagttccccaacacaagcctgtgcataagcttgaacatttctacctttgccaatggtatttccccttctggcttaccctgcttcctccttctcagacttttccagtcttgattgtcctctccataaacacaagaatgaacttcaaggcaagttacttaatgtcttagagcctgtttccccatccataaaatggggctataaattcctcaggatgggatgagggtacaaataaaaaatgaagcaggatattctttgtaaaagtgtgtgtacattttttattgtgtttctccccagctaccttccctctccccgccacacacatcctatttgcagagtgttgggggaggtggaactgtgatgtgggccctgctgtctagcagtctgcagtcacacacagccatccaaactacgagattgtatatgattcagtgccaaactgtgagctttggggaatccagaaagaaggatgaagcctttcccaagtttcctttagttaaatgtgccacttgaatcctgttctgactcctaggcacatgcaagagtcaatcacatatgttcctgtggcctttatcattttggtccatctcttgagcccacatgaatactgtcatggatggaggaggaaggaccaggctgggtcagggcctgaatgcaggttttgtttggactataggggctaagttcactttaataggctgtgacctattaaaggaggcaggaaccaagtttgcacagaaggaccatcctagttgagttaaaggagttggggagttgattgtgaggggtttcctagattgctgctgggtaaggtgattgaatctgggaaggatagggtacttgattgcctagaagggtgcactctaagttctggataagaatggtgcccaagatgagctggaggggaaggcaagtgtttgaatgacccagtccctgaggtgagcctaggttagggttaagatttggtgagtgaacaggtgcaaacgcttgtggcttatttatccagaaaaagcattttctgtgtgcctttcaggtcaggctgttactttatccccttcaggcctgaccccatctcccccacgcatagctcaagctgaacagcccctgaagctgggaatcaagcccctaccttgtgttcagagcttccctaacgtccagtcgccacctagggtagccttccctccacaccctaggccgagagcagaagcgggtggcaggagcacagggagtgaggtccaggttagaggacaggccagaaggccctccgagagggtcccccaaccccgcaacgccaggacaggtttgcacgtccccagcagtaggcaagtcaggggggtcctagggttacagcggaggagaggacgggctataagcatgtggagggtgcacggggtggcgaggccaccaccagggggcgatttcagggccgcagcgcctagaggtggggggtcgcccgatggccgaaggctgtgtgtgagcctcgccctcaaaccgcctctattgtgctagagtagggggcgcaaagaagagagtggcgaccttcccctcaccccacccagtcggccccgcctttcaggaccccgccccacccccggctccgcctccaccacccccccccgccccgcctccagccgcggccccttcctctcgcagctggtgctgtggggccgcggagccgcgcgtcgctgtctctatggccccggatccgagcgcaaagctgggccaggcctttctcaccaccaagtcccccggtcctgcatgacggctctagaggggcgcgggccaggcctcgggctgcgcggggtgcaaaccggccaccacggagtcggggaccagcgcggggagggggccgcgtggcgaacagtgttccccaggatctgggtcacgtctcccggcgtccggcgggatcgaaggagagcttgtcctcgagctgcagcagtagagactgagaaaacggacctcagaaaaccaggactagctctactgtcgggggcagggtgaccccatcagtaacctacaacccctctagaacttcacaactccctctcaccatggagtttgcatttgatgcagaaaggcatgtgatccctccctccttctgacctcttagctggggattccatggccacacaaccctgtgactccatgtccccccgattccaggaccccccatggccccatgattccttgactcctatgaccttatgacccctgaccttccaagtgacttccttggactttgacccctgtgactgtgcttcccattccccgcccccacaacctgtgactctggctccctttgggggtcttgttagtctgggcctccccaggaagatgtgggggaggctctggcccctcctcctcagcatcctcacagcaactgcagtcccaggaccctcactgcggagaccgtctagagaactagatgccacccctcggatgaccataccctatgaagagctctctgggacccggcacttcaagggccaagcccagaactactcaacactgctgctggaggaggcctcagcaaggctgctggtgggagcccgaggtgccctgttctctctcagtgccaacgacataggagatggggctcacaaagagatccactgggaagcctccccagagatgcaaagcaaatgtcatcaaaaagggaaaaacaaccagacggagtgctttaaccatgtgcggttcctgcagcggctcaattctacccacctctatgcatgtgggactcacgccttccagcccctctgtgcagccattgatgctgaggccttcaccttgccaaccagcttcgaggaggggaaggagaagtgtccttatgacccagcccgtggcttcacaggcctcatcattgatggaggcctctacacagccactaggtatgaattccggagcattcctgacatccgccggagccgccacccacactccctgagaactgaggagacaccaatgcattggctcaatgatgcggagtttgtgttctccgtcctcgtgcgggagagcaaggccagtgcagtgggtgatgatgacaaggtgtactacttcttcacggagcgtgccactgaggagggctctggcagcttcactcagagccgcagcagtcaccgtgtggcccgtgtggctcgtgtctgcaagggagacctgggagggaagaagatcctgcagaagaagtggacttccttcctgaaagcccgtctcatctgccacattccactgtatgagacactgcgtggggtctgcagcctggatgctgaaacctcaagccgtacacacttctatgcagccttcacgctgagcacacagtggaagaccctggaggcctcagccatctgccgctatgacctggcagagatccaggctgtctttgcaggaccctatatggaataccaggatggttcccggcgctggggtcgctatgagggtggggtgcctgagccccggcctggctcgtgtatcacagattcattgcgcagccaaggctacaattcatcccaagacttgccatccctggtcctggactttgtaaagttgcacccactgatggctcggcccgttgtgcccacacgtggacggcccctgctgctcaagcgcaacatacgctacacacaccttacagggacacctgtcaccacgcctgctggacctacctatgacctgctctttctgggcacagctgatggctggatccacaaggccgtagtcctgggctctgggatgcacattattgaagagacacaagtgttcagggagtcccagtctgtggaaaatctagtcatctctctattgcgcacagcctctatgtgggggctcctagcggagtcatccagctaccactctccagctgctcccgctaccgatcctgctatgactgcatcttggcccgagacccctactgtggctgggaccctggcacccatgcctgcgcagcagccaccaccatagccaacaggtcccaggacagcactgatacaggacatagagagaggaaatcgaggctgtgagagcagcagggatacaggtaagtgactcatatgagtgtgggtctagctacgcagactgtcctctttgccatttactgccatgtgtacgtatatgtttgtatctgagtggctgtggctatgtacatttggtaaggatgactcaaacacagagcctggcacagagtaagtgctcaacaaacatttactgcccaaatgaattataaactaggaaacat

SEQ ID NO: 364617 - DNA, 11747 bp, Homo sapiens
caaggggcttagatctcagtcatcagactatacaggacatgttcatcctggaacttacacaaataccttagaacgtctagtgaaggaaatggaagacacacaaaggctagatgaactgcagaagcaactacaagaagacataaggcaaggccgaggcattaaatccccaatcagaattggagaagaagacagtacagatgatgaggatggcctcttagaagagcacaaggaatttctaaagaaattttcagttacaattgatgctattcctgatcatcatccaggtgaagaaatatttaatttcctcaattctggaaaaattttcaatcagtataccttggatttaagagactctggttttattggacaaagtgctgtagaaaaacttattcttaaatcgggaaaaacagatcagatttttttgacaacacaaggtttccttacgtctgcttatcactatgtccagtgtcctgtccctgtgttaaagtggctgtttcggatgatgtcagttcatacagactgtattgtgtcagtgcagattttaagtacattgatggaaataacaattagaaatgataccttcagtgactcaccagtttggccatggatcccatcattgtctgatgtagcagctgtgtttttcaatatggggattgattttagatctttgtttcccctggagaatcttcagccagactttaatgaagactatctagtttctgaaacacagacaacatcaagggggaaagaaagtgaagattcatcttataagccaattttttcaacacttcctgaaaccaacattttaaatgtggttaagtttctaggcttgtgtacatctatacatccagaaggttaccaggatcgtgaaataatgttgctgattttaatgttatttaaaatgagtttggaaaaacagctgaaacagattcctttagtagactttcaaagcctcctgataaacctgatgaaaaacatcagagattggaacacaaaggtgcctgaactctgtctgggcataaatgaactctccagtcatccccacaacctcctgtggttggtacagctggtccctaattggacatcacgtggaaggcaactgagacagtgcctcagtctagtgattatttcaaagcttttggatgagaaacacgaagatgttcctaatgccagtaatctgcaggtatcagtcctacatcgctatcttgtgcagatgaagccttctgatttgttaaagaaaatggtcttgaagaaaaaggctgaacaaccagatggcattattgatgacagtcttcatttagaacttgaaaagcaggcatattacctgacctacattcttcttcatttagtcggtgaagttagttgttctcattctttttcttctggacaacggaaacactttgtgctactctgtggggctttggaaaagcatgttaaatgtgatattagggaagatgcaagacttttttacagaactaaggtgaaagacttggtcgccaggatacatggaaaatggcaggaaataatccagaactgtcggcctactcaggggcagcttcatgacttctgggtaccagattcttaataggagttgcagcagcaaaaatatgaaccaagagaaattcaataagagcctttcatagaggagtagaaaggattattacagaatccaatgaatgccaagaaaatgtacagcaaatgtgccacttgaatatctagtatgaagctggtaatgaagaaattgccatttctgaagcagatatgaaatatgatctgcttaattgttaaggcaactgacctttcaaaagtgcagagtcttattaaaagaggggaggggtagaagcagaataatagtcatatgtctaacctgccccagttaactcctcttgttaaattataagccagttatcttttttagatagtatttttgtcacttggataatcacaggaaatatataagaaaagagcttggactaacttgagaagttggacatggaaagcaagaccaagttccagttgggtttaattttccctcttggttattttcggacacaaagggaatgcttaaaactgagtttagtaataaaaagcataaatctcttctgtaacttttataaaccacagggaggtttcaatccatgcattttccttcattactcaagattataaatctgtttttaaaatacatctaaacaaacagttgagaaacaaaagtttggcatgttgtcagatccccttaagaggaagaggttaagctgtaaagtagtggccctgttttgatgccagaacattcatatgctgtttgttctggatttcttttaaatgcatgtattttaaatactggttaaatcttagaatcttggctatatcttagaattctggctcttggtaaccatattacagaagtctatattgtaaaagcctaaagatctggacaagtttccaacaaccttgtttccatgagtatataattttggcagacacctgaattctttgggacactgtgtctgtgtatgtgtgtgtgtgtgtgtgtgtgtgtgtgcgcttgtatcttgaagttgttgcacttcaaaaccacagctgctgtaaattcttaaacactggagagccatcctttggtttaaatggtagagggttagtggaagtgcacacgttgtttttagcccaggggtagtaacaaactcttactagccaactagaaaattattttgttgacgagatgtcccttttaggagggtttgtttcctgaaagaatgccaactttttttgttgttctttcagtattggcttgagtgacctgttctcctgagtgctctagtgtctccagttgtgggggggaaagatgatggaggggaacagaaactggacttgatgtttgcggtttgagaggcaagaaaataaaataactttctacctctaaattgaggcttaggagtaaaaagcattttgtcctaaatttatcatttaaaatagcatcagtaacttttgagctcatgtcaatcaagcattggcagtcagagattttatagggaagactaagtaaatccagtttccaagaacctaaactgattgaggctccaagagtcagaccaacaaaagttttattctgtgttgtttactggtaagaatattattatcttgatactacctctcaagggtattgttacaaaatgccacttatggttaaagagatagatacaaagagttctatttgacagaagcttgaaactctggcatctatctgcccaacgatgggggctttcgttctgtaatttaatcctttgtagatacattatttgtgtgtaattttatacgtgttcatatttttctcattttgcattgtgtaaagtgtacaaaatctcaaagtataaaatactgcttatattgcttgtaatttacagtgtgtaaatattttctaattgtgtacattgatgggggggacaagtgggttattcaggtttttttttaatgacccttttgtattgcagtttcaacagataactgtccatcaaatttaaaaccactttgatacatttttatttaacagttccaataagaaaaaaatctctatttttaattatatttctcctttagaaaaaaaatacttcatggtccctctaaaataaatggccagacctcagtttaggcccttgtatttatgactctggtagaggtcttcagactccaggtcatagtccagtcagtatttgcatttgggttctcatgaaaactttgtgactctcttttagcacaagtagcccatggtttttcttccaaatcaagtattttacttctcccttgagtccccatgctttgtctccctcctgctgctattgcccggtgaatgggatggtagagagggagaaatgttcattgcacagagaatgtcaggccactttggggacttggcaaacgaagcttgcactgagtggtggtgtgtttggcaatattactgtgccaaaaatcaccttgtctaattttatggatatgtatggcaaacttattacccttcttgcaagctgcacattaaggtacttgtaagtgtttatgcttttgtgtgtaactgtttgccttttctaactgcttttcttgttactgaaaatataattctactagttttatcacattaagaggctctccatgcacaaaatgcattgatgtagccgtaaagtaacagcatttgtacattttctatctcctgatggcagtggtgcctttgtcaccttttggaaggtttgcattttgtttctgctttcaagcgcaaatagtagcttgctttcagcttcacaaaaatctcctcaaatgtaaaagatacaaaatggcgtgttatcatccaggcttagttggagtatttgcatttttatttttatcaaaacaaatataattggtggggactggccagtaataatgtgtggcgtctttaagccaagagtaatttttaaattaaaaatgaaaattttaagaggtagcccattaaacaagctactgagttggagaattaggggatgactgtggtggtttgtcgctaaggaggcaacagtagggtccaggcggcggggcacgtagagcagttagcatgatccatggttattccttactcatgaacagtgtcggcgcacctcattatctgtgcatttgtttttcctgggcagtcctgtcagccagttaatccaccagctcttaggaagtaaatacagatttttttctttccttttttttttttttaaagattttatactacatcttgttaaagtcctatgaatgtgtgtgtgtgtgtgctattaaaactgctttttctcagtttgaacatgtgtttggtaatatttgtttgggagttggggaggctaagttatctggaatgccctgttccctcagcccaccccagtcccctggcttttaaacatttcttcttgctttggattgtccagttttttagcttgatgtctcctgtttctggaaaacataaagccaccattgtacacagttcacttttatataacccagttaattgctgtatactttgcaatcaggaattcagtaatctcattcttacctcattcactatgttcattccaccattcattctaacaattgagtctcaactacatactaggcactctttttaggattcagtaaggatttgatggtgaacaacatagagaactcatgaatcttacctcctggtatccaggttaaaatactttctgttcttgggcaaagagaattagaaacaaatacccttaacctgactcccttgttcttgagcccaggaccaagaaagaagaagctgtacaatgcagaagcagggcttgagatcacctccaacctgccaagcagatagagatctgggtatgccaacttgggaggcagaggttgaaacctcataggaggaactttggagctcatagaaggccttggcattgtcagaggccttgagttccaaaaccatgccagtatttctgccttctgacaggctggctagaaagagactaaatgggagcatttttctctgacagtggggcggagggatgaggggatgacagcccaggaagaagcagagacattgccataagtacttactagagggcaggcagcacagctttatgcaagttaagggccttgaccttgccccaaggcctgacctcagatcccagattcatcatactagccttttgatctttgccaaattacttaaactcactgtttcctcatctgttgaataatggtgtctacctcagggtttgtgaggactaagcgagctaatgcatgaaaagtgcctagtacagtgcctggcatatagcaagaactcagcaaatgcttgctgctctaacgaggcgtttctctgatgacagatttgatcttaagcagacacctcagggtgtactgacatctgagcaaaccatatctccaaaaattatagttgtaagtgtgccctatttctttggataccgggagctggagcttctctgtccagctatctctgctgattttttttaattaaaattttcactttttaaaagccagcatgctaaagctgagaaattggtgatgggtggtggttttccagcatttgtgggaatgtcctgacactccctttcccttactaaccattccctaggctggagtcaagagagggcaaaccagaaggcccagctttgggtctgactccaagacgactggctgggaggaaaactaaacaggcttctgaggcacagtggaatagtgagacttccgcattgttgcactggtgacagcccctacagaagaagcacctcagctgtatatatagccaaaataaagaccacaccacctaaagggaaagtgctgggcaaaccagagatggagatggcaaagcaggaacagaaatgctgccacattgaacagtaagcaggacaacttgactaggccagagttctcttgcttcagggaacctgctcaagtttcaggaattcatacccacccccttcacctaggatccctgctacagtaagtaactgttctgtgcaaagtggagctaaactctggtgtgtaagtggctgacaatcactgctgaagacggccagcactaccctcagccactttcttacagcaaagttggggaaaatagactagcaaaaacaaaactcatacttttctgtgtgtgtgaagttctccagaaggtttccaaatggaatcctctcacagccaccctgcgaagcagccagggtagtgaccttatggatgagtgacagcctgttcaaagaatgacctgcctgtgtcccaggatgcagatttatggctgggttagggttaatttctttagttgatttccagttttcttttccactgtctgtcagtattcccccgttcttattttaccagctggatttgcagagagacatactgtcaatcaaaagggcttcctatgggcagctccattaattgcttttacatctgatactctcattaggtttagagattttactgggaggctagcagaaggaaatggattgtggtctgctatcaaaagtactgaagtaactgcccagtgatcattgaaatcacacattttgctcatttaacaatgtctgagtttgccatcagcacctcagaggagcaaagcttggttcataaagtgaagttgagtgatactgagcctaccacactggcctactcgccacctccagagctatctgaagtcagcactgcaggttctgtgaacatttgggaagctgtgcctcttagccccctgggcccctacagtttaattgctctcctatctgctactgaaggaccagcagtcttcctaccctgcctccactgttaccaccaacccactttttgataaggactgcagatttatctttcttagccctgccttgactggtcttcccacctcagacgtccttactcagtccatcatctctttcaggattttcttctgtggtctttttcaaactactagctgacttttcccttttatttcccactaggaacccctccccgcccccccccccccagccatttcatcaaatcaaactcactgccctctttcatgccccttccttagttccccaacacaagcctgtgcataagcttgaacatttctacctttgccaatggtatttccccttctggcttaccctgcttcctccttctcagacttttccagtcttgattgtcctctccataaacacaagaatgaacttcaaggcaagttacttaatgtcttagagcctgtttccccatccataaaatggggctataaattcctcaggatgggatgagggtacaaataaaaaatgaagcaggatattctttgtaaaagtgtgtgtacattttttattgtgtttctccccagctaccttccctctccccgccacacacatcctatttgcagagtgttgggggaggtggaactgtgatgtgggccctgctgtctagcagtctgcagtcacacacagccatccaaactacgagattgtatatgattcagtgccaaactgtgagctttggggaatccagaaagaaggatgaagcctttcccaagtttcctttagttaaatgtgccacttgaatcctgttctgactcctaggcacatgcaagagtcaatcacatatgttcctgtggcctttatcattttggtccatctcttgagcccacatgaatactgtcatggatggaggaggaaggaccaggctgggtcagggcctgaatgcaggttttgtttggactataggggctaagttcactttaataggctgtgacctattaaaggaggcaggaaccaagtttgcacagaaggaccatcctagttgagttaaaggagttggggagttgattgtgaggggtttcctagattgctgctgggtaaggtgattgaatctgggaaggatagggtacttgattgcctagaagggtgcactctaagttctggataagaatggtgcccaagatgagctggaggggaaggcaagtgtttgaatgacccagtccctgaggtgagcctaggttagggttaagatttggtgagtgaacaggtgcaaacgcttgtggcttatttatccagaaaaagcattttctgtgtgcctttcaggtcaggctgttactttatccccttcaggcctgaccccatctcccccacgcatagctcaagctgaacagcccctgaagctgggaatcaagcccctaccttgtgttcagagcttccctaacgtccagtcgccacctagggtagccttccctccacaccctaggccgagagcagaagcgggtggcaggagcacagggagtgaggtccaggttagaggacaggccagaaggccctccgagagggtcccccaaccccgcaacgccaggacaggtttgcacgtccccagcagtaggcaagtcaggggggtcctagggttacagcggaggagaggacgggctataagcatgtggagggtgcacggggtggcgaggccaccaccagggggcgatttcagggccgcagcgcctagaggtggggggtcgcccgatggccgaaggctgtgtgtgagcctcgccctcaaaccgcctctattgtgctagagtagggggcgcaaagaagagagtggcgaccttcccctcaccccacccagtcggccccgcctttcaggaccccgccccacccccggctccgcctccaccacccccccccgccccgcctccagccgcggccccttcctctcgcagctggtgctgtggggccgcggagccgcgcgtcgctgtctctatggccccggatccgagcgcaaagctgggccaggcctttctcaccaccaagtcccccggtcctgcatgacggctctagaggggcgcgggccaggcctcgggctgcgcggggtgcaaaccggccaccacggagtcggggaccagcgcggggagggggccgcgtggcgaacagtgttccccaggatctgggtcacgtctcccggcgtccggcgggatcgaaggagagcttgtcctcgagctgcagcagtagagactgagaaaacggacctcagaaaaccaggactagctctactgtcgggggcagggtgaccccatcagtaacctacaacccctctagaacttcacaactccctctcaccatggagtttgcatttgatgcagaaaggcatgtgatccctccctccttctgacctcttagctggggattccatggccacacaaccctgtgactccatgtccccccgattccaggaccccccatggccccatgattccttgactcctatgaccttatgacccctgaccttccaagtgacttccttggactttgacccctgtgactgtgcttcccattccccgcccccacaacctgtgactctggctccctttgggggtcttgttagtctgggcctccccaggaagatgtgggggaggctctggcccctcctcctcagcatcctcacagcaactgcagtcccaggaccctcactgcggagaccgtctagagaactagatgccacccctcggatgaccataccctatgaagagctctctgggacccggcacttcaagggccaagcccagaactactcaacactgctgctggaggaggcctcagcaaggctgctggtgggagcccgaggtgccctgttctctctcagtgccaacgacataggagatggggctcacaaagagatccactgggaagcctccccagagatgcaaagcaaatgtcatcaaaaagggaaaaacaaccagacggagtgctttaaccatgtgcggttcctgcagcggctcaattctacccacctctatgcatgtgggactcacgccttccagcccctctgtgcagccattgatgctgaggccttcaccttgccaaccagcttcgaggaggggaaggagaagtgtccttatgacccagcccgtggcttcacaggcctcatcattgatggaggcctctacacagccactaggtatgaattccggagcattcctgacatccgccggagccgccacccacactccctgagaactgaggagacaccaatgcattggctcaatgatgcggagtttgtgttctccgtcctcgtgcgggagagcaaggccagtgcagtgggtgatgatgacaaggtgtactacttcttcacggagcgtgccactgaggagggctctggcagcttcactcagagccgcagcagtcaccgtgtggcccgtgtggctcgtgtctgcaagggagacctgggagggaagaagatcctgcagaagaagtggacttccttcctgaaagcccgtctcatctgccacattccactgtatgagacactgcgtggggtctgcagcctggatgctgaaacctcaagccgtacacacttctatgcagccttcacgctgagcacacagtggaagaccctggaggcctcagccatctgccgctatgacctggcagagatccaggctgtctttgcaggaccctatatggaataccaggatggttcccggcgctggggtcgctatgagggtggggtgcctgagccccggcctggctcgtgtatcacagattcattgcgcagccaaggctacaattcatcccaagacttgccatccctggtcctggactttgtaaagttgcacccactgatggctcggcccgttgtgcccacacgtggacggcccctgctgctcaagcgcaacatacgctacacacaccttacagggacacctgtcaccacgcctgctggacctacctatgacctgctctttctgggcacaggtgcttctgatcccaatccctgatccctgttggccctgatcactaatgcttctgaatccattaattcctgccatgactagtctggagttcccagtgtcctgagggtccactgctcctggctgagtccttgttctggacctcaggactcctgagctgttcgtattaggcctcttgcagggtgctgagagcagatcccatagttggggtctaactctctgctctttccataccagctgatggctggatccacaaggccgtagtcctgggctctgggatgcacattattgaagagacacaagtgttcagggagtcccagtctgtggaaaatctagtcatctctctattgcgctctcccacctccaccccacaatgaatgtatttattgtgagaatggctacacttctttaggaatgcccccacttacaaccaggtgggtggaacaggcatgtgacagagtggggagcctgggctcagctcctccccctgccgttggttaataaacaccctttttccccacaa

SEQ ID NO: 364618 - DNA, 10831 bp, Homo sapiens
  misc_feature (10830)..(10830): n is a, c, g, or t
caaggggcttagatctcagtcatcagactatacaggacatgttcatcctggaacttacacaaataccttagaacgtctagtgaaggaaatggaagacacacaaaggctagatgaactgcagaagcaactacaagaagacataaggcaaggccgaggcattaaatccccaatcagaattggagaagaagacagtacagatgatgaggatggcctcttagaagagcacaaggaatttctaaagaaattttcagttacaattgatgctattcctgatcatcatccaggtgaagaaatatttaatttcctcaattctggaaaaattttcaatcagtataccttggatttaagagactctggttttattggacaaagtgctgtagaaaaacttattcttaaatcgggaaaaacagatcagatttttttgacaacacaaggtttccttacgtctgcttatcactatgtccagtgtcctgtccctgtgttaaagtggctgtttcggatgatgtcagttcatacagactgtattgtgtcagtgcagattttaagtacattgatggaaataacaattagaaatgataccttcagtgactcaccagtttggccatggatcccatcattgtctgatgtagcagctgtgtttttcaatatggggattgattttagatctttgtttcccctggagaatcttcagccagactttaatgaagactatctagtttctgaaacacagacaacatcaagggggaaagaaagtgaagattcatcttataagccaattttttcaacacttcctgaaaccaacattttaaatgtggttaagtttctaggcttgtgtacatctatacatccagaaggttaccaggatcgtgaaataatgttgctgattttaatgttatttaaaatgagtttggaaaaacagctgaaacagattcctttagtagactttcaaagcctcctgataaacctgatgaaaaacatcagagattggaacacaaaggtgcctgaactctgtctgggcataaatgaactctccagtcatccccacaacctcctgtggttggtacagctggtccctaattggacatcacgtggaaggcaactgagacagtgcctcagtctagtgattatttcaaagcttttggatgagaaacacgaagatgttcctaatgccagtaatctgcaggtatcagtcctacatcgctatcttgtgcagatgaagccttctgatttgttaaagaaaatggtcttgaagaaaaaggctgaacaaccagatggcattattgatgacagtcttcatttagaacttgaaaagcaggcatattacctgacctacattcttcttcatttagtcggtgaagttagttgttctcattctttttcttctggacaacggaaacactttgtgctactctgtggggctttggaaaagcatgttaaatgtgatattagggaagatgcaagacttttttacagaactaaggtgaaagacttggtcgccaggatacatggaaaatggcaggaaataatccagaactgtcggcctactcaggggcagcttcatgacttctgggtaccagattcttaataggagttgcagcagcaaaaatatgaaccaagagaaattcaataagagcctttcatagaggagtagaaaggattattacagaatccaatgaatgccaagaaaatgtacagcaaatgtgccacttgaatatctagtatgaagctggtaatgaagaaattgccatttctgaagcagatatgaaatatgatctgcttaattgttaaggcaactgacctttcaaaagtgcagagtcttattaaaagaggggaggggtagaagcagaataatagtcatatgtctaacctgccccagttaactcctcttgttaaattataagccagttatcttttttagatagtatttttgtcacttggataatcacaggaaatatataagaaaagagcttggactaacttgagaagttggacatggaaagcaagaccaagttccagttgggtttaattttccctcttggttattttcggacacaaagggaatgcttaaaactgagtttagtaataaaaagcataaatctcttctgtaacttttataaaccacagggaggtttcaatccatgcattttccttcattactcaagattataaatctgtttttaaaatacatctaaacaaacagttgagaaacaaaagtttggcatgttgtcagatccccttaagaggaagaggttaagctgtaaagtagtggccctgttttgatgccagaacattcatatgctgtttgttctggatttcttttaaatgcatgtattttaaatactggttaaatcttagaatcttggctatatcttagaattctggctcttggtaaccatattacagaagtctatattgtaaaagcctaaagatctggacaagtttccaacaaccttgtttccatgagtatataattttggcagacacctgaattctttgggacactgtgtctgtgtatgtgtgtgtgtgtgtgtgtgtgtgtgtgcgcttgtatcttgaagttgttgcacttcaaaaccacagctgctgtaaattcttaaacactggagagccatcctttggtttaaatggtagagggttagtggaagtgcacacgttgtttttagcccaggggtagtaacaaactcttactagccaactagaaaattattttgttgacgagatgtcccttttaggagggtttgtttcctgaaagaatgccaactttttttgttgttctttcagtattggcttgagtgacctgttctcctgagtgctctagtgtctccagttgtgggggggaaagatgatggaggggaacagaaactggacttgatgtttgcggtttgagaggcaagaaaataaaataactttctacctctaaattgaggcttaggagtaaaaagcattttgtcctaaatttatcatttaaaatagcatcagtaacttttgagctcatgtcaatcaagcattggcagtcagagattttatagggaagactaagtaaatccagtttccaagaacctaaactgattgaggctccaagagtcagaccaacaaaagttttattctgtgttgtttactggtaagaatattattatcttgatactacctctcaagggtattgttacaaaatgccacttatggttaaagagatagatacaaagagttctatttgacagaagcttgaaactctggcatctatctgcccaacgatgggggctttcgttctgtaatttaatcctttgtagatacattatttgtgtgtaattttatacgtgttcatatttttctcattttgcattgtgtaaagtgtacaaaatctcaaagtataaaatactgcttatattgcttgtaatttacagtgtgtaaatattttctaattgtgtacattgatgggggggacaagtgggttattcaggtttttttttaatgacccttttgtattgcagtttcaacagataactgtccatcaaatttaaaaccactttgatacatttttatttaacagttccaataagaaaaaaatctctatttttaattatatttctcctttagaaaaaaaatacttcatggtccctctaaaataaatggccagacctcagtttaggcccttgtatttatgactctggtagaggtcttcagactccaggtcatagtccagtcagtatttgcatttgggttctcatgaaaactttgtgactctcttttagcacaagtagcccatggtttttcttccaaatcaagtattttacttctcccttgagtccccatgctttgtctccctcctgctgctattgcccggtgaatgggatggtagagagggagaaatgttcattgcacagagaatgtcaggccactttggggacttggcaaacgaagcttgcactgagtggtggtgtgtttggcaatattactgtgccaaaaatcaccttgtctaattttatggatatgtatggcaaacttattacccttcttgcaagctgcacattaaggtacttgtaagtgtttatgcttttgtgtgtaactgtttgccttttctaactgcttttcttgttactgaaaatataattctactagttttatcacattaagaggctctccatgcacaaaatgcattgatgtagccgtaaagtaacagcatttgtacattttctatctcctgatggcagtggtgcctttgtcaccttttggaaggtttgcattttgtttctgctttcaagcgcaaatagtagcttgctttcagcttcacaaaaatctcctcaaatgtaaaagatacaaaatggcgtgttatcatccaggcttagttggagtatttgcatttttatttttatcaaaacaaatataattggtggggactggccagtaataatgtgtggcgtctttaagccaagagtaatttttaaattaaaaatgaaaattttaagaggtagcccattaaacaagctactgagttggagaattaggggatgactgtggtggtttgtcgctaaggaggcaacagtagggtccaggcggcggggcacgtagagcagttagcatgatccatggttattccttactcatgaacagtgtcggcgcacctcattatctgtgcatttgtttttcctgggcagtcctgtcagccagttaatccaccagctcttaggaagtaaatacagatttttttctttccttttttttttttttaaagattttatactacatcttgttaaagtcctatgaatgtgtgtgtgtgtgtgctattaaaactgctttttctcagtttgaacatgtgtttggtaatatttgtttgggagttggggaggctaagttatctggaatgccctgttccctcagcccaccccagtcccctggcttttaaacatttcttcttgctttggattgtccagttttttagcttgatgtctcctgtttctggaaaacataaagccaccattgtacacagttcacttttatataacccagttaattgctgtatactttgcaatcaggaattcagtaatctcattcttacctcattcactatgttcattccaccattcattctaacaattgagtctcaactacatactaggcactctttttaggattcagtaaggatttgatggtgaacaacatagagaactcatgaatcttacctcctggtatccaggttaaaatactttctgttcttgggcaaagagaattagaaacaaatacccttaacctgactcccttgttcttgagcccaggaccaagaaagaagaagctgtacaatgcagaagcagggcttgagatcacctccaacctgccaagcagatagagatctgggtatgccaacttgggaggcagaggttgaaacctcataggaggaactttggagctcatagaaggccttggcattgtcagaggccttgagttccaaaaccatgccagtatttctgccttctgacaggctggctagaaagagactaaatgggagcatttttctctgacagtggggcggagggatgaggggatgacagcccaggaagaagcagagacattgccataagtacttactagagggcaggcagcacagctttatgcaagttaagggccttgaccttgccccaaggcctgacctcagatcccagattcatcatactagccttttgatctttgccaaattacttaaactcactgtttcctcatctgttgaataatggtgtctacctcagggtttgtgaggactaagcgagctaatgcatgaaaagtgcctagtacagtgcctggcatatagcaagaactcagcaaatgcttgctgctctaacgaggcgtttctctgatgacagatttgatcttaagcagacacctcagggtgtactgacatctgagcaaaccatatctccaaaaattatagttgtaagtgtgccctatttctttggataccgggagctggagcttctctgtccagctatctctgctgattttttttaattaaaattttcactttttaaaagccagcatgctaaagctgagaaattggtgatgggtggtggttttccagcatttgtgggaatgtcctgacactccctttcccttactaaccattccctaggctggagtcaagagagggcaaaccagaaggcccagctttgggtctgactccaagacgactggctgggaggaaaactaaacaggcttctgaggcacagtggaatagtgagacttccgcattgttgcactggtgacagcccctacagaagaagcacctcagctgtatatatagccaaaataaagaccacaccacctaaagggaaagtgctgggcaaaccagagatggagatggcaaagcaggaacagaaatgctgccacattgaacagtaagcaggacaacttgactaggccagagttctcttgcttcagggaacctgctcaagtttcaggaattcatacccacccccttcacctaggatccctgctacagtaagtaactgttctgtgcaaagtggagctaaactctggtgtgtaagtggctgacaatcactgctgaagacggccagcactaccctcagccactttcttacagcaaagttggggaaaatagactagcaaaaacaaaactcatacttttctgtgtgtgtgaagttctccagaaggtttccaaatggaatcctctcacagccaccctgcgaagcagccagggtagtgaccttatggatgagtgacagcctgttcaaagaatgacctgcctgtgtcccaggatgcagatttatggctgggttagggttaatttctttagttgatttccagttttcttttccactgtctgtcagtattcccccgttcttattttaccagctggatttgcagagagacatactgtcaatcaaaagggcttcctatgggcagctccattaattgcttttacatctgatactctcattaggtttagagattttactgggaggctagcagaaggaaatggattgtggtctgctatcaaaagtactgaagtaactgcccagtgatcattgaaatcacacattttgctcatttaacaatgtctgagtttgccatcagcacctcagaggagcaaagcttggttcataaagtgaagttgagtgatactgagcctaccacactggcctactcgccacctccagagctatctgaagtcagcactgcaggttctgtgaacatttgggaagctgtgcctcttagccccctgggcccctacagtttaattgctctcctatctgctactgaaggaccagcagtcttcctaccctgcctccactgttaccaccaacccactttttgataaggactgcagatttatctttcttagccctgccttgactggtcttcccacctcagacgtccttactcagtccatcatctctttcaggattttcttctgtggtctttttcaaactactagctgacttttcccttttatttcccactaggaacccctccccgcccccccccccccagccatttcatcaaatcaaactcactgccctctttcatgccccttccttagttccccaacacaagcctgtgcataagcttgaacatttctacctttgccaatggtatttccccttctggcttaccctgcttcctccttctcagacttttccagtcttgattgtcctctccataaacacaagaatgaacttcaaggcaagttacttaatgtcttagagcctgtttccccatccataaaatggggctataaattcctcaggatgggatgagggtacaaataaaaaatgaagcaggatattctttgtaaaagtgtgtgtacattttttattgtgtttctccccagctaccttccctctccccgccacacacatcctatttgcagagtgttgggggaggtggaactgtgatgtgggccctgctgtctagcagtctgcagtcacacacagccatccaaactacgagattgtatatgattcagtgccaaactgtgagctttggggaatccagaaagaaggatgaagcctttcccaagtttcctttagttaaatgtgccacttgaatcctgttctgactcctaggcacatgcaagagtcaatcacatatgttcctgtggcctttatcattttggtccatctcttgagcccacatgaatactgtcatggatggaggaggaaggaccaggctgggtcagggcctgaatgcaggttttgtttggactataggggctaagttcactttaataggctgtgacctattaaaggaggcaggaaccaagtttgcacagaaggaccatcctagttgagttaaaggagttggggagttgattgtgaggggtttcctagattgctgctgggtaaggtgattgaatctgggaaggatagggtacttgattgcctagaagggtgcactctaagttctggataagaatggtgcccaagatgagctggaggggaaggcaagtgtttgaatgacccagtccctgaggtgagcctaggttagggttaagatttggtgagtgaacaggtgcaaacgcttgtggcttatttatccagaaaaagcattttctgtgtgcctttcaggtcaggctgttactttatccccttcaggcctgaccccatctcccccacgcatagctcaagctgaacagcccctgaagctgggaatcaagcccctaccttgtgttcagagcttccctaacgtccagtcgccacctagggtagccttccctccacaccctaggccgagagcagaagcgggtggcaggagcacagggagtgaggtccaggttagaggacaggccagaaggccctccgagagggtcccccaaccccgcaacgccaggacaggtttgcacgtccccagcagtaggcaagtcaggggggtcctagggttacagcggaggagaggacgggctataagcatgtggagggtgcacggggtggcgaggccaccaccagggggcgatttcagggccgcagcgcctagaggtggggggtcgcccgatggccgaaggctgtgtgtgagcctcgccctcaaaccgcctctattgtgctagagtagggggcgcaaagaagagagtggcgaccttcccctcaccccacccagtcggccccgcctttcaggaccccgccccacccccggctccgcctccaccacccccccccgccccgcctccagccgcggccccttcctctcgcagctggtgctgtggggccgcggagccgcgcgtcgctgtctctatggccccggatccgagcgcaaagctgggccaggcctttctcaccaccaagtcccccggtcctgcatgacggctctagaggggcgcgggccaggcctcgggctgcgcggggtgcaaaccggccaccacggagtcggggaccagcgcggggagggggccgcgtggcgaacagtgttccccaggatctgggtcacgtctcccggcgtccggcgggatcgaaggagagcttgtcctcgagctgcagcagtagagactgagaaaacggacctcagaaaaccaggactagctctactgtcgggggcagggtgaccccatcagtaacctacaacccctctagaacttcacaactccctctcaccatggagtttgcatttgatgcagaaaggcatgtgatccctccctccttctgacctcttagctggggattccatggccacacaaccctgtgactccatgtccccccgattccaggaccccccatggccccatgattccttgactcctatgaccttatgacccctgaccttccaagtgacttccttggactttgacccctgtgactgtgcttcccattccccgcccccacaacctgtgactctggctccctttgggggtcttgttagtctgggcctccccaggaagatgtgggggaggctctggcccctcctcctcagcatcctcacagcaactgcagtcccaggaccctcactgcggagaccgtctagagaactagatgccacccctcggatgaccataccctatgaagagctctctgggacccggcacttcaagggccaagcccagaactactcaacactgctgctggaggaggcctcagcaaggctgctggtgggagcccgaggtgccctgttctctctcagtgccaacgacataggagatggggctcacaaagagatccactgggaagcctccccagagatgcaaagcaaatgtcatcaaaaagggaaaaacaaccagacggagtgctttaaccatgtgcggttcctgcagcggctcaattctacccacctctatgcatgtgggactcacgccttccagcccctctgtgcagccattgatgctgaggccttcaccttgccaaccagcttcgaggaggggaaggagaagtgtccttatgacccagcccgtggcttcacaggcctcatcattgatggaggcctctacacagccactaggtatgaattccggagcattcctgacatccgccggagccgccacccacactccctgagaactgaggagacaccaatgcattggctcaatgatgcgcgagttggggtgctcccggtactcggtgcgggagaagcaagggccaggtgcagatggggtgactgatgacaaggtggtactaaattccttcagcggcagcggtgcccactgacgcgagaggacctgggcaggctgcacagacagagaagcggcaaggacggcaaccgggtggcccagtggatgggaccggaggattggcaagggaaacctcggagaagagacagagagacccggagaagcgagggggcatacacgacggagaacaccggagcacatggcgaaaagacaccacggaaggagcgacng

SEQ ID NO: 364619 - DNA, 10847 bp, Homo sapiens
caaggggcttagatctcagtcatcagactatacaggacatgttcatcctggaacttacacaaataccttagaacgtctagtgaaggaaatggaagacacacaaaggctagatgaactgcagaagcaactacaagaagacataaggcaaggccgaggcattaaatccccaatcagaattggagaagaagacagtacagatgatgaggatggcctcttagaagagcacaaggaatttctaaagaaattttcagttacaattgatgctattcctgatcatcatccaggtgaagaaatatttaatttcctcaattctggaaaaattttcaatcagtataccttggatttaagagactctggttttattggacaaagtgctgtagaaaaacttattcttaaatcgggaaaaacagatcagatttttttgacaacacaaggtttccttacgtctgcttatcactatgtccagtgtcctgtccctgtgttaaagtggctgtttcggatgatgtcagttcatacagactgtattgtgtcagtgcagattttaagtacattgatggaaataacaattagaaatgataccttcagtgactcaccagtttggccatggatcccatcattgtctgatgtagcagctgtgtttttcaatatggggattgattttagatctttgtttcccctggagaatcttcagccagactttaatgaagactatctagtttctgaaacacagacaacatcaagggggaaagaaagtgaagattcatcttataagccaattttttcaacacttcctgaaaccaacattttaaatgtggttaagtttctaggcttgtgtacatctatacatccagaaggttaccaggatcgtgaaataatgttgctgattttaatgttatttaaaatgagtttggaaaaacagctgaaacagattcctttagtagactttcaaagcctcctgataaacctgatgaaaaacatcagagattggaacacaaaggtgcctgaactctgtctgggcataaatgaactctccagtcatccccacaacctcctgtggttggtacagctggtccctaattggacatcacgtggaaggcaactgagacagtgcctcagtctagtgattatttcaaagcttttggatgagaaacacgaagatgttcctaatgccagtaatctgcaggtatcagtcctacatcgctatcttgtgcagatgaagccttctgatttgttaaagaaaatggtcttgaagaaaaaggctgaacaaccagatggcattattgatgacagtcttcatttagaacttgaaaagcaggcatattacctgacctacattcttcttcatttagtcggtgaagttagttgttctcattctttttcttctggacaacggaaacactttgtgctactctgtggggctttggaaaagcatgttaaatgtgatattagggaagatgcaagacttttttacagaactaaggtgaaagacttggtcgccaggatacatggaaaatggcaggaaataatccagaactgtcggcctactcaggggcagcttcatgacttctgggtaccagattcttaataggagttgcagcagcaaaaatatgaaccaagagaaattcaataagagcctttcatagaggagtagaaaggattattacagaatccaatgaatgccaagaaaatgtacagcaaatgtgccacttgaatatctagtatgaagctggtaatgaagaaattgccatttctgaagcagatatgaaatatgatctgcttaattgttaaggcaactgacctttcaaaagtgcagagtcttattaaaagaggggaggggtagaagcagaataatagtcatatgtctaacctgccccagttaactcctcttgttaaattataagccagttatcttttttagatagtatttttgtcacttggataatcacaggaaatatataagaaaagagcttggactaacttgagaagttggacatggaaagcaagaccaagttccagttgggtttaattttccctcttggttattttcggacacaaagggaatgcttaaaactgagtttagtaataaaaagcataaatctcttctgtaacttttataaaccacagggaggtttcaatccatgcattttccttcattactcaagattataaatctgtttttaaaatacatctaaacaaacagttgagaaacaaaagtttggcatgttgtcagatccccttaagaggaagaggttaagctgtaaagtagtggccctgttttgatgccagaacattcatatgctgtttgttctggatttcttttaaatgcatgtattttaaatactggttaaatcttagaatcttggctatatcttagaattctggctcttggtaaccatattacagaagtctatattgtaaaagcctaaagatctggacaagtttccaacaaccttgtttccatgagtatataattttggcagacacctgaattctttgggacactgtgtctgtgtatgtgtgtgtgtgtgtgtgtgtgtgtgtgcgcttgtatcttgaagttgttgcacttcaaaaccacagctgctgtaaattcttaaacactggagagccatcctttggtttaaatggtagagggttagtggaagtgcacacgttgtttttagcccaggggtagtaacaaactcttactagccaactagaaaattattttgttgacgagatgtcccttttaggagggtttgtttcctgaaagaatgccaactttttttgttgttctttcagtattggcttgagtgacctgttctcctgagtgctctagtgtctccagttgtgggggggaaagatgatggaggggaacagaaactggacttgatgtttgcggtttgagaggcaagaaaataaaataactttctacctctaaattgaggcttaggagtaaaaagcattttgtcctaaatttatcatttaaaatagcatcagtaacttttgagctcatgtcaatcaagcattggcagtcagagattttatagggaagactaagtaaatccagtttccaagaacctaaactgattgaggctccaagagtcagaccaacaaaagttttattctgtgttgtttactggtaagaatattattatcttgatactacctctcaagggtattgttacaaaatgccacttatggttaaagagatagatacaaagagttctatttgacagaagcttgaaactctggcatctatctgcccaacgatgggggctttcgttctgtaatttaatcctttgtagatacattatttgtgtgtaattttatacgtgttcatatttttctcattttgcattgtgtaaagtgtacaaaatctcaaagtataaaatactgcttatattgcttgtaatttacagtgtgtaaatattttctaattgtgtacattgatgggggggacaagtgggttattcaggtttttttttaatgacccttttgtattgcagtttcaacagataactgtccatcaaatttaaaaccactttgatacatttttatttaacagttccaataagaaaaaaatctctatttttaattatatttctcctttagaaaaaaaatacttcatggtccctctaaaataaatggccagacctcagtttaggcccttgtatttatgactctggtagaggtcttcagactccaggtcatagtccagtcagtatttgcatttgggttctcatgaaaactttgtgactctcttttagcacaagtagcccatggtttttcttccaaatcaagtattttacttctcccttgagtccccatgctttgtctccctcctgctgctattgcccggtgaatgggatggtagagagggagaaatgttcattgcacagagaatgtcaggccactttggggacttggcaaacgaagcttgcactgagtggtggtgtgtttggcaatattactgtgccaaaaatcaccttgtctaattttatggatatgtatggcaaacttattacccttcttgcaagctgcacattaaggtacttgtaagtgtttatgcttttgtgtgtaactgtttgccttttctaactgcttttcttgttactgaaaatataattctactagttttatcacattaagaggctctccatgcacaaaatgcattgatgtagccgtaaagtaacagcatttgtacattttctatctcctgatggcagtggtgcctttgtcaccttttggaaggtttgcattttgtttctgctttcaagcgcaaatagtagcttgctttcagcttcacaaaaatctcctcaaatgtaaaagatacaaaatggcgtgttatcatccaggcttagttggagtatttgcatttttatttttatcaaaacaaatataattggtggggactggccagtaataatgtgtggcgtctttaagccaagagtaatttttaaattaaaaatgaaaattttaagaggtagcccattaaacaagctactgagttggagaattaggggatgactgtggtggtttgtcgctaaggaggcaacagtagggtccaggcggcggggcacgtagagcagttagcatgatccatggttattccttactcatgaacagtgtcggcgcacctcattatctgtgcatttgtttttcctgggcagtcctgtcagccagttaatccaccagctcttaggaagtaaatacagatttttttctttccttttttttttttttaaagattttatactacatcttgttaaagtcctatgaatgtgtgtgtgtgtgtgctattaaaactgctttttctcagtttgaacatgtgtttggtaatatttgtttgggagttggggaggctaagttatctggaatgccctgttccctcagcccaccccagtcccctggcttttaaacatttcttcttgctttggattgtccagttttttagcttgatgtctcctgtttctggaaaacataaagccaccattgtacacagttcacttttatataacccagttaattgctgtatactttgcaatcaggaattcagtaatctcattcttacctcattcactatgttcattccaccattcattctaacaattgagtctcaactacatactaggcactctttttaggattcagtaaggatttgatggtgaacaacatagagaactcatgaatcttacctcctggtatccaggttaaaatactttctgttcttgggcaaagagaattagaaacaaatacccttaacctgactcccttgttcttgagcccaggaccaagaaagaagaagctgtacaatgcagaagcagggcttgagatcacctccaacctgccaagcagatagagatctgggtatgccaacttgggaggcagaggttgaaacctcataggaggaactttggagctcatagaaggccttggcattgtcagaggccttgagttccaaaaccatgccagtatttctgccttctgacaggctggctagaaagagactaaatgggagcatttttctctgacagtggggcggagggatgaggggatgacagcccaggaagaagcagagacattgccataagtacttactagagggcaggcagcacagctttatgcaagttaagggccttgaccttgccccaaggcctgacctcagatcccagattcatcatactagccttttgatctttgccaaattacttaaactcactgtttcctcatctgttgaataatggtgtctacctcagggtttgtgaggactaagcgagctaatgcatgaaaagtgcctagtacagtgcctggcatatagcaagaactcagcaaatgcttgctgctctaacgaggcgtttctctgatgacagatttgatcttaagcagacacctcagggtgtactgacatctgagcaaaccatatctccaaaaattatagttgtaagtgtgccctatttctttggataccgggagctggagcttctctgtccagctatctctgctgattttttttaattaaaattttcactttttaaaagccagcatgctaaagctgagaaattggtgatgggtggtggttttccagcatttgtgggaatgtcctgacactccctttcccttactaaccattccctaggctggagtcaagagagggcaaaccagaaggcccagctttgggtctgactccaagacgactggctgggaggaaaactaaacaggcttctgaggcacagtggaatagtgagacttccgcattgttgcactggtgacagcccctacagaagaagcacctcagctgtatatatagccaaaataaagaccacaccacctaaagggaaagtgctgggcaaaccagagatggagatggcaaagcaggaacagaaatgctgccacattgaacagtaagcaggacaacttgactaggccagagttctcttgcttcagggaacctgctcaagtttcaggaattcatacccacccccttcacctaggatccctgctacagtaagtaactgttctgtgcaaagtggagctaaactctggtgtgtaagtggctgacaatcactgctgaagacggccagcactaccctcagccactttcttacagcaaagttggggaaaatagactagcaaaaacaaaactcatacttttctgtgtgtgtgaagttctccagaaggtttccaaatggaatcctctcacagccaccctgcgaagcagccagggtagtgaccttatggatgagtgacagcctgttcaaagaatgacctgcctgtgtcccaggatgcagatttatggctgggttagggttaatttctttagttgatttccagttttcttttccactgtctgtcagtattcccccgttcttattttaccagctggatttgcagagagacatactgtcaatcaaaagggcttcctatgggcagctccattaattgcttttacatctgatactctcattaggtttagagattttactgggaggctagcagaaggaaatggattgtggtctgctatcaaaagtactgaagtaactgcccagtgatcattgaaatcacacattttgctcatttaacaatgtctgagtttgccatcagcacctcagaggagcaaagcttggttcataaagtgaagttgagtgatactgagcctaccacactggcctactcgccacctccagagctatctgaagtcagcactgcaggttctgtgaacatttgggaagctgtgcctcttagccccctgggcccctacagtttaattgctctcctatctgctactgaaggaccagcagtcttcctaccctgcctccactgttaccaccaacccactttttgataaggactgcagatttatctttcttagccctgccttgactggtcttcccacctcagacgtccttactcagtccatcatctctttcaggattttcttctgtggtctttttcaaactactagctgacttttcccttttatttcccactaggaacccctccccgcccccccccccccagccatttcatcaaatcaaactcactgccctctttcatgccccttccttagttccccaacacaagcctgtgcataagcttgaacatttctacctttgccaatggtatttccccttctggcttaccctgcttcctccttctcagacttttccagtcttgattgtcctctccataaacacaagaatgaacttcaaggcaagttacttaatgtcttagagcctgtttccccatccataaaatggggctataaattcctcaggatgggatgagggtacaaataaaaaatgaagcaggatattctttgtaaaagtgtgtgtacattttttattgtgtttctccccagctaccttccctctccccgccacacacatcctatttgcagagtgttgggggaggtggaactgtgatgtgggccctgctgtctagcagtctgcagtcacacacagccatccaaactacgagattgtatatgattcagtgccaaactgtgagctttggggaatccagaaagaaggatgaagcctttcccaagtttcctttagttaaatgtgccacttgaatcctgttctgactcctaggcacatgcaagagtcaatcacatatgttcctgtggcctttatcattttggtccatctcttgagcccacatgaatactgtcatggatggaggaggaaggaccaggctgggtcagggcctgaatgcaggttttgtttggactataggggctaagttcactttaataggctgtgacctattaaaggaggcaggaaccaagtttgcacagaaggaccatcctagttgagttaaaggagttggggagttgattgtgaggggtttcctagattgctgctgggtaaggtgattgaatctgggaaggatagggtacttgattgcctagaagggtgcactctaagttctggataagaatggtgcccaagatgagctggaggggaaggcaagtgtttgaatgacccagtccctgaggtgagcctaggttagggttaagatttggtgagtgaacaggtgcaaacgcttgtggcttatttatccagaaaaagcattttctgtgtgcctttcaggtcaggctgttactttatccccttcaggcctgaccccatctcccccacgcatagctcaagctgaacagcccctgaagctgggaatcaagcccctaccttgtgttcagagcttccctaacgtccagtcgccacctagggtagccttccctccacaccctaggccgagagcagaagcgggtggcaggagcacagggagtgaggtccaggttagaggacaggccagaaggccctccgagagggtcccccaaccccgcaacgccaggacaggtttgcacgtccccagcagtaggcaagtcaggggggtcctagggttacagcggaggagaggacgggctataagcatgtggagggtgcacggggtggcgaggccaccaccagggggcgatttcagggccgcagcgcctagaggtggggggtcgcccgatggccgaaggctgtgtgtgagcctcgccctcaaaccgcctctattgtgctagagtagggggcgcaaagaagagagtggcgaccttcccctcaccccacccagtcggccccgcctttcaggaccccgccccacccccggctccgcctccaccacccccccccgccccgcctccagccgcggccccttcctctcgcagctggtgctgtggggccgcggagccgcgcgtcgctgtctctatggccccggatccgagcgcaaagctgggccaggcctttctcaccaccaagtcccccggtcctgcatgacggctctagaggggcgcgggccaggcctcgggctgcgcggggtgcaaaccggccaccacggagtcggggaccagcgcggggagggggccgcgtggcgaacagtgttccccaggatctgggtcacgtctcccggcgtccggcgggatcgaaggagagcttgtcctcgagctgcagcagtagagactgagaaaacggacctcagaaaaccaggactagctctactgtcgggggcagggtgaccccatcagtaacctacaacccctctagaacttcacaactccctctcaccatggagtttgcatttgatgcagaaaggcatgtgatccctccctccttctgacctcttagctggggattccatggccacacaaccctgtgactccatgtccccccgattccaggaccccccatggccccatgattccttgactcctatgaccttatgacccctgaccttccaagtgacttccttggactttgacccctgtgactgtgcttcccattccccgcccccacaacctgtgactctggctccctttgggggtcttgttagtctgggcctccccaggaagatgtgggggaggctctggcccctcctcctcagcatcctcacagcaactgcagtcccaggaccctcactgcggagaccgtctagagaactagatgccacccctcggatgaccataccctatgaagagctctctgggacccggcacttcaagggccaagcccagaactactcaacactgctgctggaggaggcctcagcaaggctgctggtgggagcccgaggtgccctgttctctctcagtgccaacgacataggagatggggctcacaaagagatccactgggaagcctccccagagatgcaaagcaaatgtcatcaaaaagggaaaaacaaccagacggagtgctttaaccatgtgcggttcctgcagcggctcaattctacccacctctatgcatgtgggactcacgccttccagcccctctgtgcagccattgatgctgaggccttcaccttgccaaccagcttcgaggaggggaaggagaagtgtccttatgacccagcccgtggcttcacaggcctcatcattggtgagcaggccttcttccctatcacagacatggtatttttaggatgtggatctcatctctaggacctgccaccatgtatatgtcatgtgccctgttgaatatgacatgtctctcatgcctggaatatccccacgccagatggaggcctctacacagccactaggtatgaattccggagcattcctgacatccgccggagccgccacccacactccctgagaactgaggagacaccaatgcattggctcaatggttaggaggatgaggcacaggatgatggggggtaggggactatttcttcatttttactcccttggccagctgaccaccccacccccaaatccccaggtgagcctgtccattccattcctgtgtgttgtcaagtgaggggtcagcctcagagtgagggaaaggaatccccagcctgtctcaaaagcctct

SEQ ID NO: 364620 - DNA, 4575 bp, Homo sapiens
tctctgtgttgtgctgtctcccccgttttgcccgcccctccccgtagtgatggtcgtctctctccccaaggtgactcccccccggctcgcgtcttgtttcctcgtcagcctgcctcgttctttttttgtgtcgccgcccgcgcccccctcccgtctttttatattggacgcctcccctttcttgagtgggcgccgccctcttctcttacctcaacagtggcggggtgggctgcctcattttgtgtgctcctctcccggcggcaggtagtattttcccccccccccctctctcttcttttttttttttttttttttttttttttttttttttttttttttttttttttttttttttttttttttttttttttttttttttttttttttttgaaggagacggatggtttattaaggggacttccatacagggcactccagtggcggcgggctgcactggagaaccattcccctttgtaaaaaccatgcagtttttatagcattttcacttagcatcctccccctaatcacctccacctggcaaacttcatttaacccaaaacaaagggccttgatcccctggacagcatgtgttccacaggatgggctaggggctcagatgttcttcatagataaggagtgaatctctaggttggccacttgcagatttggaactccaaacatacattgttttgaggccataaggtcattctcaggggatgcttaagttattgctgtcaggtgcatctgccatacaacctgcccctatccctgatcgctgatccctgaccccagactgatctgactttgagccactgtccctgcctgtcttcggaaccacttactgctggttccttgttccctaggatgctgaggccttcaccttgccaaccagcttcgaggaggggaaggagaagtgtccttatgacccagcccgtggcttcacaggcctcatcattggtgagcaggccttcttccctatcacagacatggtatttttaggatgtggatctcatctctaggacctgccaccatgtatatgtcatgtgccctgttgaatatgacatgtctctcatgcctggaatatccccacgccagatggaggcctctacacagccactaggtatgaattccggagcattcctgacatccgccggagccgccacccacactccctgagaactgaggagacaccaatgcattggctcaatgatgcggagtttgtgttctccgtcctcgtgcgggagagcaaggccagtgcagtgggtgatgatgacaaggtgtactacttcttcacggagcgtgccactgaggagggctctggcagcttcactcagagccgcagcagtcaccgtgtggcccgtgtggctcgtgtctgcaagggagacctgggagggaagaagatcctgcagaagaagtggacttccttcctgaaagcccgtctcatctgccacattccactgtatgagacactgcgtggggtctgcagcctggatgctgaaacctcaagccgtacacacttctatgcagccttcacgctgagcacacagtggaagaccctggaggcctcagccatctgccgctatgacctggcagagatccaggctgtctttgcaggaccctatatggaataccaggatggttcccggcgctggggtcgctatgagggtggggtgcctgagccccggcctggctcgtgtatcacagattcattgcgcagccaaggctacaattcatcccaagacttgccatccctggtcctggactttgtaaagttgcacccactgatggctcggcccgttgtgcccacacgtggacggcccctgctgctcaagcgcaacatacgctacacacaccttacagggacacctgtcaccacgcctgctggacctacctatgacctgctctttctgggcacagctgatggctggatccacaaggccgtagtcctgggctctgggatgcacattattgaagagacacaagtgttcagggagtcccagtctgtggaaaatctagtcatctctctattgcgcacagcctctatgtgggggctcctagcggagtcatccagctaccactctccagctgctcccgctaccgatcctgctatgactgcatcttggcccgagacccctactgtggctgggaccctggcacccatgcctgcgcagcagccaccaccatagccaacaggtcccaggacagcactgatacaggacatagagagaggaaatcgaggctgtgagagcagcagggatacagggccaccaccaccactgaagacccgctctgtgctccggggtgatgatgtcctcctgccctgtgaccagccatccaacctggcccgggccttgtggctactcaatgggagcatgggcctgagcgatgggcagggtggctaccgtgtgggcgtggacgggctgctggttacagatgcacagcctgagcacagtggcaactatggctgctatgccgaggaaaatggcctccgcaccctgctggcctcctatagtctcacagtccggccagccactcctgccccagctccaaaagcccctgccacacctggggcacagctggcacctgatgtgagactgctctatgtgctagccattgccgcgcttggtggcctctgcctcatcctggcctcctccctcctctatgtggcctgtctgcgggaaggcagacgagggcgccgacggaaatactcactgggtcgggccagccgggcaggaggatctgcggtgcaactgcagacagtctcaggccagtgtcctggagaggaagatgagggtgatgatgagggggctgggggcctggagggcagctgtctccagatcatccctggggagggagccccagccccaccacccccaccgcccccaccgccaccggctgagctgaccaatggcttggtggcactgcccagccggctgcggaggatgaatggcaatagctatgtgcttctgaggcagagcaacaatggagtaccagcagggccctgctccttcgccgaggaactcagccgcatcctggaaaaaaggaagcacacgcagctcgtggagcagctagatgagagctctgtctgagcccagcctcccagaacaaatgctcttccaagccagcctatctgtcccaggctgggccactgcctccctaacacagccaccctcccttcattacccccactccatacccttctcccaactttttgatgtccctgtagggctggccagtcaggcccagccaaagccccctcctcagtctccacagacccacatgtgagcagcccaggcccatcggtgctcctcagaggtaggtgctccctcaggatcaggtgccctgcagacccagagccagttcctatcccctaacctaaacacttataggtgaggactccatcctcctgttccattcatctgcccaaaccctttctctttctcccaggcagggctctgcaggtccatatgggctcaatgtcaccaccctctgcatggccctgtgtgctggatggtcctgaaaccagacaagacctctgccagccacctaagccctgcgtacattcacatgcacacatggaagaatgtttatcggctgggctgcagtgcccccaccctcaccttctcctggtgcattcttgtttcatccctgcttctggacttggggtaccctcccaattgccacatcctatctggtcctcttccccagccccatgtggtgacctctttgtcaagagcttgggaacgggccagcctggggaggtaagactgcatcactcccctcctctcccttcctgtgtggcccttgtgaatcagcctccccactctccttggtcattctcaagagtatgagagacagagctccaggcatgtcccatccccatgcacatgtggtaacacacacctgtatcacacatgtgcttacatttccactcacatgcacctctgagcctcccttgctgtcttggacctgtctgttgggtttagtccgtggacatttcagagggagatccccctcccatttaactgtcctcacaggcccttgcctaggatggatgaccaacactgcactcaatgagccagcctctcttttgggggaatcaagcatttgcttcctctagactacagcagggaaagggaggagaaatctgatgtctcaactggcacatgaagcccattcttggaactatgcaaagggcagaggctgggagtttggacgcttagctcctacccctgtcctacctcaccggggcactttcaggggccaggggcctctgaagtctctaggcctatatgggacaatcaattctgactgagctcccccattcccctcgggtgaggatgactgttatttttgtagctgagaacgtggaatcccacgggtttttactgcccttcacccaacctctcccacctccaccccacaatgaatgtatttattgtgagaatggctacacttctttaggaatgcccccacttacaaccaggtgggtggaacaggcatgtgacagagtggggagcctgggctcagctcctccccctgccgttggttaataaacaccctttttccccacaa

SEQ ID NO: 364621 - DNA, 1086 bp, Homo sapiens
gcacgagggaactcagccgcatcctggaacagcctcccagaacaaatgctcttccaagccagcctatctgtcccaggctgggccactgcctccctaacacagccaccctcccttcattacccccacctcaccttctcctggtgcattcttgtttcatccctgcttctggacttggggtaccctcccaattgccacatcctatctggtcctcttccccagccccatgtggtgacctctttgtcaagagcttgggaacgggccagcctggggaggtaagactgcatcactcccctcctctcccttcctgtgtggcccttgtgaatcagcctccccactctccttggtcattctcaagagtatgagagacagagctccaggcatgtcccatccccatgcacatgtggtaacacacacctgtatcacacatgtgcttacatttccactcacatgcacctctgagcctcccttgctgtcttggacctgtctgttgggtttagtccgtggacatttcagagggagatccccctcccatttaactgtcctcacaggcccttgcctaggatggatgaccaacactgcactcaatgagccagcctctcttttgggggaatcaagcatttgcttcctctagactacagcagggaaagggaggagaaatctgatgtctcaactggcacatgaagcccattcttggaactatgcaaagggcagaggctgggagtttggacgcttagctcctacccctgtcctacctcaccggggcactttcaggggccaggggcctctgaagtctctaggcctatatgggacaatcaattctgactgagctcccccattcccctcgggtgaggatgactgttatttttgtagctgagaacgtggaatcccacgggtttttactgcccttcacccaacctctcccacctccaccccacaatgaatgtatttattgtgagaatggctacacttctttaggaatgcccccacttacaaccaggtgggtggaacaggcatgtgacagagtggggagcctgggctcagctcctccccctgccgttggttaataaacaccctttttccccacaa

SEQ ID NO: 364622 - DNA, 3555 bp, Homo sapiens
cttgcaagttactttgcttttctaatgttggttttcttatctataaaatgcgttataaactactacatggagttgttgtaagggttaaaagacgttaatatataaagcccttagtgcagtgcctgtcacatattaagtgctcggtaaatgttaggtgttgtgatgatgatgacagtgacaactactgctgctagaaagcctagttaacttatcaggttgttgggcatctagaacccagtgaactttaaagagtagagaggataatcaaattagtgatgtttattctttgccatttttcctttcccattctgtgagtggtttggacagatcattcttgaagttctagctttatggaaatcctcaagtcttttatgcagtggaacactattctaatgccacactggtaactgggtaaaagcctagcacctgaaatatatctgttttcatgaaaattgtacgtcgtgatgtatttgggagacataatttgaccgatagtataacaaaatttgttatataccagggtacttaataagggttttctttgtgctgcttttagatataaactaaagactttttaaaaatatttttagagtaaactgttataacattctttccaattctcaggctagatgaactgcagaagcaactacaagaagacataaggcaaggccgaggcattaaatccccaatcagaattggagaagaagacagtacagatgatgaggatggcctcttagaagagcacaaggaatttctaaagaaattttcagttacaattgatgctattcctgatcatcatccaggtgaagaaatatttaatttcctcaattctggaaaaattttcaatcagtataccttggatttaagagactctggttttattggacaaagtgctgtagaaaaacttattcttaaatcgggaaaaacagatcagatttttttgacaacacaaggtttccttacgtctgcttatcactatgtccagtgtcctgtccctgtgttaaagtggctgtttcggatgatgtcagttcatacagactgtattgtgtcagtgcagattttaagtacattgatggaaataacaattagaaatgataccttcagtgactcaccagtttggccatggatcccatcattgtctgatgtagcagctgtgtttttcaatatggggattgattttagatctttgtttcccctggagaatcttcagccagactttaatgaagactatctagtttctgaaacacagacaacatcaagggggaaagaaagtgaagattcatcttataagccaattttttcaacacttcctgaaaccaacattttaaatgtggttaagtttctaggcttgtgtacatctatacatccagaaggttaccaggatcgtgaaataatgttgctgattttaatgttatttaaaatgagtttggaaaaacagctgaaacagattcctttagtagactttcaaagcctcctgataaacctgatgaaaaacatcagagattggaacacaaaggtgcctgaactctgtctgggcataaatgaactctccagtcatccccacaacctcctgtggttggtacagctggtccctaattggacatcacgtggaaggcaactgagacagtgcctcagtctagtgattatttcaaagcttttggatgagaaacacgaagatgttcctaatgccagtaatctgcaggtatcagtcctacatcgctatcttgtgcagatgaagccttctgatttgttaaagaaaatggtcttgaagaaaaaggctgaacaaccagatggcattattgatgacagtcttcatttagaacttgaaaagcaggcatattacctgacctacattcttcttcatttagtcggtgaagttagttgttctcattctttttcttctggacaacggaaacactttgtgctactctgtggggctttggaaaagcatgttaaatgtgatattagggaagatgcaagacttttttacagaactaaggtgaaagacttggtcgccaggatacatggaaaatggcaggaaataatccagaactgtcggcctactcaggggcagcttcatgacttctgggtaccagattcttaataggagttgcagcagcaaaaatatgaaccaagagaaattcaataagagcctttcatagaggagtagaaaggattattacagaatccaatgaatgccaagaaaatgtacagcaaatgtgccacttgaatatctagtatgaagctggtaatgaagaaattgccatttctgaagcagatatgaaatatgatctgcttaattgttaaggcaactgacctttcaaaagtgcagagtcttattaaaagaggggaggggtagaagcagaataatagtcatatgtctaacctgccccagttaactcctcttgttaaattataagccagttatcttttttagatagtatttttgtcacttggataatcacaggaaatatataagaaaagagcttggactaacttgagaagttggacatggaaagcaagaccaagttccagttgggtttaattttccctcttggttattttcggacacaaagggaatgcttaaaactgagtttagtaataaaaagcataaatctcttctgtaacttttataaaccacagggaggtttcaatccatgcattttccttcattactcaagattataaatctgtttttaaaatacatctaaacaaacagttgagaaacaaaagtttggcatgttgtcagatccccttaagaggaagaggttaagctgtaaagtagtggccctgttttgatgccagaacattcatatgctgtttgttctggatttcttttaaatgcatgtattttaaatactggttaaatcttagaatcttggccaaaaaaaaaaacaaaaaaaaaaaaaaaaaatttgggggcggctttggggaccctcaagaaaaaagtttgttaaggaaccacttcgtttgtggggcgcggggcaccaagttgtgttaaggtcggaacaagtttgggatataaggctggttaccccatgggaaaaacacgtggtgaatggaaatgttggtttggatttccaaccccatataaaaaaacgcccgtgaggtaaaccggacacatcttataaacaaaattccaaacatggaacgttacgaaaggaccatcacgtagatatcattcaacaccggcacccccaggaaactcacaattaaagtttcaccagctaactgggcacctacacccacacgggccgcaacacaccaaccccgcagcaaagaacaagccccacgaccggagagaacgacccgcacacaccgacgacgcacaagccacacggagggaacaagtagcacaaccccgcaccacaacaaagacaggaacggcacagagacagagcgcgacacccccgacgctagacggtatatcaattacgacggcacagcaggcaacaacaagacgcagaccccgaaacagaagcacagaacacaaccagcagacagcgagagcacaaacactaagcagacagaacacaacgaaagaacgcgactaac

SEQ ID NO: 364623 - DNA, 4806 bp, Homo sapiens
caaggggcttagatctcagtcatcagactatacaggacatgttcatcctggaacttacacaaataccttagaacgtctagtgaaggaaatggaagacacacaaaggctagatgaactgcagaagcaactacaagaagacataaggcaaggccgaggcattaaatccccaatcagaattggagaagaagacagtacagatgatgaggatggcctcttagaagagcacaaggaatttctaaagaaattttcagttacaattgatgctattcctgatcatcatccaggtgaagaaatatttaatttcctcaattctggaaaaattttcaatcagtataccttggatttaagagactctggttttattggacaaagtgctgtagaaaaacttattcttaaatcgggaaaaacagatcagatttttttgacaacacaaggtttccttacgtctgcttatcactatgtccagtgtcctgtccctgtgttaaagtggctgtttcggatgatgtcagttcatacagactgtattgtgtcagtgcagattttaagtacattgatggaaataacaattagaaatgataccttcagtgactcaccagtttggccatggatcccatcattgtctgatgtagcagctgtgtttttcaatatggggattgattttagatctttgtttcccctggagaatcttcagccagactttaatgaagactatctagtttctgaaacacagacaacatcaagggggaaagaaagtgaagattcatcttataagccaattttttcaacacttcctgaaaccaacattttaaatgtggttaagtttctaggcttgtgtacatctatacatccagaaggttaccaggatcgtgaaataatgttgctgattttaatgttatttaaaatgagtttggaaaaacagctgaaacagattcctttagtagactttcaaagcctcctgataaacctgatgaaaaacatcagagattggaacacaaaggtgcctgaactctgtctgggcataaatgaactctccagtcatccccacaacctcctgtggttggtacagctggtccctaattggacatcacgtggaaggcaactgagacagtgcctcagtctagtgattatttcaaagcttttggatgagaaacacgaagatgttcctaatgccagtaatctgcaggtatcagtcctacatcgctatcttgtgcagatgaagccttctgatttgttaaagaaaatggtcttgaagaaaaaggctgaacaaccagatggcattattgatgacagtcttcatttagaacttgaaaagcaggcatattacctgacctacattcttcttcatttagtcggtgaagttagttgttctcattctttttcttctggacaacggaaacactttgtgctactctgtggggctttggaaaagcatgttaaatgtgatattagggaagatgcaagacttttttacagaactaaggtgaaagacttggtcgccaggatacatggaaaatggcaggaaataatccagaactgtcggcctactcaggggcagcttcatgacttctgggtaccagattcttaataggagttgcagcagcaaaaatatgaaccaagagaaattcaataagagcctttcatagaggagtagaaaggattattacagaatccaatgaatgccaagaaaatgtacagcaaatgtgccacttgaatatctagtatgaagctggtaatgaagaaattgccatttctgaagcagatatgaaatatgatctgcttaattgttaaggcaactgacctttcaaaagtgcagagtcttattaaaagaggggaggggtagaagcagaataatagtcatatgtctaacctgccccagttaactcctcttgttaaattataagccagttatcttttttagatagtatttttgtcacttggataatcacaggaaatatataagaaaagagcttggactaacttgagaagttggacatggaaagcaagaccaagttccagttgggtttaattttccctcttggttattttcggacacaaagggaatgcttaaaactgagtttagtaataaaaagcataaatctcttctgtaacttttataaaccacagggaggtttcaatccatgcattttccttcattactcaagattataaatctgtttttaaaatacatctaaacaaacagttgagaaacaaaagtttggcatgttgtcagatccccttaagaggaagaggttaagctgtaaagtagtggccctgttttgatgccagaacattcatatgctgtttgttctggatttcttttaaatgcatgtattttaaatactggttaaatcttagaatcttggctatatcttagaattctggctcttggtaaccatattacagaagtctatattgtaaaagcctaaagatctggacaagtttccaacaaccttgtttccatgagtatataattttggcagacacctgaattctttgggacactgtgtctgtgtatgtgtgtgtgtgtgtgtgtgtgtgtgtgcgcttgtatcttgaagttgttgcacttcaaaaccacagctgctgtaaattcttaaacactggagagccatcctttggtttaaatggtagagggttagtggaagtgcacacgttgtttttagcccaggggtagtaacaaactcttactagccaactagaaaattattttgttgacgagatgtcccttttaggagggtttgtttcctgaaagaatgccaactttttttgttgttctttcagtattggcttgagtgacctgttctcctgagtgctctagtgtctccagttgtgggggggaaagatgatggaggggaacagaaactggacttgatgtttgcggtttgagaggcaagaaaataaaataactttctacctctaaattgaggcttaggagtaaaaagcattttgtcctaaatttatcatttaaaatagcatcagtaacttttgagctcatgtcaatcaagcattggcagtcagagattttatagggaagactaagtaaatccagtttccaagaacctaaactgattgaggctccaagagtcagaccaacaaaagttttattctgtgttgtttactggtaagaatattattatcttgatactacctctcaagggtattgttacaaaatgccacttatggttaaagagatagatacaaagagttctatttgacagaagcttgaaactctggcatctatctgcccaacgatgggggctttcgttctgtaatttaatcctttgtagatacattatttgtgtgtaattttatacgtgttcatatttttctcattttgcattgtgtaaagtgtacaaaatctcaaagtataaaatactgcttatattgcttgtaatttacagtgtgtaaatattttctaattgtgtacattgatgggggggacaagtgggttattcaggtttttttttaatgacccttttgtattgcagtttcaacagataactgtccatcaaatttaaaaccactttgatacatttttatttaacagttccaataagaaaaaaatctctatttttaattatatttctcctttagaaaaaaaatacttcatggtccctctaaaataaatggccagacctcagtttaggcccttgtatttatgactctggtagaggtcttcagactccaggtcatagtccagtcagtatttgcatttgggttctcatgaaaactttgtgactctcttttagcacaagtagcccatggtttttcttccaaatcaagtattttacttctcccttgagtccccatgctttgtctccctcctgctgctattgcccggtgaatgggatggtagagagggagaaatgttcattgcacagagaatgtcaggccactttggggacttggcaaacgaagcttgcactgagtggtggtgtgtttggcaatattactgtgccaaaaatcaccttgtctaattttatggatatgtatggcaaacttattacccttcttgcaagctgcacattaaggtacttgtaagtgtttatgcttttgtgtgtaactgtttgccttttctaactgcttttcttgttactgaaaatataattctactagttttatcacattaagaggctctccatgcacaaaatgcattgatgtagccgtaaagtaacagcatttgtacattttctatctcctgatggcagtggtgcctttgtcaccttttggaaggtttgcattttgtttctgctttcaagcgcaaatagtagcttgctttcagcttcacaaaaatctcctcaaatgtaaaagatacaaaatggcgtgttatcatccaggcttagttggagtatttgcatttttatttttatcaaaacaaatataattggtggggactggccagtaataatgtgtggcgtctttaagccaagagtaatttttaaattaaaaatgaaaattttaagaggtagcccattaaacaagctactgagttggagaattaggggatgactgtggtggtttgtcgctaaggaggcaacagtagggtccaggcggcggggcacgtagagcagttagcatgatccatggttattccttactcatgaacagtgtcggcgcacctcattatctgtgcatttgtttttcctgggcagtcctgtcagccagttaatccaccagctcttaggaagtaaatacagatttttttctttccttttttttttttttaaagattttatactacatcttgttaaagtcctatgaatgtgtgtgtgtgtgtgctattaaaactgctttttctcagtttga

SEQ ID NO: 364624 - DNA, 2396 bp, Homo sapiens
ccattttcctcggcatagcagccatagttgccactgtgctcaggctgtgcatctgtaaccagcagcccgtccaaaccccacagggccaccaccaccactgaagacccgctctgtgctccggggtgatgatgtcctcctgccctgtgaccagccatccaacctggcccgggccttgtggctactcaatgggagcatgggcctgagcgatgggcagggtggctaccgtgtgggcgtggacgggctgctggttacagatgcacagcctgagcacagtggcaactatggctgctatgccgaggaaaatggcctccgcaccctgctggcctcctatagtctcacagtccggccagccactcctgccccagctccaaaagcccctgccacacctggggcacagctggcacctgatgtgagactgctctatgtgctagccattgccgcgcttggtggcctctgcctcatcctggcctcctccctcctctatgtggcctgtctgcgggaaggcagacgagggcgccgacggaaatactcactgggtcgggccagccgggcaggaggatctgcggtgcaactgcagacagtctcaggccagtgtcctggagaggaagatgagggtgatgatgagggggctgggggcctggagggcagctgtctccagatcatccctggggagggagccccagccccaccacccccaccgcccccaccgccaccggctgagctgaccaatggcttggtggcactgcccagccggctgcggaggatgaatggcaatagctatgtgcttctgaggcagagcaacaatggagtaccagcagggccctgctccttcgccgaggaactcagccgcatcctggaaaaaaggaagcacacgcagctcgtggagcagctagatgagagctctgtctgagcccagcctcccagaacaaatgctcttccaagccagcctatctgtcccaggctgggccactgcctccctaacacagccaccctcccttcattacccccactccatacccttctcccaactttttgatgtccctgtagggctggccagtcaggcccagccaaagccccctcctcagtctccacagacccacatgtgagcagcccaggcccatcggtgctcctcagaggtaggtgctccctcaggatcaggtgccctgcagacccagagccagttcctatcccctaacctaaacacttataggtgaggactccatcctcctgttccattcatctgcccaaaccctttctctttctcccaggcagggctctgcaggtccatatgggctcaatgtcaccaccctctgcatggccctgtgtgctggatggtcctgaaaccagacaagacctctgccagccacctaagccctgcgtacattcacatgcacacatggaagaatgtttatcggctgggctgcagtgcccccaccctcaccttctcctggtgcattcttgtttcatccctgcttctggacttggggtaccctcccaattgccacatcctatctggtcctcttccccagccccatgtggtgacctctttgtcaagagcttgggaacgggccagcctggggaggtaagactgcatcactcccctcctctcccttcctgtgtggcccttgtgaatcagcctccccactctccttggtcattctcaagagtatgagagacagagctccaggcatgtcccatccccatgcacatgtggtaacacacacctgtatcacacatgtgcttacatttccactcacatgcacctctgagcctcccttgctgtcttggacctgtctgttgggtttagtccgtggacatttcagagggagatccccctcccatttaactgtcctcacaggcccttgcctaggatggatgaccaacactgcactcaatgagccagcctctcttttgggggaatcaagcatttgcttcctctagactacagcagggaaagggaggagaaatctgatgtctcaactggcacatgaagcccattcttggaactatgcaaagggcagaggctgggagtttggacgcttagctcctacccctgtcctacctcaccggggcactttcaggggccaggggcctctgaagtctctaggcctatatgggacaatcaattctgactgagctcccccattcccctcgggtgaggatgactgttatttttgtagctgagaacgtggaatcccacgggtttttactgcccttcacccaacctctcccacctccaccccacaatgaatgtatttattgtgagaatggctacacttctttaggaatgcccccacttacaaccaggtgggtggaacaggcatgtgacagagtggggagcctgggctcagctcctccccctgccgttggttaataaacaccctttttccccacaa

SEQ ID NO: 364625 - DNA, 1398 bp, Homo sapiens
tctctgtgttgtgctgtctcccccgttttgcccgcccctccccgtagtgatggtcgtctctctccccaaggtgactcccccccggctcgcgtcttgtttcctcgtcagcctgcctcgttctttttttgtgtcgccgcccgcgcccccctcccgtctttttatattggacgcctcccctttcttgagtgggcgccgccctcttctcttacctcaacagtggcggggtgggctgcctcattttgtgtgctcctctcccggcggcaggtagtattttcccccccccccctctctcttcttttttttttttttttttttttttttttttttttttttttttttttttttttttttttttttttttttttttttttttttttttttttttttttgaaggagacggatggtttattaaggggacttccatacagggcactccagtggcggcgggctgcactggagaaccattcccctttgtaaaaaccatgcagtttttatagcattttcacttagcatcctccccctaatcacctccacctggcaaacttcatttaacccaaaacaaagggccttgatcccctggacagcatgtgttccacaggatgggctaggggctcagatgttcttcatagataaggagtgaatctctaggttggccacttgcagatttggaactccaaacatacattgttttgaggccataaggtcattctcaggggatgcttaagttattgctgtcaggtgcatctgccatacaacctgcccctatccctgatcgctgatccctgaccccagactgatctgactttgagccactgtccctgcctgtcttcggaaccacttactgctggttccttgttccctaggatgctgaggccttcaccttgccaaccagcttcgaggaggggaaggagaagtgtccttatgacccagcccgtggcttcacaggcctcatcattggtgagcaggccttcttccctatcacagacatggtatttttaggatgtggatctcatctctaggacctgccaccatgtatatgtcatgtgccctgttgaatatgacatgtctctcatgcctggaatatccccacgccagatggaggcctctacacagccactaggtatgaattccggagcattcctgacatccgccggagccgccacccacactccctgagaactgaggagacaccaatgcattggctcaatggttaggaggatgaggcacaggatgatggggggtaggggactatttcttcatttttactcccttggccagctgaccaccccacccccaaatccccaggtgagcctgtccattccattcctgtgtgttgtcaagtgaggggtcagcctcagagtgagggaaaggaatccccagcctgtctcaaaagcctct

SEQ ID NO: 364626 - DNA, 390 bp, Homo sapiens
caacagcatcaagatcatcaggagagatgcaccatgggacgcatcagcagtgactgatctgccccagagcaagtgcagccaaagctctccgtgcactaaatactgactgtactccagacaggcctccaagggcacagctgggcataccctgtagttatcttacttcctgtagttattttaattcctggcccctctttccctaaatccaattgttagcaaagactcccctcaacctttttttttttttgagaagggggtcttattatgttgcccaggctggtcttgaattgctgggctcgagcagtcctcctggttcagcctcctgagtagctgagattacaggtgtgagccaccgcgcccacccatgttcatattttaaatttatagaaa

SEQ ID NO: 364627 - DNA, 2573 bp, Homo sapiens
gcttccggctttcgctcgcttccatatccgctcctctagtcgccctccgctggccccgccttcgtccccggaagattgggtcctctggcgagccactgtttgccgtttgatcgggcaccaaataaagtttctttattcaaaagcactttttttttaaagccacaccacccccattctcagctcctccttcgcggcggtaccgcctctgtttctgcggcgattgaacagccgagctttgcggccgggatcgcggaaagtgatggctgtcgtcccggcgtctctctcaggacaggacgtgggatcatttgcatatcttacaattaaagacagaataccacagatcttaactaaggttattgatacattgcatcgacataaaagtgaattttttgagaaacacggagaggaaggcgtggaagctgaaaagaaagctatctctctcctttctaaattacggaatgaattgcaaacagataaaccatttatccccttggttgagaaatttgttgatactgatatatggaatcagtacctagaatatcaacagagtcttttaaatgaaagtgatggaaaatcaagatggttctactcaccgtggttgttggtagaatgttacatgtatcgaagaattcatgaagcaattatccagagtccaccaatcgattactttgatgtatttaaagaatcaaaagagcaaaatttctatgggtcacaggaatccatcattgctttatgtactcacctgcaacaattgataagaactattgaagacctagatgaaaatcagctgaaagatgagttttttaaacttctgcagatttcactgtggggaaataagtgtgatctgtctctctcaggtggagaaagtagttctcagaataccaatgtactaaattcattggaagacctaaaacctttcattttattgaatgatatggaacatctttggtcattgcttagcaattgcaagaaaacaagagaaaaagcttctgctactagagtgtatattgttctcgataattctggatttgagcttgttacagatttaatattagccgacttcttgttgtcctctgaactggctactgaggttcatttttatggaaaaacaattccatggtttgtttctgatactactatacatgattttaattggttaattgaacaggtaaaacacagtaatcataagtggatgtccaagtgtggggctgactgggaagagtatattaaaatgggtaaatgggtttaccacaatcatatattttggactctgcctcatgagtactgtgcaatgcctcaggttgcacctgacttatatgctgaactacagaaggcacatttaattttattcaagggtgatttgaattacaggaagttgacaggtgacagaaaatgggagttttctgttccatttcatcaggctctgaatggcttccatcctgcaccactctgtaccataagaacattaaaagctgaaattcaggttggtctgcagcctgggcaaggggaacagctcctggcctctgagcccagctggtggaccactggaaaatatggaatatttcagtacgatggtcccctttgacttgatttaggagctctcagttgcatagaaagatctggtgagcaccttttcatccccagaaaaggagcacgtgaattgagtcgcctggcggctctgtacgcgctcagggaagcttagcttcttggtgcccatctacgtgcactggatgatttttcttttgaacattttgccccactacactgttttggggatagctgggttaagcaagttaaagatatttacatttatattggaattttagcaactttttttcaggttaaatatataatttcaagtgcttttaatgaacttatttttaattggctagggagcaaaaaataagtgagttctgcttttagttagttaaccttgttcttttcttaaatagtacactgcatggtatttaatattccaggaagcatgggattttattttgcttgattttgggcacatgaaataatagctctaggaaaatgcgcatcttaatgactctttgtaaagagaggcatttcttacaactgtgatgtttgcttacataaaagttacctcataagttaattctaacttttattcttgaattttatttcatttcaatagcttgtttcatttgcacgcctttgtattttgattgacctgtagaatggatgttaggaaactcaaaattgaacacagtgaaacaaatggtatttgaagaaatgtaatatcttttatattctatttatgatatccataatcaaatgagattattttaccacataaatgttttaaatatcagatttttagtttgcagttttaggaaaatgctttagatagaaaaggttcttatgcattgaatttggagtactaccaacaatgaatgaatttattttttatattcttacacattttattggtcattgtcacagatagtaaatactaaaaatttcaggtcagtttgttttgaaactgaaattggaaataaatctggaaatgttttgttgcactaaaataataaaatgaattgtactga

SEQ ID NO: 364628 - DNA, 2440 bp, Homo sapiens
gcgcaagacacaggaggcccaggccggcagtcaggacatggcggcgatttgcagattccaatcttaccgcctctgtttctgcggcgattgaacagccgagctttgcggccgggatcgcggaaagtgatggctgtcgtcccggcgtctctctcaggacaggacgtgggatcatttgcatatcttacaattaaagacagaataccacagatcttaactaaggttattgatacattgcatcgacataaaagtgaattttttgagaaacacggagaggaaggcgtggaagctgaaaagaaagctatctctctcctttctaaattacggaatgaattgcaaacagataaaccatttatccccttggttgagaaatttgttgatactgatatatggaatcagtacctagaatatcaacagagtcttttaaatgaaagtgatggaaaatcaagatggttctactcaccgtggttgttggtagaatgttacatgtatcgaagaattcatgaagcaattatccagagtccaccaatcgattactttgatgtatttaaagaatcaaaagagcaaaatttctatgggtcacaggaatccatcattgctttatgtactcacctgcaacaattgataagaactattgaagacctagatgaaaatcagctgaaagatgagttttttaaacttctgcagatttcactgtggggaaataagtgtgatctgtctctctcaggtggagaaagtagttctcagaataccaatgtactaaattcattggaagacctaaaacctttcattttattgaatgatatggaacatctttggtcattgcttagcaattgcaagaaaacaagagaaaaagcttctgctactagagtgtatattgttctcgataattctggatttgagcttgttacagatttaatattagccgacttcttgttgtcctctgaactggctactgaggttcatttttatggaaaaacaattccatggtttgtttctgatactactatacatgattttaattggttaattgaacaggtaaaacacagtaatcataagtggatgtccaagtgtggggctgactgggaagagtatattaaaatgggtaaatgggtttaccacaatcatatattttggactctgcctcatgagtactgtgcaatgcctcaggttgcacctgacttatatgctgaactacagaaggcacatttaattttattcaagggtgatttgaattacaggaagttgacaggtgacagaaaatgggagttttctgttccatttcatcaggctctgaatggcttccatcctgcaccactctgtaccataagaacattaaaagctgaaattcaggttggtctgcagcctgggcaaggggaacagctcctggcctctgagcccagctggtggaccactggaaaatatggaatatttcagtacgatggtcccctttgacttgatttaggagctctcagttgcatagaaagatctggtgagcaccttttcatccccagaaaaggagcacgtgaattgagtcgcctggcggctctgtacgcgctcagggaagcttagcttcttggtgcccatctacgtgcactggatgatttttcttttgaacattttgccccactacactgttttggggatagctgggttaagcaagttaaagatatttacatttatattggaattttagcaactttttttcaggttaaatatataatttcaagtgcttttaatgaacttatttttaattggctagggagcaaaaaataagtgagttctgcttttagttagttaaccttgttcttttcttaaatagtacactgcatggtatttaatattccaggaagcatgggattttattttgcttgattttgggcacatgaaataatagctctaggaaaatgcgcatcttaatgactctttgtaaagagaggcatttcttacaactgtgatgtttgcttacataaaagttacctcataagttaattctaacttttattcttgaattttatttcatttcaatagcttgtttcatttgcacgcctttgtattttgattgacctgtagaatggatgttaggaaactcaaaattgaacacagtgaaacaaatggtatttgaagaaatgtaatatcttttatattctatttatgatatccataatcaaatgagattattttaccacataaatgttttaaatatcagatttttagtttgcagttttaggaaaatgctttagatagaaaaggttcttatgcattgaatttggagtactaccaacaatgaatgaatttattttttatattcttacacattttattggtcattgtcacagatagtaaatactaaaaatttcaggtcagtttgttttgaaactgaaattggaaataaatctggaaatgttttgttgcactaaaataataaaatgaattgtactga

SEQ ID NO: 364629 - DNA, 2518 bp, Homo sapiens
gcttccggctttcgctcgcttccatatccgctcctctagtcgccctccgctggccccgccttcgtccccggaagattgggtcctctggcgagccactgtttgccgtttgatcgggcaccaaataaagtttctttattcaaaagcactttttttttaaagccacaccacccccattctcagctcctccttcgcggcggtaccgcctctgtttctgcggcgattgaacagccgagctttgcggccgggatcgcggaaagtgatggctgtcgtcccggcgtctctctcaggacaggacgtgggatcatttgcatatcttacaattaaagacagaataccacagatcttaactaaggttattgatacattgcatcgacataaaagtgaattttttgagaaacacggagaggaaggcgtggaagctgaaaagaaagctatctctctcctttctaaattacggaatgaattgcaaacagataaaccatttatccccttggttgagaaatttgttgatactgatatatggaatcagtacctagaatatcaacagagtcttttaaatgaaagtgatggaaaatcaagatggttctactcaccgtggttgttggtagaatgttacatgtatcgaagaattcatgaagcaattatccagagtccaccaatcgattactttgatgtatttaaagaatcaaaagagcaaaatttctatgggtcacaggaatccatcattgctttatgtactcacctgcaacaattgataagaactattgaagacctagatgaaaatcagctgaaagatgagttttttaaacttctgcagatttcactgtggggaaataagtgtgatctgtctctctcaggtggagaaagtagttctcagaataccaatgtactaaattcattggaagacctaaaacctttcattttattgaatgatatggaacatctttggtcattgcttagcaattgcaagaaaacaagagaaaaagcttctgctactagagtgtatattgttctcgataattctggatttgagcttgttacagatttaatattagccgacttcttgttgtcctctgaactggctactgaggttcatttttatggaaaaacaattccatggtttgtttctgatactactatacatgattttaattggttaattgaacaggtaaaacacagtaatcataagtggatgtccaagtgtggggctgactgggaagagtatattaaaatgggtaaatgggtttaccacaatcatatattttggactctgcctcatgagtactgtgcaatgcctcaggttgcacctgacttatatgctgaactacagaaggcacatttaattttattcaagggtgatttgaattacaggaagttgacaggtgacagaaaatgggagttttctgttccatttcatcaggctctgaatggcttccatcctgcaccactctgtaccataagaacattaaaagctgaaattcaggttggtctgcagcctgggcaaggggaacagctcctggcctctgagcccagctggtggaccactggaaaatatggaatatttcagtacgatggtcccctttgacttgatttaggagctctcagttgcatagaaagatctggtgagcaccttttcatccccagaaaaggagcacgtgaattgagtcgcctggcggctctgtacgcgctcagggaagcttagcttcttggtgcccatctacgtgcactggatgatttttcttttgaacattttgccccactacactgttttggggatagctgggttaagcaagttaaagatatttacatttatattggaattttagcaactttttttcaggttaaatatataatttcaagtgcttttaatgaacttatttttaattggctagggagcaaaaaataagtgagttctgcttttagttagttaaccttgttcttttcttaaatagtacactgcatggtatttaatattccaggaagcatgggattttattttgcttgattttgggcacatgaaataatagctctaggaaaatgcgcatcttaatgactctttgtaaagagaggcatttcttacaactgtgatgtttgcttacataaaagttacctcataagttaattctaacttttattcttgaattttatttcatttcaatagcttgtttcatttgcacgcctttgtattttgattgacctgtagaatggatgttaggaaactcaaaattgaacacagtgaaacaaatggtatttgaagaaatgtaatatcttttatattctatttatgatatccataatcaaatgagattattttaccacataaatgttttaaatatcagatttttagtttgcagttttaggaaaatgctttagatagaaaaggttcttatgcattgaatttggagtactaccaacaatgaatgaatttattttttatattcttacacattttagtatttactatctgtgacaatgaccaataaaatgtgtcgacgcggccgcgaatttagtagtagta

SEQ ID NO: 364630 - DNA, 2654 bp, Homo sapiens
gcgcaagacacaggaggcccaggccggcagtcaggacatggcggcgatttgcagattccaatcttaccgcctctgtttctgcggcgattgaacagccgagctttgcggccgggatcgcggaaagtgatggctgtcgtcccggcgtctctctcaggacaggacgtggggttagtctagcttttctcctccccacttttgcggaaagccgggcctcgccgggagcctgtggggactaagcggagggcgcccgctccccggtgggctgcgttcgagtcccgccgccgggcgcggctttccggggcgcctttgcgggtttcgcggactggctcggaggcgaagggaggcggccccggggagggagcctgcccgcggcggctgctcatcatttgcatatcttacaattaaagacagaataccacagatcttaactaaggttattgatacattgcatcgacataaaagtgaattttttgagaaacacggagaggaaggcgtggaagctgaaaagaaagctatctctctcctttctaaattacggaatgaattgcaaacagataaaccatttatccccttggttgagaaatttgttgatactgatatatggaatcagtacctagaatatcaacagagtcttttaaatgaaagtgatggaaaatcaagatggttctactcaccgtggttgttggtagaatgttacatgtatcgaagaattcatgaagcaattatccagagtccaccaatcgattactttgatgtatttaaagaatcaaaagagcaaaatttctatgggtcacaggaatccatcattgctttatgtactcacctgcaacaattgataagaactattgaagacctagatgaaaatcagctgaaagatgagttttttaaacttctgcagatttcactgtggggaaataagtgtgatctgtctctctcaggtggagaaagtagttctcagaataccaatgtactaaattcattggaagacctaaaacctttcattttattgaatgatatggaacatctttggtcattgcttagcaattgcaagaaaacaagagaaaaagcttctgctactagagtgtatattgttctcgataattctggatttgagcttgttacagatttaatattagccgacttcttgttgtcctctgaactggctactgaggttcatttttatggaaaaacaattccatggtttgtttctgatactactatacatgattttaattggttaattgaacaggtaaaacacagtaatcataagtggatgtccaagtgtggggctgactgggaagagtatattaaaatgggtaaatgggtttaccacaatcatatattttggactctgcctcatgagtactgtgcaatgcctcaggttgcacctgacttatatgctgaactacagaaggcacatttaattttattcaagggtgatttgaattacaggaagttgacaggtgacagaaaatgggagttttctgttccatttcatcaggctctgaatggcttccatcctgcaccactctgtaccataagaacattaaaagctgaaattcaggttggtctgcagcctgggcaaggggaacagctcctggcctctgagcccagctggtggaccactggaaaatatggaatatttcagtacgatggtcccctttgacttgatttaggagctctcagttgcatagaaagatctggtgagcaccttttcatccccagaaaaggagcacgtgaattgagtcgcctggcggctctgtacgcgctcagggaagcttagcttcttggtgcccatctacgtgcactggatgatttttcttttgaacattttgccccactacactgttttggggatagctgggttaagcaagttaaagatatttacatttatattggaattttagcaactttttttcaggttaaatatataatttcaagtgcttttaatgaacttatttttaattggctagggagcaaaaaataagtgagttctgcttttagttagttaaccttgttcttttcttaaatagtacactgcatggtatttaatattccaggaagcatgggattttattttgcttgattttgggcacatgaaataatagctctaggaaaatgcgcatcttaatgactctttgtaaagagaggcatttcttacaactgtgatgtttgcttacataaaagttacctcataagttaattctaacttttattcttgaattttatttcatttcaatagcttgtttcatttgcacgcctttgtattttgattgacctgtagaatggatgttaggaaactcaaaattgaacacagtgaaacaaatggtatttgaagaaatgtaatatcttttatattctatttatgatatccataatcaaatgagattattttaccacataaatgttttaaatatcagatttttagtttgcagttttaggaaaatgctttagatagaaaaggttcttatgcattgaatttggagtactaccaacaatgaatgaatttattttttatattcttacacattttattggtcattgtcacagatagtaaatactaaaaatttcaggtcagtttgttttgaaactgaaattggaaataaatctggaaatgttttgttgcactaaaataataaaatgaattgtactga

SEQ ID NO: 364631 - DNA, 2523 bp, Homo sapiens
gcttccggctttcgctcgcttccatatccgctcctctagtcgccctccgctggccccgccttcgtccccggaagattgggtcctctggcgagccactgtttgccgtttgatcgggcaccaaataaagtttctttattcaaaagcactttttttttaaagccacaccacccccattctcagctcctccttcgcggcggtaccgcctctgtttctgcggcgattgaacagccgagctttgcggccgggatcgcggaaagtgatggctgtcgtcccggcgtctctctcaggacaggacgtgggatcatttgcatatcttacaattaaagacagaataccacagatcttaactaaggttattgatacattgcatcgacataaaagtgaattttttgagaaacacggagaggaaggcgtggaagctgaaaagaaagctatctctctcctttctaaattacggaatgaattgcaaacagataaaccatttatccccttggttgagaaatttgttgatactgatatatggaatcagtacctagaatatcaacagagtcttttaaatgaaagtgatggaaaatcaagatggttctactcaccgtggttgttggtagaatgttacatgtatcgaagaattcatgaagcaattatccagagtccaccaatcgattactttgatgtatttaaagaatcaaaagagcaaacaattgataagaactattgaagacctagatgaaaatcagctgaaagatgagttttttaaacttctgcagatttcactgtggggaaataagtgtgatctgtctctctcaggtggagaaagtagttctcagaataccaatgtactaaattcattggaagacctaaaacctttcattttattgaatgatatggaacatctttggtcattgcttagcaattgcaagaaaacaagagaaaaagcttctgctactagagtgtatattgttctcgataattctggatttgagcttgttacagatttaatattagccgacttcttgttgtcctctgaactggctactgaggttcatttttatggaaaaacaattccatggtttgtttctgatactactatacatgattttaattggttaattgaacaggtaaaacacagtaatcataagtggatgtccaagtgtggggctgactgggaagagtatattaaaatgggtaaatgggtttaccacaatcatatattttggactctgcctcatgagtactgtgcaatgcctcaggttgcacctgacttatatgctgaactacagaaggcacatttaattttattcaagggtgatttgaattacaggaagttgacaggtgacagaaaatgggagttttctgttccatttcatcaggctctgaatggcttccatcctgcaccactctgtaccataagaacattaaaagctgaaattcaggttggtctgcagcctgggcaaggggaacagctcctggcctctgagcccagctggtggaccactggaaaatatggaatatttcagtacgatggtcccctttgacttgatttaggagctctcagttgcatagaaagatctggtgagcaccttttcatccccagaaaaggagcacgtgaattgagtcgcctggcggctctgtacgcgctcagggaagcttagcttcttggtgcccatctacgtgcactggatgatttttcttttgaacattttgccccactacactgttttggggatagctgggttaagcaagttaaagatatttacatttatattggaattttagcaactttttttcaggttaaatatataatttcaagtgcttttaatgaacttatttttaattggctagggagcaaaaaataagtgagttctgcttttagttagttaaccttgttcttttcttaaatagtacactgcatggtatttaatattccaggaagcatgggattttattttgcttgattttgggcacatgaaataatagctctaggaaaatgcgcatcttaatgactctttgtaaagagaggcatttcttacaactgtgatgtttgcttacataaaagttacctcataagttaattctaacttttattcttgaattttatttcatttcaatagcttgtttcatttgcacgcctttgtattttgattgacctgtagaatggatgttaggaaactcaaaattgaacacagtgaaacaaatggtatttgaagaaatgtaatatcttttatattctatttatgatatccataatcaaatgagattattttaccacataaatgttttaaatatcagatttttagtttgcagttttaggaaaatgctttagatagaaaaggttcttatgcattgaatttggagtactaccaacaatgaatgaatttattttttatattcttacacattttattggtcattgtcacagatagtaaatactaaaaatttcaggtcagtttgttttgaaactgaaattggaaataaatctggaaatgttttgttgcactaaaataataaaatgaattgtactga

SEQ ID NO: 364632 - DNA, 522 bp, Homo sapiens
tgttagagaaagtatagatttgatggtcatgtaaagagttttgtagatatttagtagttttttagcaatgtccccccatcccgctacataatggagttttgttggctattcagaagaagggtgaatattttgtactttttctttttcagatttcactgtggggaaataagtgtgatctgtctctctcaggtggagaaagtagttctcagaataccaatgtactaaattcattggaagacctaaaacctttcattttattgaatgatatggaacatctttggtcattgcttagcaattgcaagaaaacaagagaaaaagcttctgctactagagtgtatattgttctcgataattctggatttgagcttgttacagatttaatattagccgacttcttgttgtcctctgaactggctactgaggttcatttttatggaaaaacaattccatggtttgtttctgatactactatacatgattttaattggttaattgaacaggtaaaacacagtaatcataagt

SEQ ID NO: 364633 - DNA, 2756 bp, Homo sapiens
gcttccggctttcgctcgcttccatatccgctcctctagtcgccctccgctggccccgccttcgtccccggaagattgggtcctctggcgagccactgtttgccgtttgatcgggcaccaaataaagtttctttattcaaaagcactttttttttaaagccacaccacccccattctcagctcctccttcgcggcggtaccgcctctgtttctgcggcgattgaacagccgagctttgcggccgggatcgcggaaagtgatggctgtcgtcccggcgtctctctcaggacaggacgtgggatcatttgcatatcttacaattaaagacagaataccacagatcttaactaaggttattgatacattgcatcgacataaaagtgaattttttgagaaacacggagaggaaggcgtggaagctgaaaagaaagctatctctctcctttctaaattacggaatgaattgcaaacagataaaccatttatccccttggttgagaaatttgttgatactgatatatggaatcagtacctagaatatcaacagagtcttttaaatgaaagtgatggaaaatcaagatggttctactcaccgtggttgttggtagaatgttacatgtatcgaagaattcatgaagcaattatccagagtccaccaatcgattactttgatgtatttaaagaatcaaaagagcaaaatttctatgggtcacaggaatccatcattgctttatgtactcacctgcaacaattgataagaactattgaagacctagatgaaaatcagctgaaagatgagttttttaaacttctgcagatttcactgtggggaaataagtgtgatctgtctctctcaggtggagaaagtagttctcagaataccaatgtactaaattcattggaagacctaaaacctttcattttattgaatgatatggaacatctttggtcattgcttagcaattgcaagaaaacaagagaaaaagcttctgctactagagtgtatattgttctcgataattctggatttgagcttgttacagatttaatattagccgacttcttgttgtcctctgaactggctactgaggttcatttttatggaaaaacaattccatggtttgtttctgatactactatacatgattttaattggttaattgaacaggtaaaacacagtaatcataagtggatgtccaagtgtggggctgactgggaagagtatattaaaatgggtaaatgggtttaccacaatcatatattttggactctgcctcatgagtactgtgcaatgcctcaggttgcacctgacttatatgctgaactacagaaggcacatttaattttattcaagggtgatttgaattacaggaagttgacaggtgacagaaaatgggagttttctgttccatttcatcaggctctgaatggcttccatcctgcaccactctgtaccataagaacattaaaagctgaaattcaggttggtctgcagcctgggcaaggggaacagctcctggcctctgagcccagctggtggaccactggaaaatatggaatatttcagtacgatggtcccctttgacttgatttaggagctctcagttgcatagaaagatctggtgagcaccttttcatccccagaaaaggagcacgtgaattgagtcgcctggcggctctgtacgcgctcagggaagcttagcttcttggtgcccatctacgtgcactggatgatttttcttttgaacattttgccccactacactgttttggggatagctgggttaagcaagttaaagatatttacatttatattggaattttagcaactttttttcaggttaaatatataatttcaagtgcttttaatgaacttatttttaattggctagggagcaaaaaataagtgagttctgcttttagttagttaaccttgttcttttcttaaatagtacactgcatggtatttaatattccaggaagcatgggattttattttgcttgattttgggcacatgaaataatagctctaggaaaatgcgcatcttaatgactctttgtaaagagaggcatttcttacaactgtgatgtttgcttacataaaagttacctcataagttaattctaacttttattcttgaattttatttcatttcaatagcttgtttcatttgcacgcctttgtattttgattgacctgtagaatggatgttaggaaactcaaaattgaacacagtgaaacaaatggtatttgaagaaatgtaatatcttttatattctatttatgatatccataatcaaatgagattattttaccacataaatgttttaaatatcagatttttagtttgcagttttaggaaaatgctttagatagaaaaggttcttatgcattgaatttggagtactaccaacaatgaatgaatttattttttatattcttacacattttattggtcattgtcacagatagtaaatactaaaaatttcaggtcagtttgttttgaaactgaaattggaaataaatctggaaatgttttgttgcactaaaataataaaatgaattgtactgaaaatctccttggttttattttctagtggggaaaagtcaagaaaggaagattaaaaatgagatttatataaaaagagacataatatatattctagatgttgccaaaagcagttattaaatatcatttataaaaggttattagtctatgctcttgctaagtattaaaaaagatttttgcaaaatg

SEQ ID NO: 364634 - DNA, 2425 bp, Homo sapiens
gcttccggctttcgctcgcttccatatccgctcctctagtcgccctccgctggccccgccttcgtccccggaagattgggtcctctggcgagccactgtttgccgtttgatcgggcaccaaataaagtttctttattcaaaagcactttttttttaaagccacaccacccccattctcagctcctccttcgcggcggtaccgcctctgtttctgcggcgattgaacagccgagctttgcggccgggatcgcggaaagtgatggctgtcgtcccggcgtctctctcaggacaggacgtgggatcatttgcatatcttacaattaaagacagaataccacagatcttaactaaggttattgatacattgcatcgacataaaagtgaattttttgagaaacacggagaggaaggcgtggaagctgaaaagaaagctatctctctcctttctaaattacggaatgaattgcaaacagataaaccatttatccccttggttgagaaatttgttgatactgatatatggaatcagtacctagaatatcaacagagtcttttaaatgaaagtgatggaaaatcaagatggttctactcaccgtggttgttggtagaatgttacatgtatcgaagaattcatgaagcaattatccagagtccaccaatcgattactttgatgtatttaaagaatcaaaagagcaaaatttctatgggtcacaggaatccatcattgctttatgtactcacctgcaacaattgataagaactattgaagacctagatgaaaatcagctgaaagatgagttttttaaacttctgcagatttcactgtggggaaataagtgtgatctgtctctctcaggtggagaaagtagttctcagaataccaatgtactaaattcattggaagacctaaaacctttcattttattgaatgatatggaacatctttggtcattgcttagcaattgcaagaaaacaagagaaaaagcttctgctactagagtgtatattgttctcgataattctggatttgagcttgttacagatttaatattagccgacttcttgttgtcctctgaactggctactgaggttcatttttatggaaaaacaattccatggtttgtttctgatactactatacatgattttaattggttaattgaacaggtaaaacacagtaatcataagtggatgtccaagtgtggggctgactgggaagagtatattaaaatgggtaaatgggtttaccacaatcatatattttggactctgcctcatgagtactgtgcaatgcctcaggttgcacctgacttatatgctgaactacagaaggcacatttaattttattcaagggtgatttgaattacaggaagttgacaggtgacagaaaatgggagttttctgttccatttcatcaggctctgaatggcttccatcctgcaccactctgtaccataagaacattaaaagctgaaattcaggttggtctgcagcctgggcaaggggaacagctcctggcctctgagcccagctggtggaccactggaaaatatggaatatttcagtacgatggtcccctttgacttgatttaggagctctcagttgcatagaaagatctggtgagcaccttttcatccccagaaaaggagcacgtgaattgagtcgcctggcggctctgtacgcgctcagggaagcttagcttcttggtgcccatctacgtgcactggatgatttttcttttgaacattttgccccactacactgttttggggatagctgggttaagcaagttaaagatatttacatttatattggaattttagcaactttttttcaggttaaatatataatttcaagtgcttttaatgaacttatttttaattggctagggagcaaaaaataagtgagttctgcttttagttagttaaccttgttcttttcttaaatagtacactgcatggtatttaatattccaggaagcatgggattttattttgcttgattttgggcacatgaaataatagctctaggaaaatgcgcatcttaatgactctttgtaaagagaggcatttcttacaactgtgatgtaagcaaacgcggggccgcgcacgcgggaaaagcattccccgggtgtcctcgccgaagcgacccgccgcgtatggcaatcagcgataccgcgaacagcaatacgccctatgaaccaaagacagtactccacgagtgacacgaaacgaaacacaacggagccgatagcaatagaaggcacaaaaggtgagagagcaaacggacgtgggcaccacgtgagccacagctcaaccaacagagcccaaggaacacacgccaaagacgctaacacatacaaaggcgggagaacaaacacggacgcacaaacagcccggtcgcaatagagccaggacagcgc

SEQ ID NO: 364635 - DNA, 2334 bp, Homo sapiens
gcgcaagacacaggaggcccaggccggcagtcaggacatggcggcgatttgcagattccaatcttaccgcctctgtttctgcggcgattgaacagccgagctttgcggccgggatcgcggaaagtgatggctgtcgtcccggcgtctctctcaggacaggacgtggggaaggcgtggaagctgaaaagaaagctatctctctcctttctaaattacggaatgaattgcaaacagataaaccatttatccccttggttgagaaatttgttgatactgatatatggaatcagtacctagaatatcaacagagtcttttaaatgaaagtgatggaaaatcaagatggttctactcaccgtggttgttggtagaatgttacatgtatcgaagaattcatgaagcaattatccagagtccaccaatcgattactttgatgtatttaaagaatcaaaagagcaaaatttctatgggtcacaggaatccatcattgctttatgtactcacctgcaacaattgataagaactattgaagacctagatgaaaatcagctgaaagatgagttttttaaacttctgcagatttcactgtggggaaataagtgtgatctgtctctctcaggtggagaaagtagttctcagaataccaatgtactaaattcattggaagacctaaaacctttcattttattgaatgatatggaacatctttggtcattgcttagcaattgcaagaaaacaagagaaaaagcttctgctactagagtgtatattgttctcgataattctggatttgagcttgttacagatttaatattagccgacttcttgttgtcctctgaactggctactgaggttcatttttatggaaaaacaattccatggtttgtttctgatactactatacatgattttaattggttaattgaacaggtaaaacacagtaatcataagtggatgtccaagtgtggggctgactgggaagagtatattaaaatgggtaaatgggtttaccacaatcatatattttggactctgcctcatgagtactgtgcaatgcctcaggttgcacctgacttatatgctgaactacagaaggcacatttaattttattcaagggtgatttgaattacaggaagttgacaggtgacagaaaatgggagttttctgttccatttcatcaggctctgaatggcttccatcctgcaccactctgtaccataagaacattaaaagctgaaattcaggttggtctgcagcctgggcaaggggaacagctcctggcctctgagcccagctggtggaccactggaaaatatggaatatttcagtacgatggtcccctttgacttgatttaggagctctcagttgcatagaaagatctggtgagcaccttttcatccccagaaaaggagcacgtgaattgagtcgcctggcggctctgtacgcgctcagggaagcttagcttcttggtgcccatctacgtgcactggatgatttttcttttgaacattttgccccactacactgttttggggatagctgggttaagcaagttaaagatatttacatttatattggaattttagcaactttttttcaggttaaatatataatttcaagtgcttttaatgaacttatttttaattggctagggagcaaaaaataagtgagttctgcttttagttagttaaccttgttcttttcttaaatagtacactgcatggtatttaatattccaggaagcatgggattttattttgcttgattttgggcacatgaaataatagctctaggaaaatgcgcatcttaatgactctttgtaaagagaggcatttcttacaactgtgatgtttgcttacataaaagttacctcataagttaattctaacttttattcttgaattttatttcatttcaatagcttgtttcatttgcacgcctttgtattttgattgacctgtagaatggatgttaggaaactcaaaattgaacacagtgaaacaaatggtatttgaagaaatgtaatatcttttatattctatttatgatatccataatcaaatgagattattttaccacataaatgttttaaatatcagatttttagtttgcagttttaggaaaatgctttagatagaaaaggttcttatgcattgaatttggagtactaccaacaatgaatgaatttattttttatattcttacacattttattggtcattgtcacagatagtaaatactaaaaatttcaggtcagtttgttttgaaactgaaattggaaataaatctggaaatgttttgttgcactaaaataataaaatgaattgtactga

SEQ ID NO: 364636 - DNA, 1901 bp, Homo sapiens
gcagtcatctgactcggtgactcacccgcggccgcgcttcctctgatccgggccgggcgggaagtcgggtcccgaggctccggctcggcagaccgggcggaaagcagccgagcggccatggagctgtgcgggctggggctgccccggccgcccatgctgctggcgctgctgttggcgacactgctggcggcgatgttggcgctgctgactcaggtggcgctggtggtgcaggtggcggaggcggctcgggccccgagcgtctcggccaagccggggccggcgctgtggcccctgccgctctcggtgaagatgaccccgaacctgctgcatctcgccccggagaacttctacatcagccacagccccaattccacggcgggcccctcctgcaccctgctggaggaagcgtttcgacgatatcatggctatatttttggtttctacaagtggcatcatgaacctgctgaattccaggctaaaacccaggttcagcaacttcttgtctcaatcacccttcagtcagagtgtgatgctttccccaacatatcttcagatgagtcttatactttacttgtgaaagaaccagtggctgtccttaaggccaacagagtttggggagcattacgaggtttagagacctttagccagttagtttatcaagattcttatggaactttcaccatcaatgaatccaccattattgattctccaaggttttctcacagaggaattttgattgatacatccagacattatctgccagttaagattattcttaaaactctggatgccatggcttttaataagtttaatgttcttcactggcacatagttgatgaccagtctttcccatatcagagcatcacttttcctgagttaagcaataaaggaagctattctttgtctcatgtttatacaccaaatgatgtccgtatggtgattgaatatgccagattacgaggaattcgagtcctgccagaatttgatacccctgggcatacactatcttggggaaaaggtcagaaagacctcctgactccatgttacagtagacaaaacaagttggactcttttggacctataaaccctactctgaatacaacatacagcttccttactacatttttcaaagaaattagtgaggtgtttccagatcaattcattcatttgggaggagatgaagtggaatttaaatgttgggaatcaaatccaaaaattcaagatttcatgaggcaaaaaggctttggcacagattttaagaaactagaatctttctacattcaaaaggttttggatattattgcaaccataaacaagggatccattgtctggcaggaggtttttgatgataaagcaaagcttgcgccgggcacaatagttgaagtatggaaagacagcgcatatcctgaggaactcagtagagtcacagcatctggcttccctgtaatcctttctgctccttggtacttagatttgattagctatggacaagattggaggaaatactataaagtggaacctcttgattttggcggtactcagaaacagaaacaacttttcattggtggagaagcttgtctatggggagaatatgtggatgcaactaacctcactccaagattatggcctcgggcaagtgctgttggtgagagactctggagttccaaagatgtcagagatatggatgacgcctatgacagactgacaaggcaccgctgcaggatggtcgaacgtggaatagctgcacaacctctttatgctggatattgtaaccatgagaacatgtaaaaaatggaggggaaaaaggccacagcaatctgtactacaatcaactttattttgaaatcatgtaaaataagatattagactgttttttgaataaaatatttttattgattgaa

SEQ ID NO: 364637 - DNA, 536 bp, Homo sapiens
gaggggccatcttttttgtgccacaaccattagcatctcccaaggtcctgctaaccacgggcaagaaatgttgccctaggataaagatggaggaaacaaatcttgatgaaatattgcctctgtgtataagctttgaacttctgaacttaattcaatgattttaatttaggtactcagaaacagaaacaacttttcattggtggagaagcttgtctatggggagaatatgtggatgcaactaacctcactccaagattatggcctcgggcaagtgctgttggtgagagactctggagttccaaagatgtcagagatatggatgacgcctatgacagactgacaaggcaccgctgcaggatggtcgaacgtggaatagctgcacaacctctttatgctggatattgtaaccatgagaacatgtaaaaaatggaggggaaaaaggccacagcaatctgtactacaatcaactttattttgaaatcatgtaaaataagatattagactgttttttgaataaaatatttttattgattgaa

SEQ ID NO: 364638 - DNA, 1161 bp, Homo sapiens
cattaccggtaacaatagaacattataaagatcttgttaacaaaagtagcttcttgccagagtctttttattaacacttgcaacgctatttaacaagctggccatgcctgtgtgacaccaaaccgcatgtggataaattcagtgtttcatctccaggcccaccaattcctatcctttgtaactaataatgttaacacgacagatcaagaaactagtttttcagaaagcagttttcattcattctctatagacatttccgccgcagtgaacatgcccgcactcagggtgtctgtgcatggccccaactttcctccaagccggggaggatgcaacgtgggccaaccatcccgcgcgctcggccctggaggctgcggggagcgacgcagcgcgacattcacccccaggaaagcgctgctttccgcagaggagagaggctgactgtatccttagctcggctcctcgcttccccagcggctcgccccagacattgcaccgcggaggggaggccggtcgacctctccggcgatgcccggcttctgcctgctgtgggagggcagcggcgggcaccgtgatctccgcaccgagaagagctccccttgccctctagtcgaagctcccgagtgctcggagcacgctcacccctcgcgaacacacccctgcagccgaagcagcccctgaagcccgcagcgcctgcaacaggtccggggcagtgggggaaacttacagcagtggcgactggccgcaacgcacaactgagttctagcgacggtcacgggcaaggaggcgacgaaccggtcgtctcagcccagggaagcggtggcgaatgccccggagaaaggagggccagccggggagaggactgcgccccgaacgatggctcgcggaccggctaccgatggcgttcgcctccgtctgtcgtccccacgccgcggacccggtgtccaggacccgcagagcgtctccggagcgcgtcacggtagggcagagcaagcctgccactgcaggcgccgcggaaggaggcgggctgtgcgctcgggggagggagctagaaagcgccttgtgtgccggcggccgccaggcgtctggaccgggtctccgcagcgccaccgccgcaccgcctcctctccggctgccagagcagtctgcgccccgccgccgtgc

SEQ ID NO: 364639 - DNA, 402 bp, Homo sapiens
ctgcagagcacctggcattatgtaaatatctgtaaatatttgtggattgtcagtaactgttacatgtaatttatgtgatatgacaggctagatcgtggtccctaccattttaagacagccataaaattgtaagagattgctgtttgtacaatttcctgagttgcctaccaactcaatttgaggccacttcttcctatcttaggggcatgtttaactcattcattcagcaaatgattattaaacccccatactatgttaggttctgtatcaagtgctaaaaaggaggaactacttgtgacacttcccaacttgagctgcttctgctataaagctgaactatactaaaaggcacctctcaaaatgcaagaaatccttggtagaaaatgtacatgttttaaatat

SEQ ID NO: 364640 - DNA, 340 bp, Homo sapiens
tggtcttcattcttcagccagcccagccagcttccctctcggacccacagttgggctttgaatctccagcagcagctggtgtggaggcttcaagctctgtcctcagagagaggtgacaaccatttcaaattctacacataaatggtggggcccatggaaatcaaatgctgaatatggtacagcaagggaaaaggtccagcttttctctccctttgaggggctgattaacattgacattaatccacaattacaagacaaggactagatcacaggtttgttcattcatatttaaaccatgtgctacttgcaccaaaaatcccacccccctccctcgcccctt

SEQ ID NO: 364641 - DNA, 2660 bp, Homo sapiens
gcagtcatctgactcggtgactcacccgcggccgcgcttcctctgatccgggccgggcgggaagtcgggtcccgaggctccggctcggcagaccgggcggaaagcagccgagcggccatggagctgtgcgggctggggctgccccggccgcccatgctgctggcgctgctgttggcgacactgctggcggcgatgttggcgctgctgactcaggtggcgctggtggtgcaggtggcggaggcggctcgggccccgagcgtctcggccaagccggggccggcgctgtggcccctgccgctctcggtgaagatgaccccgaacctgctgcatctcgccccggagaacttctacatcagccacagccccaattccacggcgggcccctcctgcaccctgctggaggaagcgtttcgacgatatcatggctatatttttggtttctacaagtggcatcatgaacctgctgaattccaggctaaaacccaggttcagcaacttcttgtctcaatcacccttcagtcagagtgtgatgctttccccaacatatcttcagatgagtcttatactttacttgtgaaagaaccagtggctgtccttaaggccaacagagtttggggagcattacgaggtttagagacctttagccagttagtttatcaagattcttatggaactttcaccatcaatgaatccaccattattgattctccaaggttttctcacagaggaattttgattgatacatccagacattatctgccagttaagattattcttaaaactctggatgccatggcttttaataagtttaatgttcttcactggcacatagttgatgaccagtctttcccatatcagagcatcacttttcctgagttaagcaataaaggaagctattctttgtctcatgtttatacaccaaatgatgtccgtatggtgattgaatatgccagattacgaggaattcgagtcctgccagaatttgatacccctgggcatacactatcttggggaaaaggtcagaaagacctcctgactccatgttacagtagacaaaacaagttggactcttttggacctataaaccctactctgaatacaacatacagcttccttactacatttttcaaagaaattagtgaggtgtttccagatcaattcattcatttgggaggagatgaagtggaatttaaatgttgggaatcaaatccaaaaattcaagatttcatgaggcaaaaaggctttggcacagattttaagaaactagaatctttctacattcaaaaggttttggatattattgcaaccataaacaagggatccattgtctggcaggaggtttttgatgataaagcaaagcttgcgccgggcacaatagttgaagtatggaaagacagcgcatatcctgaggaactcagtagagtcacagcatctggcttccctgtaatcctttctgctccttggtacttagatttgattagctatggacaagattggaggaaatactataaagtggaacctcttgattttggcggtactcagaaacagaaacaacttttcattggtggagaagcttgtctatggggagaatatgtggatgcaactaacctcactccaagattatggcctcgggcaagtgctgttggtgagagactctggagttccaaagatgtcagagatatggatgacgcctatgacagactgacaaggcaccgctgcaggatggtcgaacgtggaatagctgcacaacctctttatgctggatattgtaaccatgagaacatgtaaaaaatggaggggaaaaaggccacagcaatctgtactacaatcaactttattttgaaatcatgtaaaataagatattagactgttttttgaataaaatatttttattgattgaacctttgaccctctatcttattacatttagaggcctggcatctttcttgtgagacaagcttaaggacacaaaagaaacacaactttgtgataccactcttctgaaggctacttatagtaataacttcatagatgaacagcatgattcaggtacagtggctttaaacatcaaagcacatttctcattatataaattaaaacgggtggctccagtgccactatcaaagcttaagttatatcttttatctagttctctgaatgtactgaaacagtactttattcgtccaataaataaagcaataaaaattgttcttactgaaaatgaagtagctaggtgctcctgaatttctctccaaaaactaaaacatttaggtcaaaccacttctccggttgagcagtgtattttgatcttgaggattcatggcttgataagtagatagttctaaggcaaaagtagctgagcctgatgttagcgttcgaagcacagttgaataacccataatttctgctaagggaacaaatccaataacaactttgttgtcctggcgagtctgaatttcctgaatgtttcctcttctttgtgccagatctgccaggacagggctgagataatctctagctactgtaacctcaagattcatcagaggctccaaaacttgcttatcagctttcttcagagcctaaagaaattaaagaatgttaacttatctttcataaataaaaacttaaaataaatacagcctagagctcatacaaaaaga

SEQ ID NO: 364642 - DNA, 2815 bp, Homo sapiens
gcagtcatctgactcggtgactcacccgcggccgcgcttcctctgatccgggccgggcgggaagtcgggtcccgaggctccggctcggcagaccgggcggaaagcagccgagcggccatggagctgtgcgggctggggctgccccggccgcccatgctgctggcgctgctgttggcgacactgctggcggcgatgttggcgctgctgactcaggtggcgctggtggtgcaggtggcggaggcggctcgggccccgagcgtctcggccaagccggggccggcgctgtggcccctgccgctctcggtgaagatgaccccgaacctgctgcatctcgccccggagaacttctacatcagccacagccccaattccacggcgggcccctcctgcaccctgctggaggaagcgtttcgacgatatcatggctatatttttggtttctacaagtggcatcatgaacctgctgaattccaggctaaaacccaggttcagcaacttcttgtctcaatcacccttcagtcagagtgtgatgctttccccaacatatcttcagatgagtcttatactttacttgtgaaagaaccagtggctgtccttaaggccaacagagtttggggagcattacgaggtttagagacctttagccagttagtttatcaagattcttatggaactttcaccatcaatgaatccaccattattgattctccaaggttttctcacagaggaattttgattgatacatccagacattatctgccagttaagattattcttaaaactctggatgccatggcttttaataagtttaatgttcttcactggcacatagttgatgaccagtctttcccatatcagagcatcacttttcctgagttaagcaataaaggaagctattctttgtctcatgtttatacaccaaatgatgtccgtatggtgattgaatatgccagattacgaggaattcgagtcctgccagaatttgatacccctgggcatacactatcttggggaaaaggtcagaaagacctcctgactccatgttacagtagacaaaacaagttggactcttttggacctataaaccctactctgaatacaacatacagcttccttactacatttttcaaagaaattagtgaggtgtttccagatcaattcattcatttgggaggagatgaagtggaatttaaatgttgggaatcaaatccaaaaattcaagatttcatgaggcaaaaaggctttggcacagattttaagaaactagaatctttctacattcaaaaggttttggatattattgcaaccataaacaagggatccattgtctggcaggaggtttttgatgataaagcaaagcttgcgccgggcacaatagttgaagtatggaaagacagcgcatatcctgaggaactcagtagagtcacagcatctggcttccctgtaatcctttctgctccttggtacttagatttgattagctatggacaagattggaggaaatactataaagtggaacctcttgattttggcggtactcagaaacagaaacaacttttcattggtggagaagcttgtctatggggagaatatgtggatgcaactaacctcactccaagattatggcctcgggcaagtgctgttggtgagagactctggagttccaaagatgtcagagatatggatgacgcctatgacagactgacaaggcaccgctgcaggatggtcgaacgtggaatagctgcacaacctctttatgctggatattgtaaccatgagaacatgtaaaaaatggaggggaaaaaggccacagcaatctgtactacaatcaactttattttgaaatcatgtaaaataagatattagactgttttttgaataaaatatttttattgattgaacctttgaccctctatcttattacatttagaggcctggcatctttcttgtgagacaagcttaaggacacaaaagaaacacaactttgtgataccactcttctgaaggctacttatagtaataacttcatagatgaacagcatgattcaggtacattgtgtttatcagcttgcctccatactgtgagagtctgggcttctacaccagcagaggcatcaaatacagccactgcaccatccaacactcttaggcaccgctcaacctccaaggtaaagtccacatgacctaagaaaaagataagacgtataatgccttctttttaacaaaaccatcatatgatccagcaatctcacatctcactcctggggaggggtgtgtgtgtatatatatgtgtatatatataaaggtattgaaagcagagtctcagagctatttgcacaccctccatagcagcactggtagacaaaaggtggaaaaaacccaaatgtccactgatgtatgaatggataaacaaaatgtgatatacacatacaatggaatactacacagaataaaaaagaaaatattgtagcacattgtcacatgctacaatatgagaaaatttgagggctttatgctaatgagataagccaatcacaagaggacaaatacggtatgattccacttacataaggcatctaagctagtcaaatacataggtatacaaagtacacagtggttagcaggggtgaagggagggggcaaaagggaattgttgtccaatgaatatagtttcatttctgcaagataaaaaagttctggacatctgtttcacagcaatgtgattatacttaacactactaaactgtacacttaaaaatggttgagatggtaaattttgcaacacatgtttttttaccacaataaaaagcaaaac

SEQ ID NO: 364643 - DNA, 2393 bp, Homo sapiens
gcagtcatctgactcggtgactcacccgcggccgcgcttcctctgatccgggccgggcgggaagtcgggtcccgaggctccggctcggcagaccgggcggaaagcagccgagcggccatggagctgtgcgggctggggctgccccggccgcccatgctgctggcgctgctgttggcgacactgctggcggcgatgttggcgctgctgactcaggtggcgctggtggtgcaggtggcggaggcggctcgggccccgagcgtctcggccaagccggggccggcgctgtggcccctgccgctctcggtgaagatgaccccgaacctgctgcatctcgccccggagaacttctacatcagccacagccccaattccacggcgggcccctcctgcaccctgctggaggaagcgtttcgacgatatcatggctatatttttggtttctacaagtggcatcatgaacctgctgaattccaggctaaaacccaggttcagcaacttcttgtctcaatcacccttcagtcagagtgtgatgctttccccaacatatcttcagatgagtcttatactttacttgtgaaagaaccagtggctgtccttaaggccaacagagtttggggagcattacgaggtttagagacctttagccagttagtttatcaagattcttatggaactttcaccatcaatgaatccaccattattgattctccaaggttttctcacagaggaattttgattgatacatccagacattatctgccagttaagattattcttaaaactctggatgccatggcttttaataagtttaatgttcttcactggcacatagttgatgaccagtctttcccatatcagagcatcacttttcctgagttaagcaataaaggaagctattctttgtctcatgtttatacaccaaatgatgtccgtatggtgattgaatatgccagattacgaggaattcgagtcctgccagaatttgatacccctgggcatacactatcttggggaaaaggtcagaaagacctcctgactccatgttacagtagacaaaacaagttggactcttttggacctataaaccctactctgaatacaacatacagcttccttactacatttttcaaagaaattagtgaggtgtttccagatcaattcattcatttgggaggagatgaagtggaatttaaatgttgggaatcaaatccaaaaattcaagatttcatgaggcaaaaaggctttggcacagattttaagaaactagaatctttctacattcaaaaggttttggatattattgcaaccataaacaagggatccattgtctggcaggaggtttttgatgataaagcaaagcttgcgccgggcacaatagttgaagtatggaaagacagcgcatatcctgaggaactcagtagagtcacagcatctggcttccctgtaatcctttctgctccttggtacttagatttgattagctatggacaagattggaggaaatactataaagtggaacctcttgattttggcggtactcagaaacagaaacaacttttcattggtggagaagcttgtctatggggagaatatgtggatgcaactaacctcactccaagattatggcctcgggcaagtgctgttggtgagagactctggagttccaaagatgtcagagatatggatgacgcctatgacagactgacaaggcaccgctgcaggatggtcgaacgtggaatagctgcacaacctctttatgctggatattgtaaccatgagaacatgtaaaaaatggaggggaaaaaggccacagcaatctgtactacaatcaactttattttgaaatcatgtaaaataagatattagactgttttttgaataaaatatttttattgattgaacctttgaccctctatcttattacatttagaggcctggcatctttcttgtgagacaagcttaaggacacaaaagaaacacaactttgtgataccactcttctgaaggctacttatagtaataacttcatagatgaacagcatgattcaggttactgattgtctattcattggcatataatatcccctgaattaagaagaatatgtacttttcagttacaaagtacctaccataatttctgctaagggaacaaatccaataacaactttgttgtcctggcgagtctgaatttcctgaatgtttcctcttctttgtgccagatctgccaggacagggctgagataatctctagctactgtaacctcaagattcatcagaggctccaaaacttgcttatcagctttcttcagagcctaaagaaattaaagaatgttaacttatctttcataaataaaaacttaaaataaatacagcctagagctcatacaaaaaga

SEQ ID NO: 364644 - DNA, 1945 bp, Homo sapiens
gcagtcatctgactcggtgactcacccgcggccgcgcttcctctgatccgggccgggcgggaagtcgggtcccgaggctccggctcggcagaccgggcggaaagcagccgagcggccatggagctgtgcgggctggggctgccccggccgcccatgctgctggcgctgctgttggcgacactgctggcggcgatgttggcgctgctgactcaggtggcgctggtggtgcaggtggcggaggcggctcgggccccgagcgtctcggccaagccggggccggcgctgtggcccctgccgctctcggtgaagatgaccccgaacctgctgcatctcgccccggagaacttctacatcagccacagccccaattccacggcgggcccctcctgcaccctgctggaggaagcgtttcgacgatatcatggctatatttttggtttctacaagtggcatcatgaacctgctgaattccaggctaaaacccaggttcagcaacttcttgtctcaatcacccttcagtcagagtgtgatgctttccccaacatatcttcagatgagtcttatactttacttgtgaaagaaccagtggctgtccttaaggccaacagagtttggggagcattacgaggtttagagacctttagccagttagtttatcaagattcttatggaactttcaccatcaatgaatccaccattattgattctccaaggttttctcacagaggaattttgattgatacatccagacattatctgccagttaagattattcttaaaactctggaataaagcagaaatgatgctgtgttcttctcagtgcttatcaggatgccatggcttttaataagtttaatgttcttcactggcacatagttgatgaccagtctttcccatatcagagcatcacttttcctgagttaagcaataaaggaagctattctttgtctcatgtttatacaccaaatgatgtccgtatggtgattgaatatgccagattacgaggaattcgagtcctgccagaatttgatacccctgggcatacactatcttggggaaaaggtcagaaagacctcctgactccatgttacagtagacaaaacaagttggactcttttggacctataaaccctactctgaatacaacatacagcttccttactacatttttcaaagaaattagtgaggtgtttccagatcaattcattcatttgggaggagatgaagtggaatttaaatgttgggaatcaaatccaaaaattcaagatttcatgaggcaaaaaggctttggcacagattttaagaaactagaatctttctacattcaaaaggttttggatattattgcaaccataaacaagggatccattgtctggcaggaggtttttgatgataaagcaaagcttgcgccgggcacaatagttgaagtatggaaagacagcgcatatcctgaggaactcagtagagtcacagcatctggcttccctgtaatcctttctgctccttggtacttagatttgattagctatggacaagattggaggaaatactataaagtggaacctcttgattttggcggtactcagaaacagaaacaacttttcattggtggagaagcttgtctatggggagaatatgtggatgcaactaacctcactccaagattatggcctcgggcaagtgctgttggtgagagactctggagttccaaagatgtcagagatatggatgacgcctatgacagactgacaaggcaccgctgcaggatggtcgaacgtggaatagctgcacaacctctttatgctggatattgtaaccatgagaacatgtaaaaaatggaggggaaaaaggccacagcaatctgtactacaatcaactttattttgaaatcatgtaaaataagatattagactgttttttgaataaaatatttttattgattgaa

SEQ ID NO: 364645 - DNA, 1852 bp, Homo sapiens
gcagtcatctgactcggtgactcacccgcggccgcgcttcctctgatccgggccgggcgggaagtcgggtcccgaggctccggctcggcagaccgggcggaaagcagccgagcggccatggagctgtgcgggctggggctgccccggccgcccatgctgctggcgctgctgttggcgacactgctggcggcgatgttggcgctgctgactcaggtggcgctggtggtgcaggtggcggaggcggctcgggccccgagcgtctcggccaagccggggccggcgctgtggcccctgccgctctcggtgaagatgaccccgaacctgctgcatctcgccccggagaacttctacatcagccacagccccaattccacggcgggcccctcctgcaccctgctggaggaagcgtttcgacgatatcatggctatatttttggtttctacaagtggcatcatgaacctgctgaattccaggctaaaacccaggttcagcaacttcttgtctcaatcacccttcagtcagagtgtgatgctttccccaacatatcttcagatgagtcttatactttacttgtgaaagaaccagtggctgtccttaaggccaacagagtttggggagcattacgaggtttagagacctttagccagttagtttatcaagattcttatggaactttcaccatcaatgaatccaccattattgattctccaaggttttctcacagaggaattttgattgatacatccagacattatctgccagttaagattattcttaaaactctgatgaccagtctttcccatatcagagcatcacttttcctgagttaagcaataaaggaagctattctttgtctcatgtttatacaccaaatgatgtccgtatggtgattgaatatgccagattacgaggaattcgagtcctgccagaatttgatacccctgggcatacactatcttggggaaaaggtcagaaagacctcctgactccatgttacagtagacaaaacaagttggactcttttggacctataaaccctactctgaatacaacatacagcttccttactacatttttcaaagaaattagtgaggtgtttccagatcaattcattcatttgggaggagatgaagtggaatttaaatgttgggaatcaaatccaaaaattcaagatttcatgaggcaaaaaggctttggcacagattttaagaaactagaatctttctacattcaaaaggttttggatattattgcaaccataaacaagggatccattgtctggcaggaggtttttgatgataaagcaaagcttgcgccgggcacaatagttgaagtatggaaagacagcgcatatcctgaggaactcagtagagtcacagcatctggcttccctgtaatcctttctgctccttggtacttagatttgattagctatggacaagattggaggaaatactataaagtggaacctcttgattttggcggtactcagaaacagaaacaacttttcattggtggagaagcttgtctatggggagaatatgtggatgcaactaacctcactccaagattatggcctcgggcaagtgctgttggtgagagactctggagttccaaagatgtcagagatatggatgacgcctatgacagactgacaaggcaccgctgcaggatggtcgaacgtggaatagctgcacaacctctttatgctggatattgtaaccatgagaacatgtaaaaaatggaggggaaaaaggccacagcaatctgtactacaatcaactttattttgaaatcatgtaaaataagatattagactgttttttgaataaaatatttttattgattgaa

SEQ ID NO: 364646 - DNA, 3055 bp, Homo sapiens
gcagtcatctgactcggtgactcacccgcggccgcgcttcctctgatccgggccgggcgggaagtcgggtcccgaggctccggctcggcagaccgggcggaaagcagccgagcggccatggagctgtgcgggctggggctgccccggccgcccatgctgctggcgctgctgttggcgacactgctggcggcgatgttggcgctgctgactcaggtggcgctggtggtgcaggtggcggaggcggctcgggccccgagcgtctcggccaagccggggccggcgctgtggcccctgccgctctcggtgaagatgaccccgaacctgctgcatctcgccccggagaacttctacatcagccacagccccaattccacggcgggcccctcctgcaccctgctggaggaagcgtttcgacgatatcatggctatatttttggtttctacaagtggcatcatgaacctgctgaattccaggctaaaacccaggttcagcaacttcttgtctcaatcacccttcagtcagagtgtgatgctttccccaacatatcttcagatgagtcttatactttacttgtgaaagaaccagtggctgtccttaaggccaacagagtttggggagcattacgaggtttagagacctttagccagttagtttatcaagattcttatggaactttcaccatcaatgaatccaccattattgattctccaaggttttctcacagaggaattttgattgatacatccagacattatctgccagttaagattattcttaaaactctggatgccatggcttttaataagtttaatgttcttcactggcacatagttgatgaccagtctttcccatatcagagcatcacttttcctgagttaagcaataaaggaagctattctttgtctcatgtttatacaccaaatgatgtccgtatggtgattgaatatgccagattacgaggaattcgagtcctgccagaatttgatacccctgggcatacactatcttggggaaaaggtcagaaagacctcctgactccatgttacagtagacaaaacaagttggactcttttggacctataaaccctactctgaatacaacatacagcttccttactacatttttcaaagaaattagtgaggtgtttccagatcaattcattcatttgggaggagatgaagtggaatttaaatgttgggaatcaaatccaaaaattcaagatttcatgaggcaaaaaggctttggcacagattttaagaaactagaatctttctacattcaaaaggttttggatattattgcaaccataaacaagggatccattgtctggcaggaggtttttgatgataaagcaaagcttgcgccgggcacaatagttgaagtatggaaagacagcgcatatcctgaggaactcagtagagtcacagcatctggcttccctgtaatcctttctgctccttggtacttagatttgattagctatggacaagattggaggaaatactataaagtggaacctcttgattttggcggtactcagaaacagaaacaacttttcattggtggagaagcttgtctatggggagaatatgtggatgcaactaacctcactccaagattatggcctcgggcaagtgctgttggtgagagactctggagttccaaagatgtcagagatatggatgacgcctatgacagactgacaaggcaccgctgcaggatggtcgaaggcctggcatctttcttgtgagacaagcttaaggacacaaaagaaacacaactttgtgataccactcttctgaaggctacttatagtaataacttcatagatgaacagcatgattcaggtacagtggctttaaacatcaaagcacatttctcattatataaattaaaacgggtggctccagtgccactatcaaagcttaagttatatcttttatctagttctctgaatgtactgaaacagtactttattcgtccaataaataaagcaataaaaattgttcttactgaaaatgaagtagctaggtgctcctgaatttctctccaaaaactaaaacatttaggtcaaaccacttctccggttgagcagtgtattttgatcttgaggattcatggcttgataagtagatagttctaaggcaaaagtagctgagcctgatgttagcgttcgaagcacagttgaataaccctaatcaaaataatttaagtcatttatattatcaaatttaagcctcaagtttctcttcctgctgattatcttttgactattagggaaaagtgatgttgccacttttgtggcttagccatatcacttcctccaaacagatgatttaacttttttcagggtaagttggatataaaaacattgaggacagaaagcagagtagtgcaagtgtgctgcagatgtatttgttagatggctttgccggcaacccaggtgcctgtcctggagcagaagaggctgacgggagaagaatgataacttgccttaaaactgacaatggtggaagtaagataaatgcttggcagggaaaaaatggtcatataggctggtaccacattttgggactgtaaatacccccttgtagtgctataatccctggatttcgccaacaatttaaattcaaagtcctaaccattcctgctggttgaaacgaaacttaacatgtattctctaaatcaaagccttaatgtttctttcaggttactgattgtctattcattggcatataatatcccctgaattaagaagaatatgtacttttcagttacaaagtacctaccataatttctgctaagggaacaaatccaataacaactttgttgtcctggcgagtctgaatttcctgaatgtttcctcttctttgtgccagatctgccaggacagggctgagataatctctagctactgtaacctcaagattcatcagaggctccaaaacttgcttatcagctttcttcagagcctaaagaaattaaagaatgttaacttatctttcataaataaaaacttaaaataaatacagcctagagctcatacaaaaaga

SEQ ID NO: 364647 - DNA, 1503 bp, Homo sapiens
gcaggacatccaaatggagatgtacaggaggcagttagagaaataggtcatgtgcttgggagaaaataatagtccagaaatatcaatgacatgtttaggaaacttattgtgtgtcattgagggattaacaaaagtgtgtgtgtgattttaaatcctcaatacagatactttacttgtgaaagaaccagtggctgtccttaaggccaacagagtttggggagcattacgaggtttagagacctttagccagttagtttatcaagattcttatggaactttcaccatcaatgaatccaccattattgattctccaaggttttctcacagaggaattttgattgatacatccagacattatctgccagttaagattattcttaaaactctggatgccatggcttttaataagtttaatgttcttcactggcacatagttgatgaccagtctttcccatatcagagcatcacttttcctgagttaagcaataaaggaagctattctttgtctcatgtttatacaccaaatgatgtccgtatggtgattgaatatgccagattacgaggaattcgagtcctgccagaatttgatacccctgggcatacactatcttggggaaaaggtcagaaagacctcctgactccatgttacagtagacaaaacaagttggactcttttggacctataaaccctactctgaatacaacatacagcttccttactacatttttcaaagaaattagtgaggtgtttccagatcaattcattcatttgggaggagatgaagtggaatttaaatgttgggaatcaaatccaaaaattcaagatttcatgaggcaaaaaggctttggcacagattttaagaaactagaatctttctacattcaaaaggttttggatattattgcaaccataaacaagggatccattgtctggcaggaggtttttgatgataaagcaaagcttgcgccgggcacaatagttgaagtatggaaagacagcgcatatcctgaggaactcagtagagtcacagcatctggcttccctgtaatcctttctgctccttggtacttagatttgattagctatggacaagattggaggaaatactataaagtggaacctcttgattttggcggtactcagaaacagaaacaacttttcattggtggagaagcttgtctatggggagaatatgtggatgcaactaacctcactccaagattatggcctcgggcaagtgctgttggtgagagactctggagttccaaagatgtcagagatatggatgacgcctatgacagactgacaaggcaccgctgcaggatggtcgaacgtggaatagctgcacaacctctttatgctggatattgtaaccatgagaacatgtaaaaaatggaggggaaaaaggccacagcaatctgtactacaatcaactttattttgaaatcatgtaaaataagatattagactgttttttgaataaaatatttttattgattgaa

SEQ ID NO: 364648 - DNA, 1866 bp, Homo sapiens
gcagtcatctgactcggtgactcacccgcggccgcgcttcctctgatccgggccgggcgggaagtcgggtcccgaggctccggctcggcagaccgggcggaaagcagccgagcggccatggagctgtgcgggctggggctgccccggccgcccatgctgctggcgctgctgttggcgacactgctggcggcgatgttggcgctgctgactcaggtggcgctggtggtgcaggtggcggaggcggctcgggccccgagcgtctcggccaagccggggccggcgctgtggcccctgccgctctcggtgaagatgaccccgaacctgctgcatctcgccccggagaacttctacatcagccacagccccaattccacggcgggcccctcctgcaccctgctggaggaagcgtttcgacgatatcatggctatatttttggtttctacaagtggcatcatgaacctgctgaattccaggctaaaacccaggttcagcaacttcttgtctcaatcacccttcagtcagagtgtgatgctttccccaacatatcttcagatgagtcttatactttacttgtgaaagaaccagtggctgtccttaaggccaacagagtttggggagcattacgaggtttagagacctttagccagttagtttatcaagattcttatggaactttcaccatcaatgaatccaccattattgattctccaaggttttctcacagaggaattttgattgatacatccagacattatctgccagttaagattattcttaaaactctggatgccatggcttttaataagtttaatgttcttcactggcacatagttgatgaccagtctttcccatatcagagcatcacttttcctgagttaagcaataaaggaagctattctttgtctcatgtttatacaccaaatgatgtccgtatggtgattgaatatgccagattacgaggaattcgagtcctgccagaatttgatacccctgggcatacactatcttggggaaaaggtcagaaagacctcctgactccatgttacagtagacaaaacaagttggactcttttggacctataaaccctactctgaatacaacatacagcttccttactacatttttcaaagaaattagtgaggtgtttccagatcaattcattcatttgggaggagatgaagtggaatttaaatgttgggaatcaaatccaaaaattcaagatttcatgaggcaaaaaggctttggcacagattttaagaaactagaatctttctacattcaaaaggttttggatattattgcaaccataaacaagggatccattgtctggcaggaggtttttgatgataaagcaaagcttgcgccgggcacaatagttgaagtatggaaagacagcgcatatcctgaggaactcagtagagtcacagcatctggcttccctgtaatcctttctgctccttggtacttagatttgattagctatggacaagattggaggaaatactataaagtggaacctcttgattttggcggtactcagaaacagaaacaacttttcattggtggagaagcttgtctatggggagaatatgtggatgcaactaacctcactccaagattatggcctcgggcaagtgctgttggtgagagactctggagttccaaagatgtcagagatatggatgacgcctatgacagactgacaaggcaccgctgcaggatggtcgaacttggaatagctggaccacctctttagctggtttgttaccctgtgaaactgtacaatgcgggggaaaaaggccagattgtttacaccactttctttgaacccgtcacacaatttaacgggttggacaaccaattc

SEQ ID NO: 364649 - DNA, 3080 bp, Homo sapiens
gcagtcatctgactcggtgactcacccgcggccgcgcttcctctgatccgggccgggcgggaagtcgggtcccgaggctccggctcggcagaccgggcggaaagcagccgagcggccatggagctgtgcgggctggggctgccccggccgcccatgctgctggcgctgctgttggcgacactgctggcggcgatgttggcgctgctgactcaggtggcgctggtggtgcaggtggcggaggcggctcgggccccgagcgtctcggccaagccggggccggcgctgtggcccctgccgctctcggtgaagatgaccccgaacctgctgcatctcgccccggagaacttctacatcagccacagccccaattccacggcgggcccctcctgcaccctgctggaggaagcgtttcgacgatatcatggctatatttttggtttctacaagtggcatcatgaacctgctgaattccaggctaaaacccaggttcagcaacttcttgtctcaatcacccttcagtcagagtgtgatgctttccccaacatatcttcagatgagtcttatactttacttgtgaaagaaccagtggctgtccttaaggccaacagagtttggggagcattacgaggtttagagacctttagccagttagtttatcaagattcttatggaactttcaccatcaatgaatccaccattattgattctccaaggttttctcacagaggaattttgattgatacatccagacattatctgccagttaagattattcttaaaactctggatgccatggcttttaataagtttaatgttcttcactggcacatagttgatgaccagtctttcccatatcagagcatcacttttcctgagttaagcaataaaggaagctattctttgtctcatgtttatacaccaaatgatgtccgtatggtgattgaatatgccagattacgaggaattcgagtcctgccagaatttgatacccctgggcatacactatcttggggaaaaggtcagaaagacctcctgactccatgttacagtagacaaaacaagttggactcttttggacctataaaccctactctgaatacaacatacagcttccttactacatttttcaaagaaattagtgaggtgtttccagatcaattcattcatttgggaggagatgaagtggaatttaaatgttgggaatcaaatccaaaaattcaagatttcatgaggcaaaaaggctttggcacagattttaagaaactagaatctttctacattcaaaaggttttggatattattgcaaccataaacaagggatccattgtctggcaggaggtttttgatgataaagcaaaggtactcagaaacagaaacaacttttcattggtggagaagcttgtctatggggagaatatgtggatgcaactaacctcactccaagattatggcctcgggcaagtgctgttggtgagagactctggagttccaaagatgtcagagatatggatgacgcctatgacagactgacaaggcaccgctgcaggatggtcgaacgtggaatagctgcacaacctctttatgctggatattgtaaccatgagaacatgtaaaaaatggaggggaaaaaggccacagcaatctgtactacaatcaactttattttgaaatcatgtaaaataagatattagactgttttttgaataaaatatttttattgattgaacctttgaccctctatcttattacatttagaggcctggcatctttcttgtgagacaagcttaaggacacaaaagaaacacaactttgtgataccactcttctgaaggctacttatagtaataacttcatagatgaacagcatgattcaggtacagtggctttaaacatcaaagcacatttctcattatataaattaaaacgggtggctccagtgccactatcaaagcttaagttatatcttttatctagttctctgaatgtactgaaacagtactttattcgtccaataaataaagcaataaaaattgttcttactgaaaatgaagtagctaggtgctcctgaatttctctccaaaaactaaaacatttaggtcaaaccacttctccggttgagcagtgtattttgatcttgaggattcatggcttgataagtagatagttctaaggcaaaagtagctgagcctgatgttagcgttcgaagcacagttgaataaccctaatcaaaataatttaagtcatttatattatcaaatttaagcctcaagtttctcttcctgctgattatcttttgactattagggaaaagtgatgttgccacttttgtggcttagccatatcacttcctccaaacagatgatttaacttttttcagggtaagttggatataaaaacattgaggacagaaagcagagtagtgcaagtgtgctgcagatgtatttgttagatggctttgccggcaacccaggtgcctgtcctggagcagaagaggctgacgggagaagaatgataacttgccttaaaactgacaatggtggaagtaagataaatgcttggcagggaaaaaatggtcatataggctggtaccacattttgggactgtaaatacccccttgtagtgctataatccctggatttcgccaacaatttaaattcaaagtcctaaccattcctgctggttgaaacgaaacttaacatgtattctctaaatcaaagccttaatgtttctttcaggttactgattgtctattcattggcatataatatcccctgaattaagaagaatatgtacttttcagttacaaagtacctaccataatttctgctaagggaacaaatccaataacaactttgttgtcctggcgagtctgaatttcctgaatgtttcctcttctttgtgccagatctgccaggacagggctgagataatctctagctactgtaacctcaagattcatcagaggctccaaaacttgcttatcagctttcttcagagcctaaagaaattaaagaatgttaacttatctttcataaataaaaacttaaaataaatacagcctagagctcatacaaaaaga

SEQ ID NO: 364650 - DNA, 1066 bp, Homo sapiens
gtaccatggagagctggggccagagcatcactttgccggagttacgcaataaaggaagctattctttgtctcatgtttatacaccaaatgatgtccgtatggtgattgaatatgccagattacgaggaattcgagtcctgccagaatttgatacccctgggcatacactatcttggggaaaaggtcagaaagacctcctgactccatgttacagtagacaaaacaagttggactcttttggacctataaaccctactctgaatacaacatacagcttccttactacatttttcaaagaaattagtgaggtgtttccagatcaattcattcatttgggaggagatgaagtggaatttaaatgttgggaatcaaatccaaaaattcaagatttcatgaggcaaaaaggctttggcacagattttaagaaactagaatctttctacattcaaaaggttttggatattattgcaaccataaacaagggatccattgtctggcaggaggtttttgatgataaagcaaagcttgcgccgggcacaatagttgaagtatggaaagacagcgcatatcctgaggaactcagtagagtcacagcatctggcttccctgtaatcctttctgctccttggtacttagatttgattagctatggacaagattggaggaaatactataaagtggaacctcttgattttggcggtactcagaaacagaaacaacttttcattggtggagaagcttgtctatggggagaatatgtggatgcaactaacctcactccaagattatggcctcgggcaagtgctgttggtgagagactctggagttccaaagatgtcagagatatggatgacgcctatgacagactgacaaggcaccgctgcaggatggtcgaacgtggaatagctgcacaacctctttatgctggatattgtaaccatgagaacatgtaaaaaatggaggggaaaaaggccacagcaatctgtactacaatcaactttattttgaaatcatgtaaaataagatattagactgttttttgaataaaatatttttattgattgaa

SEQ ID NO: 364651 - DNA, 1789 bp, Homo sapiens
gcagtcatctgactcggtgactcacccgcggccgcgcttcctctgatccgggccgggcgggaagtcgggtcccgaggctccggctcggcagaccgggcggaaagcagccgagcggccatggagctgtgcgggctggggctgccccggccgcccatgctgctggcgctgctgttggcgacactgctggcggcgatgttggcgctgctgactcaggtggcgctggtggtgcaggtggcggaggcggctcgggccccgagcgtctcggccaagccggggccggcgctgtggcccctgccgctctcggtgaagatgaccccgaacctgctgcatctcgccccggagaacttctacatcagccacagccccaattccacggcgggcccctcctgcaccctgctggaggaagcgtttcgacgatatcatggctatatttttggtttctacaagtggcatcatgaacctgctgaattccaggctaaaacccaggttcagcaacttcttgtctcaatcacccttcagtcagagtgtgatgctttccccaacatatcttcagatgagtcttatactttacttgtgaaagaaccagtggctgtccttaaggccaacagagtttggggagcattacgaggtttagagacctttagccagttagtttatcaagattcttatggaactttcaccatcaatgaatccaccattattgattctccaaggttttctcacagaggaattttgattgatacatccagacattatctgccagttaagattattcttaaaactctggatgccatggcttttaataagtttaatgttcttcactggcacatagttgatgaccagtctttcccatatcagagcatcacttttcctgagttaagcaataaaggaagctattctttgtctcatgtttatacaccaaatgatgtccgtatggtgattgaatatgccagattacgaggaattcgagtcctgccagaatttgatacccctgggcatacactatcttggggaaaaggtcagaaagacctcctgactccatgttacagtagacaaaacaagttggactcttttggacctataaaccctactctgaatacaacatacagcttccttactacatttttcaaagaaattagtgaggtgtttccagatcaattcattcatttgggaggagatgaagtggaatttaaatgttgggaatcaaatccaaaaattcaagatttcatgaggcaaaaaggctttggcacagattttaagaaactagaatctttctacattcaaaaggttttggatattattgcaaccataaacaagggatccattgtctggcaggaggtttttgatgataaagcaaagatttgattagctatggacaagattggaggaaatactataaagtggaacctcttgattttggcggtactcagaaacagaaacaacttttcattggtggagaagcttgtctatggggagaatatgtggatgcaactaacctcactccaagattatggcctcgggcaagtgctgttggtgagagactctggagttccaaagatgtcagagatatggatgacgcctatgacagactgacaaggcaccgctgcaggatggtcgaacgtggaatagctgcacaacctctttatgctggatattgtaaccatgagaacatgtaaaaaatggaggggaaaaaggccacagcaatctgtactacaatcaactttattttgaaatcatgtaaaataagatattagactgttttttgaataaaatatttttattgattgaa

SEQ ID NO: 364652 - DNA, 1450 bp, Homo sapiens
gcagtcatctgactcggtgactcacccgcggccgcgcttcctctgatccgggccgggcgggaagtcgggtcccgaggctccggctcggcagaccgggcggaaagcagccgagcggccatggagctgtgcgggctggggctgccccggccgcccatgctgctggcgctgctgttggcgacactgctggcggcgatgttggcgctgctgactcaggtggcgctggtggtgcaggtggcggaggcggctcgggccccgagcgtctcggccaagccggggccggcgctgtggcccctgccgctctcggtgaagatgaccccgaacctgctgcatctcgccccggagaacttctacatcagccacagccccaattccacggcgggcccctcctgcaccctgctggaggaagcgtttcgacgatatcatggctatatttttggtttctacaagtggcatcatgaacctgctgaattccaggctaaaacccaggttcagcaacttcttgtctcaatcacccttcagtcagagtgtgatgctttccccaacatatcttcagatgagtcttatactttacttgtgaaagaaccagtggctgtccttaaggccaacagagtttggggagcattacgaggtttagagacctttagccagttagtttatcaagattcttatggaactttcaccatcaatgaatccaccattattgattctccaaggttttctcacagaggaattttgattgatacatccagacattatctgccagttaagattattcttaaaactctggatgccatggcttttaataagtttaatgttcttcactggcacatagttgatgaccagtctttcccatatcagagcatcacttttcctgagttaagcaataaaggaagctattctttgtctcatgtttatacaccaaatgatgtccgtatggtgattgaatatgccagattacgaggaattcgagtcctgccagaatttgatacccctgggcatacactatcttggggaaaaggtcagaaagacctcctgactccatgttacagtagacaaaacaagttggactcttttggacctataaaccctactctgaatacaacatacagcttccttactacatttttcaaagaaattagtgaggtgtttccagatcaattcattcatttgggaggagatgaagtggaatttaaatgttgggaatcaaatccaaaaattcaagatttcatgaggcaaaaaggctttggcacagattttaagaaactagaatctttctacattcaaaagtaagttgtttgaaagcctatttctgtattaatgctttttgtaaaagtttatttagtaatgtgctttattttttacattttctctacatcctttgcctaagtgtagatgtgaaaaatcactaaaggaggcaatacccactgcttgctttaaatcagtaacatgg

SEQ ID NO: 364653 - DNA, 1890 bp, Homo sapiens
gaggggccatcttttttgtgccacaaccattagcatctcccaaggtcctgctaaccacgggcaagaaatgttgccctaggataaagatggaggaaacaaatcttgatgaaatattgcctctgtgtataagctttgaacttctgaacttaattcaatgattttaatttaggtactcagaaacagaaacaacttttcattggtggagaagcttgtctatggggagaatatgtggatgcaactaacctcactccaagattatggcctcgggcaagtgctgttggtgagagactctggagttccaaagatgtcagagatatggatgacgcctatgacagactgacaaggcaccgctgcaggatggtcgaacgtggaatagctgcacaacctctttatgctggatattgtaaccatgagaacatgtaaaaaatggaggggaaaaaggccacagcaatctgtactacaatcaactttattttgaaatcatgtaaaataagatattagactgttttttgaataaaatatttttattgattgaacctttgaccctctatcttattacatttagaggcctggcatctttcttgtgagacaagcttaaggacacaaaagaaacacaactttgtgataccactcttctgaaggctacttatagtaataacttcatagatgaacagcatgattcaggtacagtggctttaaacatcaaagcacatttctcattatataaattaaaacgggtggctccagtgccactatcaaagcttaagttatatcttttatctagttctctgaatgtactgaaacagtactttattcgtccaataaataaagcaataaaaattgttcttactgaaaatgaagtagctaggtgctcctgaatttctctccaaaaactaaaacatttaggtcaaaccacttctccggttgagcagtgtattttgatcttgaggattcatggcttgataagtagatagttctaaggcaaaagtagctgagcctgatgttagcgttcgaagcacagttgaataaccctaatcaaaataatttaagtcatttatattatcaaatttaagcctcaagtttctcttcctgctgattatcttttgactattagggaaaagtgatgttgccacttttgtggcttagccatatcacttcctccaaacagatgatttaacttttttcagggtaagttggatataaaaacattgaggacagaaagcagagtagtgcaagtgtgctgcagatgtatttgttagatggctttgccggcaacccaggtgcctgtcctggagcagaagaggctgacgggagaagaatgataacttgccttaaaactgacaatggtggaagtaagataaatgcttggcagggaaaaaatggtcatataggctggtaccacattttgggactgtaaatacccccttgtagtgctataatccctggatttcgccaacaatttaaattcaaagtcctaaccattcctgctggttgaaacgaaacttaacatgtattctctaaatcaaagccttaatgtttctttcaggttactgattgtctattcattggcatataatatcccctgaattaagaagaatatgtacttttcagttacaaagtacctaccataatttctgctaagggaacaaatccaataacaactttgttgtcctggcgagtctgaatttcctgaatgtttcctcttctttgtgccagatctgccaggacagggctgagataatctctagctactgtaacctcaagattcatcagaggctccaaaacttgcttatcagctttcttcagagcctaaagaaattaaagaatgttaacttatctttcataaataaaaacttaaaataaatacagcctagagctcatacaaaaaga

SEQ ID NO: 364654 - DNA, 1959 bp, Homo sapiens
  misc_feature (8)..(8): n is a, c, g, or t
  misc_feature (22)..(24): n is a, c, g, or t
  misc_feature (32)..(32): n is a, c, g, or t
  misc_feature (36)..(37): n is a, c, g, or t
  misc_feature (40)..(41): n is a, c, g, or t
  misc_feature (43)..(44): n is a, c, g, or t
  misc_feature (46)..(46): n is a, c, g, or t
  misc_feature (50)..(50): n is a, c, g, or t
  misc_feature (53)..(53): n is a, c, g, or t
  misc_feature (59)..(59): n is a, c, g, or t
  misc_feature (64)..(64): n is a, c, g, or t
  misc_feature (67)..(67): n is a, c, g, or t
  misc_feature (69)..(69): n is a, c, g, or t
  misc_feature (72)..(74): n is a, c, g, or t
  misc_feature (82)..(82): n is a, c, g, or t
  misc_feature (85)..(85): n is a, c, g, or t
  misc_feature (88)..(88): n is a, c, g, or t
  misc_feature (92)..(93): n is a, c, g, or t
  misc_feature (97)..(97): n is a, c, g, or t
  misc_feature (101)..(101): n is a, c, g, or t
  misc_feature (103)..(103): n is a, c, g, or t
  misc_feature (108)..(108): n is a, c, g, or t
  misc_feature (112)..(112): n is a, c, g, or t
  misc_feature (114)..(115): n is a, c, g, or t
  misc_feature (119)..(119): n is a, c, g, or t
  misc_feature (122)..(123): n is a, c, g, or t
  misc_feature (125)..(125): n is a, c, g, or t
  misc_feature (127)..(128): n is a, c, g, or t
  misc_feature (133)..(133): n is a, c, g, or t
  misc_feature (138)..(140): n is a, c, g, or t
  misc_feature (147)..(148): n is a, c, g, or t
  misc_feature (155)..(155): n is a, c, g, or t
  misc_feature (160)..(160): n is a, c, g, or t
  misc_feature (167)..(168): n is a, c, g, or t
  misc_feature (175)..(175): n is a, c, g, or t
  misc_feature (177)..(180): n is a, c, g, or t
  misc_feature (185)..(185): n is a, c, g, or t
  misc_feature (190)..(191): n is a, c, g, or t
  misc_feature (196)..(196): n is a, c, g, or t
  misc_feature (199)..(201): n is a, c, g, or t
  misc_feature (203)..(204): n is a, c, g, or t
  misc_feature (217)..(220): n is a, c, g, or t
  misc_feature (228)..(229): n is a, c, g, or t
  misc_feature (231)..(231): n is a, c, g, or t
  misc_feature (234)..(236): n is a, c, g, or t
  misc_feature (238)..(240): n is a, c, g, or t
  misc_feature (243)..(243): n is a, c, g, or t
  misc_feature (246)..(246): n is a, c, g, or t
  misc_feature (252)..(252): n is a, c, g, or t
  misc_feature (260)..(262): n is a, c, g, or t
  misc_feature (267)..(272): n is a, c, g, or t
  misc_feature (274)..(274): n is a, c, g, or t
  misc_feature (277)..(277): n is a, c, g, or t
  misc_feature (279)..(281): n is a, c, g, or t
  misc_feature (286)..(290): n is a, c, g, or t
  misc_feature (292)..(292): n is a, c, g, or t
  misc_feature (298)..(301): n is a, c, g, or t
  misc_feature (304)..(304): n is a, c, g, or t
  misc_feature (323)..(323): n is a, c, g, or t
  misc_feature (329)..(329): n is a, c, g, or t
aaaaaggncaaccaaaaacaannnagccaggngcgnncannanngngggnagnagaaancaaanggncnccnnncacaaganggnaangagnnaaanacancncaganccgnannaacncannananncacancagcnnncggcccnngaagccnggcgncgccggnnaacgganannnnaggancgagnnacaanagnnnannaaagacgagaaannnnaaccgcgnnanggnnncnnnacncanaaacanaaacaacnnngcagnnnnnnanaancnnngctannnnnanaaaatnnnnagncaacaaacctcactccaanattagngcctcgggcaagtgctgttggtgagagactctggagttccaaagatgtcagagatatggatgacgcctatgacagactgacaaggcaccgctgcaggatggtcgaacgtggaatagctgcacaacctctttatgctggatattgtaaccatgagaacatgtaaaaaatggaggggaaaaaggccacagcaatctgtactacaatcaactttattttgaaatcatgtaaaataagatattagactgttttttgaataaaatatttttattgattgaacctttgaccctctatcttattacatttagaggcctggcatctttcttgtgagacaagcttaaggacacaaaagaaacacaactttgtgataccactcttctgaaggctacttatagtaataacttcatagatgaacagcatgattcaggtacagtggctttaaacatcaaagcacatttctcattatataaattaaaacgggtggctccagtgccactatcaaagcttaagttatatcttttatctagttctctgaatgtactgaaacagtactttattcgtccaataaataaagcaataaaaattgttcttactgaaaatgaagtagctaggtgctcctgaatttctctccaaaaactaaaacatttaggtcaaaccacttctccggttgagcagtgtattttgatcttgaggattcatggcttgataagtagatagttctaaggcaaaagtagctgagcctgatgttagcgttcgaagcacagttgaataaccctaatcaaaataatttaagtcatttatattatcaaatttaagcctcaagtttctcttcctgctgattatcttttgactattagggaaaagtgatgttgccacttttgtggcttagccatatcacttcctccaaacagatgatttaacttttttcagggtaagttggatataaaaacattgaggacagaaagcagagtagtgcaagtgtgctgcagatgtatttgttagatggctttgccggcaacccaggtgcctgtcctggagcagaagaggctgacgggagaagaatgataacttgccttaaaactgacaatggtggaagtaagataaatgcttggcagggaaaaaatggtcatataggctggtaccacattttgggactgtaaatacccccttgtagtgctataatccctggatttcgccaacaatttaaattcaaagtcctaaccattcctgctggttgaaacgaaacttaacatgtattctctaaatcaaagccttaatgtttctttcaggttactgattgtctattcattggcatataatatcccctgaattaagaagaatatgtacttttcagttacaaagtacctaccataatttctgctaagggaacaaatccaataacaactttgttgtcctggcgagtctgaatttcctgaatgtttcctcttctttgtgccagatctgccaggacagggctgagataatctctagctactgtaacctcaagattcatcagaggctccaaaacttgcttatcagctttcttcagagcctaaagaaattaaagaatgttaacttatctttcataaataaaaacttaaaataaatacagcctagagctcatacaaaaaga

SEQ ID NO: 364655 - DNA, 1699 bp, Homo sapiens
  misc_feature (310)..(310): n is a, c, g, or t
ttggctgcgcgtccgcttcgctgattaactctccctgctcgtgagaggcggttcgggagtctatcacctgactcgctttgttctccgtgccgccgctgtgatagtctgctgcgcggccgcgcgctcgtttggtggggctcgctatattcgtccgttgtggctggtgcctgttgtacgagtgtagtctgttcttgtctgtttttcgtcgtcatgactttttcgtctcttgttgtctttcgcttttgttttgtttcttctttttttttctctcttttttttttttttttttttttttttttttttttttttntttgttttttgaataaaatatttttattgattgaacctttgaccctctatcttattacatttagaggcctggcatctttcttgtgagacaagcttaaggacacaaaagaaacacaactttgtgataccactcttctgaaggctacttatagtaataacttcatagatgaacagcatgattcaggtacagtggctttaaacatcaaagcacatttctcattatataaattaaaacgggtggctccagtgccactatcaaagcttaagttatatcttttatctagttctctgaatgtactgaaacagtactttattcgtccaataaataaagcaataaaaattgttcttactgaaaatgaagtagctaggtgctcctgaatttctctccaaaaactaaaacatttaggtcaaaccacttctccggttgagcagtgtattttgatcttgaggattcatggcttgataagtagatagttctaaggcaaaagtagctgagcctgatgttagcgttcgaagcacagttgaataaccctaatcaaaataatttaagtcatttatattatcaaatttaagcctcaagtttctcttcctgctgattatcttttgactattagggaaaagtgatgttgccacttttgtggcttagccatatcacttcctccaaacagatgatttaacttttttcagggtaagttggatataaaaacattgaggacagaaagcagagtagtgcaagtgtgctgcagatgtatttgttagatggctttgccggcaacccaggtgcctgtcctggagcagaagaggctgacgggagaagaatgataacttgccttaaaactgacaatggtggaagtaagataaatgcttggcagggaaaaaatggtcatataggctggtaccacattttgggactgtaaatacccccttgtagtgctataatccctggatttcgccaacaatttaaattcaaagtcctaaccattcctgctggttgaaacgaaacttaacatgtattctctaaatcaaagccttaatgtttctttcaggttactgattgtctattcattggcatataatatcccctgaattaagaagaatatgtacttttcagttacaaagtacctaccataatttctgctaagggaacaaatccaataacaactttgttgtcctggcgagtctgaatttcctgaatgtttcctcttctttgtgccagatctgccaggacagggctgagataatctctagctactgtaacctcaagattcatcagaggctccaaaacttgcttatcagctttcttcagagcctaaagaaattaaagaatgttaacttatctttcataaataaaaacttaaaataaatacagcctagagctcatacaaaaaga

SEQ ID NO: 364656 - DNA, 889 bp, Homo sapiens
  misc_feature (794)..(794): n is a, c, g, or t
  misc_feature (797)..(797): n is a, c, g, or t
  misc_feature (799)..(799): n is a, c, g, or t
  misc_feature (806)..(807): n is a, c, g, or t
gcagtcatctgactcggtgactcacccgcggccgcgcttcctctgatccgggccgggcgggaagtcgggtcccgaggctccggctcggcagaccgggcggaaagcagccgagcggccatggagctgtgcgggctggggctgccccggccgcccatgctgctggcgctgctgttggcgacactgctggcggcgatgttggcgctgctgactcaggtggcgctggtggtgcaggtggcggaggcggctcgggccccgagcgtctcggccaagccggggccggcgctgtggcccctgccgctctcggtgaagatgaccccgaacctgctgcatctcgccccggagaacttctacatcagccacagccccaattccacggcgggcccctcctgcaccctgctggaggaagcgtttcgacgatatcatggctatatttttggtttctacaagtggcatcatgaacctgctgaattccaggctaaaacccaggttcagcaacttcttgtctcaatcacccttcagtcagagtgtgatgctttccccaacatatcttcagatgagtcttatactttacttgtgaaagaaccagtggctgtccttaaggccaacagagtttggggagcattacgaggtttagagacctttagccagttagtttatcaagattcttatggaactttcaccatcaatgaatccaccattattgattctccaaggttttctcacagaggaattttgattgatacatccagacattatctgccagttaagattattcttaaaactctgagccaggnttnanaagttanngtctcctggcctatgtgaccgtctttccaattagctcattcgagtagcaaggaacttctgtcctttccgagcctgtcataca

SEQ ID NO: 364657 - DNA, 938 bp, Homo sapiens
gcagtcatctgactcggtgactcacccgcggccgcgcttcctctgatccgggccgggcgggaagtcgggtcccgaggctccggctcggcagaccgggcggaaagcagccgagcggccatggagctgtgcgggctggggctgccccggccgcccatgctgctggcgctgctgttggcgacactgctggcggcgatgttggcgctgctgactcaggtggcgctggtggtgcaggtggcggaggcggctcgggccccgagcgtctcggccaagccggggccggcgctgtggcccctgccgctctcggtgaagatgaccccgaacctgctgcatctcgccccggagaacttctacatcagccacagccccaattccacggcgggcccctcctgcaccctgctggaggaagcgtttcgacgatatcatggctatatttttggtttctacaagtggcatcatgaacctgctgaattccaggctaaaacccaggttcagcaacttcttgtctcaatcacccttcagtcagagtgtgatgctttccccaacatatcttcagatgagtcttgtaagtacctatgcaatgtgagtgtattatatcccaggtgctcgctgacggacttaagtgccaaaaactgactccatgctaggaaccactgagttctcaaccagtgagtttatgattcctattttaaaaataacctttaaagtctgattataaaagtagtacatagtctttgtggaaaatttattaagtacagtaagtgcagaagaagaaataaatcactcataatcccagcagatagaattaatcactgtcattttaggtgtatttttttgcagagtaaaacatgtaaacattttacatagacataaatacaaacatgataagcattgacatgaaaatggcagtaattctgtacatgtgcttcttgtatttttgt

SEQ ID NO: 364658 - DNA, 600 bp, Homo sapiens
gtatgggatttacctgataacatttaagaattaaggtgccttagctttccttctctgtctaaacacaaaagtgctaaacataaatttaaactgcttgcggggggatgtgtgatttaaattttaggcctcgggcaagtgctgttggtgagagactctggagttccaaagatgtcagagatatggatgacgcctatgacagactgacaaggcaccgctgcaggatggtcgagtaagaaatctattaagtccagtgtgatttttaaccttcttattcagtgttagtttcttttgctataaatagaaatgtatgttacctaacaaatagtaattagaagaaaccaggaattatttttttgtaagtaataatacctgtaaagatatattcagacttgtgactgttttatagatacaaaaaatgttggtgtaacttagaactccatcttgagttgctttaattttcttcccttattttcagtaatgctgtgatttagtgattctaatttaagtttctaagatgacatgaatatcaatctaaaatatctttatgaatgatatcaatctaaatcaatctaaaatatctttattcatgttatctacaga

SEQ ID NO: 364659 - DNA, 347 bp, Homo sapiens
ctagctcttagtaaacatgttcatcttttgtgtataaaatcttgtagcttcaataaaatgacgtagtaaaatcatgtggaaaaccagatctttataatgagtacacttcttttaaaaagaatcttaatattttcttctaggtcagaaagacctcctgactccatgttacagtagacaaaacaagttggactcttttggacctataaaccctactctgaatacaacatacagcttccttactacatttttcaaagaaattagtgaggtgtttccagatcaattcattcatttgggaggagatgaagtggaatttaaatgttggtaagatgattccttaaaaccccttt

SEQ ID NO: 364660 - DNA, 474 bp, Homo sapiens
aagtttaatgttcttcactggcacatagttgatgaccagtctttcccatatcagagcatcacttttcctgagttaagcaataaagtgagtaaattgtattgtactctgtctacaaaaacattgggtatagtttcattacaagtttgtagcttaaatgtttgttcttatggatagaatcaaagtgtaaaaatcagatgtttatggtttttaatttttttggctgtgacttagcattttacatccataaaactttttttgttattgttataacggttactgtaattgttactgtgaatataaacaatcttggggaagtgtaaatcgaaatttaacaaggtagaagccctgaataattctcaaattacatatggttaagataatatatttatcaagttgtccaacagtgtatttgttttaaacataattgtttggaaatccataaatgactatttttctctctgagaaactacatga

SEQ ID NO: 364661 - DNA, 562 bp, Homo sapiens
tgcagagcacctggcattatgtaaatatctgtaaatatttgtggattgtcagtaactgttacatgtaatttatgtgatatgacaggctagatcgtggtccctaccattttaagacagccataaaattgtaagagattgctgtttgtacaatttcctgagttgcctaccaactcaatttgaggccacttcttcctatcttaggggcatgtttaactcattcattcagcaaatgattattaaacccccatactatgttaggttctgtatcaagtgctaaaaaggaggaactacttgtgacacttcccaacttgagctgcttctgctataaagctgaactatactaaaaggcacctctcaaaatgcaagaaatccttggtagaaaatgtacatgttttaaatatattgttaagcttatgatctaaaataactataatttttttgtaatactagggttttggatattattgcaaccataaacaagggatccattgtctggcaggaggtttttgatgataaagcaaaggtgagcattgtgaagactgcatctgatcaatataagaga

SEQ ID NO: 364662 - DNA, 617 bp, Homo sapiens
tttatagtttcatggtttttccagccatttttccctgttgcatttagataccttctaaaagtgactatatttgattataaaaattctttctcatgatgccataaatttattaaggaaccagtattttattaaattactattcttcttttgtctatattgaaacaacccccagggtatgggtacaatgaagtaaagcacttttattagatgagtagagaagtgcaatggatttttttttaatttggctttgattttagaaattatggtagagggtgtaggtataacaatatattttagaggatagaggtataacactatattcaattatatttgccttacctggttatgagtctgtttgaataatataacttttatcatctcaatttgttgatttataaattaatgcaataaattttactttcctcaggtttagagacctttagccagttagtttatcaagattcttatggaactgtaagtatgattattatatgttactaaaaattgttagacaaattgctaatagaaaaaaatgtaacctgtttagctattgcttcctgaagatttcatttccccagatatttgtcttagccggtaaatgtaaatttcatacattt

SEQ ID NO: 364663 - DNA, 793 bp, Homo sapiens
gaggtgttccacttcatctcctcccaaatgaatgaattgatctggaaacacctcactaatttgggaggagatgaagtggaatttaaatgtgggaatcaaatccaaaaattcaagatttcatgaggcaaaaaggctttggcacagattttaagaaactagaatctttctacattcaaaaggttttggatattattgcaaccataaacaagggatccattgtctggcaggaggtttttgatgataaagcaaagcttgcgccgggcacaatagttgaagtatggaaagacagcgcatatcctgaggaactcagtagagtcacagcatctggcttccctgtaatcctttctgctccttggtacttagatttgattagctatggacaagattggaggaaatactataaagtggaacctcttgattttggcggtactcagaaacagaaacaacttttcattggtggagaagcttgtctatggggagaatatgtggatgcaactaacctcactccaagattatggcctcgggcaagtgctgttggtgagagactctggagttccaaagatgtcagagatatggatgacgcctatgacagactgacaaggcaccgctgcaggatggtcgaacgtggaatagctgcacaacctctttatgctggatattgtaaccatgagaacatgtaaaaaatggaggggaaaaaggccacagcaatctgtactacaatcaactttattttgaaatcatgtaaaataagatattagactgttttttgaataaaatatttttattgattgaa

SEQ ID NO: 364664 - DNA, 3255 bp, Homo sapiens
gcagtcatctgactcggtgactcacccgcggccgcgcttcctctgatccgggccgggcgggaagtcgggtcccgaggctccggctcggcagaccgggcggaaagcagccgagcggccatggagctgtgcgggctggggctgccccggccgcccatgctgctggcgctgctgttggcgacactgctggcggcgatgttggcgctgctgactcaggtggcgctggtggtgcaggtggcggaggcggctcgggccccgagcgtctcggccaagccggggccggcgctgtggcccctgccgctctcggtgaagatgaccccgaacctgctgcatctcgccccggagaacttctacatcagccacagccccaattccacggcgggcccctcctgcaccctgctggaggaagcgtttcgacgatatcatggctatatttttggtttctacaagtggcatcatgaacctgctgaattccaggctaaaacccaggttcagcaacttcttgtctcaatcacccttcagtcagagtgtgatgctttccccaacatatcttcagatgagtcttatactttacttgtgaaagaaccagtggctgtccttaaggccaacagagtttggggagcattacgaggtttagagacctttagccagttagtttatcaagattcttatggaactttcaccatcaatgaatccaccattattgattctccaaggttttctcacagaggaattttgattgatacatccagacattatctgccagttaagattattcttaaaactctggatgccatggcttttaataagtttaatgttcttcactggcacatagttgatgaccagtctttcccatatcagagcatcacttttcctgagttaagcaataaaggaagctattctttgtctcatgtttatacaccaaatgatgtccgtatggtgattgaatatgccagattacgaggaattcgagtcctgccagaatttgatacccctgggcatacactatcttggggaaaaggtcagaaagacctcctgactccatgttacagtagacaaaacaagttggactcttttggacctataaaccctactctgaatacaacatacagcttccttactacatttttcaaagaaattagtgaggtgtttccagatcaattcattcatttgggaggagatgaagtggaatttaaatgttgggaatcaaatccaaaaattcaagatttcatgaggcaaaaaggctttggcacagattttaagaaactagaatctttctacattcaaaaggttttggatattattgcaaccataaacaagggatccattgtctggcaggaggtttttgatgataaagcaaagcttgcgccgggcacaatagttgaagtatggaaagacagcgcatatcctgaggaactcagtagagtcacagcatctggcttccctgtaatcctttctgctccttggtacttagatttgattagctatggacaagattggaggaaatactataaagtggaacctcttgattttggcggtactcagaaacagaaacaacttttcattggtggagaagcttgtctatggggagaatatgtggatgcaactaacctcactccaagattatggcctcgggcaagtgctgttggtgagagactctggagttccaaagatgtcagagatatggatgacgcctatgacagactgacaaggcaccgctgcaggatggtcgaacgtggaatagctgcacaacctctttatgctggatattgtaaccatgagaacatgtaaaaaatggaggggaaaaaggccacagcaatctgtactacaatcaactttattttgaaatcatgtaaaataagatattagactgttttttgaataaaatatttttattgattgaacctttgaccctctatcttattacatttagaggcctggcatctttcttgtgagacaagcttaaggacacaaaagaaacacaactttgtgataccactcttctgaaggctacttatagtaataacttcatagatgaacagcatgattcaggtacagtggctttaaacatcaaagcacatttctcattatataaattaaaacgggtggctccagtgccactatcaaagcttaagttatatcttttatctagttctctgaatgtactgaaacagtactttattcgtccaataaataaagcaataaaaattgttcttactgaaaatgaagtagctaggtgctcctgaatttctctccaaaaactaaaacatttaggtcaaaccacttctccggttgagcagtgtattttgatcttgaggattcatggcttgataagtagatagttctaaggcaaaagtagctgagcctgatgttagcgttcgaagcacagttgaataaccctaatcaaaataatttaagtcatttatattatcaaatttaagcctcaagtttctcttcctgctgattatcttttgactattagggaaaagtgatgttgccacttttgtggcttagccatatcacttcctccaaacagatgatttaacttttttcagggtaagttggatataaaaacattgaggacagaaagcagagtagtgcaagtgtgctgcagatgtatttgttagatggctttgccggcaacccaggtgcctgtcctggagcagaagaggctgacgggagaagaatgataacttgccttaaaactgacaatggtggaagtaagataaatgcttggcagggaaaaaatggtcatataggctggtaccacattttgggactgtaaatacccccttgtagtgctataatccctggatttcgccaacaatttaaattcaaagtcctaaccattcctgctggttgaaacgaaacttaacatgtattctctaaatcaaagccttaatgtttctttcaggttactgattgtctattcattggcatataatatcccctgaattaagaagaatatgtacttttcagttacaaagtacctaccataatttctgctaagggaacaaatccaataacaactttgttgtcctggcgagtctgaatttcctgaatgtttcctcttctttgtgccagatctgccaggacagggctgagataatctctagctactgtaacctcaagattcatcagaggctccaaaacttgcttatcagctttcttcagagcctaaagaaattaaagaatgttaacttatctttcataaataaaaacttaaaataaatacagcctagagctcatacaaaaaga

SEQ ID NO: 364665 - DNA, 2217 bp, Homo sapiens
  misc_feature (1926)..(1927): n is a, c, g, or t
  misc_feature (1932)..(1932): n is a, c, g, or t
  misc_feature (1935)..(1935): n is a, c, g, or t
gcagtcatctgactcggtgactcacccgcggccgcgcttcctctgatccgggccgggcgggaagtcgggtcccgaggctccggctcggcagaccgggcggaaagcagccgagcggccatggagctgtgcgggctggggctgccccggccgcccatgctgctggcgctgctgttggcgacactgctggcggcgatgttggcgctgctgactcaggtggcgctggtggtgcaggtggcggaggcggctcgggccccgagcgtctcggccaagccggggccggcgctgtggcccctgccgctctcggtgaagatgaccccgaacctgctgcatctcgccccggagaacttctacatcagccacagccccaattccacggcgggcccctcctgcaccctgctggaggaagcgtttcgacgatatcatggctatatttttggtttctacaagtggcatcatgaacctgctgaattccaggctaaaacccaggttcagcaacttcttgtctcaatcacccttcagtcagagtgtgatgctttccccaacatatcttcagatgagtcttatactttacttgtgaaagaaccagtggctgtccttaaggccaacagagtttggggagcattacgaggtttagagacctttagccagttagtttatcaagattcttatggaactttcaccatcaatgaatccaccattattgattctccaaggttttctcacagaggaattttgattgatacatccagacattatctgccagttaagattattcttaaaactctggatgccatggcttttaataagtttaatgttcttcactggcacatagttgatgaccagtctttcccatatcagagcatcacttttcctgagttaagcaataaaggaagctattctttgtctcatgtttatacaccaaatgatgtccgtatggtgattgaatatgccagattacgaggaattcgagtcctgccagaatttgatacccctgggcatacactatcttggggaaaaggtcagaaagacctcctgactccatgttacagtagacaaaacaagttggactcttttggacctataaaccctactctgaatacaacatacagcttccttactacatttttcaaagaaattagtgaggtgtttccagatcaattcattcatttgggaggagatgaagtggaatttaaatgttgggaatcaaatccaaaaattcaagatttcatgaggcaaaaaggctttggcacagattttaagaaactagaatctttctacattcaaaaggttttggatattattgcaaccataaacaagggatccattgtctggcaggaggtttttgatgataaagcaaagcttgcgccgggcacaatagttgaagtatggaaagacagcgcatatcctgaggaactcagtagagtcacagcatctggcttccctgtaatcctttctgctccttggtacttagatttgattagctatggacaagattggaggaaatactataaagtggaacctcttgattttggcggtactcagaaacagaaacaacttttcattggtggagaagcttgtctatggggagaatatgtggatgcaactaacctcactccaagattatggcctcgggcaagtgctgttggtgagagactctggagttccaaagatgtcagagatatggatgacgcctatgacagactgacaaggcaccgctgcaggatggtcgaacgtggaatagctgcacaacctctttatgctggatattgtaaccatgagaacatgtaaaaaatggaggggaaaaaggccacagcaatctgtactacaatcaactttattttgaaatcatgtaaaataagatattagactgttttttgaataaaatatttttattgattgaaaaaaaaaaaaaaaaaaaaaaaaaannggggntanggggggggggggaaaaaggggtcatggaaagggaccgtggctcaaaggtgtctcctggacccgttttctgtgtccccaagggggaatatcgggggcgcccctaaggggagcggaaaatatatcggaaagaagcggtaacccgtaatgatttcctgccaaaagacagttcttagtcggcacggaagttccagtagcgacggcggggagcaccaacactagtggacagaaagtgtcacaagagactataacagagagcgactcgaaatacaccaccagacgaga

SEQ ID NO: 364666 - DNA, 3625 bp, Homo sapiens
gcagtcatctgactcggtgactcacccgcggccgcgcttcctctgatccgggccgggcgggaagtcgggtcccgaggctccggctcggcagaccgggcggaaagcagccgagcggccatggagctgtgcgggctggggctgccccggccgcccatgctgctggcgctgctgttggcgacactgctggcggcgatgttggcgctgctgactcaggtggcgctggtggtgcaggtggcggaggcggctcgggccccgagcgtctcggccaagccggggccggcgctgtggcccctgccgctctcggtgaagatgaccccgaacctgctgcatctcgccccggagaacttctacatcagccacagccccaattccacggcgggcccctcctgcaccctgctggaggaagcgtttcgacgatatcatggctatatttttggtttctacaagtggcatcatgaacctgctgaattccaggctaaaacccaggttcagcaacttcttgtctcaatcacccttcagtcagagtgtgatgctttccccaacatatcttcagatgagtcttatactttacttgtgaaagaaccagtggctgtccttaaggccaacagagtttggggagcattacgaggtttagagacctttagccagttagtttatcaagattcttatggaactttcaccatcaatgaatccaccattattgattctccaaggttttctcacagaggaattttgattgatacatccagacattatctgccagttaagattattcttaaaactctggatgccatggcttttaataagtttaatgttcttcactggcacatagttgatgaccagtctttcccatatcagagcatcacttttcctgagttaagcaataaaggaagctattctttgtctcatgtttatacaccaaatgatgtccgtatggtgattgaatatgccagattacgaggaattcgagtcctgccagaatttgatacccctgggcatacactatcttggggaaaaggtcagaaagacctcctgactccatgttacagtagacaaaacaagttggactcttttggacctataaaccctactctgaatacaacatacagcttccttactacatttttcaaagaaattagtgaggtgtttccagatcaattcattcatttgggaggagatgaagtggaatttaaatgttgggaatcaaatccaaaaattcaagatttcatgaggcaaaaaggctttggcacagattttaagaaactagaatctttctacattcaaaaggttttggatattattgcaaccataaacaagggatccattgtctggcaggaggtttttgatgataaagcaaagcttgcgccgggcacaatagttgaagtatggaaagacagcgcatatcctgaggaactcagtagagtcacagcatctggcttccctgtaatcctttctgctccttggtacttagatttgattagctatggacaagattggaggaaatactataaagtggaacctcttgattttggcggtactcagaaacagaaacaacttttcattggtggagaagcttgtctatggggagaatatgtggatgcaactaacctcactccaagattatggcctcgggcaagtgctgttggtgagagactctggagttccaaagatgtcagagatatggatgacgcctatgacagactgacaaggcaccgctgcaggatggtcgagtaagaaatctattaagtccagtgtgatttttaaccttcttattcagtgttagtttcttttgctataaatagaaatgtatgttacctaacaaatagtaattagaagaaaccaggaattatttttttgtaagtaataatacctgtaaagatatattcagacttgtgactgttttatagatacaaaaaatgttggtgtaacttagaactccatcttgagttgctttaattttcttcccttattttcagtaatgctgtgatttagtgattctaatttaagtttctaagatgacatgaatatcaatctaaaatatctttatgaatgatatcaatctaaatcaatctaaaatatctttattcatgttatctacagacgtggaatagctgcacaacctctttatgctggatattgtaaccatgagaacatgtaaaaaatggaggggaaaaaggccacagcaatctgtactacaatcaactttattttgaaatcatgtaaaataagatattagactgttttttgaataaaatatttttattgattgaacctttgaccctctatcttattacatttagaggcctggcatctttcttgtgagacaagcttaaggacacaaaagaaacacaactttgtgataccactcttctgaaggctacttatagtaataacttcatagatgaacagcatgattcaggtacagtggctttaaacatcaaagcacatttctcattatataaattaaaacgggtggctccagtgccactatcaaagcttaagttatatcttttatctagttctctgaatgtactgaaacagtactttattcgtccaataaataaagcaataaaaattgttcttactgaaaatgaagtagctaggtgctcctgaatttctctccaaaaactaaaacatttaggtcaaaccacttctccggttgagcagtgtattttgatcttgaggattcatggcttgataagtagatagttctaaggcaaaagtagctgagcctgatgttagcgttcgaagcacagttgaataaccctaatcaaaataatttaagtcatttatattatcaaatttaagcctcaagtttctcttcctgctgattatcttttgactattagggaaaagtgatgttgccacttttgtggcttagccatatcacttcctccaaacagatgatttaacttttttcagggtaagttggatataaaaacattgaggacagaaagcagagtagtgcaagtgtgctgcagatgtatttgttagatggctttgccggcaacccaggtgcctgtcctggagcagaagaggctgacgggagaagaatgataacttgccttaaaactgacaatggtggaagtaagataaatgcttggcagggaaaaaatggtcatataggctggtaccacattttgggactgtaaatacccccttgtagtgctataatccctggatttcgccaacaatttaaattcaaagtcctaaccattcctgctggttgaaacgaaacttaacatgtattctctaaatcaaagccttaatgtttctttcaggttactgattgtctattcattggcatataatatcccctgaattaagaagaatatgtacttttcagttacaaagtacctaccataatttctgctaagggaacaaatccaataacaactttgttgtcctggcgagtctgaatttcctgaatgtttcctcttctttgtgccagatctgccaggacagggctgagataatctctagctactgtaacctcaagattcatcagaggctccaaaacttgcttatcagctttcttcagagcctaaagaaattaaagaatgttaacttatctttcataaataaaaacttaaaataaatacagcctagagctcatacaaaaaga

SEQ ID NO: 364667 - DNA, 2461 bp, Homo sapiens
cattaccggtaacaatagaacattataaagatcttgttaacaaaagtagcttcttgccagagtctttttattaacacttgcaacgctatttaacaagctggccatgcctgtgtgacaccaaaccgcatgtggataaattcagtgtttcatctccaggcccaccaattcctatcctttgtaactaataatgttaacacgacagatcaagaaactagtttttcagaaagcagttttcattcattctctatagacatttccgccgcagtgaacatgcccgcactcagggtgtctgtgcatggccccaactttcctccaagccggggaggatgcaacgtgggccaaccatcccgcgcgctcggccctggaggctgcggggagcgacgcagcgcgacattcacccccaggaaagcgctgctttccgcagaggagagaggctgactgtatccttagctcggctcctcgcttccccagcggctcgccccagacattgcaccgcggaggggaggccggtcgacctctccggcgatgcccggcttctgcctgctgtgggagggcagcggcgggcaccgtgatctccgcaccgagaagagctccccttgccctctagtcgaagctcccgagtgctcggagcacgctcacccctcgcgaacacacccctgcagccgaagcagcccctgaagcccgcagcgcctgcaacaggtccggggcagtgggggaaacttacagcagtggcgactggccgcaacgcacaactgagttctagcgacggtcacgggcaaggaggcgacgaaccggtcgtctcagcccagggaagcggtggcgaatgccccggagaaaggagggccagccggggagaggactgcgccccgaacgatggctcgcggaccggctaccgatggcgttcgcctccgtctgtcgtccccacgccgcggacccggtgtccaggacccgcagagcgtctccggagcgcgtcacgatatcatggctatatttttggtttctacaagtggcatcatgaacctgctgaattccaggctaaaacccaggttcagcaacttcttgtctcaatcacccttcagtcagagtgtgatgctttccccaacatatcttcagatgagtcttatactttacttgtgaaagaaccagtggctgtccttaaggccaacagagtttggggagcattacgaggtttagagacctttagccagttagtttatcaagattcttatggaactttcaccatcaatgaatccaccattattgattctccaaggttttctcacagaggaattttgattgatacatccagacattatctgccagttaagattattcttaaaactctggatgccatggcttttaataagtttaatgttcttcactggcacatagttgatgaccagtctttcccatatcagagcatcacttttcctgagttaagcaataaaggaagctattctttgtctcatgtttatacaccaaatgatgtccgtatggtgattgaatatgccagattacgaggaattcgagtcctgccagaatttgatacccctgggcatacactatcttggggaaaaggtcagaaagacctcctgactccatgttacagtagacaaaacaagttggactcttttggacctataaaccctactctgaatacaacatacagcttccttactacatttttcaaagaaattagtgaggtgtttccagatcaattcattcatttgggaggagatgaagtggaatttaaatgttgggaatcaaatccaaaaattcaagatttcatgaggcaaaaaggctttggcacagattttaagaaactagaatctttctacattcaaaaggttttggatattattgcaaccataaacaagggatccattgtctggcaggaggtttttgatgataaagcaaagcttgcgccgggcacaatagttgaagtatggaaagacagcgcatatcctgaggaactcagtagagtcacagcatctggcttccctgtaatcctttctgctccttggtacttagatttgattagctatggacaagattggaggaaatactataaagtggaacctcttgattttggcggtactcagaaacagaaacaacttttcattggtggagaagcttgtctatggggagaatatgtggatgcaactaacctcactccaagattatggcctcgggcaagtgctgttggtgagagactctggagttccaaagatgtcagagatatggatgacgcctatgacagactgacaaggcaccgctgcaggatggtcgaacgtggaatagctgcacaacctctttatgctggatattgtaaccatgagaacatgtaaaaaatggaggggaaaaaggccacagcaatctgtactacaatcaactttattttgaaatcatgtaaaataagatattagactgttttttgaataaaatatttttattgattgaa

SEQ ID NO: 364668 - DNA, 2271 bp, Homo sapiens
gcagtcatctgactcggtgactcacccgcggccgcgcttcctctgatccgggccgggcgggaagtcgggtcccgaggctccggctcggcagaccgggcggaaagcagccgagcggccatggagctgtgcgggctggggctgccccggccgcccatgctgctggcgctgctgttggcgacactgctggcggcgatgttggcgctgctgactcaggtggcgctggtggtgcaggtggcggaggcggctcgggccccgagcgtctcggccaagccggggccggcgctgtggcccctgccgctctcggtgaagatgaccccgaacctgctgcatctcgccccggagaacttctacatcagccacagccccaattccacggcgggcccctcctgcaccctgctggaggaagcgtttcgacgatatcatggctatatttttggtttctacaagtggcatcatgaacctgctgaattccaggctaaaacccaggttcagcaacttcttgtctcaatcacccttcagtcagagtgtgatgctttccccaacatatcttcagatgagtcttatactttacttgtgaaagaaccagtggctgtccttaaggccaacagagtttggggagcattacgaggtttagagacctttagccagttagtttatcaagattcttatggaactttcaccatcaatgaatccaccattattgattctccaaggttttctcacagaggaattttgattgatacatccagacattatctgccagttaagattattcttaaaactctggatgccatggcttttaataagtttaatgttcttcactggcacatagttgatgaccagtctttcccatatcagagcatcacttttcctgagttaagcaataaaggaagctattctttgtctcatgtttatacaccaaatgatgtccgtatggtgattgaatatgccagattacgaggaattcgagtcctgccagaatttgatacccctgggcatacactatcttggggaaaaggtcagaaagacctcctgactccatgttacagtagacaaaacaagttggactcttttggacctataaaccctactctgaatacaacatacagcttccttactacatttttcaaagaaattagtgaggtgtttccagatcaattcattcatttgggaggagatgaagtggaatttaaatgttgggaatcaaatccaaaaattcaagatttcatgaggcaaaaaggctttggcacagattttaagaaactagaatctttctacattcaaaaggttttggatattattgcaaccataaacaagggatccattgtctggcaggaggtttttgatgataaagcaaagcttgcgccgggcacaatagttgaagtatggaaagacagcgcatatcctgaggaactcagtagagtcacagcatctggcttccctgtaatcctttctgctccttggtacttagatttgattagctatggacaagattggaggaaatactataaagtggaacctcttgattttggcggtactcagaaacagaaacaacttttcattggtggagaagcttgtctatggggagaatatgtggatgcaactaacctcactccaagattatggcctcgggcaagtgctgttggtgagagactctggagttccaaagatgtcagagatatggatgacgcctatgacagactgacaaggcaccgctgcaggatggtcgagtaagaaatctattaagtccagtgtgatttttaaccttcttattcagtgttagtttcttttgctataaatagaaatgtatgttacctaacaaatagtaattagaagaaaccaggaattatttttttgtaagtaataatacctgtaaagatatattcagacttgtgactgttttatagatacaaaaaatgttggtgtaacttagaactccatcttgagttgctttaattttcttcccttattttcagtaatgctgtgatttagtgattctaatttaagtttctaagatgacatgaatatcaatctaaaatatctttatgaatgatatcaatctaaatcaatctaaaatatctttattcatgttatctacagacgtggaatagctgcacaacctctttatgctggatattgtaaccatgagaacatgtaaaaaatggaggggaaaaaggccacagcaatctgtactacaatcaactttattttgaaatcatgtaaaataagatattagactgttttttgaataaaatatttttattgattgaa

SEQ ID NO: 364669 - DNA, 2023 bp, Homo sapiens
gcagtcatctgactcggtgactcacccgcggccgcgcttcctctgatccgggccgggcgggaagtcgggtcccgaggctccggctcggcagaccgggcggaaagcagccgagcggccatggagctgtgcgggctggggctgccccggccgcccatgctgctggcgctgctgttggcgacactgctggcggcgatgttggcgctgctgactcaggtggcgctggtggtgcaggtggcggaggcggctcgggccccgagcgtctcggccaagccggggccggcgctgtggcccctgccgctctcggtgaagatgaccccgaacctgctgcatctcgccccggagaacttctacatcagccacagccccaattccacggcgggcccctcctgcaccctgctggaggaagcgtttcgacgatatcatggctatatttttggtttctacaagtggcatcatgaacctgctgaattccaggctaaaacccaggttcagcaacttcttgtctcaatcacccttcagtcagagtgtgatgctttccccaacatatcttcagatgagtcttatactttacttgtgaaagaaccagtggctgtccttaaggccaacagagtttggggagcattacgaggtttagagacctttagccagttagtttatcaagattcttatggaactttcaccatcaatgaatccaccattattgattctccaaggttttctcacagaggaattttgattgatacatccagacattatctgccagttaagattattcttaaaactctggatgccatggcttttaataagtttaatgttcttcactggcacatagttgatgaccagtctttcccatatcagagcatcacttttcctgagttaagcaataaaggaagctattctttgtctcatgtttatacaccaaatgatgtccgtatggtgattgaatatgccagattacgaggaattcgagtcctgccagaatttgatacccctgggcatacactatcttggggaaaaggtcagaaagacctcctgactccatgttacagtagacaaaacaagttggactcttttggacctataaaccctactctgaatacaacatacagcttccttactacatttttcaaagaaattagtgaggtgtttccagatcaattcattcatttgggaggagatgaagtggaatttaaatgttgggaatcaaatccaaaaattcaagatttcatgaggcaaaaaggctttggcacagattttaagaaactagaatctttctacattcaaaaggttttggatattattgcaaccataaacaagggatccattgtctggcaggaggtttttgatgataaagcaaagcttgcgccgggcacaatagttgaagtatggaaagacagcgcatatcctgaggaactcagtagagtcacagcatctggcttccctgtaatcctttctgctccttggtacttagatttgattagctatggacaagattggaggaaatactataaagtggaacctcttgattttggcggtactcagaaacagaaacaacttttcattggtggagaagcttgtctatggggagaatatgtggatgcaactaacctcactccaagattatggcctcgggcaagtgctgttggtgagagactctggagttccaaagatgtcagagatatggatgacgcctatgacagactgacaaggcaccgctgcaggatggtcgaaggcctggcatctttcttgtgagacaagcttaaggacacaaaagaaacacaactttgtgataccactcttctgaaggctacttatagtaataacttcatagatgaacagcatgattcagatctgccaggacagggctgagataatctctagctactgtaacctcaagattcatcagaggctccaaaacttgcttatcagctttcttcagagcctaaagaaattaaagaatgttaacttatctttcataaataaaaacttaaaataaatacagcctagagctcatacaaaaaga

SEQ ID NO: 364670 - DNA, 2505 bp, Homo sapiens
cattaccggtaacaatagaacattataaagatcttgttaacaaaagtagcttcttgccagagtctttttattaacacttgcaacgctatttaacaagctggccatgcctgtgtgacaccaaaccgcatgtggataaattcagtgtttcatctccaggcccaccaattcctatcctttgtaactaataatgttaacacgacagatcaagaaactagtttttcagaaagcagttttcattcattctctatagacatttccgccgcagtgaacatgcccgcactcagggtgtctgtgcatggccccaactttcctccaagccggggaggatgcaacgtgggccaaccatcccgcgcgctcggccctggaggctgcggggagcgacgcagcgcgacattcacccccaggaaagcgctgctttccgcagaggagagaggctgactgtatccttagctcggctcctcgcttccccagcggctcgccccagacattgcaccgcggaggggaggccggtcgacctctccggcgatgcccggcttctgcctgctgtgggagggcagcggcgggcaccgtgatctccgcaccgagaagagctccccttgccctctagtcgaagctcccgagtgctcggagcacgctcacccctcgcgaacacacccctgcagccgaagcagcccctgaagcccgcagcgcctgcaacaggtccggggcagtgggggaaacttacagcagtggcgactggccgcaacgcacaactgagttctagcgacggtcacgggcaaggaggcgacgaaccggtcgtctcagcccagggaagcggtggcgaatgccccggagaaaggagggccagccggggagaggactgcgccccgaacgatggctcgcggaccggctaccgatggcgttcgcctccgtctgtcgtccccacgccgcggacccggtgtccaggacccgcagagcgtctccggagcgcgtcacgatatcatggctatatttttggtttctacaagtggcatcatgaacctgctgaattccaggctaaaacccaggttcagcaacttcttgtctcaatcacccttcagtcagagtgtgatgctttccccaacatatcttcagatgagtcttatactttacttgtgaaagaaccagtggctgtccttaaggccaacagagtttggggagcattacgaggtttagagacctttagccagttagtttatcaagattcttatggaactttcaccatcaatgaatccaccattattgattctccaaggttttctcacagaggaattttgattgatacatccagacattatctgccagttaagattattcttaaaactctggaataaagcagaaatgatgctgtgttcttctcagtgcttatcaggatgccatggcttttaataagtttaatgttcttcactggcacatagttgatgaccagtctttcccatatcagagcatcacttttcctgagttaagcaataaaggaagctattctttgtctcatgtttatacaccaaatgatgtccgtatggtgattgaatatgccagattacgaggaattcgagtcctgccagaatttgatacccctgggcatacactatcttggggaaaaggtcagaaagacctcctgactccatgttacagtagacaaaacaagttggactcttttggacctataaaccctactctgaatacaacatacagcttccttactacatttttcaaagaaattagtgaggtgtttccagatcaattcattcatttgggaggagatgaagtggaatttaaatgttgggaatcaaatccaaaaattcaagatttcatgaggcaaaaaggctttggcacagattttaagaaactagaatctttctacattcaaaaggttttggatattattgcaaccataaacaagggatccattgtctggcaggaggtttttgatgataaagcaaagcttgcgccgggcacaatagttgaagtatggaaagacagcgcatatcctgaggaactcagtagagtcacagcatctggcttccctgtaatcctttctgctccttggtacttagatttgattagctatggacaagattggaggaaatactataaagtggaacctcttgattttggcggtactcagaaacagaaacaacttttcattggtggagaagcttgtctatggggagaatatgtggatgcaactaacctcactccaagattatggcctcgggcaagtgctgttggtgagagactctggagttccaaagatgtcagagatatggatgacgcctatgacagactgacaaggcaccgctgcaggatggtcgaacgtggaatagctgcacaacctctttatgctggatattgtaaccatgagaacatgtaaaaaatggaggggaaaaaggccacagcaatctgtactacaatcaactttattttgaaatcatgtaaaataagatattagactgttttttgaataaaatatttttattgattgaa

SEQ ID NO: 364671 - DNA, 3143 bp, Homo sapiens
gcagtcatctgactcggtgactcacccgcggccgcgcttcctctgatccgggccgggcgggaagtcgggtcccgaggctccggctcggcagaccgggcggaaagcagccgagcggccatggagctgtgcgggctggggctgccccggccgcccatgctgctggcgctgctgttggcgacactgctggcggcgatgttggcgctgctgactcaggtggcgctggtggtgcaggtggcggaggcggctcgggccccgagcgtctcggccaagccggggccggcgctgtggcccctgccgctctcggtgaagatgaccccgaacctgctgcatctcgccccggagaacttctacatcagccacagccccaattccacggcgggcccctcctgcaccctgctggaggaagcgtttcgacgatatcatggctatatttttggtttctacaagtggcatcatgaacctgctgaattccaggctaaaacccaggttcagcaacttcttgtctcaatcacccttcagtcagagtgtgatgctttccccaacatatcttcagatgagtcttatactttacttgtgaaagaaccagtggctgtccttaaggccaacagagtttggggagcattacgaggtttagagacctttagccagttagtttatcaagattcttatggaactttcaccatcaatgaatccaccattattgattctccaaggttttctcacagaggaattttgattgatacatccagacattatctgccagttaagattattcttaaaactctggatgccatggcttttaataagtttaatgttcttcactggcacatagttgatgaccagtctttcccatatcagagcatcacttttcctgagttaagcaataaaggaagctattctttgtctcatgtttatacaccaaatgatgtccgtatggtgattgaatatgccagattacgaggaattcgagtcctgccagaatttgatacccctgggcatacactatcttggggaaaaggtcagaaagacctcctgactccatgttacagtagacaaaacaagttggactcttttggacctataaaccctactctgaatacaacatacagcttccttactacatttttcaaagaaattagtgaggtgtttccagatcaattcattcatttgggaggagatgaagtggaatttaaatgttgggaatcaaatccaaaaattcaagatttcatgaggcaaaaaggctttggcacagattttaagaaactagaatctttctacattcaaaaggttttggatattattgcaaccataaacaagggatccattgtctggcaggaggtttttgatgataaagcaaagatttgattagctatggacaagattggaggaaatactataaagtggaacctcttgattttggcggtactcagaaacagaaacaacttttcattggtggagaagcttgtctatggggagaatatgtggatgcaactaacctcactccaagattatggcctcgggcaagtgctgttggtgagagactctggagttccaaagatgtcagagatatggatgacgcctatgacagactgacaaggcaccgctgcaggatggtcgaacgtggaatagctgcacaacctctttatgctggatattgtaaccatgagaacatgtaaaaaatggaggggaaaaaggccacagcaatctgtactacaatcaactttattttgaaatcatgtaaaataagatattagactgttttttgaataaaatatttttattgattgaacctttgaccctctatcttattacatttagaggcctggcatctttcttgtgagacaagcttaaggacacaaaagaaacacaactttgtgataccactcttctgaaggctacttatagtaataacttcatagatgaacagcatgattcaggtacagtggctttaaacatcaaagcacatttctcattatataaattaaaacgggtggctccagtgccactatcaaagcttaagttatatcttttatctagttctctgaatgtactgaaacagtactttattcgtccaataaataaagcaataaaaattgttcttactgaaaatgaagtagctaggtgctcctgaatttctctccaaaaactaaaacatttaggtcaaaccacttctccggttgagcagtgtattttgatcttgaggattcatggcttgataagtagatagttctaaggcaaaagtagctgagcctgatgttagcgttcgaagcacagttgaataaccctaatcaaaataatttaagtcatttatattatcaaatttaagcctcaagtttctcttcctgctgattatcttttgactattagggaaaagtgatgttgccacttttgtggcttagccatatcacttcctccaaacagatgatttaacttttttcagggtaagttggatataaaaacattgaggacagaaagcagagtagtgcaagtgtgctgcagatgtatttgttagatggctttgccggcaacccaggtgcctgtcctggagcagaagaggctgacgggagaagaatgataacttgccttaaaactgacaatggtggaagtaagataaatgcttggcagggaaaaaatggtcatataggctggtaccacattttgggactgtaaatacccccttgtagtgctataatccctggatttcgccaacaatttaaattcaaagtcctaaccattcctgctggttgaaacgaaacttaacatgtattctctaaatcaaagccttaatgtttctttcaggttactgattgtctattcattggcatataatatcccctgaattaagaagaatatgtacttttcagttacaaagtacctaccataatttctgctaagggaacaaatccaataacaactttgttgtcctggcgagtctgaatttcctgaatgtttcctcttctttgtgccagatctgccaggacagggctgagataatctctagctactgtaacctcaagattcatcagaggctccaaaacttgcttatcagctttcttcagagcctaaagaaattaaagaatgttaacttatctttcataaataaaaacttaaaataaatacagcctagagctcatacaaaaaga

SEQ ID NO: 364672 - DNA, 1590 bp, Homo sapiens
gcagtcatctgactcggtgactcacccgcggccgcgcttcctctgatccgggccgggcgggaagtcgggtcccgaggctccggctcggcagaccgggcggaaagcagccgagcggccatggagctgtgcgggctggggctgccccggccgcccatgctgctggcgctgctgttggcgacactgctggcggcgatgttggcgctgctgactcaggtggcgctggtggtgcaggtggcggaggcggctcgggccccgagcgtctcggccaagccggggccggcgctgtggcccctgccgctctcggtgaagatgaccccgaacctgctgcatctcgccccggagaacttctacatcagccacagccccaattccacggcgggcccctcctgcaccctgctggaggaagcgtttcgacgatatcatggctatatttttggtttctacaagtggcatcatgaacctgctgaattccaggctaaaacccaggttcagcaacttcttgtctcaatcacccttcagtcagagtgtgatgctttccccaacatatcttcagatgagtcttatactttacttgtgaaagaaccagtggctgtccttaaggccaacagagtttggggagcattacgaggtttagagacctttagccagttagtttatcaagattcttatggaactttcaccatcaatgaatccaccattattgattctccaaggttttctcacagaggaattttgattgatacatccagacattatctgccagttaagattattcttaaaactctggatgccatggcttttaataagtttaatgttcttcactggcacatagttgatgaccagtctttcccatatcagagcatcacttttcctgagttaagcaataaaggaagctattctttgtctcatgtttatacaccaaatgatgtccgtatggtgattgaatatgccagattacgaggaattcgagtcctgccagaatttgatacccctgggcatacactatcttggggaaaaggtcagaaagacctcctgactccatgttacagtagacaaaacaagttggactcttttggacctataaaccctactctgaatacaacatacagcttccttactacatttttcaaagaaattagtgaggtgtttccagatcaattcattcatttgggaggagatgaagtggaatttaaatgttgggaatcaaatccaaaaattcaagatttcatgaggcaaaaaggctttggcacagattttaagaaactagaatctttctacattcaaaaggttttggatattattgcaaccataaacaagggatccattgtctggcaggaggtttttgatgataaagcaaagcttgcgccgggcacaatagttgaagtatggaaagacagcgcatatcctgaggaactcagtagagtcacagcatctggcttccctgtaatcctttctgctccttggtacttagatttgattagctatggacaagattggaggaaatactataaagtggaacctcttgattttggcgctcagaaacagaaacaacttttcattgtacaggagtgctagggggtatcctctagc

SEQ ID NO: 364673 - DNA, 1350 bp, Homo sapiens
  misc_feature (1070)..(1070): n is a, c, g, or t
gcagtcatctgactcggtgactcacccgcggccgcgcttcctctgatccgggccgggcgggaagtcgggtcccgaggctccggctcggcagaccgggcggaaagcagccgagcggccatggagctgtgcgggctggggctgccccggccgcccatgctgctggcgctgctgttggcgacactgctggcggcgatgttggcgctgctgactcaggtggcgctggtggtgcaggtggcggaggcggctcgggccccgagcgtctcggccaagccggggccggcgctgtggcccctgccgctctcggtgaagatgaccccgaacctgctgcatctcgccccggagaacttctacatcagccacagccccaattccacggcgggcccctcctgcaccctgctggaggaagcgtttcgacgatatcatggctatatttttggtttctacaagtggcatcatgaacctgctgaattccaggctaaaacccaggttcagcaacttcttgtctcaatcacccttcagtcagagtgtgatgctttccccaacatatcttcagatgagtcttatactttacttgtgaaagaaccagtggctgtccttaaggccaacagagtttggggagcattacgaggtttagagacctttagccagttagtttatcaagattcttatggaactttcaccatcaatgaatccaccattattgattctccaaggttttctcacagaggaattttgattgatacatccagacattatctgccagttaagattattcttaaaactctggatgccatggcttttaataagtttaatgttcttcactggcacatagttgatgaccagtctttcccatatcagagcatcacttttcctgagttaagcaataaaggaagctattctttgtctcatgtttatacaccaaatgatgtccgtatggtgattgaatatgccagattacgaggaattcgagtcctgccagaatttgatacccctgggcatacactatcttggggaaaagcagaaagacctcctgactccatgttacagcatagatggttacaactgtaacnatctatgtggtaaatatcttatgtttataaccttaaagatatgatgaaactgcaattagcatcctatgacaaactgagtttcttgatacactttaaaattataaaagttaggtctggcatggtggctcatgccagtaattctggcactttgggaggcccaggcaggcagatcacttgaggtcaggattttgagaccagcctggtcaatatggtgaaaccctgcctctactaaaagtacaaaaattaactgggcatagatgtgggtacctgtaatcccagc

SEQ ID NO: 364674 - DNA, 1139 bp, Homo sapiens
gcagtcatctgactcggtgactcacccgcggccgcgcttcctctgatccgggccgggcgggaagtcgggtcccgaggctccggctcggcagaccgggcggaaagcagccgagcggccatggagctgtgcgggctggggctgccccggccgcccatgctgctggcgctgctgttggcgacactgctggcggcgatgttggcgctgctgactcaggtggcgctggtggtgcaggtggcggaggcggctcgggccccgagcgtctcggccaagccggggccggcgctgtggcccctgccgctctcggtgaagatgaccccgaacctgctgcatctcgccccggagaacttctacatcagccacagccccaattccacggcgggcccctcctgcaccctgctggaggaagcgtttcgacgatatcatggctatatttttggtttctacaagtggcatcatgaacctgctgaattccaggctaaaacccaggttcagcaacttcttgtctcaatcacccttcagtcagagtgtgatgctttccccaacatatcttcagatgagtcttatactttacttgtgaaagaaccagtggctgtccttaaggccaacagagtttggggagcattacgaggtttagagacctttagccagttagtttatcaagattcttatggaactttcaccatcaatgaatccaccattattgattctccaaggttttctcacagaggaattttgatgaaatactataaagtggaacctcttgattttggcggtactcagaaacagaaacaacttttcattggtggagaagcttgtctatggggagaatatgtggatgcaactaacctcactccaagattatggcctcgggcaagtgctgttggtgagagactctggagttccaaagatgtcagagatatggatgacgcctatgacagactgacaaggcaccgctgcaggatggtcgaacgtggaatagctgcacaacctctttatgctggatattgtaaccatgagaacatgtaaaaaatggaggggaaaaaggccacagcaatctgtactacaatcaactttattttgaaatcatgtaaaataagatattagactgttttttgaataaaatatttttattgattgaa

SEQ ID NO: 364675 - DNA, 457 bp, Homo sapiens
gcggccgcgcttcctctgatccgggccgggcgggaagtcgggtcccgaggctccggctcggcagaccgggcggaaagcagccgagcggccatggagctgtgcgggctggggctgccccggccgcccatgctgctggcgctgctgttggcgacactgctggcggcgatgttggcgctgctgactcaggtggcgctggtggtgcaggtggcggaggcggctcgggccccgagcgtctcggccaagccggggccggcgctgtggcccctgccgctctcggtgaagatgaccccgaacctgctgcatctcgccccggagaacttctacatcagccacagccccaattccacggcgggcccctcctgcaccctgctggaggaagcgtttcgacggtgagcgctcccggcccggccgggagttgtcctgggggaggggagaggcggaccaccccggagcgctg

SEQ ID NO: 364676 - DNA, 253 bp, Homo sapiens
attccatttaaattataggattggtttttgtatgtttctgcagaatgtcattgaagattgagatgtacaaattatgttgaatttaacctgtttctcttggagaaattgcctctgatatctttctaacttaatcttagtgtgttctaggaacagttttccataagaggacaacttctcaatgatcatgatagttatttagtaagaaataatggttgttaatcaaatacatgttatgtcttgtccttctctgatt

SEQ ID NO: 364677 - DNA, 1496 bp, Homo sapiens
ttgtggaatttacagttagtattaaggatattcttctacacatgaaaaaatcacttaaatatgagaaaatggcattctacatgtatgtactatgaaatgtgtctgatttggtatgcattatttcaaaaactgtgaatgtgtgttaataacactacagcaatcacacagtgactatagcttgcatttaatgcattacaaaagagggaggacaaactttctagaagaaattaaaaccatatgttattttttgttgctaatcatttgacacttaatcgaaacagaataagttactgtggaaaaaaggatgatccaactcctgaggattgccgcctgtgtgtctttaattgattatctttgatagttagagttatttttcagatttttccccctcatactggattgtgatgctctgatatgagcatgcaatgactgatacagaaataggctggagcttcggtgtgtgcttttgctatacagcttacagttctaatgcctgatgtagagatgatgaatttctcctttttaaacctatcttctgtttactccttttgcattatgaaggccctcttcaatgatgtatgtttctgatggaatcagaaaatttcacactagaaaagtgtacctaacttgattcagtgtgagctcttgggacagggagtggagccaggggtagagcttaaagaagctggctctgtaagagttgtatatcaaagtaccttttgctacaaggtgcatatagaagtctaagataagaaatgtaccctctatactttatttttcatgcccctatcatgtttggtgtgccttaaatcttacctttaaatgaagactctatggattgtttacaaatgaagttttacactaggaccagatcgtccatacatgattggtcttctacaataataatgttcaattctttcattttaaatctttctttagggtcatataaagattagttctttcagaaaagctattgctttggtacatgacttagtctaaccagttgggtaatgctgctttgaaaaatagtttgtccctctccccattccaaaaatgaatccattcagtcagaaaaaaagattatcctactatttgtagatgattgctaaggcttgaaataggaaaggggaaagaagggatagaaaagtttcaagtccagtagtgcagtgaatcctttgtgtttgagacttttttacacttatttctgaagttagtgaactttcattgtccctgtggcctcatatttatagagcttcttaactgttttgtacctcagattgtttttagatgtcattgaagattgagatgtacaaattatgttgaatttaacctgtttctcttggagaaattgcctctgatatctttctaacttaatcttagtgtgttctaggaacagttttccataagaggacaacttctcaatgatcatgatagttatttagtaagaaataatggttgttaatcaaatacatgttatgtcttgtccttctctgatt

SEQ ID NO: 364678 - DNA, 404 bp, Homo sapiens
agtatttttaattatggtaaatcatgtaacccagactcatgaattttggggcagtggaaattatttcctttgactcttttttctgcatatcatcaatttgctttttactcatgtttcttctactgtcgctgtaagcttacttgttgttttttctttccttttcttcatgctgtcgtttagagccctacagagagacaagtatgggagtaaagctaaacattgcatatcaaatgtaattttttttagttcacttttattgcatcacatatagatgatgtagttattaaaaacagttcatctcacaatttaaaaactaaaaagcctatgaatcgacttatataaatatatgttaatagagattagacgcttttgttgtctgattcttttattgtcacataatcaac

SEQ ID NO: 364679 - DNA, 6385 bp, Homo sapiens
gaaaaacacgagccgtgttgtatgtggaggccccggtgtctgggtgtaattctcgttccttctgtgaggtgaggcagatgaagccatttcgtggttctgctgagcatggtcttggcagtgtttttgggagcatcacactgtgccccttttgttaacttgctagcccggcctgtcttttgccccgggctcaatggctggattgtggaaactgcacccgccttcaggttgttgagcaactgatgggacgatctcagggaccggcgtttacgaaagaggggaagccaagatacaggagtggaaattacttggccacatcgcacaggtttcagatttgggatattggtgtttctgttttggagaaattattctttttctttttaatttgaagaaaaatcatcagtcttggaatacagaagagaaactagaaatatacgtattttgtttcacatttgaacagtcattcttgaggaatactccatacctgagtagacagccatgtggccatcgcagctactaattttcatgatgctcttagctccaataattcatgctttcagccgtgccccaattccaatggctgtggtccgcagagagctatcctgtgagagctatcctatagagcttcgctgtccaggaacagacgtcatcatgatagaaagtgccaactatggcaggactgatgacaaaatttgtgactctgaccctgctcagatggagaatatccgatgttatctgccagatgcctataagattatgtctcaaagatgcaataacagaacccagtgtgcagtggtggcaggtcctgatgtttttccagacccgtgtccaggaacctataaataccttgaagtgcagtatgaatgtgtcccttacaaagtggaacaaaaagtttttctttgtcctggactactaaaaggagtataccagagtgaacatttgtttgagtccgaccaccaatctggggcgtggtgcaaagaccctctgcaggcatctgacaagatttattatatgccctggactccctacagaactgataccctgactgagtattcatccaaggatgacttcattgctggaagaccaactacaacctacaagctccctcatagggtggatggcacaggatttgtagtgtatgatggagctttgttcttcaacaaagagcgcaccaggaacatagtaaagtttgatttgcggactaggataaagagtggagaggctatcatagcaaatgccaattaccatgatacctccccttaccgatggggaggcaaatctgacatagacctggcagtagatgagaatgggctatgggtaatctatgcaacagaacaaaacaatggtaaaattgtcattagtcaattgaacccttacaccctacggatcgaaggaacatgggatactgcatatgataaaaggtcagcttccaatgcctttatgatttgtggaattctgtatgtggtcaaatctgtatatgaggatgatgacaatgaggctactggaaataagattgactacatttacaacactgaccaaagcaaggatagtttggtggatgtaccctttcctaattcataccagtacattgcagctgtggattacaaccccagggacaacctactttatgtatggaataactatcacgtcgtgaaatattctttggattttggacctctggatagtagatcagggcaggcacatcatggacaagtttcatacatttctccgccaattcaccttgactctgagctagaaagaccctctgttaaagatatctctaccacaggacctcttggcatgggaagcactaccaccagtaccacccttcggaccacaactttgagcccaggaaggagtaccaccccgtcagtgtcaggaagaagaaaccggagtactagtaccccatctccagctgtcgaggtacttgatgacatgaccacacaccttccatcagcatcgtcccaaatcccagctctcgaagagagctgtgaggctgtggaagcccgagaaatcatgtggtttaagactcgtcaaggacagatagcaaagcagccatgccctgcaggaactataggtgtatcaacttatctatgccttgctcctgatggaatttgggatccccaaggtccagatctcagcaactgttcttctccttgggtcaatcatataacacagaagttgaaatctggtgaaacagctgccaacattgctagagagctggctgaacagacaagaaatcacttgaatgctggggacatcacctactctgtccgggccatggaccagctggtaggcctcctagatgtacagcttcggaacttgaccccaggtggaaaagatagtgctgcccggagtttgaacaaggcaatggtcgagacagttaacaacctccttcagccacaagctttgaatgcatggagagacctgactacgagtgatcagctgcgtgcggccaccatgttgcttcatactgtggaggaaagtgcttttgtgctggctgataaccttttgaagactgacattgtcagggagaatacagacaatattaaattggaagttgcaagactgagcacagaaggaaacttagaagacctaaaatttccagaaaacatgggccatggaagcactatccagctgtctgcaaataccttaaagcaaaatggccgaaatggagagatcagagtggcctttgtcctgtataacaacttgggtccttatttatccacggagaatgccagtatgaagttgggaacggaagctttgtccacaaatcattctgttattgtcaattcccctgttattacggcagcaataaacaaagagttcagtaacaaggtttatttggctgatcctgtggtatttactgttaaacatatcaagcagtcagaggaaaatttcaaccctaactgttcattttggagctactccaagcgtacaatgacaggttattggtcaacacaaggctgtcggctcctgacaacaaataagacacatactacatgctcttgtaaccacctaacaaattttgcagtactgatggcacatgtggaagttaagcacagtgatgcggtccatgacctccttctggatgtgatcacgtgggttggaattttgctgtcccttgtttgtctcctgatttgcatcttcacattttgctttttccgcgggctccagagtgaccgtaacaccatccacaagaacctctgcatcagtctctttgtagcagagctgctcttcctgattgggatcaaccgaactgaccaaccaattgcctgtgctgttttcgctgccctgttacatttcttcttcttggctgccttcacctggatgttcctggagggggtgcagctttatatcatgctggtggaggtttttgagagtgaacattcacgtaggaaatacttttatctggtcggctatgggatgcctgcactcattgtggctgtgtcagctgcagtagactacaggagttatggaacagataaagtatgttggctccgacttgacacctacttcatttggagttttataggaccagcaactttgataattatgcttaatgtaatcttccttgggattgctttatataaaatgtttcatcatactgctatactgaaacctgaatcaggctgtcttgataacatcaagtcatgggttataggtgcaatagctcttctctgcctattaggattgacctgggcctttggactcatgtatattaatgaaagcacagtcatcatggcctatctcttcaccattttcaattctctacagggaatgtttatatttattttccattgtgtcctacagaagaaggtacgaaaagagtatgggaaatgcctgcgaacacattgctgtagtggcaaaagtacagagagttccattggttcagggaaaacatctggttctcgaactcctggacgctactccacaggctcacagagccgaatccgtagaatgtggaatgacacggttcgaaagcagtcagagtcttcctttattactggagacataaacagttcagcgtcactcaacagagaggggcttctgaacaatgccagggatacaagtgtcatggatactctaccactgaatggtaaccatggcaatagttacagcattgccagcggcgaattacctgagcaactgtgtgcaaatcatagaccgtggctataaccataacgagaccgccctagagaaaaagattctgaaggaactcacttccaactatatcccttcttacctgaacaaccatgagcgctccagtgaacagaacaggaatctgatgaacaagctggtgaataaccttggcagtggaagggaagatgatgccattgtcctggatgatgccacctcgtttaaccacgaggagagtttgggcctggaactcattcatgaggaatctgatgctcctttgctgcccccaagagtatactccaccgagaaccaccagccacaccattataccagaaggcggatcccccaagaccacagtgagagctttttccctttgctaaccaacgagcacacagaagatctccagtcaccccatagagactctctctataccagcatgccgacactggctggtgtggccgccacagagagtgttaccaccagcacccagaccgaacccccaccggccaaatgtggtgatgccgaagatgtttactacaaaagcatgccaaacctaggctccagaaaccacgtccatcagctgcatacttactaccagctaggtcgcggcagcagtgatggatttatagttcctccaaacaaagatgggacccctcccgagggaagttcaaaaggaccggctcatttggtcactagtctatagaagatgacacagaaattggaaccaacaaaactgctaacaccttgttgactgttctgagttgatataagcagtggtaataatgtgtgtactcctaaatctttatgctgtcctctaaagacaaacacaaactctcagacttttttttttttaatgggatttttaggtcagcccaggggagaaagataactgctaaaattcccctgtaccccatcctttcttgtcctttccccttcagatggagacttcattatgttaatgaacaagatatgaagaaaatggcactcattgtggccttgttgaattatgttgtgtatgttttaacatctctgatgctgtgttactaaaattacaaggacctgctttttaaaaggcccagaacaattgtcctgaaattagtaacaatgcctgcatcctagattggagtgctgcacaaacaaacataagagcaaagcaaaactgtatcacatagggtttttggtcactcacaacctgaattcaccacagctggaatagctgtggaaaacaaaataaaacaacaaaattaataatgaaatggaggggaattctagaattatatgctaaatgcatattttatgatttgctgtattaactgatgataaaactaatggcagaaaaagaagttgagcaatttctatgtaatgtacagatactagcattgcacatatagtctgctttctgttcctccagaatttgagtcctgttaatgtagtagaaaaaaaaaaaagaaattttctttttcttttgtgctggtcttgcaagtttgtctaccagtaagagagcaaagtttccttcctttcttctctttcttcattttctttttttcttttttgccttttattcctttaaaatttcgcctggcaaaaaataaataaatggaactatcactttataagaatcattttctagtaatgcaaacaaattattttttacaaaaaaacaaaataaataaaattagacttccttccctcactatatatctttatgcagtcagaatatttccaacagtgttttttgcaaattagagcaggacaaacttttatgtttacagggcacgtctgttgtaatgcaaagcatatttggcaagcagttcatcaccaggacactagctatgattctagaagtcaaaaggtgtctatagaactagtggggcttctgcatgtgaaaaacggttttccataggcattaaagtgctgaatgctcagtctgatcaacaagtgggcacctgcactaccactttttagaggaaattcactccctcgtaagcattggaaggtcaaattattttgaagtgatttttttaaaaaaaagtcttctgtttattaacaggaaaatttatttatttgacaggattttgagtaatgtaggaatacaaaaggtaaattagcagcacatataatttttttttaatttatgatccattttgtatggtctcaaagttggatgacctcattactaatatttgttgtaaaagtgaaacttgtttgccaaccaataaacaactgattgagatttagaagatattgt

SEQ ID NO: 364680 - DNA, 6632 bp, Homo sapiens
gaaaaacacgagccgtgttgtatgtggaggccccggtgtctgggtgtaattctcgttccttctgtgaggtgaggcagatgaagccatttcgtggttctgctgagcatggtcttggcagtgtttttgggagcatcacactgtgccccttttgttaacttgctagcccggcctgtcttttgccccgggctcaatggctggattgtggaaactgcacccgccttcaggttgttgagcaactgatgggacgatctcagggaccggcgtttacgaaagaggggaagccaagatacaggagtggaaattacttggccacatcgcacaggtttcagatttgggatattggtgtttctgttttggagaaattattctttttctttttaatttgaagaaaaatcatcagtcttggaatacagaagagaaactagaaatatacgtattttgtttcacatttgaacagtcattcttgaggaatactccatacctgagtagacagccatgtggccatcgcagctactaattttcatgatgctcttagctccaataattcatgctttcagccgtgccccaattccaatggctgtggtccgcagagagctatcctgtgagagctatcctatagagcttcgctgtccaggaacagacgtcatcatgatagaaagtgccaactatggcaggactgatgacaaaatttgtgactctgaccctgctcagatggagaatatccgatgttatctgccagatgcctataagattatgtctcaaagatgcaataacagaacccagtgtgcagtggtggcaggtcctgatgtttttccagacccgtgtccaggaacctataaataccttgaagtgcagtatgaatgtgtcccttacaaagtggaacaaaaagtttttctttgtcctggactactaaaaggagtataccagagtgaacatttgtttgagtccgaccaccaatctggggcgtggtgcaaagaccctctgcaggcatctgacaagatttattatatgccctggactccctacagaactgataccctgactgagtattcatccaaggatgacttcattgctggaagaccaactacaacctacaagctccctcatagggtggatggcacaggatttgtagtgtatgatggagctttgttcttcaacaaagagcgcaccaggaacatagtaaagtttgatttgcggactaggataaagagtggagaggctatcatagcaaatgccaattaccatgatacctccccttaccgatggggaggcaaatctgacatagacctggcagtagatgagaatgggctatgggtaatctatgcaacagaacaaaacaatggtaaaattgtcattagtcaattgaacccttacaccctacggatcgaaggaacatgggatactgcatatgataaaaggtcagcttccaatgcctttatgatttgtggaattctgtatgtggtcaaatctgtatatgaggatgatgacaatgaggctactggaaataagattgactacatttacaacactgaccaaagcaaggatagtttggtggatgtaccctttcctaattcataccagtacattgcagctgtggattacaaccccagggacaacctactttatgtatggaataactatcacgtcgtgaaatattctttggattttggacctctggatagtagatcagggcaggcacatcatggacaagtttcatacatttctccgccaattcaccttgactctgagctagaaagaccctctgttaaagatatctctaccacaggacctcttggcatgggaagcactaccaccagtaccacccttcggaccacaactttgagcccaggaaggagtaccaccccgtcagtgtcaggaagaagaaaccggagtactagtaccccatctccagctgtcgaggtacttgatgacatgaccacacaccttccatcagcatcgtcccaaatcccagctctcgaagagagctgtgaggctgtggaagcccgagaaatcatgtggtttaagactcgtcaaggacagatagcaaagcagccatgccctgcaggaactataggtgtatcaacttatctatgccttgctcctgatggaatttgggatccccaaggtccagatctcagcaactgttcttctccttgggtcaatcatataacacagaagttgaaatctggtgaaacagctgccaacattgctagagagctggctgaacagacaagaaatcacttgaatgctggggacatcacctactctgtccgggccatggaccagctggtaggcctcctagatgtacagcttcggaacttgaccccaggtggaaaagatagtgctgcccggagtttgaacaagcttcagaaaagagagcgctcttgcagagcctatgtccaggcaatggtcgagacagttaacaacctccttcagccacaagctttgaatgcatggagagacctgactacgagtgatcagctgcgtgcggccaccatgttgcttcatactgtggaggaaagtgcttttgtgctggctgataaccttttgaagactgacattgtcagggagaatacagacaatattaaattggaagttgcaagactgagcacagaaggaaacttagaagacctaaaatttccagaaaacatgggccatggaagcactatccagctgtctgcaaataccttaaagcaaaatggccgaaatggagagatcagagtggcctttgtcctgtataacaacttgggtccttatttatccacggagaatgccagtatgaagttgggaacggaagctttgtccacaaatcattctgttattgtcaattcccctgttattacggcagcaataaacaaagagttcagtaacaaggtttatttggctgatcctgtggtatttactgttaaacatatcaagcagtcagaggaaaatttcaaccctaactgttcattttggagctactccaagcgtacaatgacaggttattggtcaacacaaggctgtcggctcctgacaacaaataagacacatactacatgctcttgtaaccacctaacaaattttgcagtactgatggcacatgtggaagttaagcacagtgatgcggtccatgacctccttctggatgtgatcacgtgggttggaattttgctgtcccttgtttgtctcctgatttgcatcttcacattttgctttttccgcgggctccagagtgaccgtaacaccatccacaagaacctctgcatcagtctctttgtagcagagctgctcttcctgattgggatcaaccgaactgaccaaccaattgcctgtgctgttttcgctgccctgttacatttcttcttcttggctgccttcacctggatgttcctggagggggtgcagctttatatcatgctggtggaggtttttgagagtgaacattcacgtaggaaatacttttatctggtcggctatgggatgcctgcactcattgtggctgtgtcagctgcagtagactacaggagttatggaacagataaagtatgttggctccgacttgacacctacttcatttggagttttataggaccagcaactttgataattatgcttaatgtaatcttccttgggattgctttatataaaatgtttcatcatactgctatactgaaacctgaatcaggctgtcttgataacatcaactatgaggataacagacccttcatcaagtcatgggttataggtgcaatagctcttctctgcctattaggattgacctgggcctttggactcatgtatattaatgaaagcacagtcatcatggcctatctcttcaccattttcaattctctacagggaatgtttatatttattttccattgtgtcctacagaagaaggtacgaaaagagtatgggaaatgcctgcgaacacattgctgtagtggcaaaagtacagagagttccattggttcagggaaaacatctggttctcgaactcctggacgctactccacaggctcacagagccgaatccgtagaatgtggaatgacacggttcgaaagcagtcagagtcttcctttattactggagacataaacagttcagcgtcactcaacagaggagccatggctaatcatcttataagcaatgctctgcttcgtccgcatggtactaacaatccctataatacattgcttggggaaccggcggtctgtaacaacccttctgtcagcatgtacaacgcacaagagccctacagagagacaagtatgggagtaaagctaaacattgcatatcaaataggggcttctgaacaatgccagggatacaagtgtcatggatactctaccactgaatggtaaccatggcaatagttacagcattgccagcggcgaattacctgagcaactgtgtgcaaatcatagaccgtggctataaccataacgagaccgccctagagaaaaagattctgaaggaactcacttccaactatatcccttcttacctgaacaaccatgagcgctccagtgaacagaacaggaatctgatgaacaagctggtgaataaccttggcagtggaagggaagatgatgccattgtcctggatgatgccacctcgtttaaccacgaggagagtttgggcctggaactcattcatgaggaatctgatgctcctttgctgcccccaagagtatactccaccgagaaccaccagccacaccattataccagaaggcggatcccccaagaccacagtgagagctttttccctttgctaaccaacgagcacacagaagatctccagtcaccccatagagactctctctataccagcatgccgacactggctggtgtggccgccacagagagtgttaccaccagcacccagaccgaacccccaccggccaaatgtggtgatgccgaagatgtttactacaaaagcatgccaaacctaggctccagaaaccacgtccatcagctgcatacttactaccagctaggtcgcggcagcagtgatggatttatagttcctccaaacaaagatgggacccctcccgagggaagttcaaaaggaccggctcatttggtcactagtctatagaagatgacacagaaattggaaccaacaaaactgctaacaccttgttgactgttctgagttgatataagcagtggtaataatgtgtgtactcctaaatctttatgctgtcctctaaagacaaacacaaactctcagacttttttttttttaatgggatttttaggtcagcccaggggagaaagataactgctaaaattcccctgtaccccatcctttcttgtcctttccccttcagatggagacttcattatgttaatgaacaagatatgaagaaaatggcactcattgtggccttgttgaattatgttgtgtatgttttaacatctctgatgctgtgttactaaaattacaaggacctgctttttaaaaggcccagaacaattgtcctgaaattagtaacaatgcctgcatcctagattggagtgctgcacaaacaaacataagagcaaagcaaaactgtatcacatagggtttttggtcactcacaacctgaattcaccacagctggaatagctgtggaaaacaaaataaaacaacaaaattaataatgaaatggaggggaattctagaattatatgctaaatgcatattttatgatttgctgtattaactgatgataaaactaatggcagaaaaagaagttgagcaatttctatgtaatgtacagatactagcattgcacatatagtctgctttctgttcctccagaatttgagtcctgttaatgtagtagaaaaaaaaaaaagaaattttctttttcttttgtgctggtcttgcaagtttgtctaccagtaagagagcaaagtttccttcctttcttctctttcttcattttctttttttcttttttgccttttattcctttaaaatttcgcctggcaaaaaataaataaatggaactatcactttataagaatcattttctagtaatgcaaacaaattattttttacaaaaaaacaaaataaataaaattagacttccttccctcactatatatctttatgcagtcagaatatttccaacagtgttttttgcaaattagagcaggacaaacttttatgtttacagggcacgtctgttgtaatgcaaagcatatttggcaagcagttcatcaccaggacactagctatgattctagaagtcaaaaggtgtctatagaactagtggggcttctgcatgtgaaaaacggttttccataggcattaaagtgctgaatgctcagtctgatcaacaagtgggcacctgcactaccactttttagaggaaattcactccctcgtaagcattggaaggtcaaattattttgaagtgatttttttaaaaaaaagtcttctgtttattaacaggaaaatttatttatttgacaggattttgagtaatgtaggaatacaaaaggtaaattagcagcacatataatttttttttaatttatgatccattttgtatggtctcaaagttggatgacctcattactaatatttgttgtaaaagtgaaacttgtttgccaaccaataaacaactgattgagatttagaagatattgt

SEQ ID NO: 364681 - DNA, 3017 bp, Homo sapiens
catttatatggtttcaatcactggtccaattatacacatatatagatttaatagtattttctgtttccttccaaacattttatacttaagtaaatgctagcaatttatacatatttcatagtcaatgaatgtttttgcttctgtgtttgtgtgtgtgttctatggcttgttggatataaatgtcatagtatcttgtaatctttttcagaggggcttctgaacaatgccagggatacaagtgtcatggatactctaccactgaatggtaaccatggcaatagttacagcattgccagcggcgaattacctgagcaactgtgtgcaaatcatagaccgtggctataaccataacgagaccgccctagagaaaaagattctgaaggaactcacttccaactatatcccttcttacctgaacaaccatgagcgctccagtgaacagaacaggaatctgatgaacaagctggtgaataaccttggcagtggaagggaagatgatgccattgtcctggatgatgccacctcgtttaaccacgaggagagtttgggcctggaactcattcatgaggaatctgatgctcctttgctgcccccaagagtatactccaccgagaaccaccagccacaccattataccagaaggcggatcccccaagaccacagtgagagctttttccctttgctaaccaacgagcacacagaagatctccagtcaccccatagagactctctctataccagcatgccgacactggctggtgtggccgccacagagagtgttaccaccagcacccagaccgaacccccaccggccaaatgtggtgatgccgaagatgtttactacaaaagcatgccaaacctaggctccagaaaccacgtccatcagctgcatacttactaccagctaggtcgcggcagcagtgatggatttatagttcctccaaacaaagatgggacccctcccgagggaagttcaaaaggaccggctcatttggtcactagtctatagaagatgacacagaaattggaaccaacaaaactgctaacaccttgttgactgttctgagttgatataagcagtggtaataatgtgtgtactcctaaatctttatgctgtcctctaaagacaaacacaaactctcagacttttttttttttaatgggatttttaggtcagcccaggggagaaagataactgctaaaattcccctgtaccccatcctttcttgtcctttccccttcagatggagacttcattatgttaatgaacaagatatgaagaaaatggcactcattgtggccttgttgaattatgttgtgtatgttttaacatctctgatgctgtgttactaaaattacaaggacctgctttttaaaaggcccagaacaattgtcctgaaattagtaacaatgcctgcatcctagattggagtgctgcacaaacaaacataagagcaaagcaaaactgtatcacatagggtttttggtcactcacaacctgaattcaccacagctggaatagctgtggaaaacaaaataaaacaacaaaattaataatgaaatggaggggaattctagaattatatgctaaatgcatattttatgatttgctgtattaactgatgataaaactaatggcagaaaaagaagttgagcaatttctatgtaatgtacagatactagcattgcacatatagtctgctttctgttcctccagaatttgagtcctgttaatgtagtagaaaaaaaaaaaagaaattttctttttcttttgtgctggtcttgcaagtttgtctaccagtaagagagcaaagtttccttcctttcttctctttcttcattttctttttttcttttttgccttttattcctttaaaatttcgcctggcaaaaaataaataaatggaactatcactttataagaatcattttctagtaatgcaaacaaattattttttacaaaaaaacaaaataaataaaattagacttccttccctcactatatatctttatgcagtcagaatatttccaacagtgttttttgcaaattagagcaggacaaacttttatgtttacagggcacgtctgttgtaatgcaaagcatatttggcaagcagttcatcaccaggacactagctatgattctagaagtcaaaaggtgtctatagaactagtggggcttctgcatgtgaaaaacggttttccataggcattaaagtgctgaatgctcagtctgatcaacaagtgggcacctgcactaccactttttagaggaaattcactccctcgtaagcattggaaggtcaaattattttgaagtgatttttttaaaaaaaagtcttctgtttattaacaggaaaatttatttatttgacaggattttgagtaatgtaggaatacaaaaggtaaattagcagcacatataatttttttttaatttatgatccattttgtatggtctcaaagttggatgacctcattactaatatttgttgtaaaagtgaaacttgtttgccaaccaataaacaactgattgagatttagaagatattgtattgatgtatgtactatatgattaatcagtctttttatttttctcgcctttctttctttctgttttcaatacataaactttgctaatcctctgtggcccaaatgagccatgcaaaagaaatcaatctgcctagatgaataagctaagcacaaaatcatacaggtttgcagacaaagtaaaccagaaaaatggaatgggcatgtttattttggatgaaatcagatgcataacttaatgttgagcaggttaacatatatgttactatttgcttatctataaaccagctgcagtcactatgcttacctttaaaaccagattcaatcagagatataaatatgaaatttgggggctgggtgagtcatattttttcctcctttgtacattgcattttgatgttagaaattcaaattccctcaatttgctaaaagctgcaaagagaatattcattttataaagatataat

SEQ ID NO: 364682 - DNA, 1457 bp, Homo sapiens
atgacagtacttgatgtttatatactctgaagcatttcttcaaactttctactttatgtgtcattgggattaaaggtcagcccaggggagaaagataactgctaaaattcccctgtaccccatcctttcttgtcctttccccttcagatggagacttcattatgttaatgaacaagatatgaagaaaatggcactcattgtggccttgttgaattatgttgtgtatgttttaacatctctgatgctgtgttactaaaattacaaggacctgctttttaaaaggcccagaacaattgtcctgaaattagtaacaatgcctgcatcctagattggagtgctgcacaaacaaacataagagcaaagcaaaactgtatcacatagggtttttggtcactcacaacctgaattcaccacagctggaatagctgtggaaaacaaaataaaacaacaaaattaataatgaaatggaggggaattctagaattatatgctaaatgcatattttatgatttgctgtattaactgatgataaaactaatggcagaaaaagaagttgagcaatttctatgtaatgtacagatactagcattgcacatatagtctgctttctgttcctccagaatttgagtcctgttaatgtagtagaaaaaaaaaaaagaaattttctttttcttttgtgctggtcttgcaagtttgtctaccagtaagagagcaaagtttccttcctttcttctctttcttcattttctttttttcttttttgccttttattcctttaaaatttcgcctggcaaaaaataaataaatggaactatcactttataagaatcattttctagtaatgcaaacaaattattttttacaaaaaaacaaaataaataaaattagacttccttccctcactatatatctttatgcagtcagaatatttccaacagtgttttttgcaaattagagcaggacaaacttttatgtttacagggcacgtctgttgtaatgcaaagcatatttggcaagcagttcatcaccaggacactagctatgattctagaagtcaaaaggtgtctatagaactagtggggcttctgcatgtgaaaaacggttttccataggcattaaagtgctgaatgctcagtctgatcaacaagtgggcacctgcactaccactttttagaggaaattcactccctcgtaagcattggaaggtcaaattattttgaagtgatttttttaaaaaaaagtcttctgtttattaacaggaaaatttatttatttgacaggattttgagtaatgtaggaatacaaaaggtaaattagcagcacatataatttttttttaatttatgatccattttgtatggtctcaaagttggatgacctcattactaatatttgttgtaaaagtgaaacttgtttgccaaccaataaacaactgattgagatttagaagatattgt

SEQ ID NO: 364683 - DNA, 691 bp, Homo sapiens
  misc_feature (131)..(131): n is a, c, g, or t
actctctccaaccaacccacttctgactctgagtcctctctgcctcctcccctcacccgctctcgggcccaatgtgctcagcaaccagctcccttgcttcctctccgggaagtagcgggagttgaggggancctcactatatatctttatgcagtcagaatatttccaacagtgttttttgcaaattagagcaggacaaacttttatgtttacagggcacgtctgttgtaatgcaaagcatatttggcaagcagttcatcaccaggacactagctatgattctagaagtcaaaaggtgtctatagaactagtggggcttctgcatgtgaaaaacggttttccataggcattaaagtgctgaatgctcagtctgatcaacaagtgggcacctgcactaccactttttagaggaaattcactccctcgtaagcattggaaggtcaaattattttgaagtgatttttttaaaaaaaagtcttctgtttattaacaggaaaatttatttatttgacaggattttgagtaatgtaggaatacaaaaggtaaattagcagcacatataatttttttttaatttatgatccattttgtatggtctcaaagttggatgacctcattactaatatttgttgtaaaagtgaaacttgtttgccaaccaataaacaactgattgagatttagaagatattgt

SEQ ID NO: 364684 - DNA, 1331 bp, Homo sapiens
gaaaaacacgagccgtgttgtatgtggaggccccggtgtctgggtgtaattctcgttccttctgtgaggtgaggcagatgaagccatttcgtggttctgctgagcatggtcttggcagtgtttttgggagcatcacactgtgccccttttgttaacttgctagcccggcctgtcttttgccccgggctcaatggctggattgtggaaactgcacccgccttcaggttgttgagcaactgatgggacgatctcagggaccggcgtttacgaaagaggggaagccaagatacaggagtggaaattacttggccacatcgcacaggtttcagatttgggatattggtgtttctgttttggagaaattattctttttctttttaatttgaagaaaaatcatcagtcttggaatacagaagagaaactagaaatatacgtattttgtttcacatttgaacagtcattcttgaggaatactccatacctgagtagacagccatgtggccatcgcagctactaattttcatgatgctcttagctccaataattcatgctttcagccgtgccccaattccaatggctgtggtccgcagagagctatcctgtgagagctatcctatagagcttcgctgtccaggaacagacgtcatcatgatagaaagtgccaactatggcaggactgatgacaaaatttgtgactctgaccctgctcagatggagaatatccgatgttatctgccagatgcctataagattatgtctcaaagatgcaataacagaacccagtgtgcagtggtggcaggtcctgatgtttttccagacccgtgtccaggaacctataaataccttgaagtgcagtatgaatgtgtcccttacagtatgtatattcctatacttttcttggcaagagaaaagatactaaactgtgttttgcatgcattgacaaatattctctatgaaaacataaatcacgtaaattaaatgaaaaaattggctaatattaatttttgagaatcatagaccctccctgccatcagaagaattagatattgcctaccctctcctacggcatttacttgtgattatttctgtatatgaatacgtgttctaacacacttttcttaattaatgcaagaatataaaacatttagaaaaaggttgggggagtgttataccaattctccaggtccaagcagataagaggtgaaaatgagcaatacaattttatatgtaatgtatagcagttgatacattttgaatttgatagaattgtatctaagcttcatctgctgtcaacattttgagaattagaaatatattcatccagaaggagt

SEQ ID NO: 364685 - DNA, 477 bp, Homo sapiens
agggcaggcacatcatggacaagtttcatacatttctccgccaattcaccttgactctgagctagaaagaccctctgttaaaggtgagtttttctttatatgaagaaaaagtaactctgctcattctttgatgaaagcaatgatggttgtacatatgtattttgtaatgcagtgcctgttcaaaaagcaggggtaaaatgaagtatgtgagtaatctggagataaagcaagtctcatttataaacaaaaatgtgaaatatttctctgagaaatgtttgtaaactaaaatacaatggcttcaataaatcagtatttatagtgattcaactagtggaggactagttgaataccaatttagatttagaaattaccagataaccgttaacttttttactgggaccttctttttctactatcttatttttttttttttacattaagatgtcttaatctaaatcatattgacagatttttttc

SEQ ID NO: 364686 - DNA, 282 bp, Homo sapiens
aatagaataagaattccagtattttgatttcagaaatactgcaatggtttaggaaattattgtagcttaggtatgtttctcaatgagcactgatatctctttgatattaacagaattggaagttgcaagactgagcacagaaggaaacttagaagacctaaaatttccagaaaacatgggccatggaagcactatccagctgtctgcaaataccttaaagcaaaatggccgaaatggtaggttagagtttattttttaagcttgagggaattgaacttgcat

SEQ ID NO: 364687 - DNA, 6520 bp, Homo sapiens
gaaaaacacgagccgtgttgtatgtggaggccccggtgtctgggtgtaattctcgttccttctgtgaggtgaggcagatgaagccatttcgtggttctgctgagcatggtcttggcagtgtttttgggagcatcacactgtgccccttttgttaacttgctagcccggcctgtcttttgccccgggctcaatggctggattgtggaaactgcacccgccttcaggttgttgagcaactgatgggacgatctcagggaccggcgtttacgaaagaaatgtttaatttggtaaattggaggaaaaaaacatggatttttagcaattgaagagcaaattaaggtttcagatttgggatattggtgtttctgttttggagaaattattctttttctttttaatttgaagaaaaatcatcagtcttggaatacagaagagaaactagaaatatacgtattttgtttcacatttgaacagtcattcttgaggaatactccatacctgagtagacagccatgtggccatcgcagctactaattttcatgatgctcttagctccaataattcatgctttcagccgtgccccaattccaatggctgtggtccgcagagagctatcctgtgagagctatcctatagagcttcgctgtccaggaacagacgtcatcatgatagaaagtgccaactatggcaggactgatgacaaaatttgtgactctgaccctgctcagatggagaatatccgatgttatctgccagatgcctataagattatgtctcaaagatgcaataacagaacccagtgtgcagtggtggcaggtcctgatgtttttccagacccgtgtccaggaacctataaataccttgaagtgcagtatgaatgtgtcccttacaaagtggaacaaaaagtttttctttgtcctggactactaaaaggagtataccagagtgaacatttgtttgagtccgaccaccaatctggggcgtggtgcaaagaccctctgcaggcatctgacaagatttattatatgccctggactccctacagaactgataccctgactgagtattcatccaaggatgacttcattgctggaagaccaactacaacctacaagctccctcatagggtggatggcacaggatttgtagtgtatgatggagctttgttcttcaacaaagagcgcaccaggaacatagtaaagtttgatttgcggactaggataaagagtggagaggctatcatagcaaatgccaattaccatgatacctccccttaccgatggggaggcaaatctgacatagacctggcagtagatgagaatgggctatgggtaatctatgcaacagaacaaaacaatggtaaaattgtcattagtcaattgaacccttacaccctacggatcgaaggaacatgggatactgcatatgataaaaggtcagcttccaatgcctttatgatttgtggaattctgtatgtggtcaaatctgtatatgaggatgatgacaatgaggctactggaaataagattgactacatttacaacactgaccaaagcaaggatagtttggtggatgtaccctttcctaattcataccagtacattgcagctgtggattacaaccccagggacaacctactttatgtatggaataactatcacgtcgtgaaatattctttggattttggacctctggatagtagatcagggcaggcacatcatggacaagtttcatacatttctccgccaattcaccttgactctgagctagaaagaccctctgttaaagatatctctaccacaggacctcttggcatgggaagcactaccaccagtaccacccttcggaccacaactttgagcccaggaaggagtaccaccccgtcagtgtcaggaagaagaaaccggagtactagtaccccatctccagctgtcgaggtacttgatgacatgaccacacaccttccatcagcatcgtcccaaatcccagctctcgaagagagctgtgaggctgtggaagcccgagaaatcatgtggtttaagactcgtcaaggacagatagcaaagcagccatgccctgcaggaactataggtgtatcaacttatctatgccttgctcctgatggaatttgggatccccaaggtccagatctcagcaactgttcttctccttgggtcaatcatataacacagaagttgaaatctggtgaaacagctgccaacattgctagagagctggctgaacagacaagaaatcacttgaatgctggggacatcacctactctgtccgggccatggaccagctggtaggcctcctagatgtacagcttcggaacttgaccccaggtggaaaagatagtgctgcccggagtttgaacaagcttcagaaaagagagcgctcttgcagagcctatgtccaggcaatggtcgagacagttaacaacctccttcagccacaagctttgaatgcatggagagacctgactacgagtgatcagctgcgtgcggccaccatgttgcttcatactgtggaggaaagtgcttttgtgctggctgataaccttttgaagactgacattgtcagggagaatacagacaatattaaattggaagttgcaagactgagcacagaaggaaacttagaagacctaaaatttccagaaaacatgggccatggaagcactatccagctgtctgcaaataccttaaagcaaaatggccgaaatggagagatcagagtggcctttgtcctgtataacaacttgggtccttatttatccacggagaatgccagtatgaagttgggaacggaagctttgtccacaaatcattctgttattgtcaattcccctgttattacggcagcaataaacaaagagttcagtaacaaggtttatttggctgatcctgtggtatttactgttaaacatatcaagcagtcagaggaaaatttcaaccctaactgttcattttggagctactccaagcgtacaatgacaggttattggtcaacacaaggctgtcggctcctgacaacaaataagacacatactacatgctcttgtaaccacctaacaaattttgcagtactgatggcacatgtggaagttaagcacagtgatgcggtccatgacctccttctggatgtgatcacgtgggttggaattttgctgtcccttgtttgtctcctgatttgcatcttcacattttgctttttccgcgggctccagagtgaccgtaacaccatccacaagaacctctgcatcagtctctttgtagcagagctgctcttcctgattgggatcaaccgaactgaccaaccaattgcctgtgctgttttcgctgccctgttacatttcttcttcttggctgccttcacctggatgttcctggagggggtgcagctttatatcatgctggtggaggtttttgagagtgaacattcacgtaggaaatacttttatctggtcggctatgggatgcctgcactcattgtggctgtgtcagctgcagtagactacaggagttatggaacagataaagtatgttggctccgacttgacacctacttcatttggagttttataggaccagcaactttgataattatgcttaatgtaatcttccttgggattgctttatataaaatgtttcatcatactgctatactgaaacctgaatcaggctgtcttgataacatcaactatgaggataacagacccttcatcaagtcatgggttataggtgcaatagctcttctctgcctattaggattgacctgggcctttggactcatgtatattaatgaaagcacagtcatcatggcctatctcttcaccattttcaattctctacagggaatgtttatatttattttccattgtgtcctacagaagaaggtacgaaaagagtatgggaaatgcctgcgaacacattgctgtagtggcaaaagtacagagagttccattggttcagggaaaacatctggttctcgaactcctggacgctactccacaggctcacagagccgaatccgtagaatgtggaatgacacggttcgaaagcagtcagagtcttcctttattactggagacataaacagttcagcgtcactcaacagagagccctacagagagacaagtatgggagtaaagctaaacattgcatatcaaataggggcttctgaacaatgccagggatacaagtgtcatggatactctaccactgaatggtaaccatggcaatagttacagcattgccagcggcgaattacctgagcaactgtgtgcaaatcatagaccgtggctataaccataacgagaccgccctagagaaaaagattctgaaggaactcacttccaactatatcccttcttacctgaacaaccatgagcgctccagtgaacagaacaggaatctgatgaacaagctggtgaataaccttggcagtggaagggaagatgatgccattgtcctggatgatgccacctcgtttaaccacgaggagagtttgggcctggaactcattcatgaggaatctgatgctcctttgctgcccccaagagtatactccaccgagaaccaccagccacaccattataccagaaggcggatcccccaagaccacagtgagagctttttccctttgctaaccaacgagcacacagaagatctccagtcaccccatagagactctctctataccagcatgccgacactggctggtgtggccgccacagagagtgttaccaccagcacccagaccgaacccccaccggccaaatgtggtgatgccgaagatgtttactacaaaagcatgccaaacctaggctccagaaaccacgtccatcagctgcatacttactaccagctaggtcgcggcagcagtgatggatttatagttcctccaaacaaagatgggacccctcccgagggaagttcaaaaggaccggctcatttggtcactagtctatagaagatgacacagaaattggaaccaacaaaactgctaacaccttgttgactgttctgagttgatataagcagtggtaataatgtgtgtactcctaaatctttatgctgtcctctaaagacaaacacaaactctcagacttttttttttttaatgggatttttaggtcagcccaggggagaaagataactgctaaaattcccctgtaccccatcctttcttgtcctttccccttcagatggagacttcattatgttaatgaacaagatatgaagaaaatggcactcattgtggccttgttgaattatgttgtgtatgttttaacatctctgatgctgtgttactaaaattacaaggacctgctttttaaaaggcccagaacaattgtcctgaaattagtaacaatgcctgcatcctagattggagtgctgcacaaacaaacataagagcaaagcaaaactgtatcacatagggtttttggtcactcacaacctgaattcaccacagctggaatagctgtggaaaacaaaataaaacaacaaaattaataatgaaatggaggggaattctagaattatatgctaaatgcatattttatgatttgctgtattaactgatgataaaactaatggcagaaaaagaagttgagcaatttctatgtaatgtacagatactagcattgcacatatagtctgctttctgttcctccagaatttgagtcctgttaatgtagtagaaaaaaaaaaaagaaattttctttttcttttgtgctggtcttgcaagtttgtctaccagtaagagagcaaagtttccttcctttcttctctttcttcattttctttttttcttttttgccttttattcctttaaaatttcgcctggcaaaaaataaataaatggaactatcactttataagaatcattttctagtaatgcaaacaaattattttttacaaaaaaacaaaataaataaaattagacttccttccctcactatatatctttatgcagtcagaatatttccaacagtgttttttgcaaattagagcaggacaaacttttatgtttacagggcacgtctgttgtaatgcaaagcatatttggcaagcagttcatcaccaggacactagctatgattctagaagtcaaaaggtgtctatagaactagtggggcttctgcatgtgaaaaacggttttccataggcattaaagtgctgaatgctcagtctgatcaacaagtgggcacctgcactaccactttttagaggaaattcactccctcgtaagcattggaaggtcaaattattttgaagtgatttttttaaaaaaaagtcttctgtttattaacaggaaaatttatttatttgacaggattttgagtaatgtaggaatacaaaaggtaaattagcagcacatataatttttttttaatttatgatccattttgtatggtctcaaagttggatgacctcattactaatatttgttgtaaaagtgaaacttgtttgccaaccaataaacaactgattgagatttagaagatattgt

SEQ ID NO: 364688 - DNA, 2554 bp, Homo sapiens
catttatatggtttcaatcactggtccaattatacacatatatagatttaatagtattttctgtttccttccaaacattttatacttaagtaaatgctagcaatttatacatatttcatagtcaatgaatgtttttgcttctgtgtttgtgtgtgtgttctatggcttgttggatataaatgtcatagtatcttgtaatctttttcagaggggcttctgaacaatgccagggatacaagtgtcatggatactctaccactgaatggtaaccatggcaatagttacagcattgccagcggcgaattacctgagcaactgtgtgcaaatcatagaccgtggctataaccataacgagaccgccctagagaaaaagattctgaaggaactcacttccaactatatcccttcttacctgaacaaccatgagcgctccagtgaacagaacaggaatctgatgaacaagctggtgaataaccttggcagtggaagggaagatgatgccattgtcctggatgatgccacctcgtttaaccacgaggagagtttgggcctggaactcattcatgaggaatctgatgctcctttgctgcccccaagagtatactccaccgagaaccaccagccacaccattataccagaaggcggatcccccaagaccacagtgagagctttttccctttgctaaccaacgagcacacagaagatctccagtcaccccatagagactctctctataccagcatgccgacactggctggtgtggccgccacagagagtgttaccaccagcacccagaccgaacccccaccggccaaatgtggtgatgccgaagatgtttactacaaaagcatgccaaacctaggctccagaaaccacgtccatcagctgcatacttactaccagctaggtcgcggcagcagtgatggatttatagttcctccaaacaaagatgggacccctcccgagggaagttcaaaaggaccggctcatttggtcactagtctatagaagatgacacagaaattggaaccaacaaaactgctaacaccttgttgactgttctgagttgatataagcagtggtaataatgtgtgtactcctaaatctttatgctgtcctctaaagacaaacacaaactctcagacttttttttttttaatgggatttttaggtcagcccaggggagaaagataactgctaaaattcccctgtaccccatcctttcttgtcctttccccttcagatggagacttcattatgttaatgaacaagatatgaagaaaatggcactcattgtggccttgttgaattatgttgtgtatgttttaacatctctgatgctgtgttactaaaattacaaggacctgctttttaaaaggcccagaacaattgtcctgaaattagtaacaatgcctgcatcctagattggagtgctgcacaaacaaacataagagcaaagcaaaactgtatcacatagggtttttggtcactcacaacctgaattcaccacagctggaatagctgtggaaaacaaaataaaacaacaaaattaataatgaaatggaggggaattctagaattatatgctaaatgcatattttatgatttgctgtattaactgatgataaaactaatggcagaaaaagaagttgagcaatttctatgtaatgtacagatactagcattgcacatatagtctgctttctgttcctccagaatttgagtcctgttaatgtagtagaaaaaaaaaaaagaaattttctttttcttttgtgctggtcttgcaagtttgtctaccagtaagagagcaaagtttccttcctttcttctctttcttcattttctttttttcttttttgccttttattcctttaaaatttcgcctggcaaaaaataaataaatggaactatcactttataagaatcattttctagtaatgcaaacaaattattttttacaaaaaaacaaaataaataaaattagacttccttccctcactatatatctttatgcagtcagaatatttccaacagtgttttttgcaaattagagcaggacaaacttttatgtttacagggcacgtctgttgtaatgcaaagcatatttggcaagcagttcatcaccaggacactagctatgattctagaagtcaaaaggtgtctatagaactagtggggcttctgcatgtgaaaaacggttttccataggcattaaagtgctgaatgctcagtctgatcaacaagtgggcacctgcactaccactttttagaggaaattcactccctcgtaagcattggaaggtcaaattattttgaagtgatttttttaaaaaaaagtcttctgtttattaacaggaaaatttatttatttgacaggattttgagtaatgtaggaatacaaaaggtaaattagcagcacatataatttttttttaatttatgatccattttgtatggtctcaaagttggatgacctcattactaatatttgttgtaaaagtgaaacttgtttgccaaccaataaacaactgattgagatttagaagatattgt

SEQ ID NO: 364689 - DNA, 3270 bp, Homo sapiens
gaaaaacacgagccgtgttgtatgtggaggccccggtgtctgggtgtaattctcgttccttctgtgaggtgaggcagatgaagccatttcgtggttctgctgagcatggtcttggcagtgtttttgggagcatcacactgtgccccttttgttaacttgctagcccggcctgtcttttgccccgggctcaatggctggattgtggaaactgcacccgccttcaggttgttgagcaactgatgggacgatctcagggaccggcgtttacgaaagaggggaagccaagatacaggagtggaaattacttggccacatcgcacaggtttcagatttgggatattggtgtttctgttttggagaaattattctttttctttttaatttgaagaaaaatcatcagtcttggaatacagaagagaaactagaaatatacgtattttgtttcacatttgaacagtcattcttgaggaatactccatacctgagtagacagccatgtggccatcgcagctactaattttcatgatgctcttagctccaataattcatgctttcagccgtgccccaattccaatggctgtggtccgcagagagctatcctgtgagagctatcctatagagcttcgctgtccaggaacagacgtcatcatgatagaaagtgccaactatggcaggactgatgacaaaatttgtgactctgaccctgctcagatggagaatatccgatgttatctgccagatgcctataagattatgtctcaaagatgcaataacagaacccagtgtgcagtggtggcaggtcctgatgtttttccagacccgtgtccaggaacctataaataccttgaagtgcagtatgaatgtgtcccttacaaagtggaacaaaaagtttttctttgtcctggactactaaaaggagtataccagagtgaacatttgtttgagtccgaccaccaatctggggcgtggtgcaaagaccctctgcaggcatctgacaagatttattatatgccctggactccctacagaactgataccctgactgagtattcatccaaggatgacttcattgctggaagaccaactacaacctacaagctccctcatagggtggatggcacaggatttgtagtgtatgatggagctttgttcttcaacaaagagcgcaccaggaacatagtaaagtttgatttgcggactaggataaagagtggagaggctatcatagcaaatgccaattaccatgatacctccccttaccgatggggaggcaaatctgacatagacctggcagtagatgagaatgggctatgggtaatctatgcaacagaacaaaacaatggtaaaattgtcattagtcaattgaacccttacaccctacggatcgaaggaacatgggatactgcatatgataaaaggtcagcttccaatgcctttatgatttgtggaattctgtatgtggtcaaatctgtatatgaggatgatgacaatgaggctactggaaataagattgactacatttacaacactgaccaaagcaaggatagtttggtggatgtaccctttcctaattcataccagtacattgcagctgtggattacaaccccagggacaacctactttatgtatggaataactatcacgtcgtgaaatattctttggattttggacctctggatagtagatcagggcaggcacatcatggacaagtttcatacatttctccgccaattcaccttgactctgagctagaaagaccctctgttaaagatatctctaccacaggacctcttggcatgggaagcactaccaccagtaccacccttcggaccacaactttgagcccaggaaggagtaccaccccgtcagtgtcaggaagaagaaaccggagtactagtaccccatctccagctgtcgaggtacttgatgacatgaccacacaccttccatcagcatcgtcccaaatcccagctctcgaagagagctgtgaggctgtggaagcccgagaaatcatgtggtttaagactcgtcaaggacagatagcaaagcagccatgccctgcaggaactataggtgtatcaacttatctatgccttgctcctgatggaatttgggatccccaaggtccagatctcagcaactgttcttctccttgggtcaatcatataacacagaagttgaaatctggtgaaacagctgccaacattgctagagagctggctgaacagacaagaaatcacttgaatgctggggacatcacctactctgtccgggccatggaccagctggtaggcctcctagatgtacagcttcggaacttgaccccaggtggaaaagatagtgctgcccggagtttgaacaaggcaatggtcgagacagttaacaacctccttcagccacaagctttgaatgcatggagagacctgactacgagtgatcagctgcgtgcggccaccatgttgcttcatactgtggaggaaagtgcttttgtgtggtcttgcaagtttgtctaccagtaagagagcaaagtttccttcctttcttctctttcttcattttctttttttcttttttgccttttattcctttaaaatttcgcctggcaaaaaataaataaatggaactatcactttataagaatcattttctagtaatgcaaacaaattattttttacaaaaaaacaaaataaataaaattagacttccttccctcactatatatctttatgcagtcagaatatttccaacagtgttttttgcaaattagagcaggacaaacttttatgtttacagggcacgtctgttgtaatgcaaagcatatttggcaagcagttcatcaccaggacactagctatgattctagaagtcaaaaggtgtctatagaactagtggggcttctgcatgtgaaaaacggttttccataggcattaaagtgctgaatgctcagtctgatcaacaagtgggcacctgcactaccactttttagaggaaattcactccctcgtaagcattggaaggtcaaattattttgaagtgatttttttaaaaaaaagtcttctgtttattaacaggaaaatttatttatttgacaggattttgagtaatgtaggaatacaaaaggtaaattagcagcacatataatttttttttaatttatgatccattttgtatggtctcaaagttggatgacctcattactaatatttgttgtaaaagtgaaacttgtttgccaaccaataaacaactgattgagatttagaagatattgt

SEQ ID NO: 364690 - DNA, 376 bp, Homo sapiens
aataaaaatccttctgaatcctatatacctatctgcctgcagcatcctcccttctctgtctctgtctccattgcctcaaatcagtccaatctaacttctacctcaatgaaaccaacaacaacaaaaaaggtactcgtgatctccaccttcttatccctaatggacattttatttgctctctaggcaacactcagcaaaattgaccacatcgtccttaaactacagtggtcccagctcacgtgagacttcactttcgatggtttcagttacctgtgatacagtaaaataagctattggggtcgaaggtaggggacagattcccataacttttattacagtgtaattgttctgttttatttattttttgagatggagt

SEQ ID NO: 364691 - DNA, 1272 bp, Homo sapiens
  misc_feature (171)..(172): n is a, c, g, or t
cgcccgcgctgcgccgcgctgcgccgcgctactgctgcgggggccgctggggggcgcagctggggcgcggctcggaggggaggctagggggccgtgccaggcccgaagccgaggcggggccgggatgcggcgctgaggcccagcatggcctggccgggccccaccttcccnnctgcaccggctcgtctgggcgaaccggcatcgcgaactggaggccgcactgcacagccaccagcacgacattgaacaggaggacccccgcgggcggaccccactggagctggccgtgtctctgggaaacctggagtctgtgagagtgctccttcgacacaatgccaacgtgggcaaagagaaccgccagggctgggcagcgcagtcctgcaggaggcagtcagcactggagaccccgagatggtgcagctggtgctccagtatcgggactaccagagggccacgcagaggctggcgggcattccggaactgctcaacaaacttcgccaggcccagggtcacgtaggaaagagagacggccaggctcacgtgggagagactggaccctttggaagagaagccttgccagctttgggcctcctgaagaatgcagattacctggagcagggacttcaggttgactcggtggattatggcctgaaaccctggaatacttgctactacgcacccttctggaagcacacggaggggcctggctggcagagcatactatctcataccccctaccccaggagcaggctcggagggagccactgtgccccctttacagagtaggactctgagacccagtggaaacaaaggctcccccagggctctgcacaggctcatggccaggttgaggctggccctccacctccaggtgcttacagcctcattgtctgaagaccactgtagtgccccacttggcccaccctctccagggcagagtggttgggcgtagctgagccatagcagtgcgtcaagacttgatgaagggccaggcgttgtggcttactcctgtaatcccagcgctttctgaggccaaagtgggcggatcacttgagcccaggaggtggagaccagcctgggcaacatggtgaaagccgtctctacaaaaagtacaaaaattagctgggagtggtggcacacacctgtggtcccagctactcgggaggctgaggtggaagaatcacctgagcccagggaggcagaggttgcagtgagccgagattgcaccactacactccagcctgggtgacagagcaagtctcaaaaaaaaaa

SEQ ID NO: 364692 - DNA, 1416 bp, Homo sapiens
  misc_feature (171)..(172): n is a, c, g, or t
cgcccgcgctgcgccgcgctgcgccgcgctactgctgcgggggccgctggggggcgcagctggggcgcggctcggaggggaggctagggggccgtgccaggcccgaagccgaggcggggccgggatgcggcgctgaggcccagcatggcctggccgggccccaccttcccnnctgcaccggctcgtctgggcgaaccggcatcgcgaactggaggccgcactgcacagccaccagcacgacattgaacaggaggacccccgcgggcggaccccactggagctggccgtgtctctgggaaacctggagtctgtgagagtgctccttcgacacaatgccaacgtgggcaaagagaaccgccagggctgggcagcgcagtcctgcaggaggcagtcagcactggagaccccgagatggtgcagctggtgctccagtatcgggactaccagagggccacgcagaggctggcgggcattccggaactgctcaacaaacttcgccaggtacagcagggcacagttatggaggtggggtaccatggcagggcaccaccctggttactgtgccaggcctggccttggaaaggcacccagtttgtgcagtgtgcctcctgccaccagcaaggaggtctgtctatcttgaccccagcccagggtcacgtaggaaagagagacggccaggctcacgtgggagagactggaccctttggaagagaagccttgccagctttgggcctcctgaagaatgcagattacctggagcagggacttcaggttgactcggtggattatggcctgaaaccctggaatacttgctactacgcacccttctggaagcacacggaggggcctggctggcagagcatactatctcataccccctaccccaggagcaggctcggagggagccactgtgccccctttacagagtaggactctgagacccagtggaaacaaaggctcccccagggctctgcacaggctcatggccaggttgaggctggccctccacctccaggtgcttacagcctcattgtctgaagaccactgtagtgccccacttggcccaccctctccagggcagagtggttgggcgtagctgagccatagcagtgcgtcaagacttgatgaagggccaggcgttgtggcttactcctgtaatcccagcgctttctgaggccaaagtgggcggatcacttgagcccaggaggtggagaccagcctgggcaacatggtgaaagccgtctctacaaaaagtacaaaaattagctgggagtggtggcacacacctgtggtcccagctactcgggaggctgaggtggaagaatcacctgagcccagggaggcagaggttgcagtgagccgagattgcaccactacactccagcctgggtgacagagcaagtctcaaaaaaaaaa

SEQ ID NO: 364693 - DNA, 699 bp, Homo sapiens
  misc_feature (171)..(172): n is a, c, g, or t
cgcccgcgctgcgccgcgctgcgccgcgctactgctgcgggggccgctggggggcgcagctggggcgcggctcggaggggaggctagggggccgtgccaggcccgaagccgaggcggggccgggatgcggcgctgaggcccagcatggcctggccgggccccaccttcccnnctgcaccggctcgtctgggcgaaccggcatcgcgaactggaggccgcactgcacagccaccagcacgacattgaacaggaggacccccgcgggcggaccccactggagctggccgtgtctctgggaaacctggagtctgtgagagtgctccttcgacacaatgccaacgtgggcaaagagaaccgccagggctgggcagcgcagtcctgcaggaggcagtcagcactggagaccccgagatggtgcagctggtgctccagtatcgggactaccagagggccacgcagaggctggcgggcattccggaactgctcaacaaacttcgccaggcccccgatttctacgttgagatgaagtgggagttcaccagctgggtgccccttgtgtctaagatgtgcccaagcgatgtgtaccgcgtgtggaagcggggtgagagcctgcgagtagacaccagtctcctgggcttcgagcacatgacctggcagcggggccggaggagcttcatcttcaagggccagggtgagctc

SEQ ID NO: 364694 - DNA, 534 bp, Homo sapiens
gagtggagcgatttagaagtaccaaattaagaccatgtaatccatgggaccaattgagagtcagctacttttataggcatcaaagtattctcagacacctttaatatctttatggaaacttaatttttggccttttatcaatatgtcataacagcattctgaagtcagacattgttaaattgagctattaaactaatgagttttatgtaagttatatggtcttaatttggtacttgtaaatagcactagttagactctttagaatactccaagagttagggcagcagagtggagcgatttagaaagaacattttaaaacaatcagttaatttaccatgtaaaattgctgtaaatgataatgtgtacagattttctgttcaaatattcaattgtaaacttcttgttaagactgttacgtttctattgcttttgtatgggatattgcaaaaataaaaaggaaagaaccctctaaaaaaaaaaaaaaaaaaaaaaaaaaaaaaaaaaaacaaaaaaaaaaaaaaaaaaaaaaacaag

SEQ ID NO: 364695 - DNA, 511 bp, Homo sapiens
acgaactttagctcggtacccccttccctttctcacgatacatggtgatcttaattgcggggcttattctgttaatctgttgttttttcagttctgattcaaaggagtctatgtctactgtgccggctgactttgagacagatgaaagtgtcctaatgaggagacagaagcagatcaactatgggaagaacacaattgcctacgatcgttatattaaagaagtcccaaggtagtcttgtttcagtggcatgtcttgaacaagctgtgtggcattgcgcttctaaagagttgcttagattgggtagtacaaatgatgctggggatagttcacacctgctaagagctatttaatagggacttactggggcttatgacgtaaataaagaatggattggcaactggaaaactaaagacatgaagattttaaaaatcattttcatataattttaaatgttagataacattttatttcttaggagtcagcaatcatagatgtaagcttattaaaata

SEQ ID NO: 364696 - DNA, 1786 bp, Homo sapiens
agcgggagctcgtgagcgccggcgcggggacgcgggtttctgcctcaggccctgccctgctctactctgcgctctctgcccgcgccgccgccgcctcagcctcggccctgcgctgcgcgcccggcccgtgctgccatggcctgccgcccgcgaagcccgccgaggcatcagagccgctgcgacggtgacgccagcccgccgtcccccgcgcgatggagcctgggacggaagcgcagagccgacggcaggcgctggaggcccgaagacgccgaggaggcagagcaccgcggcgccgagcgcagacccgagagctttaccactcctgaaggccctaaaccccgttccagatgctctgactgggcaagtgcagttgaagaagatgaaatgaggaccagagttaacaaagaaatggcaagatataaaaggaaactcctcatcaatgactttggaagagagagaaaatcatcatcaggaagttctgattcaaaggagtctatgtctactgtgccggctgactttgagacagatgaaagtgtcctaatgaggagacagaagcagatcaactatgggaagaacacaattgcctacgatcgttatattaaagaagtcccaagacaccttcgacaacctggcattcatcccaagacccctaataaatttaagaagtatagtcgacgttcatgggaccagcaaatcaaactctggaaggtggctctgcatttttgggatcctccagcggaagaaggatgtgatttgcaagaaatacaccctgtagaccttgaatctgcagaaagcagctccgagccccagaccagctctcaggatgactttgatgtgtactctggcacacccaccaaggtgagacacatggacagtcaagtggaggatgagtttgatttggaagcttgtttaactgaacccttgagagacttctcagccatgagctaactgccccctggcggccaggaagagaaacagctcctccccgactaggtggaaggctggccaggcaccaagcatgtgtgtgcacttgtacctggtggtttctctgttagcagtccattagctcatgctgaattatttttgccttactttcttaagaaacattaattttatgtatagtgagtatattttgcatgttttaaattgtaaatggagctaagtccaagaaagtacttgaagctctcttccagcgagcttaattgcgtaatccctgttgtcctccagggtaagctgacacgtctacataactggttttccacaggcatcttcagttattgcttgtcaggtggactgttttggatttaaccatgtaatccatgggaccaattgagagtcagctacttttataggcatcaaagtattctcagacacctttaatatctttatggaaacttaatttttggccttttatcaatatgtcataacagcattctgaagtcagacattgttaaattgagctattaaactaatgagttttatgtaagttatatggtcttaatttggtacttgtaaatagcactagttagactctttagaatactccaagagttagggcagcagagtggagcgatttagaaagaacattttaaaacaatcagttaatttaccatgtaaaattgctgtaaatgataatgtgtacagattttctgttcaaatattcaattgtaaacttcttgttaagactgttacgtttctattgcttttgtatgggatattgcaaaaataaaaaggaaagaaccctctaaaaaaaaaaaacaaaaaaaaaaaaaaaaaaaaaaacaag

SEQ ID NO: 364697 - DNA, 1641 bp, Homo sapiens
agcgggagctcgtgagcgccggcgcggggacgcgggtttctgcctcaggccctgccctgctctactctgcgctctctgcccgcgccgccgccgcctcagcctcggccctgcgctgcgcgcccggcccgtgctgccatggcctgccgcccgcgaagcccgccgaggcatcagagccgctgcgacggtgacgccagcccgccgtcccccgcgcgatggagcctgggacggaagcgcagagccgacggcaggcgctggaggcccgaagacgccgaggaggcagagcaccgcggcgccgagcgcagacccgagagatataaaaggaaactcctcatcaatgactttggaagagagagaaaatcatcatcaggaagttctgattcaaaggagtctatgtctactgtgccggctgactttgagacagatgaaagtgtcctaatgaggagacagaagcagatcaactatgggaagaacacaattgcctacgatcgttatattaaagaagtcccaagacaccttcgacaacctggcattcatcccaagacccctaataaatttaagaagtatagtcgacgttcatgggaccagcaaatcaaactctggaaggtggctctgcatttttgggatcctccagcggaagaaggatgtgatttgcaagaaatacaccctgtagaccttgaatctgcagaaagcagctccgagccccagaccagctctcaggatgactttgatgtgtactctggcacacccaccaaggtgagacacatggacagtcaagtggaggatgagtttgatttggaagcttgtttaactgaacccttgagagacttctcagccatgagctaactgccccctggcggccaggaagagaaacagctcctccccgactaggtggaaggctggccaggcaccaagcatgtgtgtgcacttgtacctggtggtttctctgttagcagtccattagctcatgctgaattatttttgccttactttcttaagaaacattaattttatgtatagtgagtatattttgcatgttttaaattgtaaatggagctaagtccaagaaagtacttgaagctctcttccagcgagcttaattgcgtaatccctgttgtcctccagggtaagctgacacgtctacataactggttttccacaggcatcttcagttattgcttgtcaggtggactgttttggatttaaccatgtaatccatgggaccaattgagagtcagctacttttataggcatcaaagtattctcagacacctttaatatctttatggaaacttaatttttggccttttatcaatatgtcataacagcattctgaagtcagacattgttaaattgagctattaaactaatgagttttatgtaagttatatggtcttaatttggtacttgtaaatagcactagttagactctttagaatactccaagagttagggcagcagagtggagcgatttagaaagaacattttaaaacaatcagttaatttaccatgtaaaattgctgtaaatgataatgtgtacagattttctgttcaaatattcaattgtaaacttcttgttaagactgttacgtttctattgcttttgtatgggatattgcaaaaataaaaaggaaagaaccctct

SEQ ID NO: 364698 - DNA, 1354 bp, Homo sapiens
agcgggagctcgtgagcgccggcgcggggacgcgggtttctgcctcaggccctgccctgctctactctgcgctctctgcccgcgccgccgccgcctcagcctcggccctgcgctgcgcgcccggcccgtgctgccatggcctgccgcccgcgaagcccgccgaggcatcagagccgctgcgacggtgacgccagcccgccgtcccccgcgcgatggagcctgggacggaagcgcagagccgacggcaggcgctggaggcccgaagacgccgaggaggcagagcaccgcggcgccgagcgcagacccgagagctttaccactcctgaaggccctaaaccccgttccagatgctctgactgggcaagtgcagttgaagaagatgaaatgaggaccagagttaacaaagaaatggcaagatataaaaggaaactcctcatcaatgactttggaagagagagaaaatcatcatcaggaagttctgattcaaaggagtctatgtctactgtgccggctgactttgagacagatgaaagtgtcctaatgaggagacagaagcagatcaactatgggaagaacacaattgcctacgatcgttatattaaagaagtcccaagacaccttcgacaacctggcattcatcccaagacccctaataaatttaagaagtatagtcgacgttcatgggaccagcaaatcaaactctggaaggtggctctgcatttttgggatcctccagcggaagaaggatgtgatttgcaagaaatgtatgtctttattgcattcttgtcctgtgattctctgattggtccagtgactggagcagctgcgcaccactgggacaggaggtctggtgccaagtcccccagcagctgttggggagcagagcagctgctgcagctcggtgctgagttcttctgtactgggagggaggcagctggaaggaagagtttgcttcctggattgaatttattttttcaagcaaagtcaatctgggaatacagtttttgtttgttgttttgctgtttttgttgttgtagttgtttttcccctaaaaattacaataatctctggaatttgttttttaaatataaatatcctaaaaagtatttgagtcatttcggctcaaccatgaaaataaaagttcttaattaaggaaggaaggctttctttctctgttggctttttttttttgggagatgctctgtcaccgaggctggagtgcagtggcgtgatcccggctcactgcaaccttcaccttgtgggagaatagcttgaacccaggaggtggaggttgcagtgagctgagatggcgccattgcactccagcctgggcaacagagcaagactctgtctc

SEQ ID NO: 364699 - DNA, 502 bp, Homo sapiens
actgcgttctggtaatgactgcaatagaaagcagatgcctcaggaagttcatgaggaacaagagaaaagggggcacgtttggtctccaggattggagaaggtatgcagtgcccagtaggcatatgagtcccattagtaagtttggtgtttttaaaataatttatttcaatttatgttttgtttttctttttttaaggctgccaagttttagggaatgtaaatttttgttgtgtggatctcactacttaaactgaacctgacaaagatttcttttggcccacggagcttctggattgcataggatggtgtgcctgcgggcatcagggtggagcttcctcagacctggctgctttatttttatatcttttttaaaaacagcaatatttattttgccctcagatataaaaggaaactcctcatcaatgactttggaagagagagaaaatcatcatcaggaaggtaaaggctgtgtaaatgtttcttttctaatttgatagacctg

SEQ ID NO: 364700 - DNA, 1746 bp, Homo sapiens
agcgggagctcgtgagcgccggcgcggggacgcgggtttctgcctcaggccctgccctgctctactctgcgctctctgcccgcgccgccgccgcctcagcctcggccctgcgctgcgcgcccggcccgtgctgccatggcctgccgcccgcgaagcccgccgaggcatcagagccgctgcgacggtgacgccagcccgccgtcccccgcgcgatggagcctgggacggaagcgcagagccgacggcaggcgctggaggcccgaagacgccgaggaggcagagcaccgcggcgccgagcgcagacccgagagctttaccactcctgaaggccctaaaccccgttccagatgctctgactgggcaagtgcagttgaagaagatgaaatgaggaccagagttaacaaagaaatggcaagatataaaaggaaactcctcatcaatgactttggaagagagagaaaatcatcatcaggaagttctgattcaaaggagtctatgtctactgtgccggctgactttgagacagatgaaagtgtcctaatgaggagacagaagcagatcaactatgggaagaacacaattgcctacgatcgttatattaaagaagtcccaagacaccttcgacaacctggcattcatcccaagacccctaataaatttaagaagtatagtcgacgttcatgggaccagcaaatcaaactctggaaggtggctctgcatttttgggatcctccagcggaagaaggatgtgatttgcaagaaatacaccctgtagaccttgaatctgcagaaagcagctccgagccccagaccagctctcaggatgactttgatgtgtactctggcacacccaccaaggtgagacacatggacagtcaagtggaggatgagtttgatttggaagcttgtttaactgaacccttgagagacttctcagccatgagctaactgccccctggcggccaggaagagaaacagctcctccccgactaggtggaaggctggccaggcaccaagcatgtgtgtgcacttgtacctggtggtttctctgttagcagtccattagctcatgctgaattatttttgccttactttcttaagaaacattaattttatgtatagtgagtatattttgcatgttttaaattgtaaatggagctaagtccaagaaagtacttgaagctctcttccagcgagcttaattgcgtaatccctgttgtcctccagggtaagctgacacgtctacataactggttttccacaggcatcttcagttattgcttgtcaggtggactgttttggatttaaccatgtaatccatgggaccaattgagagtcagctacttttataggcatcaaagtattctcagacacctttaatatctttatggaaacttaatttttggccttttatcaatatgtcataacagcattctgaagtcagacattgttaaattgagctattaaactaatgagttttatgtaagttatatggtcttaatttggtacttgtaaatagcactagttagactctttagaatactccaagagttagggcagcagagtggagcgatttagaaagaacattttaaaacaatcagttaatttaccatgtaaaattgctgtaaatgataatgtgtacagattttctgttcaaatattcaattgtaaacttcttgttaagactgttacgtttctattgcttttgtatgggatattgcaaaaataaaaaggaaagaaccctct

SEQ ID NO: 364701 - DNA, 1032 bp, Homo sapiens
tgaagaccaggtccctgtggacgaagttgttgcacacgccgagacacctgtctccgcgagatatctcaatggacgaagttgttgccgagacaccataccagctctcaggatgactttgatgtgtactctggcacacccaccaaggtgagacacatggacagtcaagtggaggatgagtttgatttggaagcttgtttaactgaacccttgagagacttctcagccatgagctaactgccccctggcggccaggaagagaaacagctcctccccgactaggtggaaggctggccaggcaccaagcatgtgtgtgcacttgtacctggtggtttctctgttagcagtccattagctcatgctgaattatttttgccttactttcttaagaaacattaattttatgtatagtgagtatattttgcatgttttaaattgtaaatggagctaagtccaagaaagtacttgaagctctcttccagcgagcttaattgcgtaatccctgttgtcctccagggtaagctgacacgtctacataactggttttccacaggcatcttcagttattgcttgtcaggtggactgttttggatttaaccatgtaatccatgggaccaattgagagtcagctacttttataggcatcaaagtattctcagacacctttaatatctttatggaaacttaatttttggccttttatcaatatgtcataacagcattctgaagtcagacattgttaaattgagctattaaactaatgagttttatgtaagttatatggtcttaatttggtacttgtaaatagcactagttagactctttagaatactccaagagttagggcagcagagtggagcgatttagaaagaacattttaaaacaatcagttaatttaccatgtaaaattgctgtaaatgataatgtgtacagattttctgttcaaatattcaattgtaaacttcttgttaagactgttacgtttctattgcttttgtatgggatattgcaaaaataaaaaggaaagaaccctct

SEQ ID NO: 364702 - DNA, 1556 bp, Homo sapiens
tttcctgtgttgtggattcttcctcaagaaatgtttgcttagtccactgtccaagagagttttccccaaagttttcttgtagtagtttcatagctttaggtcttagatttaagtgtttaatccattttcgtttgatttttgtatatggggggagataggactctagtttcattcttctacatgtgggtatccttttttcccagcacaatttattgaagagactgttctttccctaaggtatgttttttgcacttttgtcaaaaatgagttctctgtagatgtatggatttgcttctgggtttctctgttctgttccattggtctatgtgtctgtttttatgccagtatttgatcattacttttatgaaatctactttttgagtagtaattactattctttatgcttttcctctaaaaatgtttttcaggaaaatatctattcattgctttaagcaatctaaagttatagaataaataatcgtaactgctgttttatctgcctgtaacatagagagcacagtgctaagcattctccttcatagttattatccattacattagcattaatgactatgtatcactatccctcatttaaaaattatgtaaaaagagaaatacacctttaagtaaaggacatataagaatgttaggttttggttgtcatacattatttcttacctatgcttggtttttgtttgcttgtctgttgtttatcattctgtttgattctgagtatttccttctgtggttctgaagcactgttcacatctccaacataatgtgcagcatttcttcaaacaatctagagagtagcactggaatttaaactagacatacatgtaaaaaaaaatcattattagaaagaatgttttaaaataaactagataaattttaaataattataagcagttgattcaggagtaaagaggaaaaaaataacttaacgacttaaaataagcctttaaaaaataacttaaagacttaaaaataacttaaacttaagctccaataactcttggagctattgacaactatgaatttgtaatgaacttttctacccactcaggagactaggatagtttctaaaagccatttgggttctcttgcctattaggttggtgcaaaaataattgcagtttttgccattacttttagtagcaaaaaagaatgttatccttcaagcctagaagtaactctattatatcccgttttctttataattgcttttaatggcaaaaactacaattacttttgcacaaacctaatagtttagttatgtctcttataacaatattttaaaatattctttaatcttaggggtaagtaatttaagaaaaactgaacccaccctgtaaaattgactatggtatttctggtaaaactacattatgggattgctattaagatatgattctggccagacgctgtggctcatgcctgttataccagcattttgggaggctgaggcgggtggatcgcctgaggtcaggagctctagaccagcctgaccaacatggtgaaaccccgtctctactaaaaatagaaaaaaaaaaaaa

SEQ ID NO: 364703 - DNA, 2799 bp, Homo sapiens
  misc_feature (1)..(1): n is a, c, g, or t
  misc_feature (4)..(4): n is a, c, g, or t
  misc_feature (6)..(6): n is a, c, g, or t
ngcngngcccagtccagcgcccgccgcccgccaccccggaccccggtgtctggcttcccccgagccgggaccccgcgatggccaagcgcagctcgctgtacatccgcatcgtggaggggaagaaccttcccgccaaggacatcactggcagcagcgacccctactgcatcgtgaaggtggacaatgagcccatcatcaggacagccacagtgtggaagaccctgtgccccttctggggtgaggagtaccaagtgcacctgccgcccaccttccacgctgtggctttctatgtcatggatgaggatgccctcagccgggacgacgttatcggaaaggtctgccttacaagggacaccatagcctctcaccctaagggtttcagcgggtgggcccacctgacggaggtcgaccccgacgaggaggtgcagggcgagatccacctgcggctggaagtgtggccaggggcccgggcctgccggctacgctgctctgtgctggaggccagggatctggccccaaaggaccgcaatggcacatctgaccccttcgtccgagtgcgctacaagggccggacacgggagacctcgatcgtgaagaagtcatgctacccacgctggaatgagacgtttgaatttgagctgcaggagggggccatggaggcgctgtgcgtggaggcctgggactgggaccttgtcagccgaaacgacttcctgggcaaagtggtgattgatgtccagagactgcgggtggtgcagcaggaggagggctggttccggctgcagcccgaccagtccaagagccggcggcatgacgagggcaacctgggctccttgcagctggaggtgcggctgcgggacgagacggtgctgccctccagctactaccagccactggtgcacctgctgtgccacgaggtcaagctgggcatgcagggcccagggcagctgatcccactcatcgaggagacaaccagcaccgagtgtcgccaggacgtggccacgaacctgctcaagctcttcctggggcaggggctggccaaggacttcctggacctgctcttccagctggagctgagtcgcaccagtgagaccaacaccctgttccggagcaactctctggcctcaaagtccatggagtcttttctgaaggtggccgggatgcagtacctgcacggcgtcctgggccccatcatcaacaaggtgtttgaggagaagaagtacgtggagctggaccccagcaaagtggaagttaaggatgtagggtgctccgggctgcaccgcccgcagaccgaggccgaggtgctggagcagagcgcgcagacgctgcgcgcccacctgggggccctgctgagcgcgctcagccgctcggttcgcgcgtgccccgccgtggtgcgcgccaccttccgccagctcttccggcgcgtgcgcgagcgcttccccggcgcccagcacgagaatgtaccgttcatcgccgtcaccagcttcctgtgcctgcgcttcttctctcccgccatcatgtcgcccaagctcttccacctgcgggagcgccacgcggacgcccgcaccagccgcaccctgctcctgttggccaaggcagtccagaacgtgggcaacatggacacgccggcttccagggccaaggaggcttggatggagccgctgcagcccaccgtgcgccagggcgtggcgcagctgaaggacttcatcaccaagctcgtggacatcgaggagaaggacgagctggacctgcagcggacgctgagtttgcaggcgccacctgtgaaggaggggccactcttcatccacaggaccaagggcaagggccccctcatgtcctcctccttcaagaagctctacttctccctcactaccgaggccctcagcttcgcgaagacgcccagctccaagtgtgtgaatgagcttaaccagtggctgtctgcgctgcggaaggtgagcatcaacaacaccggactgctgggctcctaccaccctggcgtcttccgtggggacaagtggagctgctgccaccaaaaagagaagacaggtcagggctgcgataagacccggtcacgggtgaccctgcaggagtggaatgaccctcttgaccatgaccttgaggcccagctcatctaccggcacctgctgggcgtggaggccatgctgtgggagaggcaccgggagctgagcgggggcgcagaggcaggcacggtgcccacgagccctggcaaagtccccgaggactcattggcccggctgctccgggtgctgcaggacctccgcgaggcccatagctccagcccggccggctccccaccctcagagcccaactgcctcctggagctgcagacgtgaggcccgccctacgctccccttgctgagtcccctgccaagcgctcggagcccccccaggacactctgcaccccctcaccccggtcctcctcattagggtgcagggcctaggtctcttccaggtgggggaggggggagagtcaggaataaggggatccccagaagtgcagagctgagcaggcttgggcctgtcatggctggccggaagtgtccccagctccctacagacgctgtagccatcactgcctctccagggaccctcctctcctgcccaggacagacccagccagaaccactgctaggatgggccgcacccaggggtctggcctccagggacctagagaatgggagggagaacggggccccaggagacccggccgccaccccacccgctacccttgggtgccacagggctgtgctgttgccaacagtaaacctgctcttactgtc

SEQ ID NO: 364704 - DNA, 857 bp, Homo sapiens
cacagcaagaccctgcttcaaaaaaaaaaaaaaaattactggacacaattattgtgccagacccctaggttaacagtgaggattcagtgggagaactaaacagataaacagatccagtccccgccctcagagagttacagtttaatgggaaaaagagacattcaccaaagaaggacacagcccactagtgagttacactcgagagggatcatttacagaacaaagcagattataaaaatacagcgattggctgggtgcagtggctcacgcctgtaatcccagcactttgggaggcagaggcgggcggatgacttgaggtcaggagttctcaaccagcctggccaaaatggtgaaaccccatctctactaaaaacacaaaaattaaccaggcgtggtggtgggcacctgtaatcctagctacttgggaggctgaggcaggagaatgaatcgcttgaacccaggaggtggaggttgcagtgagccgagaccacaccattgcactctagcctgggcaacaagagcaaaactccgtctcaaaataaatacatacatacatacatgcatacatacatacagggattaaaatagtctagtactgacacctgaacagacagattgatccaagaaatgaaacagaaattccagaagttgacctgaacacacacacacacacacacacacacacacacacacacacacacacacgaaggcgtgaaagactccatgaccctcaaggtataagatgcatttttttttttttttgagacagggtctcactctgtcacccagactggatgcagtggtgcactatcccagctcagttctaccctccatccccccaacctcccccaaccacc

SEQ ID NO: 364705 - DNA, 476 bp, Homo sapiens
agatccttaaggcgagcccgggtactgtaatcctagctacttgggaggctgaggcaggagaatgaatcgcttgaacccaggaggtggaggttgcagtgagccgagaccacaccattgcactctagcctgggcaacaagagcaaaactccgtctcaaaataaatacatacatacatacatgcatacatacatacagggattaaaatagtctagtactgacacctgaacagacagattgatccaagaaatgaaacagaaattccagaagttgacctgaacacacacacacacacacacacacacacacacacacacacacacacacgaaggcgtgaaagactccatgaccctcaaggtataagatgcatttttttttttttttgagacagggtctcactctgtcacccagactggatgcagtggtgcactatcccagctcagttctaccctccatccccccaacctcccccaaccacc

SEQ ID NO: 364706 - DNA, 548 bp, Homo sapiens
tgggaggatcactggaggccaggagtttgagaacagcctggccaatgtagcaagaccccatctctaaaaaaaagaaattagccagccatgatggcattataggagtgagccactgggattataggagtgagccactgcacctgctctccaggccatgcgcccgggcatgggtcatgttccactggaggaagggcagcttctcctaattcactcaaagctgctgggttggtatggtggggaacatggcgtctggcgtggtacaggagctccgggttaggagggcttcctggaggaggtgacgtctgaacaggcctccccctccgtgtcccctgcagtgtgtgaatgagcttaaccagtggctgtctgcgctgcggaaggtgagcatcaacaacaccggactgctgggctcctaccaccctggcgtcttccgtggggacaagtggagctgctgccaccaaaaagagaagacagacacagactttcactctgtcccccagactggagtgcaatggcacgatctcagctcgctgcaatctccacctcccagg

SEQ ID NO: 364707 - DNA, 659 bp, Homo sapiens
  misc_feature (1)..(1): n is a, c, g, or t
  misc_feature (4)..(4): n is a, c, g, or t
  misc_feature (6)..(6): n is a, c, g, or t
ngcngngcccagtccagcgcccgccgcccgccaccccggaccccggtgtctggcttcccccgagccgggaccccgcgatggccaagcgcagctcgctgtacatccgcatcgtggaggggaagaaccttcccgccaaggacatcactggcagcagcgacccctactgcatcgtgaaggtggacaatgagcccatcatcaggacagccacagtgtggaagaccctgtgccccttctggggtgaggagtaccaagtgcacctgccgcccaccttccacgctgtggctttctatgtcatggatgaggatgccctcagccgggacgacgttatcggaaaggtctgccttacaagggacaccatagcctctcaccctaagggtttcagcgggtgggcccacctgacggaggtcgaccccgacgaggaggtgcagggcgagatccacctgcggctggaagtgtggccaggggcccgggcctgccggctacgctgctctgtgctggaggccagatcgtgaagaagtcatgctacccacgctggaatgagacgtttgaatttgagctgcaggagggggccatggaggcgctgtgcgtggaggcctgggactgggaccttgtcagccgaaacgacttcctgggcaaagtgagcaccaccgccccgcccc

SEQ ID NO: 364708 - DNA, 5678 bp, Homo sapiens
  misc_feature (1)..(1): n is a, c, g, or t
  misc_feature (4)..(4): n is a, c, g, or t
  misc_feature (6)..(6): n is a, c, g, or t
ngcngngcccagtccagcgcccgccgcccgccaccccggaccccggtgtctggcttcccccgagccgggaccccgcgatggccaagcgcagctcgctgtacatccgcatcgtggaggggaagaaccttcccgccaaggacatcactggcagcagcgacccctactgcatcgtgaaggtggacaatgagcccatcatcaggtaccgcccccacccccaggaccgaggggcgctcagcctctcatcggcccgcgctctccccgcaaaggggacagccacagtgtggaagaccctgtgccccttctggggtgaggagtaccaagtgcacctgccgcccaccttccacgctgtggctttctatgtcatggatgaggatgccctcagccgggacgacgttatcggaaaggtctgccttacaagggacaccatagcctctcaccctaagggtttcagcgggtgggcccacctgacggaggtcgaccccgacgaggaggtgcagggcgagatccacctgcggctggaagtgtggccaggggcccgggcctgccggctacgctgctctgtgctggaggccagggatctggccccaaaggaccgcaatggcacatctgaccccttcgtccgagtgcgctacaagggccggacacgggagacctcgatcgtgaagaagtcatgctacccacgctggaatgagacgtttgaatttgagctgcaggagggggccatggaggcgctgtgcgtggaggcctgggactgggaccttgtcagccgaaacgacttcctgggcaaagtggtgattgatgtccagagactgcgggtggtgcagcaggaggagggctggttccggctgcagcccgaccagtccaagagccggcggcatgacgagggcaacctgggctccttgcagctggaggtgcggctgcgggacgagacggtgctgccctccagctactaccagccactggtgcacctgctgtgccacgaggtcaagctgggcatgcagggcccagggcagctgatcccactcatcgaggagacaaccagcaccgagtgtcgccaggacgtggccacgaacctgctcaagctcttcctggggcaggggctggccaaggacttcctggacctgctcttccagctggagctgagtcgcaccagtgagaccaacaccctgttccggagcaactctctggcctcaaagtccatggagtcttttctgaaggtggccgggatgcagtacctgcacggcgtcctgggccccatcatcaacaaggtgtttgaggagaagaagtacgtggagctggaccccagcaaagtggaagttaaggatgtagggtgctccgggctgcaccgcccgcagaccgaggccgaggtgctggagcagagcgcgcagacgctgcgcgcccacctgggggccctgctgagcgcgctcagccgctcggttcgcgcgtgccccgccgtggtgcgcgccaccttccgccagctcttccggcgcgtgcgcgagcgcttccccggcgcccagcacgagaatgtaccgttcatcgccgtcaccagcttcctgtgcctgcgcttcttctctcccgccatcatgtcgcccaagctcttccacctgcgggagcgccacgcggacgcccgcaccagccgcaccctgctcctgttggccaaggcagtccagaacgtgggcaacatggacacgccggcttccagggccaaggaggcttggatggagccgctgcagcccaccgtgcgccagggcgtggcgcagctgaaggacttcatcaccaagctcgtggacatcgaggagaaggacgagctggacctgcagcggacgctgagtttgcaggcgccacctgtgaaggaggggccactcttcatccacaggaccaagggcaagggccccctcatgtcctcctccttcaagaagctctacttctccctcactaccgaggccctcagcttcgcgaagacgcccagctccaagaaaagcgccctcatcaagttagccaacatccgggcagcggaaaaggttgaggaaaagagctttggcggctcgcacgtcatgcaggtcatctacacggacgacgccggcaggccccagactgcctacctgcagtgcaagtgtgtgaatgagcttaaccagtggctgtctgcgctgcggaaggtgagcatcaacaacaccggactgctgggctcctaccaccctggcgtcttccgtggggacaagtggagctgctgccaccaaaaagagaagacaggtcagggctgcgataagacccggtcacgggtgaccctgcaggagtggaatgaccctcttgaccatgaccttgaggcccagctcatctaccggcacctgctgggcgtggaggccatgctgtgggagaggcaccgggagctgagcgggggcgcagaggcaggcacggtgcccacgagccctggcaaagtccccgaggactcattggcccggctgctccgggtgctgcaggacctccgcgaggcccatagctccagcccggccggctccccaccctcagagcccaactgcctcctggagctgcagacgtgaggcccgccctacgctccccttgctgagtcccctgccaagcgctcggagcccccccaggacactctgcaccccctcaccccggtcctcctcattagggtgcagggcctaggtctcttccaggtgggggaggggggagagtcaggaataaggggatccccagaagtgcagagctgagcaggcttgggcctgtcatggctggccggaagtgtccccagctccctacagacgctgtagccatcactgcctctccagggaccctcctctcctgcccaggacagacccagccagaaccactgctaggatgggccgcacccaggggtctggcctccagggacctagagaatgggagggagaacggggccccaggagacccggccgccaccccacccgctacccttgggtgccacagggctgtgctgttgccaacagtaaacctgctcttactgtccaggctctggggtcttgtgatgagggtctggggagaaagtgggcccggggggaccccggaggctgtcggtggatgtgccgatgatggggctgacagtatgggctctgggcatccctgttcccccctctttcttccccccactcttctggggtcgggggttcctttcccttcccagttgctgtccctgggtcccctctttcatgtcccacaggccacagagcccagtgtgtccaaccagctgttctctcctcaaagcagcccccaagcaagtcccttctctagggtgtccctgaggacagcacagaggcgggactcagagaccccattcctcttcacgcagcccttaccccaagccctctagctgtgtggctggcagtgttggccacgtaggggctcccatccccccaccattgtgtcacatgggctgccaggctcagctcccagctgcgtccacagtgacctggatcagggtggggacaaggactggaccctccttctccagaaggccttcagctcttgccttgccatgcagtcacctccttccccctctgaccccagatcccaaaggtgcaccgttgccccagcccctttctggccccatggggtttctctgatgccttcatcatagaggcccggggctggtccgatggttggcaaaacttgactccggcccagtccccactcttggggacttagaacccctgctgtcctgggatctggcctgcctttctttggtcagtccctgtggtcccccaccagctccccctcccatagggctgcccaccaagccctgcccccagcccaagaggagcccccactgcctgcggggcagtgatgtctggccaccggctcacaccaatgacttggtcctggggtggcagaagcagcaggtgacaggagcagggcccctgtccctctcttctggccctgtggtacccaggccacacgttgtgcccgctcttggggctgaccggctgtagggaccaccagccgctgctactgtgggccgccccggggcagggtgggcagggcttttgtgggttatgaggacacagaagtccctgaggcccccagacctggctcagccaacctccttcctcccccggttgccccccactctaaagcctcctccctcccagcgtccactggctccaggctcctcacaacagcagctcatagacacggggcgtctccaggtggtcccagccctccagatgtttctagctctccaggtgggcgctgttttcacgtctgcctgcatccattcattccttcattcctcacctttatcctgttatctctatttttttaagctaccaggaaggaaagggaagaagagatcacgaaactgggacccccagaagggaggagtgggctttgaacttagacatctacctcagagctcaaataggttgtttaaaatcacattcaattttcagatgaaggggaactttatagtttttttttttttttttttttgagacagagtctcactgtgttgcccaggctggagtgcaaatggcttgatcttggttcactgcaacctctgcctcccaggttcaagcaattctcttgcctcagcctcccgagtagctgggactaaaggcgtgtgccaccatgcccagctaattcttgtatttttagtagagacggagtttctccatgttggccagactggtctcgaactcctgacctcaggtgatctgaccgccttggcctccgaaagtgctgagattacagttgcgagccactgtgcgtggccagaactttataataagagacttgaagctgggtgtgacggtgcacacctctagtcccagctactcgggaggccaagacagaaggatcaccttgaggccaggagtttaaggccagcctgggcaacatagcaaaacctagtccctaaaattaaaaaaaaaaaaaaaaaaaaaggaaaataaaggagacttgaaatttttgaactaaatagtggtgatggctacacattgtgaatgtaattaacaccactgagttaaacacttaaaatggttaaaatggcaaattgtatgttatacctattttactacaataaaaagtataaaaaagagaagatatttaggtgacttacagcaaccaattgcaacaaaacaaaatgttaagaaatgatctttttatgaggcaattggaaatttgaacactgatcaactataggatgattggaattattaatttttaaaggtgtgataagatactgcacttggctgggcacagtggcacatgcctgtaatcccagctacttggcaggctgaggtgggagaatcgcttgagctcaggagttcgagaccagcctgggcaacgtggcgaaatccccgtctttacaaaaacaaacaaacaaacaaaaaagatattgcagttgtgttgtaagcgtccttatctttcagagctacatagtggaatgtttatggaatatttaggataaatgatataggcatttgggatttgctgcaaaatgacccagaggcaggggtcagggggagaggtagagatgagacaagaggtagaggggagaggtagaggtagccacgagctgataattacagacaagagatgcggagtatgtgggggctcattatcctgcatagtctatctttgtatatctttgaacttttcaagaataaaaaagcttaaaaagt

SEQ ID NO: 364709 - DNA, 5564 bp, Homo sapiens
  misc_feature (1)..(1): n is a, c, g, or t
  misc_feature (4)..(4): n is a, c, g, or t
  misc_feature (6)..(6): n is a, c, g, or t
ngcngngcccagtccagcgcccgccgcccgccaccccggaccccggtgtctggcttcccccgagccgggaccccgcgatggccaagcgcagctcgctgtacatccgcatcgtggaggggaagaaccttcccgccaaggacatcactggcagcagcgacccctactgcatcgtgaaggtggacaatgagcccatcatcaggacagccacagtgtggaagaccctgtgccccttctggggtgaggagtaccaagtgcacctgccgcccaccttccacgctgtggctttctatgtcatggatgaggatgccctcagccgggacgacgttatcggaaaggtctgccttacaagggacaccatagcctctcaccctaagggtttcagcgggtgggcccacctgacggaggtcgaccccgacgaggaggtgcagggcgagatccacctgcggctggaagtgtggccaggggcccgggcctgccggctacgctgctctgtgctggaggccagggatctggccccaaaggaccgcaatggcacatctgaccccttcgtccgagtgcgctacaagggccggacacgggagacctcgatcgtgaagaagtcatgctacccacgctggaatgagacgtttgaatttgagctgcaggagggggccatggaggcgctgtgcgtggaggcctgggactgggaccttgtcagccgaaacgacttcctgggcaaagtggtgattgatgtccagagactgcgggtggtgcagcaggaggagggctggttccggctgcagcccgaccagtccaagagccggcggcatgacgagggcaacctgggctccttgcagctggaggtgcggctgcgggacgagacggtgctgccctccagctactaccagccactggtgcacctgctgtgccacgaggtcaagctgggcatgcagggcccagggcagctgatcccactcatcgaggagacaaccagcaccgagtgtcgccaggacgtggccacgaacctgctcaagctcttcctggggcaggggctggccaaggacttcctggacctgctcttccagctggagctgagtcgcaccagtgagaccaacaccctgttccggagcaactctctggcctcaaagtccatggagtcttttctgaaggtggccgggatgcagtacctgcacggcgtcctgggccccatcatcaacaaggtgtttgaggagaagaagtgctccgggctgcaccgcccgcagaccgaggccgaggtgctggagcagagcgcgcagacgctgcgcgcccacctgggggccctgctgagcgcgctcagccgctcggttcgcgcgtgccccgccgtggtgcgcgccaccttccgccagctcttccggcgcgtgcgcgagcgcttccccggcgcccagcacgagaatgtaccgttcatcgccgtcaccagcttcctgtgcctgcgcttcttctctcccgccatcatgtcgcccaagctcttccacctgcgggagcgccacgcggacgcccgcaccagccgcaccctgctcctgttggccaaggcagtccagaacgtgggcaacatggacacgccggcttccagggccaaggaggcttggatggagccgctgcagcccaccgtgcgccagggcgtggcgcagctgaaggacttcatcaccaagctcgtggacatcgaggagaaggacgagctggacctgcagcggacgctgagtttgcaggcgccacctgtgaaggaggggccactcttcatccacaggaccaagggcaagggccccctcatgtcctcctccttcaagaagctctacttctccctcactaccgaggccctcagcttcgcgaagacgcccagctccaagaaaagcgccctcatcaagttagccaacatccgggcagcggaaaaggttgaggaaaagagctttggcggctcgcacgtcatgcaggtcatctacacggacgacgccggcaggccccagactgcctacctgcagtgcaagtgtgtgaatgagcttaaccagtggctgtctgcgctgcggaaggtgagcatcaacaacaccggactgctgggctcctaccaccctggcgtcttccgtggggacaagtggagctgctgccaccaaaaagagaagacaggtcagggctgcgataagacccggtcacgggtgaccctgcaggagtggaatgaccctcttgaccatgaccttgaggcccagctcatctaccggcacctgctgggcgtggaggccatgctgtgggagaggcaccgggagctgagcgggggcgcagaggcaggcacggtgcccacgagccctggcaaagtccccgaggactcattggcccggctgctccgggtgctgcaggacctccgcgaggcccatagctccagcccggccggctccccaccctcagagcccaactgcctcctggagctgcagacgtgaggcccgccctacgctccccttgctgagtcccctgccaagcgctcggagcccccccaggacactctgcaccccctcaccccggtcctcctcattagggtgcagggcctaggtctcttccaggtgggggaggggggagagtcaggaataaggggatccccagaagtgcagagctgagcaggcttgggcctgtcatggctggccggaagtgtccccagctccctacagacgctgtagccatcactgcctctccagggaccctcctctcctgcccaggacagacccagccagaaccactgctaggatgggccgcacccaggggtctggcctccagggacctagagaatgggagggagaacggggccccaggagacccggccgccaccccacccgctacccttgggtgccacagggctgtgctgttgccaacagtaaacctgctcttactgtccaggctctggggtcttgtgatgagggtctggggagaaagtgggcccggggggaccccggaggctgtcggtggatgtgccgatgatggggctgacagtatgggctctgggcatccctgttcccccctctttcttccccccactcttctggggtcgggggttcctttcccttcccagttgctgtccctgggtcccctctttcatgtcccacaggccacagagcccagtgtgtccaaccagctgttctctcctcaaagcagcccccaagcaagtcccttctctagggtgtccctgaggacagcacagaggcgggactcagagaccccattcctcttcacgcagcccttaccccaagccctctagctgtgtggctggcagtgttggccacgtaggggctcccatccccccaccattgtgtcacatgggctgccaggctcagctcccagctgcgtccacagtgacctggatcagggtggggacaaggactggaccctccttctccagaaggccttcagctcttgccttgccatgcagtcacctccttccccctctgaccccagatcccaaaggtgcaccgttgccccagcccctttctggccccatggggtttctctgatgccttcatcatagaggcccggggctggtccgatggttggcaaaacttgactccggcccagtccccactcttggggacttagaacccctgctgtcctgggatctggcctgcctttctttggtcagtccctgtggtcccccaccagctccccctcccatagggctgcccaccaagccctgcccccagcccaagaggagcccccactgcctgcggggcagtgatgtctggccaccggctcacaccaatgacttggtcctggggtggcagaagcagcaggtgacaggagcagggcccctgtccctctcttctggccctgtggtacccaggccacacgttgtgcccgctcttggggctgaccggctgtagggaccaccagccgctgctactgtgggccgccccggggcagggtgggcagggcttttgtgggttatgaggacacagaagtccctgaggcccccagacctggctcagccaacctccttcctcccccggttgccccccactctaaagcctcctccctcccagcgtccactggctccaggctcctcacaacagcagctcatagacacggggcgtctccaggtggtcccagccctccagatgtttctagctctccaggtgggcgctgttttcacgtctgcctgcatccattcattccttcattcctcacctttatcctgttatctctatttttttaagctaccaggaaggaaagggaagaagagatcacgaaactgggacccccagaagggaggagtgggctttgaacttagacatctacctcagagctcaaataggttgtttaaaatcacattcaattttcagatgaaggggaactttatagtttttttttttttttttttttgagacagagtctcactgtgttgcccaggctggagtgcaaatggcttgatcttggttcactgcaacctctgcctcccaggttcaagcaattctcttgcctcagcctcccgagtagctgggactaaaggcgtgtgccaccatgcccagctaattcttgtatttttagtagagacggagtttctccatgttggccagactggtctcgaactcctgacctcaggtgatctgaccgccttggcctccgaaagtgctgagattacagttgcgagccactgtgcgtggccagaactttataataagagacttgaagctgggtgtgacggtgcacacctctagtcccagctactcgggaggccaagacagaaggatcaccttgaggccaggagtttaaggccagcctgggcaacatagcaaaacctagtccctaaaattaaaaaaaaaaaaaaaaaaaaaggaaaataaaggagacttgaaatttttgaactaaatagtggtgatggctacacattgtgaatgtaattaacaccactgagttaaacacttaaaatggttaaaatggcaaattgtatgttatacctattttactacaataaaaagtataaaaaagagaagatatttaggtgacttacagcaaccaattgcaacaaaacaaaatgttaagaaatgatctttttatgaggcaattggaaatttgaacactgatcaactataggatgattggaattattaatttttaaaggtgtgataagatactgcacttggctgggcacagtggcacatgcctgtaatcccagctacttggcaggctgaggtgggagaatcgcttgagctcaggagttcgagaccagcctgggcaacgtggcgaaatccccgtctttacaaaaacaaacaaacaaacaaaaaagatattgcagttgtgttgtaagcgtccttatctttcagagctacatagtggaatgtttatggaatatttaggataaatgatataggcatttgggatttgctgcaaaatgacccagaggcaggggtcagggggagaggtagagatgagacaagaggtagaggggagaggtagaggtagccacgagctgataattacagacaagagatgcggagtatgtgggggctcattatcctgcatagtctatctttgtatatctttgaacttttcaagaataaaaaagcttaaaaagt

SEQ ID NO: 364710 - DNA, 5298 bp, Homo sapiens
tctgcctccgtctccctcctctagccgggacgacgttatcggaaaggtctgccttacaagggacaccatagcctctcaccctaagggtttcagcgggtgggcccacctgacggaggtcgaccccgacgaggaggtgcagggcgagatccacctgcggctggaagtgtggccaggggcccgggcctgccggctacgctgctctgtgctggaggccagggatctggccccaaaggaccgcaatggcacatctgaccccttcgtccgagtgcgctacaagggccggacacgggagacctcgatcgtgaagaagtcatgctacccacgctggaatgagacgtttgaatttgagctgcaggagggggccatggaggcgctgtgcgtggaggcctgggactgggaccttgtcagccgaaacgacttcctgggcaaagtggtgattgatgtccagagactgcgggtggtgcagcaggaggagggctggttccggctgcagcccgaccagtccaagagccggcggcatgacgactggaggtgcggctgcgggacgagacggtgctgccctccagctactaccagccactggtgcacctgctgtgccacgaggtcaagctgggcatgcagggcccagggcagctgatcccactcatcgaggagacaaccagcaccgagtgtcgccaggacgtggccacgaacctgctcaagctcttcctggggcaggggctggccaaggacttcctggacctgctcttccagctggagctgagtcgcaccagtgagaccaacaccctgttccggagcaactctctggcctcaaagtccatggagtcttttctgaaggtggccgggatgcagtacctgcacggcgtcctgggccccatcatcaacaaggtgtttgaggagaagaagtacgtggagctggaccccagcaaagtggaagttaaggatgtagggtgctccgggctgcaccgcccgcagaccgaggccgaggtgctggagcagagcgcgcagacgctgcgcgcccacctgggggccctgctgagcgcgctcagccgctcggttcgcgcgtgccccgccgtggtgcgcgccaccttccgccagctcttccggcgcgtgcgcgagcgcttccccggcgcccagcacgagaatgtaccgttcatcgccgtcaccagcttcctgtgcctgcgcttcttctctcccgccatcatgtcgcccaagctcttccacctgcgggagcgccacgcggacgcccgcaccagccgcaccctgctcctgttggccaaggcagtccagaacgtgggcaacatggacacgccggcttccagggccaaggaggcttggatggagccgctgcagcccaccgtgcgccagggcgtggcgcagctgaaggacttcatcaccaagctcgtggacatcgaggagaaggacgagctggacctgcagcggacgctgagtttgcaggcgccacctgtgaaggaggggccactcttcatccacaggaccaagggcaagggccccctcatgtcctcctccttcaagaagctctacttctccctcactaccgaggccctcagcttcgcgaagacgcccagctccaagaaaagcgccctcatcaagttagccaacatccgggcagcggaaaaggttgaggaaaagagctttggcggctcgcacgtcatgcaggtcatctacacggacgacgccggcaggccccagactgcctacctgcagtgcaagtgtgtgaatgagcttaaccagtggctgtctgcgctgcggaaggtgagcatcaacaacaccggactgctgggctcctaccaccctggcgtcttccgtggggacaagtggagctgctgccaccaaaaagagaagacaggtcagggctgcgataagacccggtcacgggtgaccctgcaggagtggaatgaccctcttgaccatgaccttgaggcccagctcatctaccggcacctgctgggcgtggaggccatgctgtgggagaggcaccgggagctgagcgggggcgcagaggcaggcacggtgcccacgagccctggcaaagtccccgaggactcattggcccggctgctccgggtgctgcaggacctccgcgaggcccatagctccagcccggccggctccccaccctcagagcccaactgcctcctggagctgcagacgtgaggcccgccctacgctccccttgctgagtcccctgccaagcgctcggagcccccccaggacactctgcaccccctcaccccggtcctcctcattagggtgcagggcctaggtctcttccaggtgggggaggggggagagtcaggaataaggggatccccagaagtgcagagctgagcaggcttgggcctgtcatggctggccggaagtgtccccagctccctacagacgctgtagccatcactgcctctccagggaccctcctctcctgcccaggacagacccagccagaaccactgctaggatgggccgcacccaggggtctggcctccagggacctagagaatgggagggagaacggggccccaggagacccggccgccaccccacccgctacccttgggtgccacagggctgtgctgttgccaacagtaaacctgctcttactgtccaggctctggggtcttgtgatgagggtctggggagaaagtgggcccggggggaccccggaggctgtcggtggatgtgccgatgatggggctgacagtatgggctctgggcatccctgttcccccctctttcttccccccactcttctggggtcgggggttcctttcccttcccagttgctgtccctgggtcccctctttcatgtcccacaggccacagagcccagtgtgtccaaccagctgttctctcctcaaagcagcccccaagcaagtcccttctctagggtgtccctgaggacagcacagaggcgggactcagagaccccattcctcttcacgcagcccttaccccaagccctctagctgtgtggctggcagtgttggccacgtaggggctcccatccccccaccattgtgtcacatgggctgccaggctcagctcccagctgcgtccacagtgacctggatcagggtggggacaaggactggaccctccttctccagaaggccttcagctcttgccttgccatgcagtcacctccttccccctctgaccccagatcccaaaggtgcaccgttgccccagcccctttctggccccatggggtttctctgatgccttcatcatagaggcccggggctggtccgatggttggcaaaacttgactccggcccagtccccactcttggggacttagaacccctgctgtcctgggatctggcctgcctttctttggtcagtccctgtggtcccccaccagctccccctcccatagggctgcccaccaagccctgcccccagcccaagaggagcccccactgcctgcggggcagtgatgtctggccaccggctcacaccaatgacttggtcctggggtggcagaagcagcaggtgacaggagcagggcccctgtccctctcttctggccctgtggtacccaggccacacgttgtgcccgctcttggggctgaccggctgtagggaccaccagccgctgctactgtgggccgccccggggcagggtgggcagggcttttgtgggttatgaggacacagaagtccctgaggcccccagacctggctcagccaacctccttcctcccccggttgccccccactctaaagcctcctccctcccagcgtccactggctccaggctcctcacaacagcagctcatagacacggggcgtctccaggtggtcccagccctccagatgtttctagctctccaggtgggcgctgttttcacgtctgcctgcatccattcattccttcattcctcacctttatcctgttatctctatttttttaagctaccaggaaggaaagggaagaagagatcacgaaactgggacccccagaagggaggagtgggctttgaacttagacatctacctcagagctcaaataggttgtttaaaatcacattcaattttcagatgaaggggaactttatagtttttttttttttttttttttgagacagagtctcactgtgttgcccaggctggagtgcaaatggcttgatcttggttcactgcaacctctgcctcccaggttcaagcaattctcttgcctcagcctcccgagtagctgggactaaaggcgtgtgccaccatgcccagctaattcttgtatttttagtagagacggagtttctccatgttggccagactggtctcgaactcctgacctcaggtgatctgaccgccttggcctccgaaagtgctgagattacagttgcgagccactgtgcgtggccagaactttataataagagacttgaagctgggtgtgacggtgcacacctctagtcccagctactcgggaggccaagacagaaggatcaccttgaggccaggagtttaaggccagcctgggcaacatagcaaaacctagtccctaaaattaaaaaaaaaaaaaaaaaaaaaggaaaataaaggagacttgaaatttttgaactaaatagtggtgatggctacacattgtgaatgtaattaacaccactgagttaaacacttaaaatggttaaaatggcaaattgtatgttatacctattttactacaataaaaagtataaaaaagagaagatatttaggtgacttacagcaaccaattgcaacaaaacaaaatgttaagaaatgatctttttatgaggcaattggaaatttgaacactgatcaactataggatgattggaattattaatttttaaaggtgtgataagatactgcacttggctgggcacagtggcacatgcctgtaatcccagctacttggcaggctgaggtgggagaatcgcttgagctcaggagttcgagaccagcctgggcaacgtggcgaaatccccgtctttacaaaaacaaacaaacaaacaaaaaagatattgcagttgtgttgtaagcgtccttatctttcagagctacatagtggaatgtttatggaatatttaggataaatgatataggcatttgggatttgctgcaaaatgacccagaggcaggggtcagggggagaggtagagatgagacaagaggtagaggggagaggtagaggtagccacgagctgataattacagacaagagatgcggagtatgtgggggctcattatcctgcatagtctatctttgtatatctttgaacttttcaagaataaaaaagcttaaaaagt

SEQ ID NO: 364711 - DNA, 4976 bp, Homo sapiens
tttgtctatatttattgtttatttttggaggactgtgtggtctggtgtttgggagggaactccacccccaccaggccaaccatggagctagaaacagagacagcaggaagggcaaagctggccactgcctgctccaccccttcacagcccagagcagaacagggtctggggatgtgaggagctggccagtgtccagggccccgtccccagccaccccttgggaaaatgtcctctttccctgggatgctctgaggtcctcagagggaaaggttcgggatcccccgtgcctctccctgcagggcccagggcagctgatcccactcatcgaggagacaaccagcaccgagtgtcgccaggacgtggccacgaacctgctcaagctcttcctggggcaggggctggccaaggacttcctggacctgctcttccagctggagctgagtcgcaccagtgagaccaacaccctgttccggagcaactctctggcctcaaagtccatggagtcttttctgaaggtggccgggatgcagtacctgcacggcgtcctgggccccatcatcaacaaggtgtttgaggagaagaagtacgtggagctggaccccagcaaagtggaagttaaggatgtagggtgctccgggctgcaccgcccgcagaccgaggccgaggtgctggagcagagcgcgcagacgctgcgcgcccacctgggggccctgctgagcgcgctcagccgctcggttcgcgcgtgccccgccgtggtgcgcgccaccttccgccagctcttccggcgcgtgcgcgagcgcttccccggcgcccagcacgagaatgtaccgttcatcgccgtcaccagcttcctgtgcctgcgcttcttctctcccgccatcatgtcgcccaagctcttccacctgcgggagcgccacgcggacgcccgcaccagccgcaccctgctcctgttggccaaggcagtccagaacgtgggcaacatggacacgccggcttccagggccaaggaggcttggatggagccgctgcagcccaccgtgcgccagggcgtggcgcagctgaaggacttcatcaccaagctcgtggacatcgaggagaaggacgagctggacctgcagcggacgctgagtttgcaggcgccacctgtgaaggaggggccactcttcatccacaggaccaagggcaagggccccctcatgtcctcctccttcaagaagctctacttctccctcactaccgaggccctcagcttcgcgaagacgcccagctccaagaaaagcgccctcatcaagttagccaacatccgggcagcggaaaaggttgaggaaaagagctttggcggctcgcacgtcatgcaggtcatctacacggacgacgccggcaggccccagactgcctacctgcagtgcaagtgtgtgaatgagcttaaccagtggctgtctgcgctgcggaaggtgagcatcaacaacaccggactgctgggctcctaccaccctggcgtcttccgtggggacaagtggagctgctgccaccaaaaagagaagacaggtcagggctgcgataagacccggtcacgggtgaccctgcaggagtggaatgaccctcttgaccatgaccttgaggcccagctcatctaccggcacctgctgggcgtggaggccatgctgtgggagaggcaccgggagctgagcgggggcgcagaggcaggcacggtgcccacgagccctggcaaagtccccgaggactcattggcccggctgctccgggtgctgcaggacctccgcgaggcccatagctccagcccggccggctccccaccctcagagcccaactgcctcctggagctgcagacgtgaggcccgccctacgctccccttgctgagtcccctgccaagcgctcggagcccccccaggacactctgcaccccctcaccccggtcctcctcattagggtgcagggcctaggtctcttccaggtgggggaggggggagagtcaggaataaggggatccccagaagtgcagagctgagcaggcttgggcctgtcatggctggccggaagtgtccccagctccctacagacgctgtagccatcactgcctctccagggaccctcctctcctgcccaggacagacccagccagaaccactgctaggatgggccgcacccaggggtctggcctccagggacctagagaatgggagggagaacggggccccaggagacccggccgccaccccacccgctacccttgggtgccacagggctgtgctgttgccaacagtaaacctgctcttactgtccaggctctggggtcttgtgatgagggtctggggagaaagtgggcccggggggaccccggaggctgtcggtggatgtgccgatgatggggctgacagtatgggctctgggcatccctgttcccccctctttcttccccccactcttctggggtcgggggttcctttcccttcccagttgctgtccctgggtcccctctttcatgtcccacaggccacagagcccagtgtgtccaaccagctgttctctcctcaaagcagcccccaagcaagtcccttctctagggtgtccctgaggacagcacagaggcgggactcagagaccccattcctcttcacgcagcccttaccccaagccctctagctgtgtggctggcagtgttggccacgtaggggctcccatccccccaccattgtgtcacatgggctgccaggctcagctcccagctgcgtccacagtgacctggatcagggtggggacaaggactggaccctccttctccagaaggccttcagctcttgccttgccatgcagtcacctccttccccctctgaccccagatcccaaaggtgcaccgttgccccagcccctttctggccccatggggtttctctgatgccttcatcatagaggcccggggctggtccgatggttggcaaaacttgactccggcccagtccccactcttggggacttagaacccctgctgtcctgggatctggcctgcctttctttggtcagtccctgtggtcccccaccagctccccctcccatagggctgcccaccaagccctgcccccagcccaagaggagcccccactgcctgcggggcagtgatgtctggccaccggctcacaccaatgacttggtcctggggtggcagaagcagcaggtgacaggagcagggcccctgtccctctcttctggccctgtggtacccaggccacacgttgtgcccgctcttggggctgaccggctgtagggaccaccagccgctgctactgtgggccgccccggggcagggtgggcagggcttttgtgggttatgaggacacagaagtccctgaggcccccagacctggctcagccaacctccttcctcccccggttgccccccactctaaagcctcctccctcccagcgtccactggctccaggctcctcacaacagcagctcatagacacggggcgtctccaggtggtcccagccctccagatgtttctagctctccaggtgggcgctgttttcacgtctgcctgcatccattcattccttcattcctcacctttatcctgttatctctatttttttaagctaccaggaaggaaagggaagaagagatcacgaaactgggacccccagaagggaggagtgggctttgaacttagacatctacctcagagctcaaataggttgtttaaaatcacattcaattttcagatgaaggggaactttatagtttttttttttttttttttttgagacagagtctcactgtgttgcccaggctggagtgcaaatggcttgatcttggttcactgcaacctctgcctcccaggttcaagcaattctcttgcctcagcctcccgagtagctgggactaaaggcgtgtgccaccatgcccagctaattcttgtatttttagtagagacggagtttctccatgttggccagactggtctcgaactcctgacctcaggtgatctgaccgccttggcctccgaaagtgctgagattacagttgcgagccactgtgcgtggccagaactttataataagagacttgaagctgggtgtgacggtgcacacctctagtcccagctactcgggaggccaagacagaaggatcaccttgaggccaggagtttaaggccagcctgggcaacatagcaaaacctagtccctaaaattaaaaaaaaaaaaaaaaaaaaaggaaaataaaggagacttgaaatttttgaactaaatagtggtgatggctacacattgtgaatgtaattaacaccactgagttaaacacttaaaatggttaaaatggcaaattgtatgttatacctattttactacaataaaaagtataaaaaagagaagatatttaggtgacttacagcaaccaattgcaacaaaacaaaatgttaagaaatgatctttttatgaggcaattggaaatttgaacactgatcaactataggatgattggaattattaatttttaaaggtgtgataagatactgcacttggctgggcacagtggcacatgcctgtaatcccagctacttggcaggctgaggtgggagaatcgcttgagctcaggagttcgagaccagcctgggcaacgtggcgaaatccccgtctttacaaaaacaaacaaacaaacaaaaaagatattgcagttgtgttgtaagcgtccttatctttcagagctacatagtggaatgtttatggaatatttaggataaatgatataggcatttgggatttgctgcaaaatgacccagaggcaggggtcagggggagaggtagagatgagacaagaggtagaggggagaggtagaggtagccacgagctgataattacagacaagagatgcggagtatgtgggggctcattatcctgcatagtctatctttgtatatctttgaacttttcaagaataaaaaagcttaaaaagt

SEQ ID NO: 364712 - DNA, 5814 bp, Homo sapiens
  misc_feature (1)..(1): n is a, c, g, or t
  misc_feature (4)..(4): n is a, c, g, or t
  misc_feature (6)..(6): n is a, c, g, or t
ngcngngcccagtccagcgcccgccgcccgccaccccggaccccggtgtctggcttcccccgagccgggaccccgcgatggccaagcgcagctcgctgtacatccgcatcgtggaggggaagaaccttcccgccaaggacatcactggcagcagcgacccctactgcatcgtgaaggtggacaatgagcccatcatcaggacagccacagtgtggaagaccctgtgccccttctggggtgaggagtaccaagtgcacctgccgcccaccttccacgctgtggctttctatgtcatggatgaggatgccctcagccgggacgacgttatcggaaaggtctgccttacaagggacaccatagcctctcaccctaagggtttcagcgggtgggcccacctgacggaggtcgaccccgacgaggaggtgcagggcgagatccacctgcggctggaagtgtggccaggggcccgggcctgccggctacgctgctctgtgctggaggccagggatctggccccaaaggaccgcaatggcacatctgaccccttcgtccgagtgcgctacaagggccggacacgggagacctcgatcgtgaagaagtcatgctacccacgctggaatgagacgtttgaatttgagctgcaggagggggccatggaggcgctgtgcgtggaggcctgggactgggaccttgtcagccgaaacgacttcctgggcaaagtggtgattgatgtccagagactgcgggtggtgcagcaggaggagggctggttccggctgcagcccgaccagtccaagagccggcggcatgacgagggcaacctgggctccttgcagctggaggtgcggctgcgggacgagacggtgctgccctccagctactaccagccactggtgcacctgctgtgccacgaggtcaagctgggcatgcagggcccagggcagctgatcccactcatcgaggagacaaccagcaccgagtgtcgccaggacgtggccacgaacctgctcaagctcttcctggggcaggggctggccaaggacttcctggacctgctcttccagctggagctgagtcgcaccagtgagaccaacaccctgttccggagcaactctctggcctcaaagtccatggagtcttttctgaaggtggccgggatgcagtacctgcacggcgtcctgggccccatcatcaacaaggtgtttgaggagaagaagtacgtggagctggaccccagcaaagtggaagttaaggatgtagggtgctccgggctgcaccgcccgcagaccgaggccgaggtgctggagcagagcgcgcagacgctgcgcgcccacctgggggccctgctgagcgcgctcagccgctcggttcgcgcgtgccccgccgtggtgcgcgccaccttccgccagctcttccggcgcgtgcgcgagcgcttccccggcgcccagcacgaggtgcgccctccacccgctgggctaggctgggccgggttggactgggctggggcgaggggtgaagagcggtggggaaccagggagcgctggggaggaccagggaggctgtgtcgcagcgagggtcagggacggagcctaaggggagggggctgccaggagccctggtctgggggactccagcccgcgctcttccgcacccctccagaatgtaccgttcatcgccgtcaccagcttcctgtgcctgcgcttcttctctcccgccatcatgtcgcccaagctcttccacctgcgggagcgccacgcggacgcccgcaccagccgcaccctgctcctgttggccaaggcagtccagaacgtgggcaacatggacacgccggcttccagggccaaggaggcttggatggagccgctgcagcccaccgtgcgccagggcgtggcgcagctgaaggacttcatcaccaagctcgtggacatcgaggagaaggacgagctggacctgcagcggacgctgagtttgcaggcgccacctgtgaaggaggggccactcttcatccacaggaccaagggcaagggccccctcatgtcctcctccttcaagaagctctacttctccctcactaccgaggccctcagcttcgcgaagacgcccagctccaagaaaagcgccctcatcaagttagccaacatccgggcagcggaaaaggttgaggaaaagagctttggcggctcgcacgtcatgcaggtcatctacacggacgacgccggcaggccccagactgcctacctgcagtgcaagtgtgtgaatgagcttaaccagtggctgtctgcgctgcggaaggtgagcatcaacaacaccggactgctgggctcctaccaccctggcgtcttccgtggggacaagtggagctgctgccaccaaaaagagaagacaggtcagggctgcgataagacccggtcacgggtgaccctgcaggagtggaatgaccctcttgaccatgaccttgaggcccagctcatctaccggcacctgctgggcgtggaggccatgctgtgggagaggcaccgggagctgagcgggggcgcagaggcaggcacggtgcccacgagccctggcaaagtccccgaggactcattggcccggctgctccgggtgctgcaggacctccgcgaggcccatagctccagcccggccggctccccaccctcagagcccaactgcctcctggagctgcagacgtgaggcccgccctacgctccccttgctgagtcccctgccaagcgctcggagcccccccaggacactctgcaccccctcaccccggtcctcctcattagggtgcagggcctaggtctcttccaggtgggggaggggggagagtcaggaataaggggatccccagaagtgcagagctgagcaggcttgggcctgtcatggctggccggaagtgtccccagctccctacagacgctgtagccatcactgcctctccagggaccctcctctcctgcccaggacagacccagccagaaccactgctaggatgggccgcacccaggggtctggcctccagggacctagagaatgggagggagaacggggccccaggagacccggccgccaccccacccgctacccttgggtgccacagggctgtgctgttgccaacagtaaacctgctcttactgtccaggctctggggtcttgtgatgagggtctggggagaaagtgggcccggggggaccccggaggctgtcggtggatgtgccgatgatggggctgacagtatgggctctgggcatccctgttcccccctctttcttccccccactcttctggggtcgggggttcctttcccttcccagttgctgtccctgggtcccctctttcatgtcccacaggccacagagcccagtgtgtccaaccagctgttctctcctcaaagcagcccccaagcaagtcccttctctagggtgtccctgaggacagcacagaggcgggactcagagaccccattcctcttcacgcagcccttaccccaagccctctagctgtgtggctggcagtgttggccacgtaggggctcccatccccccaccattgtgtcacatgggctgccaggctcagctcccagctgcgtccacagtgacctggatcagggtggggacaaggactggaccctccttctccagaaggccttcagctcttgccttgccatgcagtcacctccttccccctctgaccccagatcccaaaggtgcaccgttgccccagcccctttctggccccatggggtttctctgatgccttcatcatagaggcccggggctggtccgatggttggcaaaacttgactccggcccagtccccactcttggggacttagaacccctgctgtcctgggatctggcctgcctttctttggtcagtccctgtggtcccccaccagctccccctcccatagggctgcccaccaagccctgcccccagcccaagaggagcccccactgcctgcggggcagtgatgtctggccaccggctcacaccaatgacttggtcctggggtggcagaagcagcaggtgacaggagcagggcccctgtccctctcttctggccctgtggtacccaggccacacgttgtgcccgctcttggggctgaccggctgtagggaccaccagccgctgctactgtgggccgccccggggcagggtgggcagggcttttgtgggttatgaggacacagaagtccctgaggcccccagacctggctcagccaacctccttcctcccccggttgccccccactctaaagcctcctccctcccagcgtccactggctccaggctcctcacaacagcagctcatagacacggggcgtctccaggtggtcccagccctccagatgtttctagctctccaggtgggcgctgttttcacgtctgcctgcatccattcattccttcattcctcacctttatcctgttatctctatttttttaagctaccaggaaggaaagggaagaagagatcacgaaactgggacccccagaagggaggagtgggctttgaacttagacatctacctcagagctcaaataggttgtttaaaatcacattcaattttcagatgaaggggaactttatagtttttttttttttttttttttgagacagagtctcactgtgttgcccaggctggagtgcaaatggcttgatcttggttcactgcaacctctgcctcccaggttcaagcaattctcttgcctcagcctcccgagtagctgggactaaaggcgtgtgccaccatgcccagctaattcttgtatttttagtagagacggagtttctccatgttggccagactggtctcgaactcctgacctcaggtgatctgaccgccttggcctccgaaagtgctgagattacagttgcgagccactgtgcgtggccagaactttataataagagacttgaagctgggtgtgacggtgcacacctctagtcccagctactcgggaggccaagacagaaggatcaccttgaggccaggagtttaaggccagcctgggcaacatagcaaaacctagtccctaaaattaaaaaaaaaaaaaaaaaaaaaggaaaataaaggagacttgaaatttttgaactaaatagtggtgatggctacacattgtgaatgtaattaacaccactgagttaaacacttaaaatggttaaaatggcaaattgtatgttatacctattttactacaataaaaagtataaaaaagagaagatatttaggtgacttacagcaaccaattgcaacaaaacaaaatgttaagaaatgatctttttatgaggcaattggaaatttgaacactgatcaactataggatgattggaattattaatttttaaaggtgtgataagatactgcacttggctgggcacagtggcacatgcctgtaatcccagctacttggcaggctgaggtgggagaatcgcttgagctcaggagttcgagaccagcctgggcaacgtggcgaaatccccgtctttacaaaaacaaacaaacaaacaaaaaagatattgcagttgtgttgtaagcgtccttatctttcagagctacatagtggaatgtttatggaatatttaggataaatgatataggcatttgggatttgctgcaaaatgacccagaggcaggggtcagggggagaggtagagatgagacaagaggtagaggggagaggtagaggtagccacgagctgataattacagacaagagatgcggagtatgtgggggctcattatcctgcatagtctatctttgtatatctttgaacttttcaagaataaaaaagcttaaaaagt

SEQ ID NO: 364713 - DNA, 5471 bp, Homo sapiens
  misc_feature (1)..(1): n is a, c, g, or t
  misc_feature (4)..(4): n is a, c, g, or t
  misc_feature (6)..(6): n is a, c, g, or t
ngcngngcccagtccagcgcccgccgcccgccaccccggaccccggtgtctggcttcccccgagccgggaccccgcgatggccaagcgcagctcgctgtacatccgcatcgtggaggggaagaaccttcccgccaaggacatcactggcagcagcgacccctactgcatcgtgaaggtggacaatgagcccatcatcaggacagccacagtgtggaagaccctgtgccccttctggggtgaggagtaccaagtgcacctgccgcccaccttccacgctgtggctttctatgtcatggatgaggatgccctcagccgggacgacgttatcggaaaggtctgccttacaagggacaccatagcctctcaccctaagggtttcagcgggtgggcccacctgacggaggtcgaccccgacgaggaggtgcagggcgagatccacctgcggctggaagtgtggccaggggcccgggcctgccggctacgctgctctgtgctggaggccagggatctggccccaaaggaccgcaatggcacatctgaccccttcgtccgagtgcgctacaagggccggacacgggagacctcgatcgtgaagaagtcatgctacccacgctggaatgagacgtttgaatttgagctgcaggagggggccatggaggcgctgtgcgtggaggcctgggactgggaccttgtcagccgaaacgacttcctgggcaaagtggtgattgatgtccagagactgcgggtggtgcagcaggaggagggctggttccggctgcagcccgaccagtccaagagccggcggcatgacgagggcaacctgggctccttgcagctggaggtgcggctgcgggacgagacggtgctgccctccagctactaccagccactggtgcacctgctgtgccacgaggtcaagctgggcatgcagggcccagggcagctgatcccactcatcgaggagacaaccagcaccgagtgtcgccaggacgtggccacgaacctgctcaagctcttcctggggcaggggctggccaaggacttcctggacctgctcttccagctggagctgagtcgcaccagtgagaccaacaccctgttccggagcaactctctggcctcaaagtccatggagtcttttctgaaggtggccgggatgcagtacctgcacggcgtcctgggccccatcatcaacaaggtgtttgaggagaagaagtacgtggagctggaccccagcaaagtggaagttaaggatgtagggtgctccgggctgcaccgcccgcagaccgaggccgaggtgctggagcagagcgcgcagacgctgcgcgcccacctgggggccctgctgagcgcgctcagccgctcggttcgcgcgtgccccgccgtggtgcgcgccaccttccgccagctcttccggcgcgtgcgcgagcgcttccccggcgcccagcacgagaatgtaccgttcatcgccgtcaccagcttcctgtgcctgcgcttcttctctcccgccatcatgtcgcccaagctcttccacctgcgggagcgccacgcggacgcccgcaccagccgcaccctgctcctgttggccaaggcagtccagaacgtgggcaacatggacacgccggcttccagggccaaggaggcttggatggagccgctgcagcccaccgtgcgccagggcgtggcgcagctgaaggacttcatcaccaagctcgtggacatcgaggagaaggacgagctggacctgcagcggacgctgagtttgcaggcgccacctgtgaaggaggggccactcttcatccacaggaccaagggcaagggccccctcatgtcctcctccttcaagaagctctacttctccctcactaccgaggccctcagcttcgcgaagacgcccagctccaagtgtgtgaatgagcttaaccagtggctgtctgcgctgcggaaggtgagcatcaacaacaccggactgctgggctcctaccaccctggcgtcttccgtggggacaagtggagctgctgccaccaaaaagagaagacaggtcagggctgcgataagacccggtcacgggtgaccctgcaggagtggaatgaccctcttgaccatgaccttgaggcccagctcatctaccggcacctgctgggcgtggaggccatgctgtgggagaggcaccgggagctgagcgggggcgcagaggcaggcacggtgcccacgagccctggcaaagtccccgaggactcattggcccggctgctccgggtgctgcaggacctccgcgaggcccatagctccagcccggccggctccccaccctcagagcccaactgcctcctggagctgcagacgtgaggcccgccctacgctccccttgctgagtcccctgccaagcgctcggagcccccccaggacactctgcaccccctcaccccggtcctcctcattagggtgcagggcctaggtctcttccaggtgggggaggggggagagtcaggaataaggggatccccagaagtgcagagctgagcaggcttgggcctgtcatggctggccggaagtgtccccagctccctacagacgctgtagccatcactgcctctccagggaccctcctctcctgcccaggacagacccagccagaaccactgctaggatgggccgcacccaggggtctggcctccagggacctagagaatgggagggagaacggggccccaggagacccggccgccaccccacccgctacccttgggtgccacagggctgtgctgttgccaacagtaaacctgctcttactgtccaggctctggggtcttgtgatgagggtctggggagaaagtgggcccggggggaccccggaggctgtcggtggatgtgccgatgatggggctgacagtatgggctctgggcatccctgttcccccctctttcttccccccactcttctggggtcgggggttcctttcccttcccagttgctgtccctgggtcccctctttcatgtcccacaggccacagagcccagtgtgtccaaccagctgttctctcctcaaagcagcccccaagcaagtcccttctctagggtgtccctgaggacagcacagaggcgggactcagagaccccattcctcttcacgcagcccttaccccaagccctctagctgtgtggctggcagtgttggccacgtaggggctcccatccccccaccattgtgtcacatgggctgccaggctcagctcccagctgcgtccacagtgacctggatcagggtggggacaaggactggaccctccttctccagaaggccttcagctcttgccttgccatgcagtcacctccttccccctctgaccccagatcccaaaggtgcaccgttgccccagcccctttctggccccatggggtttctctgatgccttcatcatagaggcccggggctggtccgatggttggcaaaacttgactccggcccagtccccactcttggggacttagaacccctgctgtcctgggatctggcctgcctttctttggtcagtccctgtggtcccccaccagctccccctcccatagggctgcccaccaagccctgcccccagcccaagaggagcccccactgcctgcggggcagtgatgtctggccaccggctcacaccaatgacttggtcctggggtggcagaagcagcaggtgacaggagcagggcccctgtccctctcttctggccctgtggtacccaggccacacgttgtgcccgctcttggggctgaccggctgtagggaccaccagccgctgctactgtgggccgccccggggcagggtgggcagggcttttgtgggttatgaggacacagaagtccctgaggcccccagacctggctcagccaacctccttcctcccccggttgccccccactctaaagcctcctccctcccagcgtccactggctccaggctcctcacaacagcagctcatagacacggggcgtctccaggtggtcccagccctccagatgtttctagctctccaggtgggcgctgttttcacgtctgcctgcatccattcattccttcattcctcacctttatcctgttatctctatttttttaagctaccaggaaggaaagggaagaagagatcacgaaactgggacccccagaagggaggagtgggctttgaacttagacatctacctcagagctcaaataggttgtttaaaatcacattcaattttcagatgaaggggaactttatagtttttttttttttttttttttgagacagagtctcactgtgttgcccaggctggagtgcaaatggcttgatcttggttcactgcaacctctgcctcccaggttcaagcaattctcttgcctcagcctcccgagtagctgggactaaaggcgtgtgccaccatgcccagctaattcttgtatttttagtagagacggagtttctccatgttggccagactggtctcgaactcctgacctcaggtgatctgaccgccttggcctccgaaagtgctgagattacagttgcgagccactgtgcgtggccagaactttataataagagacttgaagctgggtgtgacggtgcacacctctagtcccagctactcgggaggccaagacagaaggatcaccttgaggccaggagtttaaggccagcctgggcaacatagcaaaacctagtccctaaaattaaaaaaaaaaaaaaaaaaaaaggaaaataaaggagacttgaaatttttgaactaaatagtggtgatggctacacattgtgaatgtaattaacaccactgagttaaacacttaaaatggttaaaatggcaaattgtatgttatacctattttactacaataaaaagtataaaaaagagaagatatttaggtgacttacagcaaccaattgcaacaaaacaaaatgttaagaaatgatctttttatgaggcaattggaaatttgaacactgatcaactataggatgattggaattattaatttttaaaggtgtgataagatactgcacttggctgggcacagtggcacatgcctgtaatcccagctacttggcaggctgaggtgggagaatcgcttgagctcaggagttcgagaccagcctgggcaacgtggcgaaatccccgtctttacaaaaacaaacaaacaaacaaaaaagatattgcagttgtgttgtaagcgtccttatctttcagagctacatagtggaatgtttatggaatatttaggataaatgatataggcatttgggatttgctgcaaaatgacccagaggcaggggtcagggggagaggtagagatgagacaagaggtagaggggagaggtagaggtagccacgagctgataattacagacaagagatgcggagtatgtgggggctcattatcctgcatagtctatctttgtatatctttgaacttttcaagaataaaaaagcttaaaaagt

SEQ ID NO: 364714 - DNA, 3854 bp, Homo sapiens
ttggtttcttccgggcttgaccgtcctggcctgtggggaggaagtcacagacctgtccctctgtgcccttccctctaggagttcccttttgtgtcagggtccagagccactgggaaaagtagtgatatcagggccaccaaatatatttggcgggttctggaatacctacgagcgtggccaaggggccagcggcggctgaaatccagcccacaccagcctcctgggctcctaccatcccggtgccttccgtggggacaagtggagctgctgccaccaaaaagacgagacagtgtgtgaatgagcttaaccagtggctgtctgcgctgcggaaggtgagcatcaacaacaccggactgctgggctcctaccaccctggcgtcttccgtggggacaagtggagctgctgccaccaaaaagagaagacaggtcagggctgcgataagacccggtcacgggtgaccctgcaggagtggaatgaccctcttgaccatgaccttgaggcccagctcatctaccggcacctgctgggcgtggaggccatgctgtgggagaggcaccgggagctgagcgggggcgcagaggcaggcacggtgcccacgagccctggcaaagtccccgaggactcattggcccggctgctccgggtgctgcaggacctccgcgaggcccatagctccagcccggccggctccccaccctcagagcccaactgcctcctggagctgcagacgtgaggcccgccctacgctccccttgctgagtcccctgccaagcgctcggagcccccccaggacactctgcaccccctcaccccggtcctcctcattagggtgcagggcctaggtctcttccaggtgggggaggggggagagtcaggaataaggggatccccagaagtgcagagctgagcaggcttgggcctgtcatggctggccggaagtgtccccagctccctacagacgctgtagccatcactgcctctccagggaccctcctctcctgcccaggacagacccagccagaaccactgctaggatgggccgcacccaggggtctggcctccagggacctagagaatgggagggagaacggggccccaggagacccggccgccaccccacccgctacccttgggtgccacagggctgtgctgttgccaacagtaaacctgctcttactgtccaggctctggggtcttgtgatgagggtctggggagaaagtgggcccggggggaccccggaggctgtcggtggatgtgccgatgatggggctgacagtatgggctctgggcatccctgttcccccctctttcttccccccactcttctggggtcgggggttcctttcccttcccagttgctgtccctgggtcccctctttcatgtcccacaggccacagagcccagtgtgtccaaccagctgttctctcctcaaagcagcccccaagcaagtcccttctctagggtgtccctgaggacagcacagaggcgggactcagagaccccattcctcttcacgcagcccttaccccaagccctctagctgtgtggctggcagtgttggccacgtaggggctcccatccccccaccattgtgtcacatgggctgccaggctcagctcccagctgcgtccacagtgacctggatcagggtggggacaaggactggaccctccttctccagaaggccttcagctcttgccttgccatgcagtcacctccttccccctctgaccccagatcccaaaggtgcaccgttgccccagcccctttctggccccatggggtttctctgatgccttcatcatagaggcccggggctggtccgatggttggcaaaacttgactccggcccagtccccactcttggggacttagaacccctgctgtcctgggatctggcctgcctttctttggtcagtccctgtggtcccccaccagctccccctcccatagggctgcccaccaagccctgcccccagcccaagaggagcccccactgcctgcggggcagtgatgtctggccaccggctcacaccaatgacttggtcctggggtggcagaagcagcaggtgacaggagcagggcccctgtccctctcttctggccctgtggtacccaggccacacgttgtgcccgctcttggggctgaccggctgtagggaccaccagccgctgctactgtgggccgccccggggcagggtgggcagggcttttgtgggttatgaggacacagaagtccctgaggcccccagacctggctcagccaacctccttcctcccccggttgccccccactctaaagcctcctccctcccagcgtccactggctccaggctcctcacaacagcagctcatagacacggggcgtctccaggtggtcccagccctccagatgtttctagctctccaggtgggcgctgttttcacgtctgcctgcatccattcattccttcattcctcacctttatcctgttatctctatttttttaagctaccaggaaggaaagggaagaagagatcacgaaactgggacccccagaagggaggagtgggctttgaacttagacatctacctcagagctcaaataggttgtttaaaatcacattcaattttcagatgaaggggaactttatagtttttttttttttttttttttgagacagagtctcactgtgttgcccaggctggagtgcaaatggcttgatcttggttcactgcaacctctgcctcccaggttcaagcaattctcttgcctcagcctcccgagtagctgggactaaaggcgtgtgccaccatgcccagctaattcttgtatttttagtagagacggagtttctccatgttggccagactggtctcgaactcctgacctcaggtgatctgaccgccttggcctccgaaagtgctgagattacagttgcgagccactgtgcgtggccagaactttataataagagacttgaagctgggtgtgacggtgcacacctctagtcccagctactcgggaggccaagacagaaggatcaccttgaggccaggagtttaaggccagcctgggcaacatagcaaaacctagtccctaaaattaaaaaaaaaaaaaaaaaaaaaggaaaataaaggagacttgaaatttttgaactaaatagtggtgatggctacacattgtgaatgtaattaacaccactgagttaaacacttaaaatggttaaaatggcaaattgtatgttatacctattttactacaataaaaagtataaaaaagagaagatatttaggtgacttacagcaaccaattgcaacaaaacaaaatgttaagaaatgatctttttatgaggcaattggaaatttgaacactgatcaactataggatgattggaattattaatttttaaaggtgtgataagatactgcacttggctgggcacagtggcacatgcctgtaatcccagctacttggcaggctgaggtgggagaatcgcttgagctcaggagttcgagaccagcctgggcaacgtggcgaaatccccgtctttacaaaaacaaacaaacaaacaaaaaagatattgcagttgtgttgtaagcgtccttatctttcagagctacatagtggaatgtttatggaatatttaggataaatgatataggcatttgggatttgctgcaaaatgacccagaggcaggggtcagggggagaggtagagatgagacaagaggtagaggggagaggtagaggtagccacgagctgataattacagacaagagatgcggagtatgtgggggctcattatcctgcatagtctatctttgtatatctttgaacttttcaagaataaaaaagcttaaaaagt

SEQ ID NO: 364715 - DNA, 3899 bp, Homo sapiens
tgggaggatcactggaggccaggagtttgagaacagcctggccaatgtagcaagaccccatctctaaaaaaaagaaattagccagccatgatggcattataggagtgagccactgggattataggagtgagccactgcacctgctctccaggccatgcgcccgggcatgggtcatgttccactggaggaagggcagcttctcctaattcactcaaagctgctgggttggtatggtggggaacatggcgtctggcgtggtacaggagctccgggttaggagggcttcctggaggaggtgacgtctgaacaggcctccccctccgtgtcccctgcagtgtgtgaatgagcttaaccagtggctgtctgcgctgcggaaggtgagcatcaacaacaccggactgctgggctcctaccaccctggcgtcttccgtggggacaagtggagctgctgccaccaaaaagagaagacaggtcagggctgcgataagacccggtcacgggtgaccctgcaggagtggaatgaccctcttgaccatgaccttgaggcccagctcatctaccggcacctgctgggcgtggaggccatgctgtgggagaggcaccgggagctgagcgggggcgcagaggcaggcacggtgcccacgagccctggcaaagtccccgaggactcattggcccggctgctccgggtgctgcaggacctccgcgaggcccatagctccagcccggccggctccccaccctcagagcccaactgcctcctggagctgcagacgtgaggcccgccctacgctccccttgctgagtcccctgccaagcgctcggagcccccccaggacactctgcaccccctcaccccggtcctcctcattagggtgcagggcctaggtctcttccaggtgggggaggggggagagtcaggaataaggggatccccagaagtgcagagctgagcaggcttgggcctgtcatggctggccggaagtgtccccagctccctacagacgctgtagccatcactgcctctccagggaccctcctctcctgcccaggacagacccagccagaaccactgctaggatgggccgcacccaggggtctggcctccagggacctagagaatgggagggagaacggggccccaggagacccggccgccaccccacccgctacccttgggtgccacagggctgtgctgttgccaacagtaaacctgctcttactgtccaggctctggggtcttgtgatgagggtctggggagaaagtgggcccggggggaccccggaggctgtcggtggatgtgccgatgatggggctgacagtatgggctctgggcatccctgttcccccctctttcttccccccactcttctggggtcgggggttcctttcccttcccagttgctgtccctgggtcccctctttcatgtcccacaggccacagagcccagtgtgtccaaccagctgttctctcctcaaagcagcccccaagcaagtcccttctctagggtgtccctgaggacagcacagaggcgggactcagagaccccattcctcttcacgcagcccttaccccaagccctctagctgtgtggctggcagtgttggccacgtaggggctcccatccccccaccattgtgtcacatgggctgccaggctcagctcccagctgcgtccacagtgacctggatcagggtggggacaaggactggaccctccttctccagaaggccttcagctcttgccttgccatgcagtcacctccttccccctctgaccccagatcccaaaggtgcaccgttgccccagcccctttctggccccatggggtttctctgatgccttcatcatagaggcccggggctggtccgatggttggcaaaacttgactccggcccagtccccactcttggggacttagaacccctgctgtcctgggatctggcctgcctttctttggtcagtccctgtggtcccccaccagctccccctcccatagggctgcccaccaagccctgcccccagcccaagaggagcccccactgcctgcggggcagtgatgtctggccaccggctcacaccaatgacttggtcctggggtggcagaagcagcaggtgacaggagcagggcccctgtccctctcttctggccctgtggtacccaggccacacgttgtgcccgctcttggggctgaccggctgtagggaccaccagccgctgctactgtgggccgccccggggcagggtgggcagggcttttgtgggttatgaggacacagaagtccctgaggcccccagacctggctcagccaacctccttcctcccccggttgccccccactctaaagcctcctccctcccagcgtccactggctccaggctcctcacaacagcagctcatagacacggggcgtctccaggtggtcccagccctccagatgtttctagctctccaggtgggcgctgttttcacgtctgcctgcatccattcattccttcattcctcacctttatcctgttatctctatttttttaagctaccaggaaggaaagggaagaagagatcacgaaactgggacccccagaagggaggagtgggctttgaacttagacatctacctcagagctcaaataggttgtttaaaatcacattcaattttcagatgaaggggaactttatagtttttttttttttttttttttgagacagagtctcactgtgttgcccaggctggagtgcaaatggcttgatcttggttcactgcaacctctgcctcccaggttcaagcaattctcttgcctcagcctcccgagtagctgggactaaaggcgtgtgccaccatgcccagctaattcttgtatttttagtagagacggagtttctccatgttggccagactggtctcgaactcctgacctcaggtgatctgaccgccttggcctccgaaagtgctgagattacagttgcgagccactgtgcgtggccagaactttataataagagacttgaagctgggtgtgacggtgcacacctctagtcccagctactcgggaggccaagacagaaggatcaccttgaggccaggagtttaaggccagcctgggcaacatagcaaaacctagtccctaaaattaaaaaaaaaaaaaaaaaaaaaggaaaataaaggagacttgaaatttttgaactaaatagtggtgatggctacacattgtgaatgtaattaacaccactgagttaaacacttaaaatggttaaaatggcaaattgtatgttatacctattttactacaataaaaagtataaaaaagagaagatatttaggtgacttacagcaaccaattgcaacaaaacaaaatgttaagaaatgatctttttatgaggcaattggaaatttgaacactgatcaactataggatgattggaattattaatttttaaaggtgtgataagatactgcacttggctgggcacagtggcacatgcctgtaatcccagctacttggcaggctgaggtgggagaatcgcttgagctcaggagttcgagaccagcctgggcaacgtggcgaaatccccgtctttacaaaaacaaacaaacaaacaaaaaagatattgcagttgtgttgtaagcgtccttatctttcagagctacatagtggaatgtttatggaatatttaggataaatgatataggcatttgggatttgctgcaaaatgacccagaggcaggggtcagggggagaggtagagatgagacaagaggtagaggggagaggtagaggtagccacgagctgataattacagacaagagatgcggagtatgtgggggctcattatcctgcatagtctatctttgtatatctttgaacttttcaagaataaaaaagcttaaaaagt

SEQ ID NO: 364716 - DNA, 3579 bp, Homo sapiens
  misc_feature (1)..(1): n is a, c, g, or t
  misc_feature (4)..(4): n is a, c, g, or t
  misc_feature (6)..(6): n is a, c, g, or t
  misc_feature (3021)..(3021): n is a, c, g, or t
ngcngngcccagtccagcgcccgccgcccgccaccccggaccccggtgtctggcttcccccgagccgggaccccgcgatggccaagcgcagctcgctgtacatccgcatcgtggaggggaagaaccttcccgccaaggacatcactggcagcagcgacccctactgcatcgtgaaggtggacaatgagcccatcatcaggtaccgcccccacccccaggaccgaggggcgctcagcctctcatcggcccgcgctctccccgcaaaggggacagccacagtgtggaagaccctgtgccccttctggggtgaggagtaccaagtgcacctgccgcccaccttccacgctgtggctttctatgtcatggatgaggatgccctcagccgggacgacgttatcggaaaggtctgccttacaagggacaccatagcctctcaccctaagggtttcagcgggtgggcccacctgacggaggtcgaccccgacgaggaggtgcagggcgagatccacctgcggctggaagtgtggccaggggcccgggcctgccggctacgctgctctgtgctggaggccagggatctggccccaaaggaccgcaatggcacatctgaccccttcgtccgagtgcgctacaagggccggacacgggagacctcgatcgtgaagaagtcatgctacccacgctggaatgagacgtttgaatttgagctgcaggagggggccatggaggcgctgtgcgtggaggcctgggactgggaccttgtcagccgaaacgacttcctgggcaaagtggtgattgatgtccagagactgcgggtggtgcagcaggaggagggctggttccggctgcagcccgaccagtccaagagccggcggcatgacgagggcaacctgggctccttgcagctggaggtgcggctgcgggacgagacggtgctgccctccagctactaccagccactggtgcacctgctgtgccacgaggtcaagctgggcatgcagggcccagggcagctgatcccactcatcgaggagacaaccagcaccgagtgtcgccaggacgtggccacgaacctgctcaagctcttcctggggcaggggctggccaaggacttcctggacctgctcttccagctggagctgagtcgcaccagtgagaccaacaccctgttccggagcaactctctggcctcaaagtccatggagtcttttctgaaggtggccgggatgcagtacctgcacggcgtcctgggccccatcatcaacaaggtgtttgaggagaagaagtacgtggagctggaccccagcaaagtggaagttaaggatgtagggtgctccgggctgcaccgcccgcagaccgaggccgaggtgctggagcagagcgcgcagacgctgcgcgcccacctgggggccctgctgagcgcgctcagccgctcggttcgcgcgtgccccgccgtggtgcgcgccaccttccgccagctcttccggcgcgtgcgcgagcgcttccccggcgcccagcacgagaatgtaccgttcatcgccgtcaccagcttcctgtgcctgcgcttcttctctcccgccatcatgtcgcccaagctcttccacctgcgggagcgccacgcggacgcccgcaccagccgcaccctgctcctgttggccaaggcagtccagaacgtgggcaacatggacacgccggcttccagggccaaggaggcttggatggagccgctgcagcccaccgtgcgccagggcgtggcgcagctgaaggacttcatcaccaagctcgtggacatcgaggagaaggacgagctggacctgcagcggacgctgagtttgcaggcgccacctgtgaaggaggggccactcttcatccacaggaccaagggcaagggccccctcatgtcctcctccttcaagaagctctacttctccctcactaccgaggccctcagcttcgcgaagacgcccagctccaagaaaagcgccctcatcaagttagccaacatccgggcagcggaaaaggttgaggaaaagagctttggcggctcgcacgtcatgcaggtcatctacacggacgacgccggcaggccccagactgcctacctgcagtgcaagtgtgtgaatgagcttaaccagtggctgtctgcgctgcggaaggtgagcatcaacaacaccggactgctgggctcctaccaccctggcgtcttccgtggggacaagtggagctgctgccaccaaaaagagaagacaggtcagggctgcgataagacccggtcacgggtgaccctgcaggagtggaatgaccctcttgaccatgaccttgaggcccagctcatctaccggcacctgctgggcgtggaggccatgctgtgggagaggcaccgggagctgagcgggggcgcagaggcaggcacggtgcccacgagccctggcaaagtccccgaggactcattggcccggctgctccgggtgctgcaggacctccgcgaggcccatagctccagcccggccggctccccaccctcagagcccaactgcctcctggagctgcagacgtgaggcccgccctacgctccccttgctgagtcccctgccaagcgctcggagcccccccaggacactctgcaccccctcaccccggtcctcctcattagggtgcagggcctaggtctcttccaggtgggggaggggggagagtcaggaataaggggatccccagaagtgcagagctgagcaggcttgggcctgtcatggctggccggaagtgtccccagctccctacagacgctgtagccatcactgcctctccagggaccctcctctcctgcccaggacagacccagccagaaccactgctaggatgggccgcacccaggggtctggcctccagggacctagagaatgggagggagaacggggccccaggagacccggccgccaccccacccgctacccttgggtgccacagggctgtgctgttgccaacagtaaacctgctcttactgtcaaaaaaaaaaaaaanaaaaaaaaaaaaaaaaaaaaaaaaaaaaaaaaaaaaaaaaaaaaaaaaaaaaaaaaaaaaaagggggggggggccacaacaaaaaatcatcctcccgcgaaggggcgcgccgcaacactaaagcaacgcacgcacccccacgatgttagtagaaaccagggcggcgccccatagtcgggaggagcagctaatatataaaaaaccggagggacggcggcggcgccgagggaaaaacacaacgacccgggagaggcgggagaagaacaaagacggagcaggtggagaaaaattttatgagagagagaacacatcttattatgggcgggggagcaggacaaaaatataggtgggggaagaaatcacttcctgaaaggtaagataatttaagagccgccgctgagggggcagggaataatatataccaaaggacgacgagggacgtatatgtggggtgtggaaaaaacaacgcgacgcgattagaattcggtcgatgtgcaggagagaacgatgttggtgcacatacaaggggtatttagattatgtacgaacgaatatacg

SEQ ID NO: 364717 - DNA, 4292 bp, Homo sapiens
  misc_feature (291)..(291): n is a, c, g, or t
  misc_feature (3817)..(3817): n is a, c, g, or t
tgtctggctaattttttaaatttctttagagacggggtctcactatgttgctcaggctgctgtaatcccagctactcaggaggctgaggcaggagaattacttgaacccaggaggcggaggttgcagtgagctaagattgcaccattgcactccagcctgggcaacagagcacgactccatctcaaaaacaaacaaaaaaaaagagtgtcacctggggctacttggccagacacagagagcaaggagacatccctattatctgtcaaaaataattgttggggctgagcacngtggctcatgcctgtaatctcagcactttgggaggtcggggcaggaggacttgaggcctagagtttgagaccagcctgggcaacatggcgaaaccccatctctactaaaaatacaaaaaattagccaggcatggtggtggatgcctgtaatcgcagctactcaggagagggcgctggagaatcacttgaactcatggtgcgcaggttgcagggagccaagatggcaccattgtgctccagcctgggcaacgagagcaaaactccatctcaaaaaaaataaagaacctgcgagtgagttcccacacgttttcctaatgggctgctgctttcctaggagtctctcgctcatagaaaaggcacaaactgaaagaggaagcagatcccattgctgtggaagtcccattgttaggaagctctgcttttctggagttcaaattcgcattcatgacgctttaaaccgtcagagctgggtgggtcctcctacaacaaaatagtttgctctctctctcctagttaacaggctttcaaatattagaagatcaatgttctgaccccattaaaatttctcttttgtggaatgaaaagctctgatttaacccatcttcaaggctggtttgatggaggaataggggctgagtcacctgcatttcccctccctgcacaaagtcctgggcccagatctggggtctgtctctgctgagggtggggtgaaccaggaagcacctccttcttcatctccttgatgaatgggtataatggttgccatggaactggggcttgtttgatgacctggggctgggtgggcctctgagagcctttatagctgattgccttttgggagaggggaggtgggagccccaccctgtctcatgagtcaccccaaaggtgcatgggcaggcaggtgctggggaatcggctactccccagagcttggcgtggccatccctgtggcccctctgggagtctggagcccattccctcacgctggtactcactgcagctggggacatctgcactaggaagacaggacacggcatggaagctggcctctgcccagaagccatgacattctggtcaccagcctgatgctataaaacgagtgtcacggccgggcatggtggttcacacctgtaatcccagcactttgggaggccaaggcgggtggatcatgaggtctggagttcgagaccagcctggccaacatggcgaaatcccgtctctactaaaaataagaacattagccaggtgtggtggcacatacctgtagtcccagctcctctggaggctgaggcaggagaatcacttaaacccaggaggcggagattgcagtgagccgagaccacggcattggactccaggctgggcaacagagcacgactccatctcaaaaacaaacaaaaaaaaaagagtgtcacctggggctacttggccagacacagagagcaaggagacatccctattatctgtcaaaaataattattacagctgtgagccaccgcacccggccgcattcttctaaatcacagtacatctggttcccagtgcccaggctctcagggcagagggtccagtgtgatcactttgcatggcctctctcccctcctgagcttgtgccagggccccagggctgacctggagaaggaaaatggcagagggtgaagatggggtgtctggtttggggaccatcctggccccccttgtcactgttggcatctcttctgcacagtggcattgctgggaggtgcttactgtgcctattcaaggggctggcagccgcagcctcactgcagatcagggacttggcttcccggttgaccacaggtccaagaacctgcagggtccagcctcccccccatccccagtcttccccaccctggcccggccctccaggtgcagaaacatgcaggcccctctccaggactgtgggaggagtgtgtccctcagactggcctgtgtcctggctcctcttaccacctcttccagaggttgtcacctgcagctgccccaggataaaggcaaggccagagaggactcctgaactcctgtgtgcctggggtggcaggggcaaacatagccaactggtggcctgagcggggccatggtgaggacacccttggtggcttgtcccacatcaagctgggaggtgacactgaggatgcattagtctgcagcgtatgataaaaacggcatttcaggccaggcgtggtggctcatgcctgtcaccccagcaccttgggaggccgaggtgggcagatcatatgaggtcaggactttgagaccagcctggccaacatggtgaaaactcatctgtactaaaaaaacaaaaattatgtgggttggtggtgtgcgcctgtaatcccagctacttgggaggctgaggcaggagaatcacttgaacctgggaggcggaggctacaacgagccgaaattgcaccactgcactccagcctgactccgtctcaaaaaaaaaaaaaaaaaaggcatttcagttcaaatagggaaaggatacatctttctttctttctttctttctttctttctttctttctttctttctttctttctttctttcttctttctttctttttctttcctcccttcctttatctctctctctctctctctttctctctttctttttgagatggagtttcactctcgctgcccaggctggagtacaatggtgcgatctcggcttattattattctccatgttggtcaggctggtcttgaactcccaacctcaggtgatccgcctgcgttggcctcccaaagtgctggtgtgagccactgcacccggcttaggatgcatttttcaatattttagtgtttgaataacgggctaacttgagaaaaaaataatttgaatcacacatcacaccaaaaataaattctaggtggattttaacactttcaaaaattattattagtttagagacagggtctcactccgtcgcctaggctggagtgcagtggtatgatcatggttcactgcaaccttaaactcctggcctcatatgatcctccggcctcagcctctcaaagtactggaactacaaacatgcaccaccacgcccagcctaggtgggtttttaaaatccattcaagggcgggtgcagtggctcacacctgtaatcccagcattttgggaagccaaggtgggaggatcacttgagcccaggagttcgagaccagcctgggcaacatagtgagaccacatctctacaaaaaatttaaaaatgagccaggcatggtggtgcacacctgtagtctctgctattcaggaggctgaggcgggatcattgtttgagcccaggagacagattgcagtgagctatgatggcaccactgcatggcagcctgggtgacaaagggagactcagtctcaaaaaaaaccaaaagttacccagcaacccaagtcatatcctgatgatatccatactcctcagtcatgcatcccgtggtgcgggggctgaccccaagaggagctgctgcccccagagggtggggagccgaggcaggcctnggtcagacttaccaggctatgctcccagcccagccctcactagggacccccgagtgcatctctctcctctccaggcctctgtttctccatctgtgcaaccacagtgttggacatggtagtcccaagtgtctgctcgtaactttgccctctctgtgcccccaggtcagggctgcgataagacccggtcacgggtgaccctgcaggagtggaatgaccctcttgaccatgaccttgaggcccagctcatctaccggcacctgctgggcgtggaggccatgctgtgggagaggcaccgggagctgagcgggggcgcagaggcaggcacggtgcccacgagccctggcaaagtccccgaggactcattggcccggctgctccgggtgctgcaggacctccgcgaggcccatagctccagcccggccggctccccaccctcagagcccaactgcctcctggagctgcagacgtgaggccc

SEQ ID NO: 364718 - DNA, 2401 bp, Homo sapiens
  misc_feature (1)..(1): n is a, c, g, or t
  misc_feature (4)..(4): n is a, c, g, or t
  misc_feature (6)..(6): n is a, c, g, or t
ngcngngcccagtccagcgcccgccgcccgccaccccggaccccggtgtctggcttcccccgagccgggaccccgcgatggccaagcgcagctcgctgtacatccgcatcgtggaggggaagaaccttcccgccaaggacatcactggcagcagcgacccctactgcatcgtgaaggtggacaatgagcccatcatcaggacagccacagtgtggaagaccctgtgccccttctggggtgaggagtaccaagtgcacctgccgcccaccttccacgctgtggctttctatgtcatggatgaggatgccctcagccgggacgacgttatcggaaaggtctgccttacaagggacaccatagcctctcaccctaagggtttcagcgggtgggcccacctgacggaggtcgaccccgacgaggaggtgcagggcgagatccacctgcggctggaagtgtggccaggggcccgggcctgccggctacgctgctctgtgctggaggccagggatctggccccaaaggaccgcaatggcacatctgaccccttcgtccgagtgcgctacaagggccggacacgggagacctcgatcgtgaagaagtcatgctacccacgctggaatgagacgtttgaatttgagctgcaggagggggccatggaggcgctgtgcgtggaggcctgggactgggaccttgtcagccgaaacgacttcctgggcaaagtggtgattgatgtccagagactgcgggtggtgcagcaggaggagggctggttccggctgcagcccgaccagtccaagagccggcggcatgacgagggcaacctgggctccttgcagctggaggtgcggctgcgggacgagacggtgctgccctccagctactaccagccactggtgcacctgctgtgccacgaggtcaagctgggcatgcagggcccagggcagctgatcccactcatcgaggagacaaccagcaccgagtgtcgccaggacgtggccacgaacctgctcaagctcttcctggggcaggggctggccaaggacttcctggacctgctcttccagctggagctgagtcgcaccagtgagaccaacaccctgttccggagcaactctctggcctcaaagtccatggagtcttttctgaaggtggccgggatgcagtacctgcacggcgtcctgggccccatcatcaacaaggtgtttgaggagaagaagtacgtggagctggaccccagcaaagtggaagttaaggatgtagggtgctccgggctgcaccgcccgcagaccgaggccgaggtgctggagcagagcgcgcagacgctgcgcgcccacctgggggccctgctgagcgcgctcagccgctcggttcgcgcgtgccccgccgtggtgcgcgccaccttccgccagctcttccggcgcgtgcgcgagcgcttccccggcgcccagcacgaggtgcgccctccacccgctgggctaggctgggccgggttggactgggctggggcgaggggtgaagagcggtggggaaccagggagcgctggggaggaccagggaggctgtgtcgcagcgagggtcagggacggagcctaaggggagggggctgccaggagccctggtctgggggactccagcccgcgctcttccgcacccctccagaatgtaccgttcatcgccgtcaccagcttcctgtgcctgcgcttcttctctcccgccatcatgtcgcccaagctcttccacctgcgggagcgccacgcggacgcccgcaccagccgcaccctgctcctgttggccaaggcagtccagaacgtgggcaacatggacacgccggcttccagggccaaggaggcttggatggagccgctgcagcccaccgtgcgccagggcgtggcgcagctgaaggacttcatcaccaagctcgtggacatcgaggagaaggacgagctggacctgcagcggacgctgagtttgcaggcgccacctgtgaaggaggggccactcttcatccacaggaccaagggcaagggccccctcatgtcctcctccttcaagaagctctacttctccctcactaccgaggccctcagcttcgcgaagacgcccagctccaagaaaagcgccctcatcaagttagccaacatccgggcagcggaaaaggttgaggaaaagagctttggcggctcgcacgtcatgcaggtcatctacacggacgacgccggcaggccccagactgcctacctgcagtgcaagtgtgtgaatgagcttaaccagtggctgtctgcgctgcggaaggtgagcatcaacaacaccggactgctgggctcctaccaccctggcgtcttccgtggggacaagtggagctgctgccaccaaaaagagaagacaggtgggagaggaggcc

SEQ ID NO: 364719 - DNA, 2279 bp, Homo sapiens
  misc_feature (1)..(1): n is a, c, g, or t
  misc_feature (4)..(4): n is a, c, g, or t
  misc_feature (6)..(6): n is a, c, g, or t
ngcngngcccagtccagcgcccgccgcccgccaccccggaccccggtgtctggcttcccccgagccgggaccccgcgatggccaagcgcagctcgctgtacatccgcatcgtggaggggaagaaccttcccgccaaggacatcactggcagcagcgacccctactgcatcgtgaaggtggacaatgagcccatcatcaggacagccacagtgtggaagaccctgtgccccttctggggtgaggagtaccaagtgcacctgccgcccaccttccacgctgtggctttctatgtcatggatgaggatgccctcagccgggacgacgttatcggaaaggtctgccttacaagggacaccatagcctctcaccctaagggtttcagcgggtgggcccacctgacggaggtcgaccccgacgaggaggtgcagggcgagatccacctgcggctggaagtgtggccaggggcccgggcctgccggctacgctgctctgtgctggaggccagggatctggccccaaaggaccgcaatggcacatctgaccccttcgtccgagtgcgctacaagggccggacacgggagacctcgatcgtgaagaagtcatgctacccacgctggaatgagacgtttgaatttgagctgcaggagggggccatggaggcgctgtgcgtggaggcctgggactgggaccttgtcagccgaaacgacttcctgggcaaagtggtgattgatgtccagagactgcgggtggtgcagcaggaggagggctggttccggctgcagcccgaccagtccaagagccggcggcatgacgagggcaacctgggctccttgcagctggaggtgcggctgcgggacgagacggtgctgccctccagctactaccagccactggtgcacctgctgtgccacgaggtcaagctgggcatgcagggcccagggcagctgatcccactcatcgaggagacaaccagcaccgagtgtcgccaggacgtggccacgaacctgctcaagctcttcctggggcaggggctggccaaggacttcctggacctgctcttccagctggagctgagtcgcaccagtgagaccaacaccctgttccggagcaactctctggcctcaaagtccatggagtcttttctgaaggtggccgggatgcagtacctgcacggcgtcctgggccccatcatcaacaaggtgtttgaggagaagaagtacgtggagctggaccccagcaaagtggaagttaaggatgtagggtgctccgggctgcaccgcccgcagaccgaggccgaggtgctggagcagagcgcgcagacgctgcgcgcccacctgggggccctgctgagcgcgctcagccgctcggttcgcgcgtgccccgccgtggtgcgcgccaccttccgccagctcttccggcgcgtgcgcgagcgcttccccggcgcccagcacgagaatgtaccgttcatcgccgtcaccagcttcctgtgcctgcgcttcttctctcccgccatcatgtcgcccaagctcttccacctgcgggagcgccacgcggacgcccgcaccagccgcaccctgctcctgttggccaaggcagtccagaacgtgggcaacatggacacgccggcttccagggccaaggaggcttggatggagccgctgcagcccaccgtgcgccagggcgtggcgcagctgaaggacttcatcaccaagctcgtggacatcgaggagaaggacgagctggacctgcagcggacgctgagtttgcaggcgccacctgtgaaggaggggccactcttcatccacaggaccaagggcaagggccccctcatgtcctcctccttcaagaagctctacttctccctcactaccgaggccctcagcttcgcgaagacgcccagctccaagaaaagcgccctcatcaagttagccaacatccgggcagcggaaaaggttgaggaaaagagctttggcggctcgcacgtcatgcaggtcatctacacggacgacgccggcaggccccagactgcctacctgcagtgcaaggtgcggggaggggagcgggtgctgtgggagtggcctgaacactgtgggagtggcttgggtgctgtgggagaggcctgggtactgtgggagtggcatgagtcctgtgggagtggcctgggtattgtgggagaggcctgagctctatgggagtggcctgggtgctgtgggagtgccctggatgctatgggaatgccctgggtgctgtgggaatggcctgggtgctatgggagtggc

SEQ ID NO: 364720 - DNA, 2701 bp, Homo sapiens
  misc_feature (2226)..(2226): n is a, c, g, or t
agcaattctcatgcctcaaccctcagcctcatgagtaactgggactacaggcgtgcaccaccatgcgcagctaattttttgtatttttagtagagatgggtctaaccatgttgcctaggctggtctcgaactcctgagctcaagcgatcctcttgcctcaacctcccaaagtgctgggattacagctgtgagccaccgcacccggccgcattcttctaaatcacagtacatctggttcccagtgcccaggctctcagggcagagggtccagtgtgatcactttgcatggcctctctcccctcctgagcttgtgccagggccccagggctgacctggagaaggaaaatggcagagggtgaagatggggtgtctggtttggggaccatcctggccccccttgtcactgttggcatctcttctgcacagtggcattgctgggaggtgcttactgtgcctattcaaggggctggcagccgcagcctcactgcagatcagggacttggcttcccggttgaccacaggtccaagaacctgcagggtccagcctcccccccatccccagtcttccccaccctggcccggccctccaggtgcagaaacatgcaggcccctctccaggactgtgggaggagtgtgtccctcagactggcctgtgtcctggctcctcttaccacctcttccagaggttgtcacctgcagctgccccaggataaaggcaaggccagagaggactcctgaactcctgtgtgcctggggtggcaggggcaaacatagccaactggtggcctgagcggggccatggtgaggacacccttggtggcttgtcccacatcaagctgggaggtgacactgaggatgcattagtctgcagcgtatgataaaaacggcatttcaggccaggcgtggtggctcatgcctgtcaccccagcaccttgggaggccgaggtgggcagatcatatgaggtcaggactttgagaccagcctggccaacatggtgaaaactcatctgtactaaaaaaacaaaaattatgtgggttggtggtgtgcgcctgtaatcccagctacttgggaggctgaggcaggagaatcacttgaacctgggaggcggaggctacaacgagccgaaattgcaccactgcactccagcctgactccgtctcaaaaaaaaaaaaaaaaaaggcatttcagttcaaatagggaaaggatacatctttctttctttctttctttctttctttctttctttctttctttctttctttctttctttcttctttctttctttttctttcctcccttcctttatctctctctctctctctctttctctctttctttttgagatggagtttcactctcgctgcccaggctggagtacaatggtgcgatctcggcttattattattctccatgttggtcaggctggtcttgaactcccaacctcaggtgatccgcctgcgttggcctcccaaagtgctggtgtgagccactgcacccggcttaggatgcatttttcaatattttagtgtttgaataacgggctaacttgagaaaaaaataatttgaatcacacatcacaccaaaaataaattctaggtggattttaacactttcaaaaattattattagtttagagacagggtctcactccgtcgcctaggctggagtgcagtggtatgatcatggttcactgcaaccttaaactcctggcctcatatgatcctccggcctcagcctctcaaagtactggaactacaaacatgcaccaccacgcccagcctaggtgggtttttaaaatccattcaagggcgggtgcagtggctcacacctgtaatcccagcattttgggaagccaaggtgggaggatcacttgagcccaggagttcgagaccagcctgggcaacatagtgagaccacatctctacaaaaaatttaaaaatgagccaggcatggtggtgcacacctgtagtctctgctattcaggaggctgaggcgggatcattgtttgagcccaggagacagattgcagtgagctatgatggcaccactgcatggcagcctgggtgacaaagggagactcagtctcaaaaaaaaccaaaagttacccagcaacccaagtcatatcctgatgatatccatactcctcagtcatgcatcccgtggtgcgggggctgaccccaagaggagctgctgcccccagagggtggggagccgaggcaggcctnggtcagacttaccaggctatgctcccagcccagccctcactagggacccccgagtgcatctctctcctctccaggcctctgtttctccatctgtgcaaccacagtgttggacatggtagtcccaagtgtctgctcgtaactttgccctctctgtgcccccaggtcagggctgcgataagacccggtcacgggtgaccctgcaggagtggaatgaccctcttgaccatgaccttgaggcccagctcatctaccggcacctgctgggcgtggaggccatgctgtgggagaggcaccgggagctgagcgggggcgcagaggcaggcacggtgcccacgagccctggcaaagtccccgaggactcattggcccggctgctccgggtgctgcaggacctccgcgaggcccatagctccagcccggccggctccccaccctcagagcccaactgcctcctggagctgcagacgtgaggccc

SEQ ID NO: 364721 - DNA, 2857 bp, Homo sapiens
  misc_feature (2382)..(2382): n is a, c, g, or t
gccggaccggtgttccttcgtctctgtgtctggccaagtagccccaggtgacctctttttttttttttttttttgagatggagtcttgctctgtcgcccaggctggggtacaatggcacgatctcggctcactgcaatctccgcctcctgggttcaagtgattctcctgcctcagcctcccgagtagctgggactacaggtgtgcaccaccacgcctgggtaatctttgtatttttagtagagacggggtttcaccatgttggccaggctggtctcgaactcctgacctcaagtgatcctcccgcctcggcctcccaaagtgctgggattacagattacagctgtgagccaccgcacccggccgcattcttctaaatcacagtacatctggttcccagtgcccaggctctcagggcagagggtccagtgtgatcactttgcatggcctctctcccctcctgagcttgtgccagggccccagggctgacctggagaaggaaaatggcagagggtgaagatggggtgtctggtttggggaccatcctggccccccttgtcactgttggcatctcttctgcacagtggcattgctgggaggtgcttactgtgcctattcaaggggctggcagccgcagcctcactgcagatcagggacttggcttcccggttgaccacaggtccaagaacctgcagggtccagcctcccccccatccccagtcttccccaccctggcccggccctccaggtgcagaaacatgcaggcccctctccaggactgtgggaggagtgtgtccctcagactggcctgtgtcctggctcctcttaccacctcttccagaggttgtcacctgcagctgccccaggataaaggcaaggccagagaggactcctgaactcctgtgtgcctggggtggcaggggcaaacatagccaactggtggcctgagcggggccatggtgaggacacccttggtggcttgtcccacatcaagctgggaggtgacactgaggatgcattagtctgcagcgtatgataaaaacggcatttcaggccaggcgtggtggctcatgcctgtcaccccagcaccttgggaggccgaggtgggcagatcatatgaggtcaggactttgagaccagcctggccaacatggtgaaaactcatctgtactaaaaaaacaaaaattatgtgggttggtggtgtgcgcctgtaatcccagctacttgggaggctgaggcaggagaatcacttgaacctgggaggcggaggctacaacgagccgaaattgcaccactgcactccagcctgactccgtctcaaaaaaaaaaaaaaaaaaggcatttcagttcaaatagggaaaggatacatctttctttctttctttctttctttctttctttctttctttctttctttctttctttctttcttctttctttctttttctttcctcccttcctttatctctctctctctctctctttctctctttctttttgagatggagtttcactctcgctgcccaggctggagtacaatggtgcgatctcggcttattattattctccatgttggtcaggctggtcttgaactcccaacctcaggtgatccgcctgcgttggcctcccaaagtgctggtgtgagccactgcacccggcttaggatgcatttttcaatattttagtgtttgaataacgggctaacttgagaaaaaaataatttgaatcacacatcacaccaaaaataaattctaggtggattttaacactttcaaaaattattattagtttagagacagggtctcactccgtcgcctaggctggagtgcagtggtatgatcatggttcactgcaaccttaaactcctggcctcatatgatcctccggcctcagcctctcaaagtactggaactacaaacatgcaccaccacgcccagcctaggtgggtttttaaaatccattcaagggcgggtgcagtggctcacacctgtaatcccagcattttgggaagccaaggtgggaggatcacttgagcccaggagttcgagaccagcctgggcaacatagtgagaccacatctctacaaaaaatttaaaaatgagccaggcatggtggtgcacacctgtagtctctgctattcaggaggctgaggcgggatcattgtttgagcccaggagacagattgcagtgagctatgatggcaccactgcatggcagcctgggtgacaaagggagactcagtctcaaaaaaaaccaaaagttacccagcaacccaagtcatatcctgatgatatccatactcctcagtcatgcatcccgtggtgcgggggctgaccccaagaggagctgctgcccccagagggtggggagccgaggcaggcctnggtcagacttaccaggctatgctcccagcccagccctcactagggacccccgagtgcatctctctcctctccaggcctctgtttctccatctgtgcaaccacagtgttggacatggtagtcccaagtgtctgctcgtaactttgccctctctgtgcccccaggtcagggctgcgataagacccggtcacgggtgaccctgcaggagtggaatgaccctcttgaccatgaccttgaggcccagctcatctaccggcacctgctgggcgtggaggccatgctgtgggagaggcaccgggagctgagcgggggcgcagaggcaggcacggtgcccacgagccctggcaaagtccccgaggactcattggcccggctgctccgggtgctgcaggacctccgcgaggcccatagctccagcccggccggctccccaccctcagagcccaactgcctcctggagctgcagacgtgaggccc

SEQ ID NO: 364722 - DNA, 3498 bp, Homo sapiens
  misc_feature (3023)..(3023): n is a, c, g, or t
ggagctgggattacaggcatgcgccaccacacctggctcacagggtgagaccctgtctctaaaaacaacaatgacaaaaatgacacaatagtgagggcacaggccccagtcactgacttagattctaatcccagctcttccaactgctgtttcttcacctgcggagcctcagtttccccatctgtcattggggataccagcccctgcttcacgggtgcctaggggattcccagattatggaggtgcctcaaggtgcccggtggggctgagggtggagggtatgggggttcagggccgggtccctggctgagctgaccccacaggtttcagcgggtgggcccacctgacggaggtcgaccccgacgaggaggtgcagggcgagatccacctgcggctggaagtgtggccaggggcccgggcctgccggctacgctgctctgtgctggaggccaggtgagactcaggggcctgggggcgggcagtgggtcccctgcaactagagaaacccaatgaggaagctgagccccccctcgccccacctctacctcctggtcccagagctggccacctcccatcaaagcctgctctcaagagagggtctcgccaggcacggcgtctcacacctgtaatcccagcactttgggaggccgaggcaggtggttcacctgaggtctggagttcgagaccagcctggccaacatggcgaaatcccgtctctactaaaaataagaacattagccaggtgtggtggcacatacctgtagtcccagctcctctggaggctgaggcaggagaatcacttaaacccaggaggcggagattgcagtgagccgagaccacggcattggactccaggctgggcaacagagcacgactccatctcaaaaacaaacaaaaaaaaaagagtgtcacctggggctacttggccagacacagagagcaaggagacatccctattatctgtcaaaaataattattacagctgtgagccaccgcacccggccgcattcttctaaatcacagtacatctggttcccagtgcccaggctctcagggcagagggtccagtgtgatcactttgcatggcctctctcccctcctgagcttgtgccagggccccagggctgacctggagaaggaaaatggcagagggtgaagatggggtgtctggtttggggaccatcctggccccccttgtcactgttggcatctcttctgcacagtggcattgctgggaggtgcttactgtgcctattcaaggggctggcagccgcagcctcactgcagatcagggacttggcttcccggttgaccacaggtccaagaacctgcagggtccagcctcccccccatccccagtcttccccaccctggcccggccctccaggtgcagaaacatgcaggcccctctccaggactgtgggaggagtgtgtccctcagactggcctgtgtcctggctcctcttaccacctcttccagaggttgtcacctgcagctgccccaggataaaggcaaggccagagaggactcctgaactcctgtgtgcctggggtggcaggggcaaacatagccaactggtggcctgagcggggccatggtgaggacacccttggtggcttgtcccacatcaagctgggaggtgacactgaggatgcattagtctgcagcgtatgataaaaacggcatttcaggccaggcgtggtggctcatgcctgtcaccccagcaccttgggaggccgaggtgggcagatcatatgaggtcaggactttgagaccagcctggccaacatggtgaaaactcatctgtactaaaaaaacaaaaattatgtgggttggtggtgtgcgcctgtaatcccagctacttgggaggctgaggcaggagaatcacttgaacctgggaggcggaggctacaacgagccgaaattgcaccactgcactccagcctgactccgtctcaaaaaaaaaaaaaaaaaaggcatttcagttcaaatagggaaaggatacatctttctttctttctttctttctttctttctttctttctttctttctttctttctttctttcttctttctttctttttctttcctcccttcctttatctctctctctctctctctttctctctttctttttgagatggagtttcactctcgctgcccaggctggagtacaatggtgcgatctcggcttattattattctccatgttggtcaggctggtcttgaactcccaacctcaggtgatccgcctgcgttggcctcccaaagtgctggtgtgagccactgcacccggcttaggatgcatttttcaatattttagtgtttgaataacgggctaacttgagaaaaaaataatttgaatcacacatcacaccaaaaataaattctaggtggattttaacactttcaaaaattattattagtttagagacagggtctcactccgtcgcctaggctggagtgcagtggtatgatcatggttcactgcaaccttaaactcctggcctcatatgatcctccggcctcagcctctcaaagtactggaactacaaacatgcaccaccacgcccagcctaggtgggtttttaaaatccattcaagggcgggtgcagtggctcacacctgtaatcccagcattttgggaagccaaggtgggaggatcacttgagcccaggagttcgagaccagcctgggcaacatagtgagaccacatctctacaaaaaatttaaaaatgagccaggcatggtggtgcacacctgtagtctctgctattcaggaggctgaggcgggatcattgtttgagcccaggagacagattgcagtgagctatgatggcaccactgcatggcagcctgggtgacaaagggagactcagtctcaaaaaaaaccaaaagttacccagcaacccaagtcatatcctgatgatatccatactcctcagtcatgcatcccgtggtgcgggggctgaccccaagaggagctgctgcccccagagggtggggagccgaggcaggcctnggtcagacttaccaggctatgctcccagcccagccctcactagggacccccgagtgcatctctctcctctccaggcctctgtttctccatctgtgcaaccacagtgttggacatggtagtcccaagtgtctgctcgtaactttgccctctctgtgcccccaggtcagggctgcgataagacccggtcacgggtgaccctgcaggagtggaatgaccctcttgaccatgaccttgaggcccagctcatctaccggcacctgctgggcgtggaggccatgctgtgggagaggcaccgggagctgagcgggggcgcagaggcaggcacggtgcccacgagccctggcaaagtccccgaggactcattggcccggctgctccgggtgctgcaggacctccgcgaggcccatagctccagcccggccggctccccaccctcagagcccaactgcctcctggagctgcagacgtgaggccc

SEQ ID NO: 364723 - DNA, 3196 bp, Homo sapiens
  misc_feature (291)..(291): n is a, c, g, or t
  misc_feature (2785)..(2785): n is a, c, g, or t
  misc_feature (2868)..(2868): n is a, c, g, or t
  misc_feature (2888)..(2888): n is a, c, g, or t
  misc_feature (3104)..(3104): n is a, c, g, or t
  misc_feature (3145)..(3145): n is a, c, g, or t
  misc_feature (3161)..(3164): n is a, c, g, or t
  misc_feature (3171)..(3171): n is a, c, g, or t
tgtctggctaattttttaaatttctttagagacggggtctcactatgttgctcaggctgctgtaatcccagctactcaggaggctgaggcaggagaattacttgaacccaggaggcggaggttgcagtgagctaagattgcaccattgcactccagcctgggcaacagagcacgactccatctcaaaaacaaacaaaaaaaaagagtgtcacctggggctacttggccagacacagagagcaaggagacatccctattatctgtcaaaaataattgttggggctgagcacngtggctcatgcctgtaatctcagcactttgggaggtcggggcaggaggacttgaggcctagagtttgagaccagcctgggcaacatggcgaaaccccatctctactaaaaatacaaaaaattagccaggcatggtggtggatgcctgtaatcgcagctactcaggagagggcgctggagaatcacttgaactcatggtgcgcaggttgcagggagccaagatggcaccattgtgctccagcctgggcaacgagagcaaaactccatctcaaaaaaaataaagaacctgcgagtgagttcccacacgttttcctaatgggctgctgctttcctaggagtctctcgctcatagaaaaggcacaaactgaaagaggaagcagatcccattgctgtggaagtcccattgttaggaagctctgcttttctggagttcaaattcgcattcatgacgctttaaaccgtcagagctgggtgggtcctcctacaacaaaatagtttgctctctctctcctagttaacaggctttcaaatattagaagatcaatgttctgaccccattaaaatttctcttttgtggaatgaaaagctctgatttaacccatcttcaaggctggtttgatggaggaataggggctgagtcacctgcatttcccctccctgcacaaagtcctgggcccagatctggggtctgtctctgctgagggtggggtgaaccaggaagcacctccttcttcatctccttgatgaatgggtataatggttgccatggaactggggcttgtttgatgacctggggctgggtgggcctctgagagcctttatagctgattgccttttgggagaggggaggtgggagccccaccctgtctcatgagtcaccccaaaggtgcatgggcaggcaggtgctggggaatcggctactccccagagcttggcgtggccatccctgtggcccctctgggagtctggagcccattccctcacgctggtactcactgcagctggggacatctgcactaggaagacaggacacggcatggaagctggcctctgcccagaagccatgacattctggtcaccagcctgatgctataaaacgagtgtcacggccgggcatggtggttcacacctgtaatcccagcactttgggaggccaaggcgggtggatcatgaggtctggagttcgagaccagcctggccaacatggcgaaatcccgtctctactaaaaataagaacattagccaggtgtggtggcacatacctgtagtcccagctcctctggaggctgaggcaggagaatcacttaaacccaggaggcggagattgcagtgagccgagaccacggcattggactccaggctgggcaacagagcacgactccatctcaaaaacaaacaaaaaaaaaagagtgtcacctggggctacttggccagacacagagagcaaggagacatccctattatctgtcaaaaataattattacagctgtgagccaccgcacccggccgcattcttctaaatcacagtacatctggttcccagtgcccaggctctcagggcagagggtccagtgtgatcactttgcatggcctctctcccctcctgagcttgtgccagggccccagggctgacctggagaaggaaaatggcagagggtgaagatggggtgtctggtttggggaccatcctggccccccttgtcactgttggcatctcttctgcacagtggcattgctgggaggtgcttactgtgcctattcaaggggctggcagccgcagcctcactgcagatcagggacttggcttcccggttgaccacaggtccaagaacctgcagggtccagcctcccccccatccccagtcttccccaccctggcccggccctccaggtgcagaaacatgcaggcccctctccaggactgtgggaggagtgtgtccctcagactggcctgtgtcctggctcctcttaccacctcttccagaggttgtcacctgcagctgccccaggataaaggcaaggccagagaggactcctgaactcctgtgtgcctggggtggcaggggcaaacatagccaactggtggcctgagcggggccatggtgaggacacccttggtggcttgtcccacatcaagctgggaggtgacactgaggatgcattagtctgcagcgtatgataaaaacggcatttcaggccaggcgtggtggctcatgcctgtcaccccagcaccttgggaggccgaggtgggcagatcatatgaggtcaggactttgagaccagcctggccaacatggtgaaaactcatctgtactaaaaaaacaaaaattatgtgggttggtggtgtgcgcctgtaatcccagctacttgggaggctgaggcaggagaatcacttgaacctgggaggcggaggctacaacgagccgaaattgcaccactgcactccagcctgggagacagagcaagactctgtctccaaaacaaacaaacaaacnaaaaaaccctgtagcttgggatcagccttctcttctattgtttttctttaaaaaataaaaattaaaaatagatgtagatgctntgttgctgaggctggcctcnaactcctggcctcaggtgatcctcccgccatgacctccaaaaccacagggattgtaggtgtgagcactgcacccagccttatgtttttttctacataaaaaacagcacaggattatcttccagagctaataaatatgttcaaataaccacaaccccattaaggaaaaatatcactgggcagcaaataatcaatccagaccaatatgatcacaattnctgtgaaggtgagaaaagttcatttttattatgtttccccnagagacgcactctatnnnnctcttgnaaacgcacaactcttctaataaacg

SEQ ID NO: 364724 - DNA, 2383 bp, Homo sapiens
  misc_feature (1)..(1): n is a, c, g, or t
  misc_feature (4)..(4): n is a, c, g, or t
  misc_feature (6)..(6): n is a, c, g, or t
ngcngngcccagtccagcgcccgccgcccgccaccccggaccccggtgtctggcttcccccgagccgggaccccgcgatggccaagcgcagctcgctgtacatccgcatcgtggaggggaagaaccttcccgccaaggacatcactggcagcagcgacccctactgcatcgtgaaggtggacaatgagcccatcatcaggacagccacagtgtggaagaccctgtgccccttctggggtgaggagtaccaagtgcacctgccgcccaccttccacgctgtggctttctatgtcatggatgaggatgccctcagccgggacgacgttatcggaaaggtctgccttacaagggacaccatagcctctcaccctaagggtttcagcgggtgggcccacctgacggaggtcgaccccgacgaggaggtgcagggcgagatccacctgcggctggaagtgtggccaggggcccgggcctgccggctacgctgctctgtgctggaggccagggatctggccccaaaggaccgcaatggcacatctgaccccttcgtccgagtgcgctacaagggccggacacgggagacctcgatcgtgaagaagtcatgctacccacgctggaatgagacgtttgaatttgagctgcaggagggggccatggaggcgctgtgcgtggaggcctgggactgggaccttgtcagccgaaacgacttcctgggcaaagtggtgattgatgtccagagactgcgggtggtgcagcaggaggagggctggttccggctgcagcccgaccagtccaagagccggcggcatgacgagggcaacctgggctccttgcagctggaggtgcggctgcgggacgagacggtgctgccctccagctactaccagccactggtgcacctgctgtgccacgaggtcaagctgggcatgcagggcccagggcagctgatcccactcatcgaggagacaaccagcaccgagtgtcgccaggacgtggccacgaacctgctcaagctcttcctggggcaggggctggccaaggacttcctggacctgctcttccagctggagctgagtcgcaccagtgagaccaacaccctgttccggagcaactctctggcctcaaagtccatggagtcttttctgaaggtggccgggatgcagtacctgcacggcgtcctgggccccatcatcaacaaggtgtttgaggagaagaagtacgtggagctggaccccagcaaagtggaagttaaggatgtagggtgctccgggctgcaccgcccgcagaccgaggccgaggtgctggagcagagcgcgcagacgctgcgcgcccacctgggggccctgctgagcgcgctcagccgctcggttcgcgcgtgccccgccgtggtgcgcgccaccttccgccagctcttccggcgcgtgcgcgagcgcttccccggcgcccagcacgaggtgcgccctccacccgctgggctaggctgggccgggttggactgggctggggcgaggggtgaagagcggtggggaaccagggagcgctggggaggaccagggaggctgtgtcgcagcgagggtcagggacggagcctaaggggagggggctgccaggagccctggtctgggggactccagcccgcgctcttccgcacccctccagaatgtaccgttcatcgccgtcaccagcttcctgtgcctgcgcttcttctctcccgccatcatgtcgcccaagctcttccacctgcgggagcgccacgcggacgcccgcaccagccgcaccctgctcctgttggccaaggtgcgggccttgcggccacgggcgggatgcacagctgggtgtcctaccggggccctggcctggactgcagagtgttccctaccggctccggcgaggccactggcacgcccacgtaggcactgcacttcacagtttgcaaagccttcctgtggccaccttgtccgagctccatctcatggataagggaacaggcctgcgaggggtcgggggttgccaaggccgcccatcctgtcggtggtgaatcgcgggaccttccaacccaggtctgcttactctcaggctgcacctatgtgcccggcaccggggtggggtatccagtgcagcagcgtcagttaaaccctcccatcatctgtgcctgttgacatttgctccatccttgagctccatagccccgccgccacctgctactgacgcgtgtcccgcctccaagcccatggccctgccttcctcagtccacctgtcaccccgctcaccaccagctgttgatgtttgctccgcccttgagccccatgactacgtccactgcctgctgttcagatttgctcagcccttgagccccatggcccctcccactgctccgctcccc

SEQ ID NO: 364725 - DNA, 2220 bp, Homo sapiens
  misc_feature (1)..(1): n is a, c, g, or t
  misc_feature (4)..(4): n is a, c, g, or t
  misc_feature (6)..(6): n is a, c, g, or t
ngcngngcccagtccagcgcccgccgcccgccaccccggaccccggtgtctggcttcccccgagccgggaccccgcgatggccaagcgcagctcgctgtacatccgcatcgtggaggggaagaaccttcccgccaaggacatcactggcagcagcgacccctactgcatcgtgaaggtggacaatgagcccatcatcaggacagccacagtgtggaagaccctgtgccccttctggggtgaggagtaccaagtgcacctgccgcccaccttccacgctgtggctttctatgtcatggatgaggatgccctcagccgggacgacgttatcggaaaggtctgccttacaagggacaccatagcctctcaccctaagggtttcagcgggtgggcccacctgacggaggtcgaccccgacgaggaggtgcagggcgagatccacctgcggctggaagtgtggccaggggcccgggcctgccggctacgctgctctgtgctggaggccagggatctggccccaaaggaccgcaatggcacatctgaccccttcgtccgagtgcgctacaagggccggacacgggagacctcgatcgtgaagaagtcatgctacccacgctggaatgagacgtttgaatttgagctgcaggagggggccatggaggcgctgtgcgtggaggcctgggactgggaccttgtcagccgaaacgacttcctgggcaaagtggtgattgatgtccagagactgcgggtggtgcagcaggaggagggctggttccggctgcagcccgaccagtccaagagccggcggcatgacgagggcaacctgggctccttgcagctggaggtgcggctgcgggacgagacggtgctgccctccagctactaccagccactggtgcacctgctgtgccacgaggtcaagctgggcatgcagggcccagggcagctgatcccactcatcgaggagacaaccagcaccgagtgtcgccaggacgtggccacgaacctgctcaagctcttcctggggcaggggctggccaaggacttcctggacctgctcttccagctggagctgagtcgcaccagtgagaccaacaccctgttccggagcaactctctggcctcaaagtccatggagtcttttctgaaggtggccgggatgcagtacctgcacggcgtcctgggccccatcatcaacaaggtgtttgaggagaagaagtacgtggagctggaccccagcaaagtggaagttaaggatgtagggtgctccgggctgcaccgcccgcagaccgaggccgaggtgctggagcagagcgcgcagacgctgcgcgcccacctgggggccctgctgagcgcgctcagccgctcggttcgcgcgtgccccgccgtggtgcgcgccaccttccgccagctcttccggcgcgtgcgcgagcgcttccccggcgcccagcacgagaatgtaccgttcatcgccgtcaccagcttcctgtgcctgcgcttcttctctcccgccatcatgtcgcccaagctcttccacctgcgggagcgccacgcggacgcccgcaccagccgcaccctgctcctgttggccaaggcagtccagaacgtgggcaacatggacacgccggcttccagggccaaggaggcttggatggagccgctgcagcccaccgtgcgccagggcgtggcgcagctgaaggacttcatcaccaagctcgtggacatcgaggagaaggacggtgagcgccgccctgcacagacccgcccacagcctactgctgacgtttgctccgcccttgagccccacggccccacccatcgctgtttgttcctctcgtggccccacccaccgcctgctgttggcatttgccaggcccccaggccatagacccacgcaccactgtttgtgcttcctgtgaccctgcccactgcctgctgttgacgtttgccccacccctagacccatggcctcaccctcccatcatctgtgcctgttgacatttgctccatccttgagctccatagccccgccgccacctgctactgacgcgtgtcccgcctccaagcccatggccctgccttcctcagtccacctgtcaccccgctcaccaccagctgttgatgtttgctccgcccttgagccccatgactacgtccactgcctgctgttcagatttgctcagcccttgagccccatggcccctcccactgctccgctcccc

SEQ ID NO: 364726 - DNA, 2410 bp, Homo sapiens
  misc_feature (291)..(291): n is a, c, g, or t
  misc_feature (1852)..(1852): n is a, c, g, or t
tgtctggctaattttttaaatttctttagagacggggtctcactatgttgctcaggctgctgtaatcccagctactcaggaggctgaggcaggagaattacttgaacccaggaggcggaggttgcagtgagctaagattgcaccattgcactccagcctgggcaacagagcacgactccatctcaaaaacaaacaaaaaaaaagagtgtcacctggggctacttggccagacacagagagcaaggagacatccctattatctgtcaaaaataattgttggggctgagcacngtggctcatgcctgtaatctcagcactttgggaggtcggggcaggaggacttgaggcctagagtttgagaccagcctgggcaacatggcgaaaccccatctctactaaaaatacaaaaaattagccaggcatggtggtggatgcctgtaatcgcagctactcaggagagggcgctggagaatcacttgaactcatggtgcgcaggttgcagggagccaagatggcaccattgtgctccagcctgggcaacgagagcaaaactccatctcaaaaaaaataaagaacctgcgagtgagttcccacacgttttcctaatgggctgctgctttcctaggagtctctcgctcatagaaaaggcacaaactgaaagaggaagcagatcccattgctgtggaagtcccattgttaggaagctctgcttttctggagttcaaattcgcattcatgacgctttaaaccgtcagagctgggtgggtcctcctacaacaaaatagtttgctctctctctcctagttaacaggctttcaaatattagaagatcaatgttctgaccccattaaaatttctcttttgtggaatgaaaagctctgatttaacccatcttcaaggctggtttgatggaggaataggggctgagtcacctgcatttcccctccctgcacaaagtcctgggcccagatctggggtctgtctctgctgagggtggggtgaaccaggaagcacctccttcttcatctccttgatgaatgggtataatggttgccatggaactggggcttgtttgatgacctggggctgggtgggcctctgagagcctttatagctgattgccttttgggagaggggaggtgggagccccaccctgtctcatgagtcaccccaaaggtgcatgggcaggcaggtgctggggaatcggctactccccagagcttggcgtggccatccctgtggcccctctgggagtctggagcccattccctcacgctggtactcactgcagctggggacatctgcactaggaagacaggacacggcatggaagctggcctctgcccagaagccatgacattctggtcaccagcctgatgctataaaacgagtgtcacggccgggcatggtggttcacacctgtaatcccagcactttgggaggccaaggcgggtggatcatgaggtctggagttcgagaccagcctggccaacatggcgaaatcccgtctctactaaaaataagaacattagccaggtgtggtggcacatacctgtagtcccagctcctctggaggctgaggcaggagaatcacttaaacccaggaggcggagattgcagtgagccgagaccacggcattggactccaggctgggcaacaagagcaaaactccgtctcaaaataaatacatacatacatacatgcatacatacatacagggattaaaatagtctagtactgacacctgaacagacagattgatccaagaaatgaaacagaaattccagaagttgacctctgtctcacaaccacacaaccacaccacacgacaccacgaaaaaaaaaaaaaanaaaaaaaaaaaaaaaaaaaaaaaaaaaaaaaaaaaaaaaaaaaaaaaaaaaaaaaaaaaaaagggggggggggccacaacaaaaaatcatcctcccgcgaaggggcgcgccgcaacactaaagcaacgcacgcacccccacgatgttagtagaaaccagggcggcgccccatagtcgggaggagcagctaatatataaaaaaccggagggacggcggcggcgccgagggaaaaacacaacgacccgggagaggcgggagaagaacaaagacggagcaggtggagaaaaattttatgagagagagaacacatcttattatgggcgggggagcaggacaaaaatataggtgggggaagaaatcacttcctgaaaggtaagataatttaagagccgccgctgagggggcagggaataatatataccaaaggacgacgagggacgtatatgtggggtgtggaaaaaacaacgcgacgcgattagaattcggtcgatgtgcaggagagaacgatgttggtgcacatacaaggggtatttagattatgtacgaacgaatatacg

SEQ ID NO: 364727 - DNA, 2000 bp, Homo sapiens
  misc_feature (291)..(291): n is a, c, g, or t
tgtctggctaattttttaaatttctttagagacggggtctcactatgttgctcaggctgctgtaatcccagctactcaggaggctgaggcaggagaattacttgaacccaggaggcggaggttgcagtgagctaagattgcaccattgcactccagcctgggcaacagagcacgactccatctcaaaaacaaacaaaaaaaaagagtgtcacctggggctacttggccagacacagagagcaaggagacatccctattatctgtcaaaaataattgttggggctgagcacngtggctcatgcctgtaatctcagcactttgggaggtcggggcaggaggacttgaggcctagagtttgagaccagcctgggcaacatggcgaaaccccatctctactaaaaatacaaaaaattagccaggcatggtggtggatgcctgtaatcgcagctactcaggagagggcgctggagaatcacttgaactcatggtgcgcaggttgcagggagccaagatggcaccattgtgctccagcctgggcaacgagagcaaaactccatctcaaaaaaaataaagaacctgcgagtgagttcccacacgttttcctaatgggctgctgctttcctaggagtctctcgctcatagaaaaggcacaaactgaaagaggaagcagatcccattgctgtggaagtcccattgttaggaagctctgcttttctggagttcaaattcgcattcatgacgctttaaaccgtcagagctgggtgggtcctcctacaacaaaatagtttgctctctctctcctagttaacaggctttcaaatattagaagatcaatgttctgaccccattaaaatttctcttttgtggaatgaaaagctctgatttaacccatcttcaaggctggtttgatggaggaataggggctgagtcacctgcatttcccctccctgcacaaagtcctgggcccagatctggggtctgtctctgctgagggtggggtgaaccaggaagcacctccttcttcatctccttgatgaatgggtataatggttgccatggaactggggcttgtttgatgacctggggctgggtgggcctctgagagcctttatagctgattgccttttgggagaggggaggtgggagccccaccctgtctcatgagtcaccccaaaggtgcatgggcaggcaggtgctggggaatcggctactccccagagcttggcgtggccatccctgtggcccctctgggagtctggagcccattccctcacgctggtactcactgcagctggggacatctgcactaggaagacaggacacggcatggaagctggcctctgcccagaagccatgacattctggtcaccagcctgatgctataaaacgagtgtcacggccgggcatggtggttcacacctgtaatcccagcactttgggaggccaaggcgggtggatcatgaggtctggagttcgagaccagcctggccaacatggcgaaatcccgtctctactaaaaataagaacattagccaggtgtggtggcacatacctgtagtcccagctcctctggaggctgaggcaggagaatcacttaaacccaggaggcggagattgcagtgagccgagaccacggcattggactccaggctgggcaacaagagcaaaactccgtctcaaaataaatacatacatacatacatgcatacatacatacagggattaaaatagtctagtactgacacctgaacagacagattgatccaagaaatgaaacagaaattccagaagttgacctgaacacacacacacacacacacacacacacacacacacacacacacacacgaaggcgtgaaagactccatgaccctcaaggtataagatgcatttttttttttttttgagacagggtctcactctgtcacccagactggatgcagtggtgcactatcccagctcagttctaccctccatccccccaacctcccccaaccacc

SEQ ID NO: 364728 - DNA, 672 bp, Homo sapiens
  misc_feature (25)..(25): n is a, c, g, or t
gtgactccagaggatcccgcaggcnatccggttcaatattcaaaatgcgatctagagccgggagtgggggtgcagtggctcacgcctgtaatcccagcactttgggaggcagaggcgggcggatgacttgaggtcaggagttctcaaccagcctggccaaaatggtgaaaccccatctctactaaaaacacaaaaattaaccaggcgtggtggtgggcacctgtaatcctagctacttgggaggctgaggcaggagaatgaatcgcttgaacccaggaggtggaggttgcagtgagccgagaccacaccattgcactctagcctgggcaacaagagcaaaactccgtctcaaaataaatacatacatacatacatgcatacatacatacagggattaaaatagtctagtactgacacctgaacagacagattgatccaagaaatgaaacagaaattccagaagttgacctgaacacacacacacacacacacacacacacacacacacacacacacacacgaaggcgtgaaagactccatgaccctcaaggtataagatgcatttttttttttttttgagacagggtctcactctgtcacccagactggatgcagtggtgcactatcccagctcagttctaccctccatccccccaacctcccccaaccacc

SEQ ID NO: 364729 - DNA, 723 bp, Homo sapiens
  misc_feature (208)..(208): n is a, c, g, or t
atctagcaggatccttagtcatagcgtatttcagccgcggcggcttcccctcctggcaataccaacgcatacatttcttcctggctctgtgagtggtttgctgcctcctatccgtcaatatcaatgcctgggacagcgggggaagtgggatccagccttcatttattctttcactattgtcctctttactctgtgtacaaaaaagagnggatatactatcatagactgttgtttctaaacagaaactcaggctgggcacagtggaatacgcctgtaatcctagctacttgggaggctgaggcaggagaatgaatcgcttgaacccaggaggtggaggttgcagtgagccgagaccacaccattgcactctagcctgggcaacaagagcaaaactccgtctcaaaataaatacatacatacatacatgcatacatacatacagggattaaaatagtctagtactgacacctgaacagacagattgatccaagaaatgaaacagaaattccagaagttgacctgaacacacacacacacacacacacacacacacacacacacacacacacacgaaggcgtgaaagactccatgaccctcaaggtataagatgcatttttttttttttttgagacagggtctcactctgtcacccagactggatgcagtggtgcactatcccagctcagttctaccctccatccccccaacctcccccaaccacc

SEQ ID NO: 364730 - DNA, 1108 bp, Homo sapiens
ggagctgggattacaggcatgcgccaccacacctggctcacagggtgagaccctgtctctaaaaacaacaatgacaaaaatgacacaatagtgagggcacaggccccagtcactgacttagattctaatcccagctcttccaactgctgtttcttcacctgcggagcctcagtttccccatctgtcattggggataccagcccctgcttcacgggtgcctaggggattcccagattatggaggtgcctcaaggtgcccggtggggctgagggtggagggtatgggggttcagggccgggtccctggctgagctgaccccacaggtttcagcgggtgggcccacctgacggaggtcgaccccgacgaggaggtgcagggcgagatccacctgcggctggaagtgtggccaggggcccgggcctgccggctacgctgctctgtgctggaggccaggtgagactcaggggcctgggggcgggcagtgggtcccctgcaactagagaaacccaatgaggaagctgagccccccctcgccccacctctacctcctggtcccagagctggccacctcccatcaaagcctgctctcaagagagggtctcgccaggcacggcgtctcacacctgtaatcccagcactttgggaggccgaggcaggtggttcacctgaggtctggagttcgagaccagcctggccaacatggcgaaatcccgtctctactaaaaataagaacattagccaggtgtggtggcacatacctgtagtcccagctcctctggaggctgaggcaggagaatcacttaaacccaggaggcggagattgcagtgagccgagaccacggcattggactccaggctgggcaacagagcacgactccatctcaaaaacaaacaaaaaaaaaagagtgtcacctggggctacttggccagacacagagagcaaggagacatccctattatctgtcaaaaataattgttggggctgagcacagtggctcatgcctataatctcagcactttgggaggtcggggcaggaggacttgaggcctagagtttgagaccagcctgggcaacatagcgagcaccccatctccagaaaaaatttaa

SEQ ID NO: 364731 - DNA, 788 bp, Homo sapiens
  misc_feature (1)..(1): n is a, c, g, or t
  misc_feature (4)..(4): n is a, c, g, or t
  misc_feature (6)..(6): n is a, c, g, or t
ngcngngcccagtccagcgcccgccgcccgccaccccggaccccggtgtctggcttcccccgagccgggaccccgcgatggccaagcgcagctcgctgtacatccgcatcgtggaggggaagaaccttcccgccaaggacatcactggcagcagcgacccctactgcatcgtgaaggtggacaatgagcccatcatcaggtaccgcccccacccccaggaccgaggggcgctcagcctctcatcggcccgcgctctccccgcaaaggggacagccacagtgtggaagaccctgtgccccttctggggtgaggagtaccaagtgcacctgccgcccaccttccacgctgtggctttctatgtcatggatgaggatgccctcagccgggacgacgttatcggaaaggtctgccttacaagggacaccatagcctctcaccctaagggtaagttctcccttccctcccatactggtctgcccagtccctgcctccctcccactcggagacctcccctctaggctccgtctggtctcctgctcagggaaagccatttctactctccccagaagccggggccacgttctgtactcctggcctctgttctgcagcatgttcccaagcctggttgttactgcctcttccctagggtgaagaggggctgctatgggtggaatctgaggcctctgctggcagaagaaggggcctccttacactctattgctgaagcatagggaccccttctccaaatcaggccagctccttctgtaacccatggggtcgcctccatc

SEQ ID NO: 364732 - DNA, 422 bp, Homo sapiens
cccgtcagaggcgtttagtgaatctggaactttgagttgcagtgagccgagaccacaccattgcactctagcctgggcaacaagagcaaaactccgtctcaaaataaatacatacatacatacatgcatacatacatacagggattaaaatagtctagtactgacacctgaacagacagattgatccaagaaatgaaacagaaattccagaagttgacctgaacacacacacacacacacacacacacacacacacacacacacacacacgaaggcgtgaaagactccatgaccctcaaggtataagatgcatttttttttttttttgagacagggtctcactctgtcacccagactggatgcagtggtgcactatcccagctcagttctaccctccatccccccaacctcccccaaccacc

SEQ ID NO: 364733 - DNA, 5609 bp, Homo sapiens
  misc_feature (1)..(1): n is a, c, g, or t
  misc_feature (4)..(4): n is a, c, g, or t
  misc_feature (6)..(6): n is a, c, g, or t
ngcngngcccagtccagcgcccgccgcccgccaccccggaccccggtgtctggcttcccccgagccgggaccccgcgatggccaagcgcagctcgctgtacatccgcatcgtggaggggaagaaccttcccgccaaggacatcactggcagcagcgacccctactgcatcgtgaaggtggacaatgagcccatcatcaggacagccacagtgtggaagaccctgtgccccttctggggtgaggagtaccaagtgcacctgccgcccaccttccacgctgtggctttctatgtcatggatgaggatgccctcagccgggacgacgttatcggaaaggtctgccttacaagggacaccatagcctctcaccctaagggtttcagcgggtgggcccacctgacggaggtcgaccccgacgaggaggtgcagggcgagatccacctgcggctggaagtgtggccaggggcccgggcctgccggctacgctgctctgtgctggaggccagggatctggccccaaaggaccgcaatggcacatctgaccccttcgtccgagtgcgctacaagggccggacacgggagacctcgatcgtgaagaagtcatgctacccacgctggaatgagacgtttgaatttgagctgcaggagggggccatggaggcgctgtgcgtggaggcctgggactgggaccttgtcagccgaaacgacttcctgggcaaagtggtgattgatgtccagagactgcgggtggtgcagcaggaggagggctggttccggctgcagcccgaccagtccaagagccggcggcatgacgagggcaacctgggctccttgcagctggaggtgcggctgcgggacgagacggtgctgccctccagctactaccagccactggtgcacctgctgtgccacgaggtcaagctgggcatgcagggcccagggcagctgatcccactcatcgaggagacaaccagcaccgagtgtcgccaggacgtggccacgaacctgctcaagctcttcctggggcaggggctggccaaggacttcctggacctgctcttccagctggagctgagtcgcaccagtgagaccaacaccctgttccggagcaactctctggcctcaaagtccatggagtcttttctgaaggtggccgggatgcagtacctgcacggcgtcctgggccccatcatcaacaaggtgtttgaggagaagaagtacgtggagctggaccccagcaaagtggaagttaaggatgtagggtgctccgggctgcaccgcccgcagaccgaggccgaggtgctggagcagagcgcgcagacgctgcgcgcccacctgggggccctgctgagcgcgctcagccgctcggttcgcgcgtgccccgccgtggtgcgcgccaccttccgccagctcttccggcgcgtgcgcgagcgcttccccggcgcccagcacgagaatgtaccgttcatcgccgtcaccagcttcctgtgcctgcgcttcttctctcccgccatcatgtcgcccaagctcttccacctgcgggagcgccacgcggacgcccgcaccagccgcaccctgctcctgttggccaaggcagtccagaacgtgggcaacatggacacgccggcttccagggccaaggaggcttggatggagccgctgcagcccaccgtgcgccagggcgtggcgcagctgaaggacttcatcaccaagctcgtggacatcgaggagaaggacgagctggacctgcagcggacgctgagtttgcaggcgccacctgtgaaggaggggccactcttcatccacaggaccaagggcaagggccccctcatgtcctcctccttcaagaagctctacttctccctcactaccgaggccctcagcttcgcgaagacgcccagctccaagaaaagcgccctcatcaagttagccaacatccgggcagcggaaaaggttgaggaaaagagctttggcggctcgcacgtcatgcaggtcatctacacggacgacgccggcaggccccagactgcctacctgcagtgcaagtgtgtgaatgagcttaaccagtggctgtctgcgctgcggaaggtgagcatcaacaacaccggactgctgggctcctaccaccctggcgtcttccgtggggacaagtggagctgctgccaccaaaaagagaagacaggtcagggctgcgataagacccggtcacgggtgaccctgcaggagtggaatgaccctcttgaccatgaccttgaggcccagctcatctaccggcacctgctgggcgtggaggccatgctgtgggagaggcaccgggagctgagcgggggcgcagaggcaggcacggtgcccacgagccctggcaaagtccccgaggactcattggcccggctgctccgggtgctgcaggacctccgcgaggcccatagctccagcccggccggctccccaccctcagagcccaactgcctcctggagctgcagacgtgaggcccgccctacgctccccttgctgagtcccctgccaagcgctcggagcccccccaggacactctgcaccccctcaccccggtcctcctcattagggtgcagggcctaggtctcttccaggtgggggaggggggagagtcaggaataaggggatccccagaagtgcagagctgagcaggcttgggcctgtcatggctggccggaagtgtccccagctccctacagacgctgtagccatcactgcctctccagggaccctcctctcctgcccaggacagacccagccagaaccactgctaggatgggccgcacccaggggtctggcctccagggacctagagaatgggagggagaacggggccccaggagacccggccgccaccccacccgctacccttgggtgccacagggctgtgctgttgccaacagtaaacctgctcttactgtccaggctctggggtcttgtgatgagggtctggggagaaagtgggcccggggggaccccggaggctgtcggtggatgtgccgatgatggggctgacagtatgggctctgggcatccctgttcccccctctttcttccccccactcttctggggtcgggggttcctttcccttcccagttgctgtccctgggtcccctctttcatgtcccacaggccacagagcccagtgtgtccaaccagctgttctctcctcaaagcagcccccaagcaagtcccttctctagggtgtccctgaggacagcacagaggcgggactcagagaccccattcctcttcacgcagcccttaccccaagccctctagctgtgtggctggcagtgttggccacgtaggggctcccatccccccaccattgtgtcacatgggctgccaggctcagctcccagctgcgtccacagtgacctggatcagggtggggacaaggactggaccctccttctccagaaggccttcagctcttgccttgccatgcagtcacctccttccccctctgaccccagatcccaaaggtgcaccgttgccccagcccctttctggccccatggggtttctctgatgccttcatcatagaggcccggggctggtccgatggttggcaaaacttgactccggcccagtccccactcttggggacttagaacccctgctgtcctgggatctggcctgcctttctttggtcagtccctgtggtcccccaccagctccccctcccatagggctgcccaccaagccctgcccccagcccaagaggagcccccactgcctgcggggcagtgatgtctggccaccggctcacaccaatgacttggtcctggggtggcagaagcagcaggtgacaggagcagggcccctgtccctctcttctggccctgtggtacccaggccacacgttgtgcccgctcttggggctgaccggctgtagggaccaccagccgctgctactgtgggccgccccggggcagggtgggcagggcttttgtgggttatgaggacacagaagtccctgaggcccccagacctggctcagccaacctccttcctcccccggttgccccccactctaaagcctcctccctcccagcgtccactggctccaggctcctcacaacagcagctcatagacacggggcgtctccaggtggtcccagccctccagatgtttctagctctccaggtgggcgctgttttcacgtctgcctgcatccattcattccttcattcctcacctttatcctgttatctctatttttttaagctaccaggaaggaaagggaagaagagatcacgaaactgggacccccagaagggaggagtgggctttgaacttagacatctacctcagagctcaaataggttgtttaaaatcacattcaattttcagatgaaggggaactttatagtttttttttttttttttttttgagacagagtctcactgtgttgcccaggctggagtgcaaatggcttgatcttggttcactgcaacctctgcctcccaggttcaagcaattctcttgcctcagcctcccgagtagctgggactaaaggcgtgtgccaccatgcccagctaattcttgtatttttagtagagacggagtttctccatgttggccagactggtctcgaactcctgacctcaggtgatctgaccgccttggcctccgaaagtgctgagattacagttgcgagccactgtgcgtggccagaactttataataagagacttgaagctgggtgtgacggtgcacacctctagtcccagctactcgggaggccaagacagaaggatcaccttgaggccaggagtttaaggccagcctgggcaacatagcaaaacctagtccctaaaattaaaaaaaaaaaaaaaaaaaaaggaaaataaaggagacttgaaatttttgaactaaatagtggtgatggctacacattgtgaatgtaattaacaccactgagttaaacacttaaaatggttaaaatggcaaattgtatgttatacctattttactacaataaaaagtataaaaaagagaagatatttaggtgacttacagcaaccaattgcaacaaaacaaaatgttaagaaatgatctttttatgaggcaattggaaatttgaacactgatcaactataggatgattggaattattaatttttaaaggtgtgataagatactgcacttggctgggcacagtggcacatgcctgtaatcccagctacttggcaggctgaggtgggagaatcgcttgagctcaggagttcgagaccagcctgggcaacgtggcgaaatccccgtctttacaaaaacaaacaaacaaacaaaaaagatattgcagttgtgttgtaagcgtccttatctttcagagctacatagtggaatgtttatggaatatttaggataaatgatataggcatttgggatttgctgcaaaatgacccagaggcaggggtcagggggagaggtagagatgagacaagaggtagaggggagaggtagaggtagccacgagctgataattacagacaagagatgcggagtatgtgggggctcattatcctgcatagtctatctttgtatatctttgaacttttcaagaataaaaaagcttaaaaagt

SEQ ID NO: 364734 - DNA, 3290 bp, Homo sapiens
  misc_feature (1)..(1): n is a, c, g, or t
  misc_feature (4)..(4): n is a, c, g, or t
  misc_feature (6)..(6): n is a, c, g, or t
ngcngngcccagtccagcgcccgccgcccgccaccccggaccccggtgtctggcttcccccgagccgggaccccgcgatggccaagcgcagctcgctgtacatccgcatcgtggaggggaagaaccttcccgccaaggacatcactggcagcagcgacccctactgcatcgtgaaggtggacaatgagcccatcatcaggacagccacagtgtggaagaccctgtgccccttctggggtgaggagtaccaagtgcacctgccgcccaccttccacgctgtggctttctatgtcatggatgaggatgccctcagccgggacgacgttatcggaaaggtctgccttacaagggacaccatagcctctcaccctaagggtttcagcgggtgggcccacctgacggaggtcgaccccgacgaggaggtgcagggcgagatccacctgcggctggaagtgtggccaggggcccgggcctgccggctacgctgctctgtgctggaggccagggatctggccccaaaggaccgcaatggcacatctgaccccttcgtccgagtgcgctacaagggccggacacgggagacctcgatcgtgaagaagtcatgctacccacgctggaatgagacgtttgaatttgagctgcaggagggggccatggaggcgctgtgcgtggaggcctgggactgggaccttgtcagccgaaacgacttcctgggcaaagtggtgattgatgtccagagactgcgggtggtgcagcaggaggagggctggttccggctgcagcccgaccagtccaagagccggcggcatgacgagggcaacctgggctccttgcagctggaggtgcggctgcgggacgagacggtgctgccctccagctactaccagccactggtgcacctgctgtgccacgaggtcaagctgggcatgcagggcccagggcagctgatcccactcatcgaggagacaaccagcaccgagtgtcgccaggacgtggccacgaacctgctcaagctcttcctggggcaggggctggccaaggacttcctggacctgctcttccagctggagctgagtcgcaccagtgagaccaacaccctgttccggagcaactctctggcctcaaagtccatggagtcttttctgaaggtggccgggatgcagtacctgcacggcgtcctgggccccatcatcaacaaggtgtttgaggagaagaagtacgtggagctggaccccagcaaagtggaagttaaggatgtagggtgctccgggctgcaccgcccgcagaccgaggccgaggtgctggagcagagcgcgcagacgctgcgcgcccacctgggggccctgctgagcgcgctcagccgctcggttcgcgcgtgccccgccgtggtgcgcgccaccttccgccagctcttccggcgcgtgcgcgagcgcttccccggcgcccagcacgagaatgtaccgttcatcgccgtcaccagcttcctgtgcctgcgcttcttctctcccgccatcatgtcgcccaagctcttccacctgcgggagcgccacgcggacgcccgcaccagccgcaccctgctcctgttggccaaggcagtccagaacgtgggcaacatggacacgccggcttccagggccaaggaggcttggatggagccgctgcagcccaccgtgcgccagggcgtggcgcagctgaaggacttcatcaccaagctcgtggacatcgaggagaaggacgagctggacctgcagcggacgctgagtttgcaggcgccacctgtgaaggaggggccactcttcatccacaggaccaagggcaagggccccctcatgtcctcctccttcaagaagctctacttctccctcactaccgaggccctcagcttcgcgaagacgcccagctccaagaaaagcgccctcatcaagttagccaacatccgggcagcggaaaaggttgaggaaaagagctttggcggctcgcacgtcatgcaggtcatctacacggacgacgccggcaggccccagactgcctacctgcagtgcaagtgtgtgaatgagcttaaccagtggctgtctgcgctgcggaaggtgagcatcaacaacaccggactgctgggctcctaccaccctggcgtcttccgtggggacaagtggagctgctgccaccaaaaagagaagacaggtcagggctgcgataagacccggtcacgggtgaccctgcaggagtggaatgaccctcttgaccatgaccttgaggcccagctcatctaccggcacctgctgggcgtggaggccatgctgtgggagaggcaccgggagctgagcgggggcgcagaggcaggcacggtgcccacgagccctggcaaagtccccgaggactcattggcccggctgctccgggtgctgcaggacctccgcgaggcccatagctccagcccggccggctccccaccctcagagcccaactgcctcctggagctgcagacgtgaggcccgccctacgctccccttgctgagtcccctgccaagcgctcggagcccccccaggacactctgcaccccctcaccccggtcctcctcattagggtgcagggcctaggtctcttccaggtgggggaggggggagagtcaggaataaggggatccccagaagtgcagagctgagcaggcttgggcctgtcatggctggccggaagtgtccccagctccctacagacgctgtagccatcactgcctctccagggaccctcctctcctgcccaggacagacccagccagaaccactgctaggatgggccgcacccaggggtctggcctccagggacctagagaatgggagggagaacggggccccaggagacccggccgccaccccacccgctacccttgggtgccacagggctgtgctgttgccaacagtaaacctgctcttactgtcaaaaaaaaaaaaactgaccccctgaaggtgtacccgccactgaaggggagcttcccggagaacctgagacaccttaagaacaccatggagaccatagactggaaggtctttgagagttggatgcaccattggctcctgtttgaaatgagcaggcactccttggagcaaaagcccactgacgctccaccgaaagagtcactggaactggaggacccgtcttctgggctgggtgtgaccaagcaggatctgggcccagtccccatgtgagagcagcagaggcggtcttcaacatcctgccagccccacacagctacagctttcttgctcccttcagcccccagccccttcgtgcc

SEQ ID NO: 364735 - DNA, 5808 bp, Homo sapiens
  misc_feature (1)..(1): n is a, c, g, or t
  misc_feature (4)..(4): n is a, c, g, or t
  misc_feature (6)..(6): n is a, c, g, or t
ngcngngcccagtccagcgcccgccgcccgccaccccggaccccggtgtctggcttcccccgagccgggaccccgcgatggccaagcgcagctcgctgtacatccgcatcgtggaggggaagaaccttcccgccaaggacatcactggcagcagcgacccctactgcatcgtgaaggtggacaatgagcccatcatcaggtaccgcccccacccccaggaccgaggggcgctcagcctctcatcggcccgcgctctccccgcaaaggggacagccacagtgtggaagaccctgtgccccttctggggtgaggagtaccaagtgcacctgccgcccaccttccacgctgtggctttctatgtcatggatgaggatgccctcagccgggacgacgttatcggaaaggtctgccttacaagggacaccatagcctctcaccctaagggtttcagcgggtgggcccacctgacggaggtcgaccccgacgaggaggtgcagggcgagatccacctgcggctggaagtgtggccaggggcccgggcctgccggctacgctgctctgtgctggaggccagggatctggccccaaaggaccgcaatggcacatctgaccccttcgtccgagtgcgctacaagggccggacacgggagacctcgatcgtgaagaagtcatgctacccacgctggaatgagacgtttgaatttgagctgcaggagggggccatggaggcgctgtgcgtggaggcctgggactgggaccttgtcagccgaaacgacttcctgggcaaagtggtgattgatgtccagagactgcgggtggtgcagcaggaggagggctggttccggctgcagcccgaccagtccaagagccggcggcatgacgagggcaacctgggctccttgcagctggaggtgcggctgcgggacgagacggtgctgccctccagctactaccagccactggtgcacctgctgtgccacgaggtcaagctgggcatgcagggcccagggcagctgatcccactcatcgaggagacaaccagcaccgagtgtcgccaggacgtggccacgaacctgctcaagctcttcctggggcaggggctggccaaggacttcctggacctgctcttccagctggagctgagtcgcaccagtgagaccaacaccctgttccggagcaactctctggcctcaaagtccatggagtcttttctgaaggtggccgggatgcagtacctgcacggcgtcctgggccccatcatcaacaaggtgtttgaggagaagaagtacgtggagctggaccccagcaaagtggaagttaaggatgtagggtgctccgggctgcaccgcccgcagaccgaggccgaggtgctggagcagagcgcgcagacgctgcgcgcccacctgggggccctgctgagcgcgctcagccgctcggttcgcgcgtgccccgccgtggtgcgcgccaccttccgccagctcttccggcgcgtgcgcgagcgcttccccggcgcccagcacgagaatgtaccgttcatcgccgtcaccagcttcctgtgcctgcgcttcttctctcccgccatcatgtcgcccaagctcttccacctgcgggagcgccacgcggacgcccgcaccagccgcaccctgctcctgttggccaaggcagtccagaacgtgggcaacatggacacgccggcttccagggccaaggaggcttggatggagccgctgcagcccaccgtgcgccagggcgtggcgcagctgaaggacttcatcaccaagctcgtggacatcgaggagaaggacgagctggacctgcagcggacgctgagtttgcaggcgccacctgtgaaggaggggccactcttcatccacaggaccaagggcaagggccccctcatgtcctcctccttcaagaagctctacttctccctcactaccgaggccctcagcttcgcgaagacgcccagctccaagaaaagcgccctcatcaagttagccaacatccgggcagcggaaaaggttgaggaaaagagctttggcggctcgcacgtcatgcaggtcatctacacggacgacgccggcaggccccagactgcctacctgcagtgcaagtgtgtgaatgagcttaaccagtggctgtctgcgctgcggaaggtgagcatcaacaacaccggactgctgggctcctaccaccctggcgtcttccgtggggacaagtggagctgctgccaccaaaaagagaagacaggtcagggctgcgataagacccggtcacgggtgaccctgcaggagtggaatgaccctcttgaccatgaccttgaggcccagctcatctaccggcacctgctgggcgtggaggccatgctgtgggagaggcaccgggagctgagcgggggcgcagaggcaggcacggtgcccacgagccctggcaaagtccccgaggactcattggcccggctgctccgggtgctgcaggacctccgcgaggcccatagctccagcccggccggctccccaccctcagagcccaactgcctcctggagctgcagacgtgaggcccgccctacgctccccttgctgagtcccctgccaagcgctcggagcccccccaggacactctgcaccccctcaccccggtcctcctcattagggtgcagggcctaggtctcttccaggtgggggaggggggagagtcaggaataaggggatccccagaagtgcagagctgagcaggcttgggcctgtcatggctggccggaagtgtccccagctccctacagacgctgtagccatcactgcctctccagggaccctcctctcctgcccaggacagacccagccagaaccactgctaggatgggccgcacccaggggtctggcctccagggacctagagaatgggagggagaacggggccccaggagacccggccgccaccccacccgctacccttgggtgccacagggctgtgctgttgccaacagtaaacctgctcttactgtccaggctctggggtcttgtgatgagggtctggggagaaagtgggcccggggggaccccggaggctgtcggtggatgtgccgatgatggggctgacagtatgggctctgggcatccctgttcccccctctttcttccccccactcttctggggtcgggggttcctttcccttcccagttgctgtccctgggtcccctctttcatgtcccacaggccacagagcccagtgtgtccaaccagctgttctctcctcaaagcagcccccaagcaagtcccttctctagggtgtccctgaggacagcacagaggcgggactcagagaccccattcctcttcacgcagcccttaccccaagccctctagctgtgtggctggcagtgttggccacgtaggggctcccatccccccaccattgtgtcacatgggctgccaggctcagctcccagctgcgtccacagtgacctggatcagggtggggacaaggactggaccctccttctccagaaggccttcagctcttgccttgccatgcagtcacctccttccccctctgaccccagatcccaaaggtgcaccgttgccccagcccctttctggccccatggggtttctctgatgccttcatcatagaggcccggggctggtccgatggttggcaaaacttgactccggcccagtccccactcttggggacttagaacccctgctgtcctgggatctggcctgcctttctttggtcagtccctgtggtcccccaccagctccccctcccatagggctgcccaccaagccctgcccccagcccaagaggagcccccactgcctgcggggcagtgatgtctggccaccggctcacaccaatgacttggtcctggggtggcagaagcagcaggtgacaggagcagggcccctgtccctctcttctggccctgtggtacccaggccacacgttgtgcccgctcttggggctgaccggctgtagggaccaccagccgctgctactgtgggccgccccggggcagggtgggcagggcttttgtgggttatgaggacacagaagtccctgaggcccccagacctggctcagccaacctccttcctcccccggttgccccccactctaaagcctcctccctcccagcgtccactggctccaggctcctcacaacagcagctcatagacacggggcgtctccaggtggtcccagccctccagatgtttctagctctccaggtgggcgctgttttcacgtctgcctgcatccattcattccttcattcctcacctttatcctgttatctctatttttttaagctaccaggaaggaaagggaagaagagatcacgaaactgggacccccagaagggaggagtgggctttgaacttagacatctacctcagagctcaaataggttgtttaaaatcacattcaattttcagatgaaggggaactttatagtttttttttttttttttttttgagacagagtctcactgtgttgcccaggctggagtgcaaatggcttgatcttggttcactgcaacctctgcctcccaggttcaagcaattctcttgcctcagcctcccgagtagctgggactaaaggcgtgtgccaccatgcccagctaattcttgtatttttagtagagacggagtttctccatgttggccagactggtctcgaactcctgacctcaggtgatctgaccgccttggcctccgaaagtgctgagattacagttgcgagccactgtgcgtggccagaactttataataagagacttgaagctgggtgtgacggtgcacacctctagtcccagctactcgggaggccaagacagaaggatcaccttgaggccaggagtttaaggccagcctgggcaacatagcaaaacctagtccctaaaattaaaaaaaaaaaaaaaaaaaaaggaaaataaaggagacttgaaatttttgaactaaatagtggtgatggctacacattgtgaatgtaattaacaccactgagttaaacacttaaaatggttaaaatggcaaattgtatgttatacctattttactacaataaaaagtataaaaaagagaagatatttaggtgacttacagcaaccaattgcaacaaaacaaaatgttaagaaatgatctttttatgaggcaattggaaatttgaacactgatcaactataggatgattggaattattaatttttaaaggtgtgataagatactgcacttggctgggcacagtggcacatgcctgtaatcccagctacttggcaggctgaggtgggagaatcgcttgagctcaggagttcgagaccagcctgggcaacgtggcgaaatccccgtctttacaaaaacaaacaaacaaacaaaaaagatattgcagttgtgttgtaagcgtccttatctttcagagctacatagtggaatgtttatggaatatttaggataaatgatataggcatttgggatttgctgcaaaatgacccagaggcaggggtcagggggagaggtagagatgagacaagaggtagaggggagaggtagaggtagccacgagctgataattacagacaagagatgcggagtatgtgggggctcattatcctgcatagtctatctttgtatatctttgaacttttcaagaataaaaaagcttaaaaagtatacatggcctggtcctaccagagactcacccaatgccagcctccagccagggagagccaagtttgcattttcacacgcatctcacactcctctgcactctcaacttggagcgctccaaacagggaaacc

SEQ ID NO: 364736 - DNA, 5507 bp, Homo sapiens
ctcccacccctgcccgcgaaaggggagccctggtgcgggttcctgcccttccctcaccatccgctcccgggctgagggcggggacccgtgtttggccggaggagcctgcggtctccaaaccaggacgcggagactcagcctccgctctcttcccccgcactcctcccgaggggccaaaagagagaggagcctgccgcgagtccccgccccgatcccgccctccagccccgcccctgcctatttgtcttgcagcactggcagcagcgacccctactgcatcgtgaaggtggacaatgagcccatcatcaggacagccacagtgtggaagaccctgtgccccttctggggtgaggagtaccaagtgcacctgccgcccaccttccacgctgtggctttctatgtcatggatgaggatgccctcagccgggacgacgttatcggaaaggtctgccttacaagggacaccatagcctctcaccctaaggatcgtgaagaagtcatgctacccacgctggaatgagacgtttgaatttgagctgcaggagggggccatggaggcgctgtgcgtggaggcctgggactgggaccttgtcagccgaaacgacttcctgggcaaagtggtgattgatgtccagagactgcgggtggtgcagcaggaggagggctggttccggctgcagcccgaccagtccaagagccggcggcatgacgagggcaacctgggctccttgcagctggaggtgcggctgcgggacgagacggtgctgccctccagctactaccagccactggtgcacctgctgtgccacgaggtcaagctgggcatgcagggcccagggcagctgatcccactcatcgaggagacaaccagcaccgagtgtcgccaggacgtggccacgaacctgctcaagctcttcctggggcaggggctggccaaggacttcctggacctgctcttccagctggagctgagtcgcaccagtgagaccaacaccctgttccggagcaactctctggcctcaaagtccatggagtcttttctgaaggtggccgggatgcagtacctgcacggcgtcctgggccccatcatcaacaaggtgtttgaggagaagaagtacgtggagctggaccccagcaaagtggaagttaaggatgtagggtgctccgggctgcaccgcccgcagaccgaggccgaggtgctggagcagagcgcgcagacgctgcgcgcccacctgggggccctgctgagcgcgctcagccgctcggttcgcgcgtgccccgccgtggtgcgcgccaccttccgccagctcttccggcgcgtgcgcgagcgcttccccggcgcccagcacgagaatgtaccgttcatcgccgtcaccagcttcctgtgcctgcgcttcttctctcccgccatcatgtcgcccaagctcttccacctgcgggagcgccacgcggacgcccgcaccagccgcaccctgctcctgttggccaaggcagtccagaacgtgggcaacatggacacgccggcttccagggccaaggaggcttggatggagccgctgcagcccaccgtgcgccagggcgtggcgcagctgaaggacttcatcaccaagctcgtggacatcgaggagaaggacgagctggacctgcagcggacgctgagtttgcaggcgccacctgtgaaggaggggccactcttcatccacaggaccaagggcaagggccccctcatgtcctcctccttcaagaagctctacttctccctcactaccgaggccctcagcttcgcgaagacgcccagctccaagaaaagcgccctcatcaagttagccaacatccgggcagcggaaaaggttgaggaaaagagctttggcggctcgcacgtcatgcaggtcatctacacggacgacgccggcaggccccagactgcctacctgcagtgcaagtgtgtgaatgagcttaaccagtggctgtctgcgctgcggaaggtgagcatcaacaacaccggactgctgggctcctaccaccctggcgtcttccgtggggacaagtggagctgctgccaccaaaaagagaagacaggtcagggctgcgataagacccggtcacgggtgaccctgcaggagtggaatgaccctcttgaccatgaccttgaggcccagctcatctaccggcacctgctgggcgtggaggccatgctgtgggagaggcaccgggagctgagcgggggcgcagaggcaggcacggtgcccacgagccctggcaaagtccccgaggactcattggcccggctgctccgggtgctgcaggacctccgcgaggcccatagctccagcccggccggctccccaccctcagagcccaactgcctcctggagctgcagacgtgaggcccgccctacgctccccttgctgagtcccctgccaagcgctcggagcccccccaggacactctgcaccccctcaccccggtcctcctcattagggtgcagggcctaggtctcttccaggtgggggaggggggagagtcaggaataaggggatccccagaagtgcagagctgagcaggcttgggcctgtcatggctggccggaagtgtccccagctccctacagacgctgtagccatcactgcctctccagggaccctcctctcctgcccaggacagacccagccagaaccactgctaggatgggccgcacccaggggtctggcctccagggacctagagaatgggagggagaacggggccccaggagacccggccgccaccccacccgctacccttgggtgccacagggctgtgctgttgccaacagtaaacctgctcttactgtccaggctctggggtcttgtgatgagggtctggggagaaagtgggcccggggggaccccggaggctgtcggtggatgtgccgatgatggggctgacagtatgggctctgggcatccctgttcccccctctttcttccccccactcttctggggtcgggggttcctttcccttcccagttgctgtccctgggtcccctctttcatgtcccacaggccacagagcccagtgtgtccaaccagctgttctctcctcaaagcagcccccaagcaagtcccttctctagggtgtccctgaggacagcacagaggcgggactcagagaccccattcctcttcacgcagcccttaccccaagccctctagctgtgtggctggcagtgttggccacgtaggggctcccatccccccaccattgtgtcacatgggctgccaggctcagctcccagctgcgtccacagtgacctggatcagggtggggacaaggactggaccctccttctccagaaggccttcagctcttgccttgccatgcagtcacctccttccccctctgaccccagatcccaaaggtgcaccgttgccccagcccctttctggccccatggggtttctctgatgccttcatcatagaggcccggggctggtccgatggttggcaaaacttgactccggcccagtccccactcttggggacttagaacccctgctgtcctgggatctggcctgcctttctttggtcagtccctgtggtcccccaccagctccccctcccatagggctgcccaccaagccctgcccccagcccaagaggagcccccactgcctgcggggcagtgatgtctggccaccggctcacaccaatgacttggtcctggggtggcagaagcagcaggtgacaggagcagggcccctgtccctctcttctggccctgtggtacccaggccacacgttgtgcccgctcttggggctgaccggctgtagggaccaccagccgctgctactgtgggccgccccggggcagggtgggcagggcttttgtgggttatgaggacacagaagtccctgaggcccccagacctggctcagccaacctccttcctcccccggttgccccccactctaaagcctcctccctcccagcgtccactggctccaggctcctcacaacagcagctcatagacacggggcgtctccaggtggtcccagccctccagatgtttctagctctccaggtgggcgctgttttcacgtctgcctgcatccattcattccttcattcctcacctttatcctgttatctctatttttttaagctaccaggaaggaaagggaagaagagatcacgaaactgggacccccagaagggaggagtgggctttgaacttagacatctacctcagagctcaaataggttgtttaaaatcacattcaattttcagatgaaggggaactttatagtttttttttttttttttttttgagacagagtctcactgtgttgcccaggctggagtgcaaatggcttgatcttggttcactgcaacctctgcctcccaggttcaagcaattctcttgcctcagcctcccgagtagctgggactaaaggcgtgtgccaccatgcccagctaattcttgtatttttagtagagacggagtttctccatgttggccagactggtctcgaactcctgacctcaggtgatctgaccgccttggcctccgaaagtgctgagattacagttgcgagccactgtgcgtggccagaactttataataagagacttgaagctgggtgtgacggtgcacacctctagtcccagctactcgggaggccaagacagaaggatcaccttgaggccaggagtttaaggccagcctgggcaacatagcaaaacctagtccctaaaattaaaaaaaaaaaaaaaaaaaaaggaaaataaaggagacttgaaatttttgaactaaatagtggtgatggctacacattgtgaatgtaattaacaccactgagttaaacacttaaaatggttaaaatggcaaattgtatgttatacctattttactacaataaaaagtataaaaaagagaagatatttaggtgacttacagcaaccaattgcaacaaaacaaaatgttaagaaatgatctttttatgaggcaattggaaatttgaacactgatcaactataggatgattggaattattaatttttaaaggtgtgataagatactgcacttggctgggcacagtggcacatgcctgtaatcccagctacttggcaggctgaggtgggagaatcgcttgagctcaggagttcgagaccagcctgggcaacgtggcgaaatccccgtctttacaaaaacaaacaaacaaacaaaaaagatattgcagttgtgttgtaagcgtccttatctttcagagctacatagtggaatgtttatggaatatttaggataaatgatataggcatttgggatttgctgcaaaatgacccagaggcaggggtcagggggagaggtagagatgagacaagaggtagaggggagaggtagaggtagccacgagctgataattacagacaagagatgcggagtatgtgggggctcattatcctgcatagtctatctttgtatatctttgaacttttcaagaataaaaaagcttaaaaagt

SEQ ID NO: 364737 - DNA, 5056 bp, Homo sapiens
  misc_feature (1)..(1): n is a, c, g, or t
  misc_feature (4)..(4): n is a, c, g, or t
  misc_feature (6)..(6): n is a, c, g, or t
ngcngngcccagtccagcgcccgccgcccgccaccccggaccccggtgtctggcttcccccgagccgggaccccgcgatggccaagcgcagctcgctgtacatccgcatcgtggaggggaagaaccttcccgccaaggacatcactggcagcagcgacccctactgcatcgtgaaggtggacaatgagcccatcatcaggtaccgcccccacccccaggaccgaggggcgctcagcctctcatcggcccgcgctctccccgcaaaggggacagccacagtgtggaagaccctgtgccccttctggggtgaggagtaccaagtgcacctgccgcccaccttccacgctgtggctttctatgtcatggatgaggatgccctcagccgggacgacgttatcggaaaggtctgccttacaagggacaccatagcctctcaccctaagggtttcagcgggtgggcccacctgacggaggtcgaccccgacgaggaggtgcagggcgagatccacctgcggctggaagtgtggccaggggcccgggcctgccggctacgctgctctgtgctggaggccagggatctggccccaaaggaccgcaatggcacatctgaccccttcgtccgagtgcgctacaagggccggacacgggagacctcgatcgtgaagaagtcatgctacccacgctggaatgagacgtttgaatttgagctgcaggagggggccatggaggcgctgtgcgtggaggcctgggactgggaccttgtcagccgaaacgacttcctgggcaaagtggtgattgatgtccagagactgcgggtggtgcagcaggaggagggctggttccggctgcagcccgaccagtccaagagccggcggcatgacgagggcaacctgggctccttgcagctggaggtgcggctgcgggacgagacggtgctgccctccagctactaccagccactggtgcacctgctgtgccacgaggtcaagctgggcatgcagggcccagggcagctgatcccactcatcgaggagacaaccagcaccgagtgtcgccaggacgtggccacgaacctgctcaagctcttcctggggcaggggctggccaaggacttcctggacctgctcttccagctggagctgagtcgcaccagtgagaccaacaccctgttccggagcaactctctggcctcaaagtccatggagtcttttctgaaggtggccgggatgcagtacctgcacggcgtcctgggccccatcatcaacaaggtgtttgaggagaagaagtacgtggagctggaccccagcaaagtggaagttaaggatgtagggtgctccgggctgcaccgcccgcagaccgaggccgaggtgctggagcagagcgcgcagacgctgcgcgcccacctgggggccctgctgagcgcgctcagccgctcggttcgcgcgtgccccgccgtggtgcgcgccaccttccgccagctcttccggcgcgtgcgcgagcgcttccccggcgcccagcacgagaatgtaccgttcatcgccgtcaccagcttcctgtgcctgcgcttcttctctcccgccatcatgtcgcccaagctcttccacctgcgggagcgccacgcggacgcccgcaccagccgcaccctgctcctgttggccaaggcagtccagaacgtgggcaacatggacacgccggcttccagggccaaggaggcttggatggagccgctgcagcccaccgtgcgccagggcgtggcgcagctgaaggacttcatcaccaagctcgtggacatcgaggagaaggacgagctggacctgcagcggacgctgagtttgcaggcgccacctgtgaaggaggggccactcttcatccacaggaccaagggcaagggccccctcatgtcctcctccttcaagaagctctacttctccctcactaccgaggccctcagcttcgcgaagacgcccagctccaagaaaagcgccctcatcaagttagccaacatccgggcagcggaaaaggttgaggaaaagagctttggcggctcgcacgtcatgcaggtcatctacacggacgacgccggcaggccccagactgcctacctgcagtgcaagtgtgtgaatgagcttaaccagtggctgtctgcgctgcggaaggtgagcatcaacaacaccggactgctgggctcctaccaccctggcgtcttccgtggggacaagtggagctgctgccaccaaaaagagaagacaggtcagggctgcgataagacccggtcacgggtgaccctgcaggagtggaatgaccctcttgaccatgaccttgaggcccagctcatctaccggcacctgctgggcgtggaggccatgctgtgggagaggcaccgggagctgagcgggggcgcagaggcaggcacggtgcccacgagccctggcaaagtccccgaggactcattggcccggctgctccgggtgctgcaggacctccgcgaggcccatagctccagcccggccggctccccaccctcagagcccaactgcctcctggagctgcagacgtgaggcccgccctacgctccccttgctgagtcccctgccaagcgctcggagcccccccaggacactctgcaccccctcaccccggtcctcctcattagggtgcagggcctaggtctcttccaggtgggggaggggggagagtcaggaataaggggatccccagaagtgcagagctgagcaggcttgggcctgtcatggctggccggaagtgtccccagctccctacagacgctgtagccatcactgcctctccagggaccctcctctcctgcccaggacagacccagccagaaccactgctaggatgggccgcacccaggggtctggcctccagggacctagagaatgggagggagaacggggccccaggagacccggccgccaccccacccgctacccttgggtgccacagggctgtgctgttgccaacagtaaacctgctcttactgtccaggctctggggtcttgtgatgagggtctggggagaaagtgggcccggggggaccccggaggctgtcggtggatgtgccgatgatggggctgacagtatgggctctgggcatccctgttcccccctctttcttccccccactcttctggggtcgggggttcctttcccttcccagttgctgtccctgggtcccctctttcatgtcccacaggccacagagcccagtgtgtccaaccagctgttctctcctcaaagcagcccccaagcaagtcccttctctagggtgtccctgaggacagcacagaggcgggactcagagaccccattcctcttcacgcagcccttaccccaagccctctagctgtgtggctggcagtgttggccacgtaggggctcccatccccccaccattgtgtcacatgggctgccaggctcagctcccagctgcgtccacagtgacctggatcagggtggggacaaggactggaccctccttctccagaaggccttcagctcttgccttgccatgcagtcacctccttccccctctgaccccagatcccaaaggtgcaccgttgccccagcccctttctggccccatggggtttctctgatgccttcatcatagaggcccggggctggtccgatggttggcaaaacttgactccggcccagtccccactcttggggacttagaacccctgctgtcctgggatctggcctgcctttctttggtcagtccctgtggtcccccaccagctccccctcccatagggctgcccaccaagccctgcccccagcccaagaggagcccccactgcctgcggggcagtgatgtctggccaccggctcacaccaatgacttggtcctggggtggcagaagcagcaggtgacaggagcagggcccctgtccctctcttctggccctgtggtacccaggccacacgttgtgcccgctcttggggctgaccggctgtagggaccaccagccgctgctactgtgggccgccccggggcagggtgggcagggcttttgtgggttatgaggacacagaagtccctgaggcccccagacctggctcagccaacctccttcctcccccggttgccccccactctaaagcctcctccctcccagcgtccactggctccaggctcctcacaacagcagctcatagacacggggcgtctccaggtggtcccagccctccagatgtttctagctctccaggtgggcgctgttttcacgtctgcctgcatccattcattccttcattcctcacctttatcctgttatctctatttttttaagctaccaggaaggaaagggaagaagagatcacgaaactgggacccccagaagggaggagtgggctttgaacttagacatctacctcagagctcaaataggttgtttaaaatcacattcaattttcagatgaaggggaacatggcaaaacctagtcccctacaaattaaaaaaaacaaaaacaaacaaaacaacacaaaacggggacaacatacaacggcgagaactctcgcaaattttgtgcgacaccctaacaatgcggcgcggagcaggggcatccaccctgtggtggcacgcgtgtctcttttatcacaccccccgtggcgtttaacaccccttcacaagcgtggggtctaccagcgtgggaacaacctgtagcgtgtgtgttttcacatccccccctattttctctcaccctcccccatacaacacagggctctttaccacaaacagctaacaagatcttctttaagagggggcgccaccttacgccgcgcaccccccccaatagtgggtgcaccaccacacaacccacatagtgtggtcttagcagacaaaaagcgacactccctttagtagagagacaccgaccaacgtgtgcgacaaaacttctttcgaaaccaccactgtggcttccaactccctaaatcagggaaacgaagtgggggcgacttattatcacaaatttttcacacagccggttcgtggcactcaaaagaaaataacgggccacatgggcg

SEQ ID NO: 364738 - DNA, 6152 bp, Homo sapiens
  misc_feature (1)..(1): n is a, c, g, or t
  misc_feature (4)..(4): n is a, c, g, or t
  misc_feature (6)..(6): n is a, c, g, or t
ngcngngcccagtccagcgcccgccgcccgccaccccggaccccggtgtctggcttcccccgagccgggaccccgcgatggccaagcgcagctcgctgtacatccgcatcgtggaggggaagaaccttcccgccaaggacatcactggcagcagcgacccctactgcatcgtgaaggtggacaatgagcccatcatcaggacagccacagtgtggaagaccctgtgccccttctggggtgaggagtaccaagtgcacctgccgcccaccttccacgctgtggctttctatgtcatggatgaggatgccctcagccgggacgacgttatcggaaaggtctgccttacaagggacaccatagcctctcaccctaagggtttcagcgggtgggcccacctgacggaggtcgaccccgacgaggaggtgcagggcgagatccacctgcggctggaagtgtggccaggggcccgggcctgccggctacgctgctctgtgctggaggccagggatctggccccaaaggaccgcaatggcacatctgaccccttcgtccgagtgcgctacaagggccggacacgggagacctcgatcgtgaagaagtcatgctacccacgctggaatgagacgtttgaatttgagctgcaggagggggccatggaggcgctgtgcgtggaggcctgggactgggaccttgtcagccgaaacgacttcctgggcaaagtggtgattgatgtccagagactgcgggtggtgcagcaggaggagggctggttccggctgcagcccgaccagtccaagagccggcggcatgacgagggcaacctgggctccttgcagctggaggtgcggctgcgggacgagacggtgctgccctccagctactaccagccactggtgcacctgctgtgccacgaggtcaagctgggcatgcagggcccagggcagctgatcccactcatcgaggagacaaccagcaccgagtgtcgccaggacgtggccacgaacctgctcaagctcttcctggggcaggggctggccaaggacttcctggacctgctcttccagctggagctgagtcgcaccagtgagaccaacaccctgttccggagcaactctctggcctcaaagtccatggagtcttttctgaaggtggccgggatgcagtacctgcacggcgtcctgggccccatcatcaacaaggtgtttgaggagaagaagtacgtggagctggaccccagcaaagtggaagttaaggatgtagggtgctccgggctgcaccgcccgcagaccgaggccgaggtgctggagcagagcgcgcagacgctgcgcgcccacctgggggccctgctgagcgcgctcagccgctcggttcgcgcgtgccccgccgtggtgcgcgccaccttccgccagctcttccggcgcgtgcgcgagcgcttccccggcgcccagcacgaggtgcgccctccacccgctgggctaggctgggccgggttggactgggctggggcgaggggtgaagagcggtggggaaccagggagcgctggggaggaccagggaggctgtgtcgcagcgagggtcagggacggagcctaaggggagggggctgccaggagccctggtctgggggactccagcccgcgctcttccgcacccctccagaatgtaccgttcatcgccgtcaccagcttcctgtgcctgcgcttcttctctcccgccatcatgtcgcccaagctcttccacctgcgggagcgccacgcggacgcccgcaccagccgcaccctgctcctgttggccaaggtgcgggccttgcggccacgggcgggatgcacagctgggtgtcctaccggggccctggcctggactgcagagtgttccctaccggctccggcgaggccactggcacgcccacgtaggcactgcacttcacagtttgcaaagccttcctgtggccaccttgtccgagctccatctcatggataagggaacaggcctgcgaggggtcgggggttgccaaggccgcccatcctgtcggtggtgaatcgcgggaccttccaacccaggtctgcttactctcaggctgcacctatgtgcccggcaccggggtggggtatccagtgcagcagcgtcagttaaacgcagtccagaacgtgggcaacatggacacgccggcttccagggccaaggaggcttggatggagccgctgcagcccaccgtgcgccagggcgtggcgcagctgaaggacttcatcaccaagctcgtggacatcgaggagaaggacgagctggacctgcagcggacgctgagtttgcaggcgccacctgtgaaggaggggccactcttcatccacaggaccaagggcaagggccccctcatgtcctcctccttcaagaagctctacttctccctcactaccgaggccctcagcttcgcgaagacgcccagctccaagaaaagcgccctcatcaagttagccaacatccgggcagcggaaaaggttgaggaaaagagctttggcggctcgcacgtcatgcaggtcatctacacggacgacgccggcaggccccagactgcctacctgcagtgcaagtgtgtgaatgagcttaaccagtggctgtctgcgctgcggaaggtgagcatcaacaacaccggactgctgggctcctaccaccctggcgtcttccgtggggacaagtggagctgctgccaccaaaaagagaagacaggtcagggctgcgataagacccggtcacgggtgaccctgcaggagtggaatgaccctcttgaccatgaccttgaggcccagctcatctaccggcacctgctgggcgtggaggccatgctgtgggagaggcaccgggagctgagcgggggcgcagaggcaggcacggtgcccacgagccctggcaaagtccccgaggactcattggcccggctgctccgggtgctgcaggacctccgcgaggcccatagctccagcccggccggctccccaccctcagagcccaactgcctcctggagctgcagacgtgaggcccgccctacgctccccttgctgagtcccctgccaagcgctcggagcccccccaggacactctgcaccccctcaccccggtcctcctcattagggtgcagggcctaggtctcttccaggtgggggaggggggagagtcaggaataaggggatccccagaagtgcagagctgagcaggcttgggcctgtcatggctggccggaagtgtccccagctccctacagacgctgtagccatcactgcctctccagggaccctcctctcctgcccaggacagacccagccagaaccactgctaggatgggccgcacccaggggtctggcctccagggacctagagaatgggagggagaacggggccccaggagacccggccgccaccccacccgctacccttgggtgccacagggctgtgctgttgccaacagtaaacctgctcttactgtccaggctctggggtcttgtgatgagggtctggggagaaagtgggcccggggggaccccggaggctgtcggtggatgtgccgatgatggggctgacagtatgggctctgggcatccctgttcccccctctttcttccccccactcttctggggtcgggggttcctttcccttcccagttgctgtccctgggtcccctctttcatgtcccacaggccacagagcccagtgtgtccaaccagctgttctctcctcaaagcagcccccaagcaagtcccttctctagggtgtccctgaggacagcacagaggcgggactcagagaccccattcctcttcacgcagcccttaccccaagccctctagctgtgtggctggcagtgttggccacgtaggggctcccatccccccaccattgtgtcacatgggctgccaggctcagctcccagctgcgtccacagtgacctggatcagggtggggacaaggactggaccctccttctccagaaggccttcagctcttgccttgccatgcagtcacctccttccccctctgaccccagatcccaaaggtgcaccgttgccccagcccctttctggccccatggggtttctctgatgccttcatcatagaggcccggggctggtccgatggttggcaaaacttgactccggcccagtccccactcttggggacttagaacccctgctgtcctgggatctggcctgcctttctttggtcagtccctgtggtcccccaccagctccccctcccatagggctgcccaccaagccctgcccccagcccaagaggagcccccactgcctgcggggcagtgatgtctggccaccggctcacaccaatgacttggtcctggggtggcagaagcagcaggtgacaggagcagggcccctgtccctctcttctggccctgtggtacccaggccacacgttgtgcccgctcttggggctgaccggctgtagggaccaccagccgctgctactgtgggccgccccggggcagggtgggcagggcttttgtgggttatgaggacacagaagtccctgaggcccccagacctggctcagccaacctccttcctcccccggttgccccccactctaaagcctcctccctcccagcgtccactggctccaggctcctcacaacagcagctcatagacacggggcgtctccaggtggtcccagccctccagatgtttctagctctccaggtgggcgctgttttcacgtctgcctgcatccattcattccttcattcctcacctttatcctgttatctctatttttttaagctaccaggaaggaaagggaagaagagatcacgaaactgggacccccagaagggaggagtgggctttgaacttagacatctacctcagagctcaaataggttgtttaaaatcacattcaattttcagatgaaggggaactttatagtttttttttttttttttttttgagacagagtctcactgtgttgcccaggctggagtgcaaatggcttgatcttggttcactgcaacctctgcctcccaggttcaagcaattctcttgcctcagcctcccgagtagctgggactaaaggcgtgtgccaccatgcccagctaattcttgtatttttagtagagacggagtttctccatgttggccagactggtctcgaactcctgacctcaggtgatctgaccgccttggcctccgaaagtgctgagattacagttgcgagccactgtgcgtggccagaactttataataagagacttgaagctgggtgtgacggtgcacacctctagtcccagctactcgggaggccaagacagaaggatcaccttgaggccaggagtttaaggccagcctgggcaacatagcaaaacctagtccctaaaattaaaaaaaaaaaaaaaaaaaaaggaaaataaaggagacttgaaatttttgaactaaatagtggtgatggctacacattgtgaatgtaattaacaccactgagttaaacacttaaaatggttaaaatggcaaattgtatgttatacctattttactacaataaaaagtataaaaaagagaagatatttaggtgacttacagcaaccaattgcaacaaaacaaaatgttaagaaatgatctttttatgaggcaattggaaatttgaacactgatcaactataggatgattggaattattaatttttaaaggtgtgataagatactgcacttggctgggcacagtggcacatgcctgtaatcccagctacttggcaggctgaggtgggagaatcgcttgagctcaggagttcgagaccagcctgggcaacgtggcgaaatccccgtctttacaaaaacaaacaaacaaacaaaaaagatattgcagttgtgttgtaagcgtccttatctttcagagctacatagtggaatgtttatggaatatttaggataaatgatataggcatttgggatttgctgcaaaatgacccagaggcaggggtcagggggagaggtagagatgagacaagaggtagaggggagaggtagaggtagccacgagctgataattacagacaagagatgcggagtatgtgggggctcattatcctgcatagtctatctttgtatatctttgaacttttcaagaataaaaaagcttaaaaagt

SEQ ID NO: 364739 - DNA, 3006 bp, Homo sapiens
  misc_feature (1)..(1): n is a, c, g, or t
  misc_feature (4)..(4): n is a, c, g, or t
  misc_feature (6)..(6): n is a, c, g, or t
ngcngngcccagtccagcgcccgccgcccgccaccccggaccccggtgtctggcttcccccgagccgggaccccgcgatggccaagcgcagctcgctgtacatccgcatcgtggaggggaagaaccttcccgccaaggacatcactggcagcagcgacccctactgcatcgtgaaggtggacaatgagcccatcatcaggtaccgcccccacccccaggaccgaggggcgctcagcctctcatcggcccgcgctctccccgcaaaggggacagccacagtgtggaagaccctgtgccccttctggggtgaggagtaccaagtgcacctgccgcccaccttccacgctgtggctttctatgtcatggatgaggatgccctcagccgggacgacgttatcggaaaggtctgccttacaagggacaccatagcctctcaccctaagggtttcagcgggtgggcccacctgacggaggtcgaccccgacgaggaggtgcagggcgagatccacctgcggctggaagtgtggccaggggcccgggcctgccggctacgctgctctgtgctggaggccagggatctggccccaaaggaccgcaatggcacatctgaccccttcgtccgagtgcgctacaagggccggacacgggagacctcgatcgtgaagaagtcatgctacccacgctggaatgagacgtttgaatttgagctgcaggagggggccatggaggcgctgtgcgtggaggcctgggactgggaccttgtcagccgaaacgacttcctgggcaaagtggtgattgatgtccagagactgcgggtggtgcagcaggaggagggctggttccggctgcagcccgaccagtccaagagccggcggcatgacgagggcaacctgggctccttgcagctggaggtgcggctgcgggacgagacggtgctgccctccagctactaccagccactggtgcacctgctgtgccacgaggtcaagctgggcatgcagggcccagggcagctgatcccactcatcgaggagacaaccagcaccgagtgtcgccaggacgtggccacgaacctgctcaagctcttcctggggcaggggctggccaaggacttcctggacctgctcttccagctggagctgagtcgcaccagtgagaccaacaccctgttccggagcaactctctggcctcaaagtccatggagtcttttctgaaggtggccgggatgcagtacctgcacggcgtcctgggccccatcatcaacaaggtgtttgaggagaagaagtacgtggagctggaccccagcaaagtggaagttaaggatgtagggtgctccgggctgcaccgcccgcagaccgaggccgaggtgctggagcagagcgcgcagacgctgcgcgcccacctgggggccctgctgagcgcgctcagccgctcggttcgcgcgtgccccgccgtggtgcgcgccaccttccgccagctcttccggcgcgtgcgcgagcgcttccccggcgcccagcacgagaatgtaccgttcatcgccgtcaccagcttcctgtgcctgcgcttcttctctcccgccatcatgtcgcccaagctcttccacctgcgggagcgccacgcggacgcccgcaccagccgcaccctgctcctgttggccaaggcagtccagaacgtgggcaacatggacacgccggcttccagggccaaggaggcttggatggagccgctgcagcccaccgtgcgccagggcgtggcgcagctgaaggacttcatcaccaagctcgtggacatcgaggagaaggacgagctggacctgcagcggacgctgagtttgcaggcgccacctgtgaaggaggggccactcttcatccacaggaccaagggcaagggccccctcatgtcctcctccttcaagaagctctacttctccctcactaccgaggccctcagcttcgcgaagacgcccagctccaagaaaagcgccctcatcaagttagccaacatccgggcagcggaaaaggttgaggaaaagagctttggcggctcgcacgtcatgcaggtcatctacacggacgacgccggcaggccccagactgcctacctgcagtgcaagtgtgtgaatgagcttaaccagtggctgtctgcgctgcggaaggtgagcatcaacaacaccggactgctgggctcctaccaccctggcgtcttccgtggggacaagtggagctgctgccaccaaaaagagaagacaggtcagggctgcgataagacccggtcacgggtgaccctgcaggagtggaatgaccctcttgaccatgaccttgaggcccagctcatctaccggcacctgctgggcgtggaggccatgctgtgggagaggcaccgggagctgagcgggggcgcagaggcaggcacggtgcccacgagccctggcaaagtccccgaggactcattggcccggctgctccgggtgctgcaggacctccgcgaggcccatagctccagcccggccggctccccaccctcagagcccaactgcctcctggagctgcagacgtgaggcccgccctacgctccccttgctgagtcccctgccaagcgctcggagcccccccaggacactctgcaccccctcaccccggtcctcctcattagggtgcagggcctaggtctcttccaggtgggggaggggggagagtcaggaataaggggatccccagaagtgcagagctgagcaggcttgggcctgtcatggctggccggaagtgtccccagctccctacagacgctgtagccatcactgcctctccagggaccctcctctcctgcccaggacagacccagccagaaccactgctaggatgggccgcacccaggggtctggcctccagggacctagagaatgggagggagaacggggccccaggagacccggccgccaccccacccgctacccttgggtgccacagggctgtgctgttgccaacagtaaacctgctcttactgtc

SEQ ID NO: 364740 - DNA, 3401 bp, Homo sapiens
ccaacaacctcaagtctcttgaggctcaggcggagaagtactctcaaaaagaagataaatatgaggaagaaatcaagattcttactgataaaccggagaggcaccgggagctgagcgggggcgcagaggcaggcacggtgcccacgagccctggcaaagtccccgaggactcattggcccggctgctccgggtgctgcaggacctccgcgaggcccatagctccagcccggccggctccccaccctcagagcccaactgcctcctggagctgcagacgtgaggcccgccctacgctccccttgctgagtcccctgccaagcgctcggagcccccccaggacactctgcaccccctcaccccggtcctcctcattagggtgcagggcctaggtctcttccaggtgggggaggggggagagtcaggaataaggggatccccagaagtgcagagctgagcaggcttgggcctgtcatggctggccggaagtgtccccagctccctacagacgctgtagccatcactgcctctccagggaccctcctctcctgcccaggacagacccagccagaaccactgctaggatgggccgcacccaggggtctggcctccagggacctagagaatgggagggagaacggggccccaggagacccggccgccaccccacccgctacccttgggtgccacagggctgtgctgttgccaacagtaaacctgctcttactgtccaggctctggggtcttgtgatgagggtctggggagaaagtgggcccggggggaccccggaggctgtcggtggatgtgccgatgatggggctgacagtatgggctctgggcatccctgttcccccctctttcttccccccactcttctggggtcgggggttcctttcccttcccagttgctgtccctgggtcccctctttcatgtcccacaggccacagagcccagtgtgtccaaccagctgttctctcctcaaagcagcccccaagcaagtcccttctctagggtgtccctgaggacagcacagaggcgggactcagagaccccattcctcttcacgcagcccttaccccaagccctctagctgtgtggctggcagtgttggccacgtaggggctcccatccccccaccattgtgtcacatgggctgccaggctcagctcccagctgcgtccacagtgacctggatcagggtggggacaaggactggaccctccttctccagaaggccttcagctcttgccttgccatgcagtcacctccttccccctctgaccccagatcccaaaggtgcaccgttgccccagcccctttctggccccatggggtttctctgatgccttcatcatagaggcccggggctggtccgatggttggcaaaacttgactccggcccagtccccactcttggggacttagaacccctgctgtcctgggatctggcctgcctttctttggtcagtccctgtggtcccccaccagctccccctcccatagggctgcccaccaagccctgcccccagcccaagaggagcccccactgcctgcggggcagtgatgtctggccaccggctcacaccaatgacttggtcctggggtggcagaagcagcaggtgacaggagcagggcccctgtccctctcttctggccctgtggtacccaggccacacgttgtgcccgctcttggggctgaccggctgtagggaccaccagccgctgctactgtgggccgccccggggcagggtgggcagggcttttgtgggttatgaggacacagaagtccctgaggcccccagacctggctcagccaacctccttcctcccccggttgccccccactctaaagcctcctccctcccagcgtccactggctccaggctcctcacaacagcagctcatagacacggggcgtctccaggtggtcccagccctccagatgtttctagctctccaggtgggcgctgttttcacgtctgcctgcatccattcattccttcattcctcacctttatcctgttatctctatttttttaagctaccaggaaggaaagggaagaagagatcacgaaactgggacccccagaagggaggagtgggctttgaacttagacatctacctcagagctcaaataggttgtttaaaatcacattcaattttcagatgaaggggaactttatagtttttttttttttttttttttgagacagagtctcactgtgttgcccaggctggagtgcaaatggcttgatcttggttcactgcaacctctgcctcccaggttcaagcaattctcttgcctcagcctcccgagtagctgggactaaaggcgtgtgccaccatgcccagctaattcttgtatttttagtagagacggagtttctccatgttggccagactggtctcgaactcctgacctcaggtgatctgaccgccttggcctccgaaagtgctgagattacagttgcgagccactgtgcgtggccagaactttataataagagacttgaagctgggtgtgacggtgcacacctctagtcccagctactcgggaggccaagacagaaggatcaccttgaggccaggagtttaaggccagcctgggcaacatagcaaaacctagtccctaaaattaaaaaaaaaaaaaaaaaaaaaggaaaataaaggagacttgaaatttttgaactaaatagtggtgatggctacacattgtgaatgtaattaacaccactgagttaaacacttaaaatggttaaaatggcaaattgtatgttatacctattttactacaataaaaagtataaaaaagagaagatatttaggtgacttacagcaaccaattgcaacaaaacaaaatgttaagaaatgatctttttatgaggcaattggaaatttgaacactgatcaactataggatgattggaattattaatttttaaaggtgtgataagatactgcacttggctgggcacagtggcacatgcctgtaatcccagctacttggcaggctgaggtgggagaatcgcttgagctcaggagttcgagaccagcctgggcaacgtggcgaaatccccgtctttacaaaaacaaacaaacaaacaaaaaagatattgcagttgtgttgtaagcgtccttatctttcagagctacatagtggaatgtttatggaatatttaggataaatgatataggcatttgggatttgctgcaaaatgacccagaggcaggggtcagggggagaggtagagatgagacaagaggtagaggggagaggtagaggtagccacgagctgataattacagacaagagatgcggagtatgtgggggctcattatcctgcatagtctatctttgtatatctttgaacttttcaagaataaaaaagcttaaaaagt

SEQ ID NO: 364741 - DNA, 2860 bp, Homo sapiens
  misc_feature (1)..(1): n is a, c, g, or t
  misc_feature (4)..(4): n is a, c, g, or t
  misc_feature (6)..(6): n is a, c, g, or t
ngcngngcccagtccagcgcccgccgcccgccaccccggaccccggtgtctggcttcccccgagccgggaccccgcgatggccaagcgcagctcgctgtacatccgcatcgtggaggggaagaaccttcccgccaaggacatcactggcagcagcgacccctactgcatcgtgaaggtggacaatgagcccatcatcaggacagccacagtgtggaagaccctgtgccccttctggggtgaggagtaccaagtgcacctgccgcccaccttccacgctgtggctttctatgtcatggatgaggatgccctcagccgggacgacgttatcggaaaggtctgccttacaagggacaccatagcctctcaccctaagggtttcagcgggtgggcccacctgacggaggtcgaccccgacgaggaggtgcagggcgagatccacctgcggctggaagtgtggccaggggcccgggcctgccggctacgctgctctgtgctggaggccagggatctggccccaaaggaccgcaatggcacatctgaccccttcgtccgagtgcgctacaagggccggacacgggagacctcgatcgtgaagaagtcatgctacccacgctggaatgagacgtttgaatttgagctgcaggagggggccatggaggcgctgtgcgtggaggcctgggactgggaccttgtcagccgaaacgacttcctgggcaaagtggtgattgatgtccagagactgcgggtggtgcagcaggaggagggctggttccggctgcagcccgaccagtccaagagccggcggcatgacgagggcaacctgggctccttgcagctggaggtgcggctgcgggacgagacggtgctgccctccagctactaccagccactggtgcacctgctgtgccacgaggtcaagctgggcatgcagggcccagggcagctgatcccactcatcgaggagacaaccagcaccgagtgtcgccaggacgtggccacgaacctgctcaagctcttcctggggcaggggctggccaaggacttcctggacctgctcttccagctggagctgagtcgcaccagtgagaccaacaccctgttccggagcaactctctggcctcaaagtccatggagtcttttctgaaggtggccgggatgcagtacctgcacggcgtcctgggccccatcatcaacaaggtgtttgaggagaagaagtacgtggagctggaccccagcaaagtggaagttaaggatgtagggtgctccgggctgcaccgcccgcagaccgaggccgaggtgctggagcagagcgcgcagacgctgcgcgcccacctgggggccctgctgagcgcgctcagccgctcggttcgcgcgtgccccgccgtggtgcgcgccaccttccgccagctcttccggcgcgtgcgcgagcgcttccccggcgcccagcacgagaatgtaccgttcatcgccgtcaccagcttcctgtgcctgcgcttcttctctcccgccatcatgtcgcccaagctcttccacctgcgggagcgccacgcggacgcccgcaccagccgcaccctgctcctgttggccaaggcagtccagaacgtgggcaacatggacacgccggcttccagggccaaggaggcttggatggagccgctgcagcccaccgtgcgccagggcgtggcgcagctgaaggacttcatcaccaagctcgtggacatcgaggagaaggacgagctggacctgcagcggacgctgagtttgcaggcgccacctgtgaaggaggggccactcttcatccacaggaccaagggcaagggccccctcatgtcctcctccttcaagaagctctacttctccctcactaccgaggccctcagcttcgcgaagacgcccagctccaagaaaagcgccctcatcaagttagccaacatccgggcagcggaaaaggttgaggaaaagagctttggcggctcgcacgtcatgcaggtcatctacacggacgacgccggcaggccccagactgcctacctgcagtgcaagtgtgtgaatgagcttaaccagtggctgtctgcgctgcggaaggtgagcatcaacaacaccggactgctgggctcctaccaccctggcgtcttccgtggggacaagtggagctgctgccaccaaaaagagaagacaggtcagggctgcgataagacccggtcacgggtgaccctgcaggagtggaatgaccctcttgaccatgaccttgaggcccagctcatctaccggcacctgctgggcgtggaggccatgctgtggatcaccattaacaaggacaccaaggtacccaatgcctgtttattcaccatcaacaaagaagaccacacactgggaaacatcattaaatcacgtgcctgcttccccttcgccttctgccgtgattgtcagtttcctgaggcctccccagccacgcttcctgtacagcctgcagaacttctggcatggaaaagcccctgtgcaactggtaaagatatcaataagcaccaggaggtatctaaatccaccaggagccataggcatcacgttgacgtccatttaccagtcttccctggcaagattcttctgaattgtgctgccttggccaaaagagctgccccagagcacatcagctatgtgccccagctctcaaacgacaccttggcggggaggctcaccctgtccaccttcacgctggagcagcctctaggccagttcagcagccacaacatctctgacttggataccatctggctggtggggccctcagcacggcaccctgagcttcggccccggcaaacaggactccggtctgcgctttccagagggtcgatctccct

SEQ ID NO: 364742 - DNA, 2722 bp, Homo sapiens
  misc_feature (1)..(1): n is a, c, g, or t
  misc_feature (4)..(4): n is a, c, g, or t
  misc_feature (6)..(6): n is a, c, g, or t
ngcngngcccagtccagcgcccgccgcccgccaccccggaccccggtgtctggcttcccccgagccgggaccccgcgatggccaagcgcagctcgctgtacatccgcatcgtggaggggaagaaccttcccgccaaggacatcactggcagcagcgacccctactgcatcgtgaaggtggacaatgagcccatcatcaggacagccacagtgtggaagaccctgtgccccttctggggtgaggagtaccaagtgcacctgccgcccaccttccacgctgtggctttctatgtcatggatgaggatgccctcagccgggacgacgttatcggaaaggtctgccttacaagggacaccatagcctctcaccctaagggtttcagcgggtgggcccacctgacggaggtcgaccccgacgaggaggtgcagggcgagatccacctgcggctggaagtgtggccaggggcccgggcctgccggctacgctgctctgtgctggaggccagggatctggccccaaaggaccgcaatggcacatctgaccccttcgtccgagtgcgctacaagggccggacacgggagacctcgatcgtgaagaagtcatgctacccacgctggaatgagacgtttgaatttgagctgcaggagggggccatggaggcgctgtgcgtggaggcctgggactgggaccttgtcagccgaaacgacttcctgggcaaagtggtgattgatgtccagagactgcgggtggtgcagcaggaggagggctggttccggctgcagcccgaccagtccaagagccggcggcatgacgagggcaacctgggctccttgcagctggaggtgcggctgcgggacgagacggtgctgccctccagctactaccagccactggtgcacctgctgtgccacgaggtcaagctgggcatgcagggcccagggcagctgatcccactcatcgaggagacaaccagcaccgagtgtcgccaggacgtggccacgaacctgctcaagctcttcctggggcaggggctggccaaggacttcctggacctgctcttccagctggagctgagtcgcaccagtgagaccaacaccctgttccggagcaactctctggcctcaaagtccatggagtcttttctgaaggtggccgggatgcagtacctgcacggcgtcctgggccccatcatcaacaaggtgtttgaggagaagaagtacgtggagctggaccccagcaaagtggaagttaaggatgtagggtgctccgggctgcaccgcccgcagaccgaggccgaggtgctggagcagagcgcgcagacgctgcgcgcccacctgggggccctgctgagcgcgctcagccgctcggttcgcgcgtgccccgccgtggtgcgcgccaccttccgccagctcttccggcgcgtgcgcgagcgcttccccggcgcccagcacgagaatgtaccgttcatcgccgtcaccagcttcctgtgcctgcgcttcttctctcccgccatcatgtcgcccaagctcttccacctgcgggagcgccacgcggacgcccgcaccagccgcaccctgctcctgttggccaaggcagtccagaacgtgggcaacatggacacgccggcttccagggccaaggaggcttggatggagccgctgcagcccaccgtgcgccagggcgtggcgcagctgaaggacttcatcaccaagctcgtggacatcgaggagaaggacgagctggacctgcagcggacgctgagtttgcaggcgccacctgtgaaggaggggccactcttcatccacaggaccaagggcaagggccccctcatgtcctcctccttcaagaagctctacttctccctcactaccgaggccctcagcttcgcgaagacgcccagctccaagtgtgtgaatgagcttaaccagtggctgtctgcgctgcggaaggtgagcatcaacaacaccggactgctgggctcctaccaccctggcgtcttccgtggggacaagtggagctgctgccaccaaaaagagaagacaggtcagggctgcgataagacccggtcacgggtgaccctgcaggagtggaatgaccctcttgaccatgaccttgaggcccagctcatctaccggcacctgctgggcgtggaggccatgctgtggatcaccattaacaaggacaccaaggtacccaatgcctgtttattcaccatcaacaaagaagaccacacactgggaaacatcattaaatcacgtgcctgcttccccttcgccttctgccgtgattgtcagtttcctgaggcctccccagccacgcttcctgtacagcctgcagaacttctggcatggaaaagcccctgtgcaactggtaaagatatcaataagcaccaggaggtatctaaatccaccaggagccataggcatcacgttgacgtccatttaccagtcttccctggcaagattcttctgaattgtgctgccttggccaaaagagctgccccagagcacatcagctatgtgccccagctctcaaacgacaccttggcggggaggctcaccctgtccaccttcacgctggagcagcctctaggccagttcagcagccacaacatctctgacttggataccatctggctggtggggccctcagcacggcaccctgagcttcggccccggcaaacaggactccggtctgcgctttccagagggtcgatctccct

SEQ ID NO: 364743 - DNA, 2707 bp, Homo sapiens
  misc_feature (2232)..(2232): n is a, c, g, or t
aacttaggctaggtacgaggcctggtttgaatcggccgagggcacggtgtaatgcttctgcagttgatcacaacagagcacgactccatctcaaaaacaaacaaaaaaaaaagagtgtcacctggggctacttggccagacacagagagcaaggagacatccctattatctgtcaaaaataattattacagctgtgagccaccgcacccggccgcattcttctaaatcacagtacatctggttcccagtgcccaggctctcagggcagagggtccagtgtgatcactttgcatggcctctctcccctcctgagcttgtgccagggccccagggctgacctggagaaggaaaatggcagagggtgaagatggggtgtctggtttggggaccatcctggccccccttgtcactgttggcatctcttctgcacagtggcattgctgggaggtgcttactgtgcctattcaaggggctggcagccgcagcctcactgcagatcagggacttggcttcccggttgaccacaggtccaagaacctgcagggtccagcctcccccccatccccagtcttccccaccctggcccggccctccaggtgcagaaacatgcaggcccctctccaggactgtgggaggagtgtgtccctcagactggcctgtgtcctggctcctcttaccacctcttccagaggttgtcacctgcagctgccccaggataaaggcaaggccagagaggactcctgaactcctgtgtgcctggggtggcaggggcaaacatagccaactggtggcctgagcggggccatggtgaggacacccttggtggcttgtcccacatcaagctgggaggtgacactgaggatgcattagtctgcagcgtatgataaaaacggcatttcaggccaggcgtggtggctcatgcctgtcaccccagcaccttgggaggccgaggtgggcagatcatatgaggtcaggactttgagaccagcctggccaacatggtgaaaactcatctgtactaaaaaaacaaaaattatgtgggttggtggtgtgcgcctgtaatcccagctacttgggaggctgaggcaggagaatcacttgaacctgggaggcggaggctacaacgagccgaaattgcaccactgcactccagcctgactccgtctcaaaaaaaaaaaaaaaaaaggcatttcagttcaaatagggaaaggatacatctttctttctttctttctttctttctttctttctttctttctttctttctttctttctttcttctttctttctttttctttcctcccttcctttatctctctctctctctctctttctctctttctttttgagatggagtttcactctcgctgcccaggctggagtacaatggtgcgatctcggcttattattattctccatgttggtcaggctggtcttgaactcccaacctcaggtgatccgcctgcgttggcctcccaaagtgctggtgtgagccactgcacccggcttaggatgcatttttcaatattttagtgtttgaataacgggctaacttgagaaaaaaataatttgaatcacacatcacaccaaaaataaattctaggtggattttaacactttcaaaaattattattagtttagagacagggtctcactccgtcgcctaggctggagtgcagtggtatgatcatggttcactgcaaccttaaactcctggcctcatatgatcctccggcctcagcctctcaaagtactggaactacaaacatgcaccaccacgcccagcctaggtgggtttttaaaatccattcaagggcgggtgcagtggctcacacctgtaatcccagcattttgggaagccaaggtgggaggatcacttgagcccaggagttcgagaccagcctgggcaacatagtgagaccacatctctacaaaaaatttaaaaatgagccaggcatggtggtgcacacctgtagtctctgctattcaggaggctgaggcgggatcattgtttgagcccaggagacagattgcagtgagctatgatggcaccactgcatggcagcctgggtgacaaagggagactcagtctcaaaaaaaaccaaaagttacccagcaacccaagtcatatcctgatgatatccatactcctcagtcatgcatcccgtggtgcgggggctgaccccaagaggagctgctgcccccagagggtggggagccgaggcaggcctnggtcagacttaccaggctatgctcccagcccagccctcactagggacccccgagtgcatctctctcctctccaggcctctgtttctccatctgtgcaaccacagtgttggacatggtagtcccaagtgtctgctcgtaactttgccctctctgtgcccccaggtcagggctgcgataagacccggtcacgggtgaccctgcaggagtggaatgaccctcttgaccatgaccttgaggcccagctcatctaccggcacctgctgggcgtggaggccatgctgtgggagaggcaccgggagctgagcgggggcgcagaggcaggcacggtgcccacgagccctggcaaagtccccgaggactcattggcccggctgctccgggtgctgcaggacctccgcgaggcccatagctccagcccggccggctccccaccctcagagcccaactgcctcctggagctgcagacgtgaggccc

SEQ ID NO: 364744 - DNA, 2763 bp, Homo sapiens
  misc_feature (1)..(1): n is a, c, g, or t
  misc_feature (4)..(4): n is a, c, g, or t
  misc_feature (6)..(6): n is a, c, g, or t
ngcngngcccagtccagcgcccgccgcccgccaccccggaccccggtgtctggcttcccccgagccgggaccccgcgatggccaagcgcagctcgctgtacatccgcatcgtggaggggaagaaccttcccgccaaggacatcactggcagcagcgacccctactgcatcgtgaaggtggacaatgagcccatcatcaggacagccacagtgtggaagaccctgtgccccttctggggtgaggagtaccaagtgcacctgccgcccaccttccacgctgtggctttctatgtcatggatgaggatgccctcagccgggacgacgttatcggaaaggtctgccttacaagggacaccatagcctctcaccctaagggtttcagcgggtgggcccacctgacggaggtcgaccccgacgaggaggtgcagggcgagatccacctgcggctggaagtgtggccaggggcccgggcctgccggctacgctgctctgtgctggaggccagggatctggccccaaaggaccgcaatggcacatctgaccccttcgtccgagtgcgctacaagggccggacacgggagacctcgatcgtgaagaagtcatgctacccacgctggaatgagacgtttgaatttgagctgcaggagggggccatggaggcgctgtgcgtggaggcctgggactgggaccttgtcagccgaaacgacttcctgggcaaagtggtgattgatgtccagagactgcgggtggtgcagcaggaggagggctggttccggctgcagcccgaccagtccaagagccggcggcatgacgagggcaacctgggctccttgcagctggaggtgcggctgcgggacgagacggtgctgccctccagctactaccagccactggtgcacctgctgtgccacgaggtcaagctgggcatgcagggcccagggcagctgatcccactcatcgaggagacaaccagcaccgagtgtcgccaggacgtggccacgaacctgctcaagctcttcctggggcaggggctggccaaggacttcctggacctgctcttccagctggagctgagtcgcaccagtgagaccaacaccctgttccggagcaactctctggcctcaaagtccatggagtcttttctgaaggtggccgggatgcagtacctgcacggcgtcctgggccccatcatcaacaaggtgtttgaggagaagaagtacgtggagctggaccccagcaaagtggaagttaaggatgtagggtgctccgggctgcaccgcccgcagaccgaggccgaggtgctggagcagagcgcgcagacgctgcgcgcccacctgggggccctgctgagcgcgctcagccgctcggttcgcgcgtgccccgccgtggtgcgcgccaccttccgccagctcttccggcgcgtgcgcgagcgcttccccggcgcccagcacgaggtgcgccctccacccgctgggctaggctgggccgggttggactgggctggggcgaggggtgaagagcggtggggaaccagggagcgctggggaggaccagggaggctgtgtcgcagcgagggtcagggacggagcctaaggggagggggctgccaggagccctggtctgggggactccagcccgcgctcttccgcacccctccagaatgtaccgttcatcgccgtcaccagcttcctgtgcctgcgcttcttctctcccgccatcatgtcgcccaagctcttccacctgcgggagcgccacgcggacgcccgcaccagccgcaccctgctcctgttggccaaggtgcgggccttgcggccacgggcgggatgcacagctgggtgtcctaccggggccctggcctggactgcagagtgttccctaccggctccggcgaggccactggcacgcccacgtaggcactgcacttcacagtttgcaaagccttcctgtggccaccttgtccgagctccatctcatggataagggaacaggcctgcgaggggtcgggggttgccaaggccgcccatcctgtcggtggtgaatcgcgggaccttccaacccaggtctgcttactctcaggctgcacctatgtgcccggcaccggggtggggtatccagtgcagcagcgtcagttaaacgcagtccagaacgtgggcaacatggacacgccggcttccagggccaaggaggcttggatggagccgctgcagcccaccgtgcgccagggcgtggcgcagctgaaggacttcatcaccaagctcgtggacatcgaggagaaggacggtgagcgccgccctgcacagacccgcccacagcctactgctgacgtttgctccgcccttgagccccacggccccacccatcgctgtttgttcctctcgtggccccacccaccgcctgctgttggcatttgccaggcccccaggccatagacccacgcaccactgtttgtgcttcctgtgaccctgcccactgcctgctgttgacgtttgccccacccctagacccatggcctcaccctcccatcatctgtgcctgttgacatttgctccatccttgagctccatagccccgccgccacctgctactgacgcgtgtcccgcctccaagcccatggccctgccttcctcagtccacctgtcaccccgctcaccaccagctgttgatgtttgctccgcccttgagccccatgactacgtccactgcctgctgttcagatttgctcagcccttgagccccatggcccctcccactgctccgctcccc

SEQ ID NO: 364745 - DNA, 2251 bp, Homo sapiens
  misc_feature (1776)..(1776): n is a, c, g, or t
gctactactactactactactaccaaattcgcggcgctcgatcagggacttggcttcccggttgaccacaggtccaagaacctgcagggtccagcctcccccccatccccagtcttccccaccctggcccggccctccaggtgcagaaacatgcaggcccctctccaggactgtgggaggagtgtgtccctcagactggcctgtgtcctggctcctcttaccacctcttccagaggttgtcacctgcagctgccccaggataaaggcaaggccagagaggactcctgaactcctgtgtgcctggggtggcaggggcaaacatagccaactggtggcctgagcggggccatggtgaggacacccttggtggcttgtcccacatcaagctgggaggtgacactgaggatgcattagtctgcagcgtatgataaaaacggcatttcaggccaggcgtggtggctcatgcctgtcaccccagcaccttgggaggccgaggtgggcagatcatatgaggtcaggactttgagaccagcctggccaacatggtgaaaactcatctgtactaaaaaaacaaaaattatgtgggttggtggtgtgcgcctgtaatcccagctacttgggaggctgaggcaggagaatcacttgaacctgggaggcggaggctacaacgagccgaaattgcaccactgcactccagcctgactccgtctcaaaaaaaaaaaaaaaaaaggcatttcagttcaaatagggaaaggatacatctttctttctttctttctttctttctttctttctttctttctttctttctttctttctttcttctttctttctttttctttcctcccttcctttatctctctctctctctctctttctctctttctttttgagatggagtttcactctcgctgcccaggctggagtacaatggtgcgatctcggcttattattattctccatgttggtcaggctggtcttgaactcccaacctcaggtgatccgcctgcgttggcctcccaaagtgctggtgtgagccactgcacccggcttaggatgcatttttcaatattttagtgtttgaataacgggctaacttgagaaaaaaataatttgaatcacacatcacaccaaaaataaattctaggtggattttaacactttcaaaaattattattagtttagagacagggtctcactccgtcgcctaggctggagtgcagtggtatgatcatggttcactgcaaccttaaactcctggcctcatatgatcctccggcctcagcctctcaaagtactggaactacaaacatgcaccaccacgcccagcctaggtgggtttttaaaatccattcaagggcgggtgcagtggctcacacctgtaatcccagcattttgggaagccaaggtgggaggatcacttgagcccaggagttcgagaccagcctgggcaacatagtgagaccacatctctacaaaaaatttaaaaatgagccaggcatggtggtgcacacctgtagtctctgctattcaggaggctgaggcgggatcattgtttgagcccaggagacagattgcagtgagctatgatggcaccactgcatggcagcctgggtgacaaagggagactcagtctcaaaaaaaaccaaaagttacccagcaacccaagtcatatcctgatgatatccatactcctcagtcatgcatcccgtggtgcgggggctgaccccaagaggagctgctgcccccagagggtggggagccgaggcaggcctnggtcagacttaccaggctatgctcccagcccagccctcactagggacccccgagtgcatctctctcctctccaggcctctgtttctccatctgtgcaaccacagtgttggacatggtagtcccaagtgtctgctcgtaactttgccctctctgtgcccccaggtcagggctgcgataagacccggtcacgggtgaccctgcaggagtggaatgaccctcttgaccatgaccttgaggcccagctcatctaccggcacctgctgggcgtggaggccatgctgtgggagaggcaccgggagctgagcgggggcgcagaggcaggcacggtgcccacgagccctggcaaagtccccgaggactcattggcccggctgctccgggtgctgcaggacctccgcgaggcccatagctccagcccggccggctccccaccctcagagcccaactgcctcctggagctgcagacgtgaggccc

SEQ ID NO: 364746 - DNA, 3039 bp, Homo sapiens
agttttatgggcggatggaaggggccggggcagcgtcggggaaaggaagggccggaggcgcggcggcgggcggccgagaggggcggcggcggcggcggcggcggggttcccgcgccgcggagcccggcccgagagccgcgtccacgttcctgcctcctgctcccgccgccctggggcgccgccatgacgcccgatctgctcaacttcaagaagggatggatgtcgatcttggacgagcctggagagcctccctccccctcgctcaccaccacctctacttcgcagtggaagaaacattggtttgtgctgacagattcaagtctcaaatattacagagactccactgctgaggaggcagatgagctggatggtgagatcgacctgcgttcctgcacggatgtcactgagtacgcggtgcagcgcaactatggcttccagatccacaccaaggatgctgtctataccttgtcggccatgacctcaggcatccggcggaactggatcgaggctctgagaaagaccgtacgtccaacttcagccccagatgtcaccaagctctcggactctaacaaggagaacgcgctgcacagctacagcacccagaagggccccctgaaggcaggggagcagcgggcgggctctgaggtcatcagccggggtggccctcggaaggcggacgggcagcgtcaggccttggactacgtggagctctcgccgctgacccaggcttccccgcagcgggcccgcaccccagcccgcactcctgaccgcctggccaagcaggaggagctggagcgggacctggcccagcgctccgaggagcggcgcaagtggtttgaggccacagacagcaggaccccagaggtgcctgctggtgaggggccgcgccggggcctgggtgcccccctgactgaggaccagcaaaaccggcttagtgaggagatcgagaagaagtggcaggagctggagaagctgcccctgcgggagaataagcgggtgcccctcactgccctgctcaaccaaagccgcggagagcgccgagggcccccaagtgacggccacgaggcactggagaaggaggaggcatgtgagcgcagcctggcagagatggagtcctcgcaccagcaggtgatggaggagctgcagcggcaccacgagcgggagctgcagcgcctgcagcaggagaaggagtggctcctggctgaggagacggcagccacggcctcagccattgaagccatgaagaaggcctaccaggaagagctgagccgagagctgagcaaaacacggagtctccagcagggcccggatggcctccggaagcagcaccagtcagatgtggaggcactgaagcgagagctgcaggtgctatcggagcagtactcgcagaagtgcctggagattggggcactcatgcggcaggctgaggagcgcgagcacacgctgcgccgctgccagcaggagggccaggagctgctgcgccacaaccaggagctgcatggccgcctgtcagaggagatagaccagctgcgcggcttcattgcctcgcagggcatgggcaatggctgcgggcgcagcaacgagcggagttcctgcgagctagaggtgctgcttcgcgtaaaagaaaacgaactccagtacctaaagaaggaggtgcagtgcctccgggacgagctccagatgatgcagaaggacaagcgcttcacctcgggaaagtaccaggacgtctatgtggagctgagccacatcaagacacggtctgagcgggagatcgagcagctgaaggagcacctgcgtcttgccatggccgccctccaggagaaggagtcgatgcgcaacagcctggctgagtagaggtcccgcccagctgcagaccctccaggctggaggaccagccgccctccttccctcctggatggaagtaaaaagccaagctttctccccaccctctgtgggccacacgtgcacttgcacccaccacacacacacacacacacacacacacacacagacacacagacacatacgcacacacgtgcacacatgtacacacggatacacacacacacacacacacacacacactgcatatctgagcgcgcccctcgcactgggtctcaccttgcaccttcttcaggattttatatgtgaagagatttttatatagatttttttcctttttttccaaaacactttatactttaaaaaaaaaaaaaaaaaagcaattcctggtggctgtgtgcctccaaccctggtccccctctgtctccagccaccctctgcttgggcttctgagctggtggccctggcccagaggtctggcggaggcccaggcagcagccatggcggggtgtctctacaggggagaggcgggagcctgccaccctcttcctgccctacctcctactaacacttcctgccccatttggacccgtaccatggggctcaggacagagggagctagcagctggcctccatggccccacagcctccttcgaggctgtgctgggtgcagaaccgccagagccacccaaaaggtgtttctcttctgctccctgaacctcttaacttaataaaacgttccagcagctctggtgtcctagatggctggcagaacaggaatggagattggggtttcttgaagtggcttccccactcacaccctacccacaccccacccttcctaaagcagcggcctctaggcttctgagggtggggctgaaaatccaaggtctcccttagtacagactgtgacgcccccagtgtggcttgcaggctagtggcagcggaagcatgtgggaaatagcaagtccagtcccaccccaacctactgaaccagcgtctgcattttaacagggtgccccagtgattcacgtgaccttcaaagtctgaggagccctggagtagggcccagggcccaggcctgagagagaggcctggggctaagactagccctgaccatgaccttgggcaagtcacacccctcactgagcctcagtttgcttctccatcaaatgggtgtttttctttcagtcccag

SEQ ID NO: 364747 - DNA, 3612 bp, Homo sapiens
agttttatgggcggatggaaggggccggggcagcgtcggggaaaggaagggccggaggcgcggcggcgggcggccgagaggggcggcggcggcggcggcggcggggttcccgcgccgcggagcccggcccgagagccgcgtccacgttcctgcctcctgctcccgccgccctggggcgccgccatgacgcccgatctgctcaacttcaagaagggatggatgtcgatcttggacgagcctggagagcctccctccccctcgctcaccaccacctctacttcgcagtggaagaaacattggtttgtgctgacagattcaagtctcaaatattacagagactccactgctgaggaggcagatgagctggatggtgagatcgacctgcgttcctgcacggatgtcactgagtacgcggtgcagcgcaactatggcttccagatccacaccaaggatgctgtctataccttgtcggccatgacctcaggcatccggcggaactggatcgaggctctgagaaagaccgtacgtccaacttcagccccagatgtcaccaagctctcggactctaacaaggagaacgcgctgcacagctacagcacccagaagggccccctgaaggcaggggagcagcgggcgggctctgaggtcatcagccggggtggccctcggaaggcggacgggcagcgtcaggccttggactacgtggagctctcgccgctgacccaggcttccccgcagcgggcccgcaccccagcccgcactcctgaccgcctggccaagcaggaggagctggagcgggacctggcccagcgctccgaggagcggcgcaagtggtttgaggccacagacagcaggaccccagaggtgcctgctggtgaggggccgcgccggggcctgggtgcccccctgactgaggaccagcaaaaccggcttagtgaggagatcgagaagaagtggcaggagctggagaagctgcccctgcgggagaataagcgggtgcccctcactgccctgctcaaccaaagccgcggagagcgccgagggcccccaagtgacggccacgaggcactggagaaggaggttcaggctcttcgggcccagctggaggcgtggcgtctccaaggggaggctcctcagagtgcactgagatcccaggaggatggccacatccccccgggctacatctcacaggaggcatgtgagcgcagcctggcagagatggagtcctcgcaccagcaggtgatggaggagctgcagcggcaccacgagcgggagctgcagcgcctgcagcaggagaaggagtggctcctggctgaggagacggcagccacggcctcagccattgaagccatgaagaaggcctaccaggaagagctgagccgagagctgagcaaaacacggagtctccagcagggcccggatggcctccggaagcagcaccagtcagatgtggaggcactgaagcgagagctgcaggtgctatcggagcagtactcgcagaagtgcctggagattggggcactcatgcggcaggctgaggagcgcgagcacacgctgcgccgctgccagcaggagggccaggagctgctgcgccacaaccaggagctgcatggccgcctgtcagaggagatagaccagctgcgcggcttcattgcctcgcagggcatgggcaatggctgcgggcgcagcaacgagcggagttcctgcgagctagaggtgctgcttcgcgtaaaagaaaacgaactccagtacctaaagaaggaggtgcagtgcctccgggacgagctccagatgatgcagaaggacaagcgcttcacctcgggaaagtaccaggacgtctatgtggagctgagccacatcaagacacggtctgagcgggagatcgagcagctgaaggagcacctgcgtcttgccatggccgccctccaggagaaggagtcgatgcgcaacagcctggctgagtagaggtcccgcccagctgcagaccctccaggctggaggaccagccgccctccttccctcctggatggaagtaaaaagccaagctttctccccaccctctgtgggccacacgtgcacttgcacccaccacacacacacacacacacacacacacacacagacacacagacacatacgcacacacgtgcacacatgtacacacggatacacacacacacacacacacacacacactgcatatctgagcgcgcccctcgcactgggtctcaccttgcaccttcttcaggattttatatgtgaagagatttttatatagatttttttcctttttttccaaaacactttatactttaaaaaaaaaaaaaaaaaagcaattcctggtggctgtgtgcctccaaccctggtccccctctgtctccagccaccctctgcttgggcttctgagctggtggccctggcccagaggtctggcggaggcccaggcagcagccatggcggggtgtctctacaggggagaggcgggagcctgccaccctcttcctgccctacctcctactaacacttcctgccccatttggacccgtaccatggggctcaggacagagggagctagcagctggcctccatggccccacagcctccttcgaggctgtgctgggtgcagaaccgccagagccacccaaaaggtgtttctcttctgctccctgaacctcttaacttaataaaacgttccagcagaaaaaaaaaaaaaaaaaaaaaaaaaaaaaaaaaaaaaagaacaagaaaaaaaaaacaaaaaaagaggagggggggcgcagagacagccacctcccaggagggagccaaaacaggcgacagcgcacactgtaatagcaaaaaggcgggaccacacacgaggcgagagtaataaaaaaagccgaagagccgcggagcgagagacaaaccacaggagcggcgaagcggagcaacaaagccgaggagccagcggcgacgagcccgaagagatcagaaaggacaccacgcagcgaggagaggaagagaaaaaagacagagggggcagaacaaacagcgaaaccagagccggagagacacgagagaagcacaggcaggaggacgaagaaggagaaacaacaaaacacaaacagcagaagagcaacaagcgaagcaccgaggggagagagcacacacagaccggagagcgacaacgccaacacacgagaacgcgacacacgagcaagacacacgaagcgagcgctgaacaaagagcaaggccgcgcctaagcaccgaaggagccaccggacagaagaccagctagcccacaaaccaacagccagaacgaagacgcggtgcacgacgaaacacagaacaagagcaccaggagagatcaacagcagaagagggcaaggatcgacaggcggaagcgacggaaagcagagacagagacaccacagcccaaggacgcgagcaggcgcccagctcggaaagagcgaggcaggagagagccagagcccccacgcgaaagaggcgagagcaggcgagcaaaagaaggaaggcactgaaacacaagacagagcagagacacgagcagagagacgatgggaaccacaaggagtagcaagccgagagcagacacaggagagaaacacgca

SEQ ID NO: 364748 - DNA, 3513 bp, Homo sapiens
agttttatgggcggatggaaggggccggggcagcgtcggggaaaggaagggccggaggcgcggcggcgggcggccgagaggggcggcggcggcggcggcggcggggttcccgcgccgcggagcccggcccgagagccgcgtccacgttcctgcctcctgctcccgccgccctggggcgccgccatgacgcccgatctgctcaacttcaagaagggatggatgtcgatcttggacgagcctggagagcctccctccccctcgctcaccaccacctctacttcgcagtggaagaaacattggtttgtgctgacagattcaagtctcaaatattacagagactccactgctgaggaggcagatgagctggatggtgagatcgacctgcgttcctgcacggatgtcactgagtacgcggtgcagcgcaactatggcttccagatccacaccaaggatgctgtctataccttgtcggccatgacctcaggcatccggcggaactggatcgaggctctgagaaagaccgtacgtccaacttcagccccagatgtcaccaagctctcggactctaacaaggagaacgcgctgcacagctacagcacccagaagggccccctgaaggcaggggagcagcgggcgggctctgaggtcatcagccggggtggccctcggaaggcggacgggcagcgtcaggccttggactacgtggagctctcgccgctgacccaggcttccccgcagcgggcccgcaccccagcccgcactcctgaccgcctggccaagcaggaggagctggagcgggacctggcccagcgctccgaggagcggcgcaagtggtttgaggccacagacagcaggaccccagaggtgcctgctggtgaggggccgcgccggggcctgggtgcccccctgactgaggaccagcaaaaccggcttagtgaggagatcgagaagaagtggcaggagctggagaagctgcccctgcgggagaataagcgggtgcccctcactgccctgctcaaccaaagccgcggagagcgccgagggcccccaagtgacggccacgaggcactggagaaggaggttcaggctcttcgggcccagctggaggcgtggcgtctccaaggggaggctcctcagagtgcactgagatcccaggaggatggccacatccccccgggctacatctcacaggaggcatgtgagcgcagcctggcagagatggagtcctcgcaccagcaggtgatggaggagctgcagcggcaccacgagcgggagctgcagcgcctgcagcaggagaaggagtggctcctggctgaggagacggcagccacggcctcagccattgaagccatgaagaaggcctaccaggaagagctgagccgagagctgagcaaaacacggagtctccagcagggcccggatggcctccggaagcagcaccagtcagatgtggaggcactgaagcgagagctgcaggtgctatcggagcagtactcgcagaagtgcctggagattggggcactcatgcggcaggctgaggagcgcgagcacacgctgcgccgctgccagcaggagggccaggagctgctgcgccacaaccaggagctgcatggccgcctgtcagaggagatagaccagctgcgcggcttcattgcctcgcagggcatgggcaatggctgcgggcgcagcaacgagcggagttcctgcgagctagaggtgctgcttcgcgtaaaagaaaacgaactccagtacctaaagaaggaggtgcagtgcctccgggacgagctccagatgatgcagaaggacaagcgcttcacctcgggaaagtaccaggacgtctatgtggagctgagccacatcaagacacggtctgagcgggagatcgagcagctgaaggagcacctgcgtcttgccatggccgccctccaggagaaggagtcgatgcgcaacagcctggctgagtagaggtcccgcccagctgcagaccctccaggctggaggaccagccgccctccttccctcctggatggaagtaaaaagccaagctttctccccaccctctgtgggccacacgtgcacttgcacccaccacacacacacacacacacacacacacacacagacacacagacacatacgcacacacgtgcacacatgtacacacggatacacacacacacacacacacacacacactgcatatctgagcgcgcccctcgcactgggtctcaccttgcaccttcttcaggattttatatgtgaagagatttttatatagatttttttcctttttttccaaaacactttatactttaaaaaaaaaaaaaaaaaagcaattcctggtggctgtgtgcctccaaccctggtccccctctgtctccagccaccctctgcttgggcttctgagctggtggccctggcccagaggtctggcggaggcccaggcagcagccatggcggggtgtctctacaggggagaggcgggagcctgccaccctcttcctgccctacctcctactaacacttcctgccccatttggacccgtaccatggggctcaggacagagggagctagcagctggcctccatggccccacagcctccttcgaggctgtgctgggtgcagaaccgccagagccacccaaaaggtgtttctcttctgctccctgaacctcttaacttaataaaacgttccagcagaaaaaaaaaaaaaaaaaaaaaaaaaaaaaatttttgggggcctcgcgaaaaagttttataaacccaatcggttgtgggggcgagggccccagagtaggtaacagtgtgaccacgtgccccaacgcgctgtcccaaagcgaaacccggggacagaaacataggggctggggcttctcccacccaaataaaaaaacggcccgggaggaaccacagacgtgttctggaacaaaaccacagaagggaagatcgacggaggcaacaaaccgggacacatacaaaacggggagtctcacaagcagaacgcggattataaaaatttagccccgccagtggaggaaaagaacagcaaccacacacaaagaagaaagaaagcaagcaaaagcaaaacccagaagagcaacagcagagagagaagaacacgaaaacagacgacacgaccgcaagaggaagcacaacaatgacggcaagcagagaagccgagaacgaacacgagaaaagaagacggaacaagagcaatacaggaacaagaaccgaagcaatacagcgaaagacgcgagacggagcgagcgaggaggggagagacgacgagagggaaagagcagagcgagggggaggggagggagcagagagagcggcgaggacgaaagaacagaagaggacagggcgccgcaagggaagggagaggagcgcagaggcgagagggaggaaaaagcgggggagacgaaaagagaagggggaaggagagagaagagcagagaagaaaggagagagggaccaagaacggaggaggagagagggaaaagggagagcgac

SEQ ID NO: 364749 - DNA, 3167 bp, Homo sapiens
gacttagatgagagaggtctccccagcaggaagggagggtctggtggttggcacccactagatgagcatggtcagaaaaatatcaggatgagcaacttctttatctaggcctgggtgggggtgcctggcacaggtctccatgggacatgctgcagctggtagcccccagaccccggggctgtgcccccctgggcggcacccagaagcccgatctgctcaacttcaagaagggatggatgtcgatcttggacgagcctggagagcctccctccccctcgctcaccaccacctctacttcgcagtggaagaaacattggtttgtgctgacagattcaagtctcaaatattacagagactccactgctgaggaggcagatgagctggatggtgagatcgacctgcgttcctgcacggatgtcactgagtacgcggtgcagcgcaactatggcttccagatccacaccaaggatgctgtctataccttgtcggccatgacctcaggcatccggcggaactggatcgaggctctgagaaagaccgtacgtccaacttcagccccagatgtcaccaagctctcggactctaacaaggagaacgcgctgcacagctacagcacccagaagggccccctgaaggcaggggagcagcgggcgggctctgaggtcatcagccggggtggccctcggaaggcggacgggcagcgtcaggccttggactacgtggagctctcgccgctgacccaggcttccccgcagcgggcccgcaccccagcccgcactcctgaccgcctggccaagcaggaggagctggagcgggacctggcccagcgctccgaggagcggcgcaagtggtttgaggccacagacagcaggaccccagaggtgcctgctggtgaggggccgcgccggggcctgggtgcccccctgactgaggaccagcaaaaccggcttagtgaggagatcgagaagaagtggcaggagctggagaagctgcccctgcgggagaataagcgggtgcccctcactgccctgctcaaccaaagccgcggagagcgccgagggcccccaagtgacggccacgaggcactggagaaggaggttcaggctcttcgggcccagctggaggcgtggcgtctccaaggggaggctcctcagagtgcactgagatcccaggaggatggccacatccccccgggctacatctcacaggaggcatgtgagcgcagcctggcagagatggagtcctcgcaccagcaggtgatggaggagctgcagcggcaccacgagcgggagctgcagcgcctgcagcaggagaaggagtggctcctggctgaggagacggcagccacggcctcagccattgaagccatgaagaaggcctaccaggaagagctgagccgagagctgagcaaaacacggagtctccagcagggcccggatggcctccggaagcagcaccagtcagatgtggaggcactgaagcgagagctgcaggtgctatcggagcagtactcgcagaagtgcctggagattggggcactcatgcggcaggctgaggagcgcgagcacacgctgcgccgctgccagcaggagggccaggagctgctgcgccacaaccaggagctgcatggccgcctgtcagaggagatagaccagctgcgcggcttcattgcctcgcagggcatgggcaatggctgcgggcgcagcaacgagcggagttcctgcgagctagaggtgctgcttcgcgtaaaagaaaacgaactccagtacctaaagaaggaggtgcagtgcctccgggacgagctccagatgatgcagaaggacaagcgcttcacctcgggaaagtaccaggacgtctatgtggagctgagccacatcaagacacggtctgagcgggagatcgagcagctgaaggagcacctgcgtcttgccatggccgccctccaggagaaggagtcgatgcgcaacagcctggctgagtagaggtcccgcccagctgcagaccctccaggctggaggaccagccgccctccttccctcctggatggaagtaaaaagccaagctttctccccaccctctgtgggccacacgtgcacttgcacccaccacacacacacacacacacacacacacacacagacacacagacacatacgcacacacgtgcacacatgtacacacggatacacacacacacacacacacacacacactgcatatctgagcgcgcccctcgcactgggtctcaccttgcaccttcttcaggattttatatgtgaagagatttttatatagatttttttcctttttttccaaaacactttatactttaaaaaaaaaaaaaaaaaagcaattcctggtggctgtgtgcctccaaccctggtccccctctgtctccagccaccctctgcttgggcttctgagctggtggccctggcccagaggtctggcggaggcccaggcagcagccatggcggggtgtctctacaggggagaggcgggagcctgccaccctcttcctgccctacctcctactaacacttcctgccccatttggacccgtaccatggggctcaggacagagggagctagcagctggcctccatggccccacagcctccttcgaggctgtgctgggtgcagaaccgccagagccacccaaaaggtgtttctcttctgctccctgaacctcttaacttaataaaacgttccagcagctctggtgtcctagatggctggcagaacaggaatggagattggggtttcttgaagtggcttccccactcacaccctacccacaccccacccttcctaaagcagcggcctctaggcttctgagggtggggctgaaaatccaaggtctcccttagtacagactgtgacgcccccagtgtggcttgcaggctagtggcagcggaagcatgtgggaaatagcaagtccagtcccaccccaacctactgaaccagcgtctgcattttaacagggtgccccagtgattcacgtgaccttcaaagtctgaggagccctggagtagggcccagggcccaggcctgagagagaggcctggggctaagactagccctgaccatgaccttgggcaagtcacacccctcactgagcctcagtttgcttctccatcaaatgggtgtttttctttcagtcccag

SEQ ID NO: 364750 - DNA, 4744 bp, Homo sapiens
  misc_feature (62)..(62): n is a, c, g, or t
  misc_feature (498)..(498): n is a, c, g, or t
  misc_feature (715)..(715): n is a, c, g, or t
  misc_feature (728)..(728): n is a, c, g, or t
gtgcccatggaagggacaaggctctcgtgcagagagtccatggaagggacaaggctctctgnacgagtgcccccacatccccacccctgtgtgcattgggcaccgggatgcaccctccttctcatccccaccacgccaggctcctgagccatccctcttcttccaggatccccctggaactagtatggagagcctggccccctccactgactctctgcatggctccccagtgctgatcccccaagtgtgcatcgggcaccgggatgcaccccgagcctcctccccaccccgccacccacccagtgacctagcgttcctggcaccctcaccttcaccgggcagctctgggggctcccggggctcagcgcctcccggggagaccaggcacaacttggagcgggaggagtacactgtgctggccgacctgcccccacccaggaggctggcccagagacagccagggccccaggcgcagtgcagcagcgggggccgcacccncagccctggccgtgcagaggtggagcgcctcttcgggcaagagcgcaggaagtccgaggcagcgggggccttccaggcccaggacgagggacggtcacagcagcccagccaaggccagagccaacttctccgaagacagtccagccctgcccccagcaggcaggtgaccatgctccctgccaaacaggcagaactgacccggcggagccaagcaganccccctcatcctnggagtcctgagaagagacctgagggagatcggcagctccaggggtccccgctgccccccaggacatcagccaggacccctgagagggagctgcggacacagagacctctggagagtggccaagcaggcccaagacagcctctgggggtgtggcagagtcaggaggaaccgccagggtcccagggccctcatagacacctagaaaggagctggagcagccaggagggaggcctgggccctgggggctggtggggatgtggagagcccagcctgggggcagccaaagccccggagggagcatgggggggcacttccagggagtacaaggagagctgggggcagccagaggcctgggaggagaagcccactcatgagctccccagagaactaggaaagagaagcccactcacgagcccccctgagaactggggaggccccgcagagtcctcacaatcctggcactctgggacacccactgctgtgggctggggggcagagggagcgtgtccatacccgcgtggctctgagaggcgacccgagcttgactggagggatctgcttggccttctccgggcaccaggagagggggtctgggcccgtgtccccagcctggactgggagggcctcttggagctcctgcaggccaggctgccccgcaaggacccagctggacacagggatgacctggccagggctttagggccagagctgggtcccccaggcacaaacgatgtccctgagcaggagtcacacagccagccagaaggctgggccgaggccaccccagtcaatggacacagccccgcactgcagtcccagagcccggtccagctgcccagccctgcctgcacctccacccagtggccaaagatcaaagtgacaagaggaccagcgaccgcaactctggcaggcctggagcagacgggccccctggggagcaggagcactgcgaagggccccagcttgccagagctgcagttccaaccagaggagcctgaggagtcagaaccaagcagaggccaagaccccctgactgaccagaagcaggcagactcgcccgatctgctcaacttcaagaagggatggatgtcgatcttggacgagcctggagagcctccctccccctcgctcaccaccacctctacttcgcagtggaagaaacattggtttgtgctgacagattcaagtctcaaatattacagagactccactgctgaggaggcagatgagctggatggtgagatcgacctgcgttcctgcacggatgtcactgagtacgcggtgcagcgcaactatggcttccagatccacaccaaggatgctgtctataccttgtcggccatgacctcaggcatccggcggaactggatcgaggctctgagaaagaccgtacgtccaacttcagccccagatgtcaccaagctctcggactctaacaaggagaacgcgctgcacagctacagcacccagaagggccccctgaaggcaggggagcagcgggcgggctctgaggtcatcagccggggtggccctcggaaggcggacgggcagcgtcaggccttggactacgtggagctctcgccgctgacccaggcttccccgcagcgggcccgcaccccagcccgcactcctgaccgcctggccaagcaggaggagctggagcgggacctggcccagcgctccgaggagcggcgcaagtggtttgaggccacagacagcaggaccccagaggtgcctgctggtgaggggccgcgccggggcctgggtgcccccctgactgaggaccagcaaaaccggcttagtgaggagatcgagaagaagtggcaggagctggagaagctgcccctgcgggagaataagcgggtgcccctcactgccctgctcaaccaaagccgcggagagcgccgagggcccccaagtgacggccacgaggcactggagaaggaggttcaggctcttcgggcccagctggaggcgtggcgtctccaaggggaggctcctcagagtgcactgagatcccaggaggatggccacatccccccgggctacatctcacaggaggcatgtgagcgcagcctggcagagatggagtcctcgcaccagcaggtgatggaggagctgcagcggcaccacgagcgggagctgcagcgcctgcagcaggagaaggagtggctcctggctgaggagacggcagccacggcctcagccattgaagccatgaagaaggcctaccaggaagagctgagccgagagctgagcaaaacacggagtctccagcagggcccggatggcctccggaagcagcaccagtcagatgtggaggcactgaagcgagagctgcaggtgctatcggagcagtactcgcagaagtgcctggagattggggcactcatgcggcaggctgaggagcgcgagcacacgctgcgccgctgccagcaggagggccaggagctgctgcgccacaaccaggagctgcatggccgcctgtcagaggagatagaccagctgcgcggcttcattgcctcgcagggcatgggcaatggctgcgggcgcagcaacgagcggagttcctgcgagctagaggtgctgcttcgcgtaaaagaaaacgaactccagtacctaaagaaggaggtgcagtgcctccgggacgagctccagatgatgcagaaggacaagcgcttcacctcgggaaagtaccaggacgtctatgtggagctgagccacatcaagacacggtctgagcgggagatcgagcagctgaaggagcacctgcgtcttgccatggccgccctccaggagaaggagtcgatgcgcaacagcctggctgagtagaggtcccgcccagctgcagaccctccaggctggaggaccagccgccctccttccctcctggatggaagtaaaaagccaagctttctccccaccctctgtgggccacacgtgcacttgcacccaccacacacacacacacacacacacacacacacagacacacagacacatacgcacacacgtgcacacatgtacacacggatacacacacacacacacacacacacacactgcatatctgagcgcgcccctcgcactgggtctcaccttgcaccttcttcaggattttatatgtgaagagatttttatatagatttttttcctttttttccaaaacactttatactttaaaaaaaaaaaaaaaaaagcaattcctggtggctgtgtgcctccaaccctggtccccctctgtctccagccaccctctgcttgggcttctgagctggtggccctggcccagaggtctggcggaggcccaggcagcagccatggcggggtgtctctacaggggagaggcgggagcctgccaccctcttcctgccctacctcctactaacacttcctgccccatttggacccgtaccatggggctcaggacagagggagctagcagctggcctccatggccccacagcctccttcgaggctgtgctgggtgcagaaccgccagagccacccaaaaggtgtttctcttctgctccctgaacctcttaacttaataaaacgttccagcagctctggtgtcctagatggctggcagaacaggaatggagattggggtttcttgaagtggcttccccactcacaccctacccacaccccacccttcctaaagcagcggcctctaggcttctgagggtggggctgaaaatccaaggtctcccttagtacagactgtgacgcccccagtgtggcttgcaggctagtggcagcggaagcatgtgggaaatagcaagtccagtcccaccccaacctactgaaccagcgtctgcattttaacagggtgccccagtgattcacgtgaccttcaaagtctgaggagccctggagtagggcccagggcccaggcctgagagagaggcctggggctaagactagccctgaccatgaccttgggcaagtcacacccctcactgagcctcagtttgcttctccatcaaatgggtgtttttctttcagtcccag

SEQ ID NO: 364751 - DNA, 3111 bp, Homo sapiens
agttttatgggcggatggaaggggccggggcagcgtcggggaaaggaagggccggaggcgcggcggcgggcggccgagaggggcggcggcggcggcggcggcggggttcccgcgccgcggagcccggcccgagagccgcgtccacgttcctgcctcctgctcccgccgccctggggcgccgccatgacgcccgatctgctcaacttcaagaagggatggatgtcgatcttggacgagcctggagagtggaagaaacattggtttgtgctgacagattcaagtctcaaatattacagagactccactgctgaggaggcagatgagctggatggtgagatcgacctgcgttcctgcacggatgtcactgagtacgcggtgcagcgcaactatggcttccagatccacaccaaggatgctgtctataccttgtcggccatgacctcaggcatccggcggaactggatcgaggctctgagaaagaccgtacgtccaacttcagccccagatgtcaccaagctctcggactctaacaaggagaacgcgctgcacagctacagcacccagaagggccccctgaaggcaggggagcagcgggcgggctctgaggtcatcagccggggtggccctcggaaggcggacgggcagcgtcaggccttggactacgtggagctctcgccgctgacccaggcttccccgcagcgggcccgcaccccagcccgcactcctgaccgcctggccaagcaggaggagctggagcgggacctggcccagcgctccgaggagcggcgcaagtggtttgaggccacagacagcaggaccccagaggtgcctgctggtgaggggccgcgccggggcctgggtgcccccctgactgaggaccagcaaaaccggcttagtgaggagatcgagaagaagtggcaggagctggagaagctgcccctgcgggagaataagcgggtgcccctcactgccctgctcaaccaaagccgcggagagcgccgagggcccccaagtgacggccacgaggcactggagaaggaggttcaggctcttcgggcccagctggaggcgtggcgtctccaaggggaggctcctcagagtgcactgagatcccaggaggatggccacatccccccgggctacatctcacaggaggcatgtgagcgcagcctggcagagatggagtcctcgcaccagcaggtgatggaggagctgcagcggcaccacgagcgggagctgcagcgcctgcagcaggagaaggagtggctcctggctgaggagacggcagccacggcctcagccattgaagccatgaagaaggcctaccaggaagagctgagccgagagctgagcaaaacacggagtctccagcagggcccggatggcctccggaagcagcaccagtcagatgtggaggcactgaagcgagagctgcaggtgctatcggagcagtactcgcagaagtgcctggagattggggcactcatgcggcaggctgaggagcgcgagcacacgctgcgccgctgccagcaggagggccaggagctgctgcgccacaaccaggagctgcatggccgcctgtcagaggagatagaccagctgcgcggcttcattgcctcgcagggcatgggcaatggctgcgggcgcagcaacgagcggagttcctgcgagctagaggtgctgcttcgcgtaaaagaaaacgaactccagtacctaaagaaggaggtgcagtgcctccgggacgagctccagatgatgcagaaggacaagcgcttcacctcgggaaagtaccaggacgtctatgtggagctgagccacatcaagacacggtctgagcgggagatcgagcagctgaaggagcacctgcgtcttgccatggccgccctccaggagaaggagtcgatgcgcaacagcctggctgagtagaggtcccgcccagctgcagaccctccaggctggaggaccagccgccctccttccctcctggatggaagtaaaaagccaagctttctccccaccctctgtgggccacacgtgcacttgcacccaccacacacacacacacacacacacacacacacagacacacagacacatacgcacacacgtgcacacatgtacacacggatacacacacacacacacacacacacacactgcatatctgagcgcgcccctcgcactgggtctcaccttgcaccttcttcaggattttatatgtgaagagatttttatatagatttttttcctttttttccaaaacactttatactttaaaaaaaaaaaaaaaaaagcaattcctggtggctgtgtgcctccaaccctggtccccctctgtctccagccaccctctgcttgggcttctgagctggtggccctggcccagaggtctggcggaggcccaggcagcagccatggcggggtgtctctacaggggagaggcgggagcctgccaccctcttcctgccctacctcctactaacacttcctgccccatttggacccgtaccatggggctcaggacagagggagctagcagctggcctccatggccccacagcctccttcgaggctgtgctgggtgcagaaccgccagagccacccaaaaggtgtttctcttctgctccctgaacctcttaacttaataaaacgttccagcagctctggtgtcctagatggctggcagaacaggaatggagattggggtttcttgaagtggcttccccactcacaccctacccacaccccacccttcctaaagcagcggcctctaggcttctgagggtggggctgaaaatccaaggtctcccttagtacagactgtgacgcccccagtgtggcttgcaggctagtggcagcggaagcatgtgggaaatagcaagtccagtcccaccccaacctactgaaccagcgtctgcattttaacagggtgccccagtgattcacgtgaccttcaaagtctgaggagccctggagtagggcccagggcccaggcctgagagagaggcctggggctaagactagccctgaccatgaccttgggcaagtcacacccctcactgagcctcagtttgcttctccatcaaatgggtgtttttctttcagtcccag

SEQ ID NO: 364752 - DNA, 3078 bp, Homo sapiens
agttttatgggcggatggaaggggccggggcagcgtcggggaaaggaagggccggaggcgcggcggcgggcggccgagaggggcggcggcggcggcggcggcggggttcccgcgccgcggagcccggcccgagagccgcgtccacgttcctgcctcctgctcccgccgccctggggcgccgccatgacgcccgatctgctcaacttcaagaagggatggatgtcgatcttggacgagcctggagagcctccctccccctcgctcaccaccacctctacttcgcagtggaagaaacattggtttgtgctgacagattcaagtctcaaatattacagagactccactgctgaggaggcagatgagctggatggtgagatcgacctgcgttcctgcacggatgtcactgagtacgcggtgcagcgcaactatggcttccagatccacaccaaggatgctgtctataccttgtcggccatgacctcaggcatccggcggaactggatcgaggctctgagaaagaccgtacgtccaacttcagccccagatgtcaccaagctctcggactctaacaaggagaacgcgctgcacagctacagcacccagaagggccccctgaaggcaggggagcagcgggcgggctctgaggtcatcagccggggtggccctcggaaggcggacgggcagcgtcaggccttggactacgtggagctctcgccgctgacccaggcttccccgcagcgggcccgcaccccagcccgcactcctgaccgcctggccaagcaggaggagctggagcgggacctggcccagcgctccgaggagcggcgcaagtggtttgaggccacagacagcaggaccccagaggtgcctgctggtgaggggccgcgccggggcctgggtgcccccctgactgaggaccagcaaaaccggcttagtgaggagatcgagaagaagtggcaggagctggagaagctgcccctgcgggagaataagcgggtgcccctcactgccctgctcaaccaaagccgcggagagcgccgagggcccccaagtgacggccacgaggcactggagaaggaggttcaggctcttcgggcccagctggaggcgtggcgtctccaaggggaggctcctcagagtgcactgagatcccaggaggatggccacatccccccgggctacatctcacaggaggcatgtgagcgcagcctggcagagatggagtcctcgcaccagcaggtgatggaggagctgcagcggcaccacgagcgggagctgcagcgcctgcagcaggagaaggagtggctcctggctgaggagacggcagccacggcctcagccattgaagccatgaagaaggcctaccaggaagagctgagccgagagctgagcaaaacacggagtctccagcagggcccggatggcctccggaagcagcaccagtcagatgtggaggcactgaagcgagagctgcaggtgctatcggagcagtactcgcagaagtgcctggagattggggcactcatgcggcaggctgaggagcgcgagcacacgctgcgccgctgccagcaggagggccaggagctgctgcgccacaaccaggagctgcatggccgcctgtcagaggagatagaccagctgcgcggcttcattgcctcgcagggcatgggcaatggctgcgggcgcagcaacgagcggagttcctgcgagctagaggtgctgcttcgcgtaaaagaaaacgaactccagtacctaaagaaggaggtgcagtgcctccgggacgagctccagatgatgcagaaggacaagcgcttcacctcgggaaagtaccaggacgtctatgtggagctgagccacatcaagacacggtctgagcgggagatcgagcagctgaaggagcacctgcgtcttgccatggccgccctccaggagaaggagtcgatgcgcaacagcctggctgagtagaggtcccgcccagctgcagaccctccaggctggaggaccagccgccctccttccctcctggatggaagtaaaaagccaagctttctccccaccctctgtgggccacacgtgcaacacatgtacacacggatacacacacacacacacacacacacacactgcatatctgagcgcgcccctcgcactgggtctcaccttgcaccttcttcaggattttatatgtgaagagatttttatatagatttttttcctttttttccaaaacactttatactttaaaaaaaaaaaaaaaaaagcaattcctggtggctgtgtgcctccaaccctggtccccctctgtctccagccaccctctgcttgggcttctgagctggtggccctggcccagaggtctggcggaggcccaggcagcagccatggcggggtgtctctacaggggagaggcgggagcctgccaccctcttcctgccctacctcctactaacacttcctgccccatttggacccgtaccatggggctcaggacagagggagctagcagctggcctccatggccccacagcctccttcgaggctgtgctgggtgcagaaccgccagagccacccaaaaggtgtttctcttctgctccctgaacctcttaacttaataaaacgttccagcagctctggtgtcctagatggctggcagaacaggaatggagattggggtttcttgaagtggcttccccactcacaccctacccacaccccacccttcctaaagcagcggcctctaggcttctgagggtggggctgaaaatccaaggtctcccttagtacagactgtgacgcccccagtgtggcttgcaggctagtggcagcggaagcatgtgggaaatagcaagtccagtcccaccccaacctactgaaccagcgtctgcattttaacagggtgccccagtgattcacgtgaccttcaaagtctgaggagccctggagtagggcccagggcccaggcctgagagagaggcctggggctaagactagccctgaccatgaccttgggcaagtcacacccctcactgagcctcagtttgcttctccatcaaatgggtgtttttctttcagtcccag

SEQ ID NO: 364753 - DNA, 2071 bp, Homo sapiens
gcgagaactccatctctgcagagctgcgctcacatgcctcctgtgagatgtagcccggggggatgtggccatcctcctgggatctcagtgcactctgaggagcctccccttggagacgccacgcctccggctgggcccgaagagcatgaacctccttctccagtgcctcctcctgctgctggcgctgcagctaccgctcgtggtgccgctgcaggagaaggagtggctcctggctgaggagacggcagccacggcctcagccattgaagccatgaagaaggcctaccaggaagagctgagccgagagctgagcaaaacacggagtctccagcagggcccggatggcctccggaagcagcaccagtcagatgtggaggcactgaagcgagagctgcaggtgctatcggagcagtactcgcagaagtgcctggagattggggcactcatgcggcaggctgaggagcgcgagcacacgctgcgccgctgccagcaggagggccaggagctgctgcgccacaaccaggagctgcatggccgcctgtcagaggagatagaccagctgcgcggcttcattgcctcgcagggcatgggcaatggctgcgggcgcagcaacgagcggagttcctgcgagctagaggtgctgcttcgcgtaaaagaaaacgaactccagtacctaaagaaggaggtgcagtgcctccgggacgagctccagatgatgcagaaggacaagcgcttcacctcgggaaagtaccaggacgtctatgtggagctgagccacatcaagacacggtctgagcgggagatcgagcagctgaaggagcacctgcgtcttgccatggccgccctccaggagaaggagtcgatgcgcaacagcctggctgagtagaggtcccgcccagctgcagaccctccaggctggaggaccagccgccctccttccctcctggatggaagtaaaaagccaagctttctccccaccctctgtgggccacacgtgcacttgcacccaccacacacacacacacacacacacacacacacagacacacagacacatacgcacacacgtgcacacatgtacacacggatacacacacacacacacacacacacacactgcatatctgagcgcgcccctcgcactgggtctcaccttgcaccttcttcaggattttatatgtgaagagatttttatatagatttttttcctttttttccaaaacactttatactttaaaaaaaaaaaaaaaaaagcaattcctggtggctgtgtgcctccaaccctggtccccctctgtctccagccaccctctgcttgggcttctgagctggtggccctggcccagaggtctggcggaggcccaggcagcagccatggcggggtgtctctacaggggagaggcgggagcctgccaccctcttcctgccctacctcctactaacacttcctgccccatttggacccgtaccatggggctcaggacagagggagctagcagctggcctccatggccccacagcctccttcgaggctgtgctgggtgcagaaccgccagagccacccaaaaggtgtttctcttctgctccctgaacctcttaacttaataaaacgttccagcagctctggtgtcctagatggctggcagaacaggaatggagattggggtttcttgaagtggcttccccactcacaccctacccacaccccacccttcctaaagcagcggcctctaggcttctgagggtggggctgaaaatccaaggtctcccttagtacagactgtgacgcccccagtgtggcttgcaggctagtggcagcggaagcatgtgggaaatagcaagtccagtcccaccccaacctactgaaccagcgtctgcattttaacagggtgccccagtgattcacgtgaccttcaaagtctgaggagccctggagtagggcccagggcccaggcctgagagagaggcctggggctaagactagccctgaccatgaccttgggcaagtcacacccctcactgagcctcagtttgcttctccatcaaatgggtgtttttctttcagtcccag

SEQ ID NO: 364754 - DNA, 1741 bp, Homo sapiens
agttttatgggcggatggaaggggccggggcagcgtcggggaaaggaagggccggaggcgcggcggcgggcggccgagaggggcggcggcggcggcggcggcggggttcccgcgccgcggagcccggcccgagagccgcgtccacgttcctgcctcctgctcccgccgccctggggcgccgccatgacgcccgatctgctcaacttcaagaagggatggatgtcgatcttggacgagcctggagagcctccctccccctcgctcaccaccacctctacttcgcagtggaagaaacattggtttgtgctgacagattcaagtctcaaatattacagagactccactgctgaggaggcagatgagctggatggtgagatcgacctgcgttcctgcacggatgtcactgagtacgcggtgcagcgcaactatggcttccagatccacaccaaggatgctgtctataccttgtcggccatgacctcaggcatccggcggaactggatcgaggctctgagaaagaccgtacgtccaacttcagccccagatgtcaccaagctctcggactctaacaaggagaacgcgctgcacagctacagcacccagaagggccccctgaaggcaggggagcagcgggcgggctctgaggtcatcagccggggtggccctcggaaggcggacgggcagcgtcaggccttggactacgtggagctctcgccgctgacccaggcttccccgcagcgggcccgcaccccagcccgcactcctgaccgcctggccaagcaggaggagctggagcgggacctggcccagcgctccgaggagcggcgcaagtggtttgaggccacagacagcaggaccccagaggtgcctgctggtgaggggccgcgccggggcctgggtgcccccctgactgaggaccagcaaaaccggcttagtgaggagatcgagaagaagtggcaggagctggagaagctgcccctgcgggagaataagcgggtgcccctcactgccctgctcaaccaaagccgcggagagcgccgagggcccccaagtgacggccacgaggcactggagaaggaggttcaggctcttcgggcccagctggaggcgtggcgtctccaaggggaggctcctcagagtgcactgagatcccaggaggatggccacatccccccgggctacatctcacaggaggcatgtgagcgcagcctggcagagatggagtcctcgcaccagcaggtgatggaggagctgcagcggcaccacgagcgggagctgcagcgcctgcagcaggagaaggagtggctcctggctgaggagacggcagccacggcctcagccattgaagccatgaagaaggcctaccaggaagagctgagccgagagctgagcaaaacacggagtctccagcagggcccggatggcctccggaagcagcaccagtcagatgtggaggcactgaagcgagagctgcaggtgctatcggagcagtactcgcagaagtgcctggagattggggcactcatgcggcaggctgaggagcgcgagcacacgctgcgccgctgccagcaggagggccaggagctgctgcgccacaaccaggagctgcatggccgcctgtcagaggagatagaccagctgcgcggcttcattgcctcgcagggcatgggcaatggctgcgggcgcagcaacgagcggagttcctgcgagctagaggtgagtgtcctcactagcaccaggc

SEQ ID NO: 364755 - DNA, 1301 bp, Homo sapiens
gtgccctcactcgccttcgagagataaagaaagcgttacctctcatttctctttgtgattcttgacggtgactcttgtatgtaatcctgtggcttaactacttctccctccttgtccagcacttttctagctctcccgttccccatctccattgctctgtactcttttcttttttcttgtgctgagaatctcgttagtagcatgtggcctaacaaaaggaaaaaatgtttttaaacacacacgtgcacttgccacacacacacacacacacagacacacagacacatacgcacacacgtgcacacatgtacacacggatacacacacacacacacacacacacacactgcatatctgagcgcgcccctcgcactgggtctcaccttgcaccttcttcaggattttatatgtgaagagatttttatatagatttttttcctttttttccaaaacactttatactttaaaaaaaaaaaaaaaaaagcaattcctggtggctgtgtgcctccaaccctggtccccctctgtctccagccaccctctgcttgggcttctgagctggtggccctggcccagaggtctggcggaggcccaggcagcagccatggcggggtgtctctacaggggagaggcgggagcctgccaccctcttcctgccctacctcctactaacacttcctgccccatttggacccgtaccatggggctcaggacagagggagctagcagctggcctccatggccccacagcctccttcgaggctgtgctgggtgcagaaccgccagagccacccaaaaggtgtttctcttctgctccctgaacctcttaacttaataaaacgttccagcagctctggtgtcctagatggctggcagaacaggaatggagattggggtttcttgaagtggcttccccactcacaccctacccacaccccacccttcctaaagcagcggcctctaggcttctgagggtggggctgaaaatccaaggtctcccttagtacagactgtgacgcccccagtgtggcttgcaggctagtggcagcggaagcatgtgggaaatagcaagtccagtcccaccccaacctactgaaccagcgtctgcattttaacagggtgccccagtgattcacgtgaccttcaaagtctgaggagccctggagtagggcccagggcccaggcctgagagagaggcctggggctaagactagccctgaccatgaccttgggcaagtcacacccctcactgagcctcagtttgcttctccatcaaatgggtgtttttctttcagtcccag

SEQ ID NO: 364756 - DNA, 1146 bp, Homo sapiens
gcggccgcctactactactaaattcgcggccgcgtcgacctggatggaagtaaaaagccaagctttctccccaccctctgtgggccacacgtgcacttgcacccaccacacacacacaacacacagacacatacgcacacacgtgcacacatgtacacacggatacacacacacacacacacacacacacactgcatatctgagcgcgcccctcgcactgggtctcaccttgcaccttcttcaggattttatatgtgaagagatttttatatagatttttttcctttttttccaaaacactttatactttaaaaaaaaaaaaaaaaaagcaattcctggtggctgtgtgcctccaaccctggtccccctctgtctccagccaccctctgcttgggcttctgagctggtggccctggcccagaggtctggcggaggcccaggcagcagccatggcggggtgtctctacaggggagaggcgggagcctgccaccctcttcctgccctacctcctactaacacttcctgccccatttggacccgtaccatggggctcaggacagagggagctagcagctggcctccatggccccacagcctccttcgaggctgtgctgggtgcagaaccgccagagccacccaaaaggtgtttctcttctgctccctgaacctcttaacttaataaaacgttccagcagctctggtgtcctagatggctggcagaacaggaatggagattggggtttcttgaagtggcttccccactcacaccctacccacaccccacccttcctaaagcagcggcctctaggcttctgagggtggggctgaaaatccaaggtctcccttagtacagactgtgacgcccccagtgtggcttgcaggctagtggcagcggaagcatgtgggaaatagcaagtccagtcccaccccaacctactgaaccagcgtctgcattttaacagggtgccccagtgattcacgtgaccttcaaagtctgaggagccctggagtagggcccagggcccaggcctgagagagaggcctggggctaagactagccctgaccatgaccttgggcaagtcacacccctcactgagcctcagtttgcttctccatcaaatgggtgtttttctttcagtcccag

SEQ ID NO: 364757 - DNA, 985 bp, Homo sapiens
gcggccgcctactactactactactgctcgaattcaagcttctaacgatgtacggggacatggccccacagcctccttcgaggctgtgctgggtgcagaaccgccagagccacccaaaaggtgtttctcttctgctccctgaacctcttaacttaataaaacgttccagcagaaaaaaaaaaaaaaaaaaaaaaaaaaaaaatttttgggggcctcgcgaaaaagttttataaacccaatcggttgtgggggcgagggccccagagtaggtaacagtgtgaccacgtgccccaacgcgctgtcccaaagcgaaacccggggacagaaacataggggctggggcttctcccacccaaataaaaaaacggcccgggaggaaccacagacgtgttctggaacaaaaccacagaagggaagatcgacggaggcaacaaaccgggacacatacaaaacggggagtctcacaagcagaacgcggattataaaaatttagccccgccagtggaggaaaagaacagcaaccacacacaaagaagaaagaaagcaagcaaaagcaaaacccagaagagcaacagcagagagagaagaacacgaaaacagacgacacgaccgcaagaggaagcacaacaatgacggcaagcagagaagccgagaacgaacacgagaaaagaagacggaacaagagcaatacaggaacaagaaccgaagcaatacagcgaaagacgcgagacggagcgagcgaggaggggagagacgacgagagggaaagagcagagcgagggggaggggagggagcagagagagcggcgaggacgaaagaacagaagaggacagggcgccgcaagggaagggagaggagcgcagaggcgagagggaggaaaaagcgggggagacgaaaagagaagggggaaggagagagaagagcagagaagaaaggagagagggaccaagaacggaggaggagagagggaaaagggagagcgac

SEQ ID NO: 364758 - DNA, 272 bp, Homo sapiens
catggacagatgatagaatggatggatgaggtggacagatgcatgcatcctggagaataagttgggctaagctgtgttctttttttaatctccagttccaaccagaggagcctgaggagtcagaaccaagcagaggccaagaccccctgactgaccagaagcaggcagactcggtagctgggtcatgggtgtgggtacatacggtggggaagggagggggaagcaggttggagatgggcttcattcctcagaagagccctagaatcaaccag

SEQ ID NO: 364759 - DNA, 3150 bp, Homo sapiens
agttttatgggcggatggaaggggccggggcagcgtcggggaaaggaagggccggaggcgcggcggcgggcggccgagaggggcggcggcggcggcggcggcggggttcccgcgccgcggagcccggcccgagagccgcgtccacgttcctgcctcctgctcccgccgccctggggcgccgccatgacgcccgatctgctcaacttcaagaagggatggatgtcgatcttggacgagcctggagagcctccctccccctcgctcaccaccacctctacttcgcagtggaagaaacattggtttgtgctgacagattcaagtctcaaatattacagagactccactgctgaggaggcagatgagctggatggtgagatcgacctgcgttcctgcacggatgtcactgagtacgcggtgcagcgcaactatggcttccagatccacaccaaggatgctgtctataccttgtcggccatgacctcaggcatccggcggaactggatcgaggctctgagaaagaccgtacgtccaacttcagccccagatgtcaccaagctctcggactctaacaaggagaacgcgctgcacagctacagcacccagaagggccccctgaaggcaggggagcagcgggcgggctctgaggtcatcagccggggtggccctcggaaggcggacgggcagcgtcaggccttggactacgtggagctctcgccgctgacccaggcttccccgcagcgggcccgcaccccagcccgcactcctgaccgcctggccaagcaggaggagctggagcgggacctggcccagcgctccgaggagcggcgcaagtggtttgaggccacagacagcaggaccccagaggtgcctgctggtgaggggccgcgccggggcctgggtgcccccctgactgaggaccagcaaaaccggcttagtgaggagatcgagaagaagtggcaggagctggagaagctgcccctgcgggagaataagcgggtgcccctcactgccctgctcaaccaaagccgcggagagcgccgagggcccccaagtgacggccacgaggcactggagaaggaggttcaggctcttcgggcccagctggaggcgtggcgtctccaaggggaggctcctcagagtgcactgagatcccaggaggatggccacatccccccgggctacatctcacaggaggcatgtgagcgcagcctggcagagatggagtcctcgcaccagcaggtgatggaggagctgcagcggcaccacgagcgggagctgcagcgcctgcagcaggagaaggagtggctcctggctgaggagacggcagccacggcctcagccattgaagccatgaagaaggcctaccaggaagagctgagccgagagctgagcaaaacacggagtctccagcagggcccggatggcctccggaagcagcaccagtcagatgtggaggcactgaagcgagagctgcaggtgctatcggagcagtactcgcagaagtgcctggagattggggcactcatgcggcaggctgaggagcgcgagcacacgctgcgccgctgccagcaggagggccaggagctgctgcgccacaaccaggagctgcatggccgcctgtcagaggagatagaccagctgcgcggcttcattgcctcgcagggcatgggcaatggctgcgggcgcagcaacgagcggagttcctgcgagctagaggtgctgcttcgcgtaaaagaaaacgaactccagtacctaaagaaggaggtgcagtgcctccgggacgagctccagatgatgcagaaggacaagcgcttcacctcgggaaagtaccaggacgtctatgtggagctgagccacatcaagacacggtctgagcgggagatcgagcagctgaaggagcacctgcgtcttgccatggccgccctccaggagaaggagtcgatgcgcaacagcctggctgagtagaggtcccgcccagctgcagaccctccaggctggaggaccagccgccctccttccctcctggatggaagtaaaaagccaagctttctccccaccctctgtgggccacacgtgcacttgcacccaccacacacacacacacacacacacacacacacagacacacagacacatacgcacacacgtgcacacatgtacacacggatacacacacacacacacacacacacacactgcatatctgagcgcgcccctcgcactgggtctcaccttgcaccttcttcaggattttatatgtgaagagatttttatatagatttttttcctttttttccaaaacactttatactttaaaaaaaaaaaaaaaaaagcaattcctggtggctgtgtgcctccaaccctggtccccctctgtctccagccaccctctgcttgggcttctgagctggtggccctggcccagaggtctggcggaggcccaggcagcagccatggcggggtgtctctacaggggagaggcgggagcctgccaccctcttcctgccctacctcctactaacacttcctgccccatttggacccgtaccatggggctcaggacagagggagctagcagctggcctccatggccccacagcctccttcgaggctgtgctgggtgcagaaccgccagagccacccaaaaggtgtttctcttctgctccctgaacctcttaacttaataaaacgttccagcagctctggtgtcctagatggctggcagaacaggaatggagattggggtttcttgaagtggcttccccactcacaccctacccacaccccacccttcctaaagcagcggcctctaggcttctgagggtggggctgaaaatccaaggtctcccttagtacagactgtgacgcccccagtgtggcttgcaggctagtggcagcggaagcatgtgggaaatagcaagtccagtcccaccccaacctactgaaccagcgtctgcattttaacagggtgccccagtgattcacgtgaccttcaaagtctgaggagccctggagtagggcccagggcccaggcctgagagagaggcctggggctaagactagccctgaccatgaccttgggcaagtcacacccctcactgagcctcagtttgcttctccatcaaatgggtgtttttctttcagtcccag

SEQ ID NO: 364760 - DNA, 4882 bp, Homo sapiens
  misc_feature (62)..(62): n is a, c, g, or t
  misc_feature (498)..(498): n is a, c, g, or t
  misc_feature (715)..(715): n is a, c, g, or t
  misc_feature (728)..(728): n is a, c, g, or t
gtgcccatggaagggacaaggctctcgtgcagagagtccatggaagggacaaggctctctgnacgagtgcccccacatccccacccctgtgtgcattgggcaccgggatgcaccctccttctcatccccaccacgccaggctcctgagccatccctcttcttccaggatccccctggaactagtatggagagcctggccccctccactgactctctgcatggctccccagtgctgatcccccaagtgtgcatcgggcaccgggatgcaccccgagcctcctccccaccccgccacccacccagtgacctagcgttcctggcaccctcaccttcaccgggcagctctgggggctcccggggctcagcgcctcccggggagaccaggcacaacttggagcgggaggagtacactgtgctggccgacctgcccccacccaggaggctggcccagagacagccagggccccaggcgcagtgcagcagcgggggccgcacccncagccctggccgtgcagaggtggagcgcctcttcgggcaagagcgcaggaagtccgaggcagcgggggccttccaggcccaggacgagggacggtcacagcagcccagccaaggccagagccaacttctccgaagacagtccagccctgcccccagcaggcaggtgaccatgctccctgccaaacaggcagaactgacccggcggagccaagcaganccccctcatcctnggagtcctgagaagagacctgagggagatcggcagctccaggggtccccgctgccccccaggacatcagccaggacccctgagagggagctgcggacacagagacctctggagagtggccaagcaggcccaagacagcctctgggggtgtggcagagtcaggaggaaccgccagggtcccagggccctcatagacacctagaaaggagctggagcagccaggagggaggcctgggccctgggggctggtggggatgtggagagcccagcctgggggcagccaaagccccggagggagcatgggggggcacttccagggagtacaaggagagctgggggcagccagaggcctgggaggagaagcccactcatgagctccccagagaactaggaaagagaagcccactcacgagcccccctgagaactggggaggccccgcagagtcctcacaatcctggcactctgggacacccactgctgtgggctggggggcagagggagcgtgtccatacccgcgtggctctgagaggcgacccgagcttgactggagggatctgcttggccttctccgggcaccaggagagggggtctgggcccgtgtccccagcctggactgggagggcctcttggagctcctgcaggccaggctgccccgcaaggacccagctggacacagggatgacctggccagggctttagggccagagctgggtcccccaggcacaaacgatgtccctgagcaggagtcacacagccagccagaaggctgggccgaggccaccccagtcaatggacacagccccgcactgcagtcccagagcccggtccagctgcccagccctgcctgcacctccacccagtggccaaagatcaaagtgacaagaggaccagcgaccgcaactctggcaggcctggagcagacgggccccctggggagcaggagcactgcgaagggccccagcttgccagagctgcagttccaaccagaggagcctgaggagtcagaaccaagcagaggccaagaccccctgactgaccagaagcaggcagactcggcagacaagaggccagcagagggcaaggctgggagcccgctcaagggccgactggtgacctcatggcggatgcccggggaccggcccacgctgttcaatccgttcctgctgtctctgggggtcctcaggtggcgaaggcccgatctgctcaacttcaagaagggatggatgtcgatcttggacgagcctggagagcctccctccccctcgctcaccaccacctctacttcgcagtggaagaaacattggtttgtgctgacagattcaagtctcaaatattacagagactccactgctgaggaggcagatgagctggatggtgagatcgacctgcgttcctgcacggatgtcactgagtacgcggtgcagcgcaactatggcttccagatccacaccaaggatgctgtctataccttgtcggccatgacctcaggcatccggcggaactggatcgaggctctgagaaagaccgtacgtccaacttcagccccagatgtcaccaagctctcggactctaacaaggagaacgcgctgcacagctacagcacccagaagggccccctgaaggcaggggagcagcgggcgggctctgaggtcatcagccggggtggccctcggaaggcggacgggcagcgtcaggccttggactacgtggagctctcgccgctgacccaggcttccccgcagcgggcccgcaccccagcccgcactcctgaccgcctggccaagcaggaggagctggagcgggacctggcccagcgctccgaggagcggcgcaagtggtttgaggccacagacagcaggaccccagaggtgcctgctggtgaggggccgcgccggggcctgggtgcccccctgactgaggaccagcaaaaccggcttagtgaggagatcgagaagaagtggcaggagctggagaagctgcccctgcgggagaataagcgggtgcccctcactgccctgctcaaccaaagccgcggagagcgccgagggcccccaagtgacggccacgaggcactggagaaggaggttcaggctcttcgggcccagctggaggcgtggcgtctccaaggggaggctcctcagagtgcactgagatcccaggaggatggccacatccccccgggctacatctcacaggaggcatgtgagcgcagcctggcagagatggagtcctcgcaccagcaggtgatggaggagctgcagcggcaccacgagcgggagctgcagcgcctgcagcaggagaaggagtggctcctggctgaggagacggcagccacggcctcagccattgaagccatgaagaaggcctaccaggaagagctgagccgagagctgagcaaaacacggagtctccagcagggcccggatggcctccggaagcagcaccagtcagatgtggaggcactgaagcgagagctgcaggtgctatcggagcagtactcgcagaagtgcctggagattggggcactcatgcggcaggctgaggagcgcgagcacacgctgcgccgctgccagcaggagggccaggagctgctgcgccacaaccaggagctgcatggccgcctgtcagaggagatagaccagctgcgcggcttcattgcctcgcagggcatgggcaatggctgcgggcgcagcaacgagcggagttcctgcgagctagaggtgctgcttcgcgtaaaagaaaacgaactccagtacctaaagaaggaggtgcagtgcctccgggacgagctccagatgatgcagaaggacaagcgcttcacctcgggaaagtaccaggacgtctatgtggagctgagccacatcaagacacggtctgagcgggagatcgagcagctgaaggagcacctgcgtcttgccatggccgccctccaggagaaggagtcgatgcgcaacagcctggctgagtagaggtcccgcccagctgcagaccctccaggctggaggaccagccgccctccttccctcctggatggaagtaaaaagccaagctttctccccaccctctgtgggccacacgtgcacttgcacccaccacacacacacacacacacacacacacacacagacacacagacacatacgcacacacgtgcacacatgtacacacggatacacacacacacacacacacacacacactgcatatctgagcgcgcccctcgcactgggtctcaccttgcaccttcttcaggattttatatgtgaagagatttttatatagatttttttcctttttttccaaaacactttatactttaaaaaaaaaaaaaaaaaagcaattcctggtggctgtgtgcctccaaccctggtccccctctgtctccagccaccctctgcttgggcttctgagctggtggccctggcccagaggtctggcggaggcccaggcagcagccatggcggggtgtctctacaggggagaggcgggagcctgccaccctcttcctgccctacctcctactaacacttcctgccccatttggacccgtaccatggggctcaggacagagggagctagcagctggcctccatggccccacagcctccttcgaggctgtgctgggtgcagaaccgccagagccacccaaaaggtgtttctcttctgctccctgaacctcttaacttaataaaacgttccagcagctctggtgtcctagatggctggcagaacaggaatggagattggggtttcttgaagtggcttccccactcacaccctacccacaccccacccttcctaaagcagcggcctctaggcttctgagggtggggctgaaaatccaaggtctcccttagtacagactgtgacgcccccagtgtggcttgcaggctagtggcagcggaagcatgtgggaaatagcaagtccagtcccaccccaacctactgaaccagcgtctgcattttaacagggtgccccagtgattcacgtgaccttcaaagtctgaggagccctggagtagggcccagggcccaggcctgagagagaggcctggggctaagactagccctgaccatgaccttgggcaagtcacacccctcactgagcctcagtttgcttctccatcaaatgggtgtttttctttcagtcccag

SEQ ID NO: 364761 - DNA, 3241 bp, Homo sapiens
agttttatgggcggatggaaggggccggggcagcgtcggggaaaggaagggccggaggcgcggcggcgggcggccgagaggggcggcggcggcggcggcggcggggttcccgcgccgcggagcccggcccgagagccgcgtccacgttcctgcctcctgctcccgccgccctggggcgccgccatgacgaggtatacagggaggggctgggatgccaacctactgggtcccccgactgtggctgtggaaggttctggatcttcagctgtcccaagccccgcccgatctgctcaacttcaagaagggatggatgtcgatcttggacgagcctggagagcctccctccccctcgctcaccaccacctctacttcgcagtggaagaaacattggtttgtgctgacagattcaagtctcaaatattacagagactccactgctgaggaggcagatgagctggatggtgagatcgacctgcgttcctgcacggatgtcactgagtacgcggtgcagcgcaactatggcttccagatccacaccaaggatgctgtctataccttgtcggccatgacctcaggcatccggcggaactggatcgaggctctgagaaagaccgtacgtccaacttcagccccagatgtcaccaagctctcggactctaacaaggagaacgcgctgcacagctacagcacccagaagggccccctgaaggcaggggagcagcgggcgggctctgaggtcatcagccggggtggccctcggaaggcggacgggcagcgtcaggccttggactacgtggagctctcgccgctgacccaggcttccccgcagcgggcccgcaccccagcccgcactcctgaccgcctggccaagcaggaggagctggagcgggacctggcccagcgctccgaggagcggcgcaagtggtttgaggccacagacagcaggaccccagaggtgcctgctggtgaggggccgcgccggggcctgggtgcccccctgactgaggaccagcaaaaccggcttagtgaggagatcgagaagaagtggcaggagctggagaagctgcccctgcgggagaataagcgggtgcccctcactgccctgctcaaccaaagccgcggagagcgccgagggcccccaagtgacggccacgaggcactggagaaggaggttcaggctcttcgggcccagctggaggcgtggcgtctccaaggggaggctcctcagagtgcactgagatcccaggaggatggccacatccccccgggctacatctcacaggaggcatgtgagcgcagcctggcagagatggagtcctcgcaccagcaggtgatggaggagctgcagcggcaccacgagcgggagctgcagcgcctgcagcaggagaaggagtggctcctggctgaggagacggcagccacggcctcagccattgaagccatgaagaaggcctaccaggaagagctgagccgagagctgagcaaaacacggagtctccagcagggcccggatggcctccggaagcagcaccagtcagatgtggaggcactgaagcgagagctgcaggtgctatcggagcagtactcgcagaagtgcctggagattggggcactcatgcggcaggctgaggagcgcgagcacacgctgcgccgctgccagcaggagggccaggagctgctgcgccacaaccaggagctgcatggccgcctgtcagaggagatagaccagctgcgcggcttcattgcctcgcagggcatgggcaatggctgcgggcgcagcaacgagcggagttcctgcgagctagaggtgctgcttcgcgtaaaagaaaacgaactccagtacctaaagaaggaggtgcagtgcctccgggacgagctccagatgatgcagaaggacaagcgcttcacctcgggaaagtaccaggacgtctatgtggagctgagccacatcaagacacggtctgagcgggagatcgagcagctgaaggagcacctgcgtcttgccatggccgccctccaggagaaggagtcgatgcgcaacagcctggctgagtagaggtcccgcccagctgcagaccctccaggctggaggaccagccgccctccttccctcctggatggaagtaaaaagccaagctttctccccaccctctgtgggccacacgtgcacttgcacccaccacacacacacacacacacacacacacacacagacacacagacacatacgcacacacgtgcacacatgtacacacggatacacacacacacacacacacacacacactgcatatctgagcgcgcccctcgcactgggtctcaccttgcaccttcttcaggattttatatgtgaagagatttttatatagatttttttcctttttttccaaaacactttatactttaaaaaaaaaaaaaaaaaagcaattcctggtggctgtgtgcctccaaccctggtccccctctgtctccagccaccctctgcttgggcttctgagctggtggccctggcccagaggtctggcggaggcccaggcagcagccatggcggggtgtctctacaggggagaggcgggagcctgccaccctcttcctgccctacctcctactaacacttcctgccccatttggacccgtaccatggggctcaggacagagggagctagcagctggcctccatggccccacagcctccttcgaggctgtgctgggtgcagaaccgccagagccacccaaaaggtgtttctcttctgctccctgaacctcttaacttaataaaacgttccagcagctctggtgtcctagatggctggcagaacaggaatggagattggggtttcttgaagtggcttccccactcacaccctacccacaccccacccttcctaaagcagcggcctctaggcttctgagggtggggctgaaaatccaaggtctcccttagtacagactgtgacgcccccagtgtggcttgcaggctagtggcagcggaagcatgtgggaaatagcaagtccagtcccaccccaacctactgaaccagcgtctgcattttaacagggtgccccagtgattcacgtgaccttcaaagtctgaggagccctggagtagggcccagggcccaggcctgagagagaggcctggggctaagactagccctgaccatgaccttgggcaagtcacacccctcactgagcctcagtttgcttctccatcaaatgggtgtttttctttcagtcccag

SEQ ID NO: 364762 - DNA, 4169 bp, Homo sapiens
agttttatgggcggatggaaggggccggggcagcgtcggggaaaggaagggccggaggcgcggcggcgggcggccgagaggggcggcggcggcggcggcggcggggttcccgcgccgcggagcccggcccgagagccgcgtccacgttcctgcctcctgctcccgccgccctggggcgccgccatgacgcccgatctgctcaacttcaagaagggatggatgtcgatcttggacgagcctggagagcctccctccccctcgctcaccaccacctctacttcgcagtggaagaaacattggtttgtgctgacagattcaagtctcaaatattacagagactccactgctgaggaggcagatgagctggatggtgagatcgacctgcgttcctgcacggatgtcactgagtacgcggtgcagcgcaactatggcttccagatccacaccaaggatgctgtctataccttgtcggccatgacctcaggcatccggcggaactggatcgaggctctgagaaagaccgtacgtccaacttcagccccagatgtcaccaagctctcggactctaacaaggagaacgcgctgcacagctacagcacccagaagggccccctgaaggcaggggagcagcgggcgggctctgaggtcatcagccggggtggccctcggaaggcggacgggcagcgtcaggccttggactacgtggagctctcgccgctgacccaggcttccccgcagcgggcccgcaccccagcccgcactcctgaccgcctggccaagcaggaggagctggagcgggacctggcccagcgctccgaggagcggcgcaagtggtttgaggccacagacagcaggaccccagaggtgcctgctggtgaggggccgcgccggggcctgggtgcccccctgactgaggaccagcaaaaccggcttagtgaggagatcgagaagaagtggcaggagctggagaagctgcccctgcgggagaataagcgggtgcccctcactgccctgctcaaccaaagccgcggagagcgccgagggcccccaagtgacggccacgaggcactggagaaggaggttcaggctcttcgggcccagctggaggcgtggcgtctccaaggggaggctcctcagagtgcactgagatcccaggaggatggccacatccccccgggctacatctcacaggaggcatgtgagcgcagcctggcagagatggagtcctcgcaccagcaggtgatggaggagctgcagcggcaccacgagcgggagctgcagcgcctgcagcaggagaaggagtggctcctggctgaggagacggcagccacggcctcagccattgaagccatgaagaaggcctaccaggaagagctgagccgagagctgagcaaaacacggagtctccagcagggcccggatggcctccggaagcagcaccagtcagatgtggaggcactgaagcgagagctgcaggtgctatcggagcagtactcgcagaagtgcctggagattggggcactcatgcggcaggctgaggagcgcgagcacacgctgcgccgctgccagcaggagggccaggagctgctgcgccacaaccaggagctgcatggccgcctgtcagaggagatagaccagctgcgcggcttcattgcctcgcagggcatgggcaatggctgcgggcgcagcaacgagcggagttcctgcgagctagaggtgctgcttcgcgtaaaagaaaacgaactccagtacctaaagaaggaggtgcagtgcctccgggacgagctccagatgatgcagaaggacaagcgcttcacctcgggaaagtaccaggacgtctatgtggagctgagccacatcaagacacggtctgagcgggagatcgagcagctgaaggagcacctgcgtcttgccatggccgccctccaggagaaggagtcgatgcgcaacagcctggctgagtagaggtggatgccgaggcgtgtgccctgcagggtgggcaggggctgaggctctcccacacccgggactccctggaccaccccagccaggccacttccttcttctggcctccaattcccgttctgtaaaaaggacaatgaaaccagcaacacggggttgttgcagagatcccatcagacccgggccacaggctgcttcatcagcttaagcctgttcctccagagctgggcggcacagtgcagagccacagcctgctcagtgcaccccccttcttggggctggaggcaaatgcagcgtgcacatccctgacccccacagtgaatctccactgagcttcacacacacacatcgcacgctgaggccgggcttctatcccagttagtcttaacactccttcttgacttagcagggctcaaagtggttggttggttggttggttggttggttggttggttggttggttggttttggttgctttgagaaaggtcttactctgacacccaggctggagtgcagtggtgcaatcacggctcactgcagcctcaacctcctaggctcaagggatcctcccacctcagccttctgagtagctgggaccacaggccctcaccaccatgcccagataatttttgcactttttgtataggtggggtttcgccgtgatttcccaggctggtctcgaactcctgggctcaagcaatacacctgcctcagcctcccaaaattctgagattacaggtgtgagccgctgcacctggccaaagtgttcttatttttgctttttcaacgccacatctacctggagcatcctctttctgataagtcctcatggacttcctatggcatgcaggagaggccaccctatggctgagctgcttgggaaggagccaggaagagcggatctggctgtaccttaggggctgagaggtggtggaaggacccactcagcacccttgcttggccttggggtggcctcgcagcccctcagcccaggcctccagccctgccgcaccttgtctttcaggtcccgcccagctgcagaccctccaggctggaggaccagccgccctccttccctcctggatggaagtaaaaagccaagctttctccccaccctctgtgggccacacgtgcacttgcacccaccacacacacacacacacacacacacacacacagacacacagacacatacgcacacacgtgcacacatgtacacacggatacacacacacacacacacacacacacactgcatatctgagcgcgcccctcgcactgggtctcaccttgcaccttcttcaggattttatatgtgaagagatttttatatagatttttttcctttttttccaaaacactttatactttaaaaaaaaaaaaaaaaaagcaattcctggtggctgtgtgcctccaaccctggtccccctctgtctccagccaccctctgcttgggcttctgagctggtggccctggcccagaggtctggcggaggcccaggcagcagccatggcggggtgtctctacaggggagaggcgggagcctgccaccctcttcctgccctacctcctactaacacttcctgccccatttggacccgtaccatggggctcaggacagagggagctagcagctggcctccatggccccacagcctccttcgaggctgtgctgggtgcagaaccgccagagccacccaaaaggtgtttctcttctgctccctgaacctcttaacttaataaaacgttccagcagctctggtgtcctagatggctggcagaacaggaatggagattggggtttcttgaagtggcttccccactcacaccctacccacaccccacccttcctaaagcagcggcctctaggcttctgagggtggggctgaaaatccaaggtctcccttagtacagactgtgacgcccccagtgtggcttgcaggctagtggcagcggaagcatgtgggaaatagcaagtccagtcccaccccaacctactgaaccagcgtctgcattttaacagggtgccccagtgattcacgtgaccttcaaagtctgaggagccctggagtagggcccagggcccaggcctgagagagaggcctggggctaagactagccctgaccatgaccttgggcaagtcacacccctcactgagcctcagtttgcttctccatcaaatgggtgtttttctttcagtcccag

SEQ ID NO: 364763 - DNA, 3347 bp, Homo sapiens
agttttatgggcggatggaaggggccggggcagcgtcggggaaaggaagggccggaggcgcggcggcgggcggccgagaggggcggcggcggcggcggcggcggggttcccgcgccgcggagcccggcccgagagccgcgtccacgttcctgcctcctgctcccgccgccctggggcgccgccatgacgcccgatctgctcaacttcaagaagggatggatgtcgatcttggacgagcctggagagcctccctccccctcgctcaccaccacctctacttcgcagtggaagaaacattggtttgtgctgacagattcaagtctcaaatattacagagactccactgctgaggaggcagatgagctggatggtgagatcgacctgcgttcctgcacggatgtcactgagtacgcggtgcagcgcaactatggcttccagatccacaccaaggatgctgtctataccttgtcggccatgacctcaggcatccggcggaactggatcgaggctctgagaaagaccgtacgtccaacttcagccccagatgtcaccaagctctcggactctaacaaggagaacgcgctgcacagctacagcacccagaagggccccctgaaggcaggggagcagcgggcgggctctgaggtcatcagccggggtggccctcggaaggcggacgggcagcgtcaggccttggactacgtggagctctcgccgctgacccaggcttccccgcagcgggcccgcaccccagcccgcactcctgaccgcctggccaagcaggaggagctggagcgggacctggcccagcgctccgaggagcggcgcaagtggtttgaggccacagacagcaggaccccagaggtgcctgctggtgaggggccgcgccggggcctgggtgcccccctgactgaggaccagcaaaaccggcttagtgaggagatcgagaagaagtggcaggagctggagaagctgcccctgcgggagaataagcgggtgcccctcactgccctgctcaaccaaagccgcggagagcgccgagggcccccaagtgacggccacgaggcactggagaaggaggttcaggctcttcgggcccagctggaggcgtggcgtctccaaggggaggctcctcagagtgcactgagatcccaggaggatggccacatccccccgggctacatctcacaggaggcatgtgagcgcagcctggcagagatggagtcctcgcaccagcaggtgatggaggagctgcagcggcaccacgagcgggagctgcagcgcctgcagcaggagaaggagtggctcctggctgaggagacggcagccacggcctcagccattgaagccatgaagaaggcctaccaggaagagctgagccgagagctgagcaaaacacggagtctccagcagggcccggatggcctccggaagcagcaccagtcagatgtggaggcactgaagcgagagctgcaggtgctatcggagcagtactcgcagaagtgcctggagattggggcactcatgcggcaggctgaggagcgcgagcacacgctgcgccgctgccagcaggagggccaggagctgctgcgccacaaccaggagctgcatggccgcctgtcagaggagatagaccagctgcgcggcttcattgcctcgcagggcatgggcaatggctgcgggcgcagcaacgagcggagttcctgcgagctagaggtgctgcttcgcgtaaaagaaaacgaactccagtacctaaagaaggaggtgcagtgcctccgggacgagctccagatgatgcagaaggacaagcgcttcacctcgggaaagtaccaggacgtctatgtggagctgagccacatcaagacacggtctgagcgggagatcgagcagctgaaggagcacctgcgtcttgccatggccgccctccaggagaaggagtcgatgcgcaacagcctggctgagtagaggtggatgccgaggcgtgtgccctgcagggtgggcaggggctgaggctctcccacacccgggactccctggaccaccccagccaggccacttccttcttctggcctccaattcccgttctgtaaaaaggacaatgaaaccagcaacacggggttgttgcagagatcccatcagacccgggccacaggctgcttcatcagcttaagcctgttcctccagagctgggcggcacagtgcagagccacagcctgctcagtgcaccccccttcttggggctggaggcaaatgcagcgtgcacatccctgacccccacagtgaatctccactgagcttcacacacacacacacacacagacacacagacacatacgcacacacgtgcacacatgtacacacggatacacacacacacacacacacacacacactgcatatctgagcgcgcccctcgcactgggtctcaccttgcaccttcttcaggattttatatgtgaagagatttttatatagatttttttcctttttttccaaaacactttatactttaaaaaaaaaaaaaaaaaagcaattcctggtggctgtgtgcctccaaccctggtccccctctgtctccagccaccctctgcttgggcttctgagctggtggccctggcccagaggtctggcggaggcccaggcagcagccatggcggggtgtctctacaggggagaggcgggagcctgccaccctcttcctgccctacctcctactaacacttcctgccccatttggacccgtaccatggggctcaggacagagggagctagcagctggcctccatggccccacagcctccttcgaggctgtgctgggtgcagaaccgccagagccacccaaaaggtgtttctcttctgctccctgaacctcttaacttaataaaacgttccagcagctctggtgtcctagatggctggcagaacaggaatggagattggggtttcttgaagtggcttccccactcacaccctacccacaccccacccttcctaaagcagcggcctctaggcttctgagggtggggctgaaaatccaaggtctcccttagtacagactgtgacgcccccagtgtggcttgcaggctagtggcagcggaagcatgtgggaaatagcaagtccagtcccaccccaacctactgaaccagcgtctgcattttaacagggtgccccagtgattcacgtgaccttcaaagtctgaggagccctggagtagggcccagggcccaggcctgagagagaggcctggggctaagactagccctgaccatgaccttgggcaagtcacacccctcactgagcctcagtttgcttctccatcaaatgggtgtttttctttcagtcccag

SEQ ID NO: 364764 - DNA, 2749 bp, Homo sapiens
agttttatgggcggatggaaggggccggggcagcgtcggggaaaggaagggccggaggcgcggcggcgggcggccgagaggggcggcggcggcggcggcggcggggttcccgcgccgcggagcccggcccgagagccgcgtccacgttcctgcctcctgctcccgccgccctggggcgccgccatgacgcccgatctgctcaacttcaagaagggatggatgtcgatcttggacgagcctggagagcctccctccccctcgctcaccaccacctctacttcgcagtggaagaaacattggtttgtgctgacagattcaagtctcaaatattacagagactccactgctgaggaggcagatgagctggatggtgagatcgacctgcgttcctgcacggatgtcactgagtacgcggtgcagcgcaactatggcttccagatccacaccaaggatgctgtctataccttgtcggccatgacctcaggcatccggcggaactggatcgaggctctgagaaagaccgtacgtccaacttcagccccagatgtcaccaagctctcggactctaacaaggagaacgcgctgcacagctacagcacccagaagggccccctgaaggcaggggagcagcgggcgggctctgaggtcatcagccggggtggccctcggaaggcggacgggcagcgtcaggccttggactacgtggagctctcgccgctgacccaggcttccccgcagcgggcccgcaccccagcccgcactcctgaccgcctggccaagcaggaggagctggagcgggacctggcccagcgctccgaggagcggcgcaagtggtttgaggccacagacagcaggaccccagaggtgcctgctggtgaggggccgcgccggggcctgggtgcccccctgactgaggaccagcaaaaccggcttagtgaggagatcgagaagaagtggcaggagctggagaagctgcccctgcgggagaataagcgggtgcccctcactgccctgctcaaccaaagccgcggagagcgccgagggcccccaagtgacggccacgaggcactggagaaggaggttcaggctcttcgggcccagctggaggcgtggcgtctccaaggggaggctcctcagagtgcactgagatcccaggaggatggccacatccccccgggctacatctcacagctggtgggcgtgatcactgtgcccgttttacagacaaggccactgagctctgagaggttatgtgacttgcccaaggtcaccccgcctgcaggtctcaaaggtgggatttgagcgagggtccggctgactgcagagcctgtgtgtgagtccccgtgtgacactctgcacttggacccttgccccggggaagtggggggctagtggccccgagagtcactccctgaacacagggaaatcctgccgaggcccactgggccaaggccccacacaaggaggtctgcaggacaggggagcctccagtagccctcagagaatgcaccgtccgcctaggacagcggttctcaacggggtccattttgtcccccttggggacatttggctgtgtctgggaatacttctggttgtcacaactaggacaaactaactctctagaaaaaacgtgtgtgtgtacacatatataagtttattataaattttaccaataaaaacaatgcttagtacacaatttacaaataaaaatatataattttattgtgaattccgtacagcaaatggatttttctcagaatgctttcagtgattttttccatactcttgtatccacaactgattaacaaagggggttgttctaacatgtgtgctggttgacatttttgtttatggtaatgagtaagatgagaagacatttgtcgaaactttactggtccatgttgtcagctacttctttgctagatcggatagtagttttctattgagaatatttgagaatattctattaagaatatttttgcaattttttgttctatttacaatgtaatggttatagatgtgagatacttctaagtttaatctgcattattagcattttcttatcacttgcttaagtctagacaatcaacaaaacaataaatcaagccctgatgtgtaatgtttaccaattctgcagtgtaaatactcccgctgtggccaatgctgcattaccagcacaaagtccctggacagagagttgggaagagatgtcacactattcactaggatttccaccatgcggatacagtagatgtgattggccccaagagcacgcataatacaacacagtgaaatatttaggaagtaataaatttgagtatctattgccttgtctttaacatagttaatttaaagtatataaatttaattgttaatggctgtgcttaacaactacatcacagaattactaaaaatttgacaatcagctgtctgtagttatcacaccattatctaaagtagaaaagaaggggccaggcgcagtggctcacgcctgtaatcccagcactttggggaggccgaagtgggcagatcacgaggtcaggagaacgagactaacctggccaacatggtgaaactccgtctctaataaaatacaaaaaatagccgggcgtggtggtgcgcactgtggtcccagctacttgggaggctgaggcaggggacccactggaacccaggaggcgcaggttgcagtgagccgagattgcgccacggcactccagcctggcgacagagtaagactccatctcaa

SEQ ID NO: 364765 - DNA, 182 bp, Homo sapiens
gtgctgcttcgcgtaaaagaaaacgaactccagtacctaaagaaggaggtgcagtgcctccgggacgagctccagatgatgcagaaggtaggtccttccgctgggctgggggccgtcggggactctggagccatctggatgccatcctgtgagcacctgctctgtgccaagccctccactcg

SEQ ID NO: 364766 - DNA, 1494 bp, Homo sapiens
cttttaaattgctgtattatgtaggtatctgaaaatccaaagaacgaatctcatatatgggtaaggaaatatatgggaaaggaaaaaaattgtgtacataagctgtctgtggcatagatcaagcctgtggcattctgtggccttcaaagagagaaggggagagagattctataagcttatcaggtagatttgtcattggaactttaggattttaaaattttggttaaaatatgtgaatactgttacttcagttaaagtaactccttttatagattttgctttctaacaaagtcagtgaaaagtaaccgaggttcactccagaaacatgtaaagaaagtaaaattattaaaaggccaaatatttaattcttgtgacattgaatctgcttttattataaagagttaagaaattgccatttccatgacagtttcctccatcaacaatcttaatattgaagcttgaatttaggtctgctggtcagtgattctagtctagcaaattactttaggactgaaagctcttgtttctttagaaaaatatactatggagattaggatcctgtttactagtgaagactctgtctcttttccaggtcaaaacattttgtgggaaatatcctgttcgtgacctaggagaaacaagacagaaaacaaatctttcttcatttatgaatttcttactccatacaagcagtttatggatgtctgggcaatcatagcacttgccatttaaaaacatgctacaggggcacattttctgtggttaaaaatgatctccagaataagtgtaaactgcagttttcctttgcattgagggttttggctttttatttgtaaattaaatcaagatgttacccactccttggtgtggtggtcttgctggttcgtgttgggaagtagtatggcagcaatgcacaaattcagaatagccaagaaatccctccttttcaacgctctgtgcctgggaaccattagaggagttttaaaaaccatccctcatagcccacaattttgggtcaactctcaaaattgggaataagaaaactggcactgttgggagaaaaatcgttcttactgaaacatgaactggctcaggcaagcaaatagcgggagtcggcacaggaaggagtgtgtgctgcggggatgcgtggtggcgtcaccttcaaaactaaagtggtgccaggcggacagatgagtccttgatcttgtttcctgatcttgtttccatttgactgaattctgaaccttcattgtcttcacagtcttgccacttgcctagtgaggcttttccgaacctggaaggagacgtctagaaatcccaactttgctgtgtaaggaccattagctgcaagtcagtggaagtctatagaaagcagtgtgaattccatagtggtcttgacttcttagcaaggatttgggataagtctaaaacttcagacttaaagctttgaagcatgttaactgcatgaaatattaaacatttcgaacttcttta

SEQ ID NO: 364767 - DNA, 872 bp, Homo sapiens
ttttatgtacgtttggcttggggatgaaaattctaattctagagtgtaggtaataccctattacagagtagataacgcatatcgcattcttaaggagcgaaaataattttgataatggtcttggtatatagattgcataaatattgttaaattgttaatgtttactaaactaagataggacagctctaagtatagattgttttacatagatgcgtttagcccagcccctgctggtaaccaaggtcctcctccaatgatgggtatgaatatgaacaacagagcaactatacctggcccaccaatgggtcctggtcctgccatgggaccagaaggagccgcaaatatgggaactccaatgatgccagataatggagcagtgcacaatgacagatttcctcaaggaccaccatctcagatgggttcacctatggggagtagaacaggttctgaaacccctcaagcaccaatgagtggtgtaggtcctgtgagtggtggtcctggtggctttggtagaggaagtcaagggggcaactttgaaggccctaataagcgtcgtagatattaaacattcgttcattcctggctatctagaaaaaaaaaagtcagtggtatgcctttatacttttacctgttatctggaagaaatggttttattgttaatgtatgtagacttaaaagttttttttttttgtaaaacttgaggtttttgtatttttctttattcatgagctttgtagattagaatggtaatgatgctcatcattttgaatgttgaaatgtgtttgtgactttagctaaatataagtattccatagtactgtgaaatctatgtagttaatctcaataaagaaatcattttggataatttaaaa

SEQ ID NO: 364768 - DNA, 448 bp, Homo sapiens
tatcgaaacctcaattactgttatgaatttactaaatgagttaactctgatttttctcattgtttattgaaatcagttcttaaaaatgctgaatctgatttcattgtatttctagggtgataaaagaaaatgtggctgaagttacccgaagttcagcttgcagtgtaattcagaagagttaagaccagaagtactggaatcatacttcctttcagtcttgccacttgcctagtgaggcttttccgaacctggaaggagacgtctagaaatcccaactttgctgtgtaaggaccattagctgcaagtcagtggaagtctatagaaagcagtgtgaattccatagtggtcttgacttcttagcaaggatttgggataagtctaaaacttcagacttaaagctttgaagcatgttaactgcatgaaatattaaacatttcgaacttcttta

SEQ ID NO: 364769 - DNA, 737 bp, Homo sapiens
cttttaaattgctgtattatgtaggtatctgaaaatccaaagaacgaatctcatatatgggtaaggaaatatatgggaaaggaaaaaaattgtgtacataagctgtctgtggcatagatcaagcctgtggcattctgtggccttcaaagagagaaggggagagagattctataagcttatcaggtagatttgtcattggaactttaggattttaaaattttggttaaaatatgtgaatactgttacttcagttaaagtaactccttttatagattttgctttctaacaaagtcagtgaaaagtaaccgaggttcactccagaaacatgtaaagaaagtaaaattattaaaaggccaaatatttaattcttgtgacattgaatctgcttttattataaagagttaagaaattgccatttccatgacagtttcctccatcaacaatcttaatattgaagcttgaatttaggtctgctggtcagtgattctagtctagcaaattactttaggactgaaagctcttgtttctttagaaaaatatactatggagattaggatcctgtttactagtgaagactctgtctcttttccaggtcaaaacattttgtgggaaatatcctgttcgtgacccaggtttttcatagtctgctctatgtctcctgcttttccttgttttgctaatcatcctccttgagctccactgttttcattctgggcatccaatccagcctttcatgg

SEQ ID NO: 364770 - DNA, 577 bp, Homo sapiens
cagcactagtatattctcattaacaaacaaacagtcagcttcgtttgggagggtgcttcactttcaaagctacccagtataatgcatacaatgcagtacaagcggaactcactcagaagtagcacctgagcttcaaatagactctcctgatcattctactgagtaagattctccacatttaagaatcaatacaggatttacttgcgaggatagtgtataaaaatggaatagtttttctatttctggactgaaaccaaactcctcatatctaattgtagttattcaacattatcagaatccctatttattttggcagaacagacaaaaggacgtggaatgtactttctgctacagccattacagtcaactagatttgagtgctgccgctggtaagttaattgaatagccaagttatgttgtccttacccaagtagacagtggaaaggaataatggcagaggccatgatgcgagtctggccacagccatgcatcccatctgtggtgatcttagtcctgagatcacctatgtcctaggccacgaactgaatcatgtactagtaccatatcatctgacttc

SEQ ID NO: 364771 - DNA, 2411 bp, Homo sapiens
ggctttggcggaggggtgggacttgcaccggcgtctcttcttctaactgcagtttgtggcagcgccattttgaatgtgcagctgcagcgggcgtgagttgggggaggacgggttgccgactcgcctacctagcggtctcttgattgtcgatattttgttggcataggtttatgtagagacgtatacatatatatagacacactgtctttaaatctaggcctgtatccggtgtccgaggcgaactcagtaagatgatgttaagaggaaacctgaagcaagtgcgcattgagaaaaacccggcccgccttcgcgccctggagtccgcggtgggcgagagcgagccggcggccgcggcagccatggcgctcgctcttgccggggagccggcaccgcccgcgcccgcgcctccagaggaccacccggacgaggagatggggttcactatcgacatcaagagtttcctcaagccgggcgagaagacgtacacgcagcgctgccgcctcttcgtgggaaatctgcccaccgacatcacggaggaggacttcaagaggctcttcgaacgctatggcgagcccagcgaagtcttcatcaaccgggaccgtggcttcggcttcatccgcttggaatccagaaccctggctgaaattgcaaaagcagagctggacggcaccattctcaagagcagacctctacggattcgcttcgctacacatggagcagccttgactgtcaagaacctttctccagttgtttccaatgagctgctagagcaagcattttctcagtttggtccagtagagaaagctgttgtggttgtggatgatcgcggtagagctacaggaaaaggttttgtagagtttgcagcaaaacctcctgcacgaaaggctctggaaagatgtggtgatggggcattcttgctaacaacgacccctcgtccagtcattgtggaacccatggagcagtttgatgatgaagatggcttgccagagaagctgatgcagaaaactcaacaatatcataaggaaagagaacaaccaccacgttttgctcaacctgggacatttgaatttgagtatgcatctcgatggaaggctcttgatgaaatggaaaagcagcagcgtgagcaggttgatagaaacatcagagaagccaaagagaaactggaggcagaaatggaagcagctaggcatgaacaccaattaatgctaatgaggcaagatctaatgaggcgtcaagaagaactcagacgcttggaagaactcagaaaccaagagttgcaaaaacggaagcaaatacaactaagacatgaagaggagcatcggcggcgtgaggaagaaatgatccgacacagagaacaggaggaactgaggcgacagcaagagggctttaagccaaactacatggaaaatggtgataaaagaaaatgtggctgaagttacccgaagttcagcttgcagtgtaattcagaagagttaagaccagaagtactggaatcatacttcctttcaggtcaaaacattttgtgggaaatatcctgttcgtgacctaggagaaacaagacagaaaacaaatctttcttcatttatgaatttcttactccatacaagcagtttatggatgtctgggcaatcatagcacttgccatttaaaaacatgctacaggggcacattttctgtggttaaaaatgatctccagaataagtgtaaactgcagttttcctttgcattgagggttttggctttttatttgtaaattaaatcaagatgttacccactccttggtgtggtggtcttgctggttcgtgttgggaagtagtatggcagcaatgcacaaattcagaatagccaagaaatccctccttttcaacgctctgtgcctgggaaccattagaggagttttaaaaaccatccctcatagcccacaattttgggtcaactctcaaaattgggaataagaaaactggcactgttgggagaaaaatcgttcttactgaaacatgaactggctcaggcaagcaaatagcgggagtcggcacaggaaggagtgtgtgctgcggggatgcgtggtggcgtcaccttcaaaactaaagtggtgccaggcggacagatgagtccttgatcttgtttcctgatcttgtttccatttgactgaattctgaaccttcattgtcttcacagtcttgccacttgcctagtgaggcttttccgaacctggaaggagacgtctagaaatcccaactttgctgtgtaaggaccattagctgcaagtcagtggaagtctatagaaagcagtgtgaattccatagtggtcttgacttcttagcaaggatttgggataagtctaaaacttcagacttaaagctttgaagcatgttaactgcatgaaatattaaacatttcgaacttcttta

SEQ ID NO: 364772 - DNA, 2337 bp, Homo sapiens
catattacggctaggtacgaggctgggtgtcggacgggttgccgactcgcctacctagcggtctcttgattgtcgatattttgttggcataggtttatgtagagacgtatacatatatatagacacactgtctttaaatctaggcctgtatccggtgtccgaggcgaactcagtaagatgatgttaagaggaaacctgaagcaagtgcgcattgagaaaaacccggcccgccttcgcgccctggagtccgcggtgggcgagagcgagccggcggccgcggcagccatggcgctcgctcttgccggggagccggcaccgcccgcgcccgcgcctccagaggaccacccggacgaggagatggggttcactatcgacatcaagagtttcctcaagccgggcgagaagacgtacacgcagcgctgccgcctcttcgtgggaaatctgcccaccgacatcacggaggaggacttcaagaggctcttcgaacgctatggcgagcccagcgaagtcttcatcaaccgggaccgtggcttcggcttcatccgcttggaatccagaaccctggctgaaattgcaaaagcagagctggacggcaccattctcaagagcagacctctacggattcgcttcgctacacatggagcagccttgactgtcaagaacctttctccagttgtttccaatgagctgctagagcaagcattttctcagtttggtccagtagagaaagctgttgtggttgtggatgatcgcggtagagctacaggaaaaggttttgtagagtttgcagcaaaacctcctgcacgaaaggctctggaaagatgtggtgatggggcattcttgctaacaacgacccctcgtccagtcattgtggaacccatggagcagtttgatgatgaagatggcttgccagagaagctgatgcagaaaactcaacaatatcataaggaaagagaacaaccaccacgttttgctcaacctgggacatttgaatttgagtatgcatctcgatggaaggctcttgatgaaatggaaaagcagcagcgtgagcaggttgatagaaacatcagagaagccaaagagaaactggaggcagaaatggaagcagctaggcatgaacaccaattaatgctaatgaggcaagatctaatgaggcgtcaagaagaactcagacgcttggaagaactcagaaaccaagagttgcaaaaacggaagcaaatacaactaagacatgaagaggagcatcggcggcgtgaggaagaaatgatccgacacagagaacaggaggaactgaggcgacagcaagagggctttaagccaaactacatggaaaatggtgataaaagaaaatgtggctgaagttacccgaagttcagcttgcagtgtaattcagaagagttaagaccagaagtactggaatcatacttcctttcaggtcaaaacattttgtgggaaatatcctgttcgtgacctaggagaaacaagacagaaaacaaatctttcttcatttatgaatttcttactccatacaagcagtttatggatgtctgggcaatcatagcacttgccatttaaaaacatgctacaggggcacattttctgtggttaaaaatgatctccagaataagtgtaaactgcagttttcctttgcattgagggttttggctttttatttgtaaattaaatcaagatgttacccactccttggtgtggtggtcttgctggttcgtgttgggaagtagtatggcagcaatgcacaaattcagaatagccaagaaatccctccttttcaacgctctgtgcctgggaaccattagaggagttttaaaaaccatccctcatagcccacaattttgggtcaactctcaaaattgggaataagaaaactggcactgttgggagaaaaatcgttcttactgaaacatgaactggctcaggcaagcaaatagcgggagtcggcacaggaaggagtgtgtgctgcggggatgcgtggtggcgtcaccttcaaaactaaagtggtgccaggcggacagatgagtccttgatcttgtttcctgatcttgtttccatttgactgaattctgaaccttcattgtcttcacagtcttgccacttgcctagtgaggcttttccgaacctggaaggagacgtctagaaatcccaactttgctgtgtaaggaccattagctgcaagtcagtggaagtctatagaaagcagtgtgaattccatagtggtcttgacttcttagcaaggatttgggataagtctaaaacttcagacttaaagctttgaagcatgttaactgcatgaaatattaaacatttcgaacttcttta

SEQ ID NO: 364773 - DNA, 2130 bp, Homo sapiens
ggctttggcggaggggtgggacttgcaccggcgtctcttcttctaactgcagtttgtggcagcgccattttgaatgtgcagctgcagcgggcgtgagttgggggaggacgggttgccgactcgcctacctagcggtctcttgattgtcgatattttgttggcataggtttatgtagagacgtatacatatatatagacacactgtctttaaatctaggcctgtatccggtgtccgaggcgaactcagtaagatgatgttaagaggaaacctgaagcaagtgcgcattgagaaaaacccggcccgccttcgcgccctggagtccgcggtgggcgagagcgagccggcggccgcggcagccatggcgctcgctcttgccggggagccggcaccgcccgcgcccgcgcctccagaggaccacccggacgaggagatggggttcactatcgacatcaagagtttcctcaagccgggcgagaagacgtacacgcagcgctgccgcctcttcgtgggaaatctgcccaccgacatcacggaggaggacttcaagaggctcttcgaacgctatggcgagcccagcgaagtcttcatcaaccgggaccgtggcttcggcttcatccgcttggaatccagaaccctggctgaaattgcaaaagcagagctggacggcaccattctcaagagcagacctctacggattcgcttcgctacacatggagcagccttgactgtcaagaacctttctccagttgtttccaatgagctgctagagcaagcattttctcagtttggtccagtagagaaagctgttgtggttgtggatgatcgcggtagagctacaggaaaaggttttgtagagtttgcagcaaaacctcctgcacgaaaggctctggaaagatgtggtgatggggcattcttgctaacaacgacccctcgtccagtcattgtggaacccatggagcagtttgatgatgaagatggcttgccagagaagctgatgcagaaaactcaacaatatcataaggaaagagaacaaccaccacgttttgctcaacctgggacatttgaatttgagtatgcatctcgatggaaggctcttgatgaaatggaaaagcagcagcgtgagcaggttgatagaaacatcagagaagccaaagagaaactggaggcagaaatggaagcagctaggcatgaacaccaattaatgctaatgaggcaagatctaatgaggcgtcaagaagaactcagacgcttggaagaactcagaaaccaagagttgcaaaaacggaagcaaatacaactaagacatgaagaggagcatcggcggcgtgaggaagaaatgatccgacacagagaacaggaggaactgaggcgacagcaagagggctttaagccaaactacatggaaaatagagaacaggaaatgagaatgggtgatatgggtccccgtggagcaataaacatgggagatgcgtttagcccagcccctgctggtaaccaaggtcctcctccaatgatgggtatgaatatgaacaacagagcaactatacctggcccaccaatgggtcctggtcctgccatgggaccagaaggagccgcaaatatgggaactccaatgatgccagataatggagcagtgcacaatgacagatttcctcaaggaccaccatctcagatgggttcacctatggggagtagaacaggttctgaaacccctcaagcaccaatgagtggtgtaggtcctgtgagtggtggtcctggtggctttggtagaggaagtcaagggggcaactttgaaggccctaataagcgtcgtagatattaaacattcgttcattcctggctatctagaaaaaaaaaagtcagtggtatgcctttatacttttacctgttatctggaagaaatggttttattgttaatgtatgtagacttaaaagttttttttttttgtaaaacttgaggtttttgtatttttctttattcatgagctttgtagattagaatggtaatgatgctcatcattttgaatgttgaaatgtgtttgtgactttagctaaatataagtattccatagtactgtgaaatctatgtagttaatctcaataaagaaatcattttggataatttaaaa

SEQ ID NO: 364774 - DNA, 2151 bp, Homo sapiens
ggctttggcggaggggtgggacttgcaccggcgtctcttcttctaactgcagtttgtggcagcgccattttgaatgtgcagctgcagcgggcgtgagttgggggaggacgggttgccgactcgcctacctagcggtctcttgattgtcgatattttgttggcataggtttatgtagagacgtatacatatatatagacacactgtctttaaatctaggcctgtatccggtgtccgaggcgaactcagtaagatgatgttaagaggaaacctgaagcaagtgcgcattgagaaaaacccggcccgccttcgcgccctggagtccgcggtgggcgagagcgagccggcggccgcggcagccatggcgctcgctcttgccggggagccggcaccgcccgcgcccgcgcctccagaggaccacccggacgaggagatggggttcactatcgacatcaagagtttcctcaagccgggcgagaagacgtacacgcagcgctgccgcctcttcgtgggaaatctgcccaccgacatcacggaggaggacttcaagaggctcttcgaacgctatggcgagcccagcgaagtcttcatcaaccgggaccgtggcttcggcttcatccgcttggaatccagaaccctggctgaaattgcaaaagcagagctggacggcaccattctcaagagcagacctctacggattcgcttcgctacacatggagcagccttgactgtcaagaacctttctccagttgtttccaatgagctgctagagcaagcattttctcagtttggtccagtagagaaagctgttgtggttgtggatgatcgcggtagagctacaggaaaaggttttgtagagtttgcagcaaaacctcctgcacgaaaggctctggaaagatgtggtgatggggcattcttgctaacaacgacccctcgtccagtcattgtggaacccatggagcagtttgatgatgaagatggcttgccagagaagctgatgcagaaaactcaacaatatcataaggaaagagaacaaccaccacgttttgctcaacctgggacatttgaatttgagtatgcatctcgatggaaggctcttgatgaaatggaaaagcagcagcgtgagcaggttgatagaaacatcagagaagccaaagagaaactggaggcagaaatggaagcagctaggcatgaacaccaattaatgctaatgaggcaagatctaatgaggcgtcaagaagaactcagacgcttggaagaactcagaaaccaagagttgcaaaaacggaagcaaatacaactaagacatgaagaggagcatcggcggcgtgaggaagaaatgatccgacacagagaacaggaggaactgaggcgacagcaagagggctttaagccaaactacatggaaaattttaaagggaggaatcaaatgagagaacaggaaatgagaatgggtgatatgggtccccgtggagcaataaacatgggagatgcgtttagcccagcccctgctggtaaccaaggtcctcctccaatgatgggtatgaatatgaacaacagagcaactatacctggcccaccaatgggtcctggtcctgccatgggaccagaaggagccgcaaatatgggaactccaatgatgccagataatggagcagtgcacaatgacagatttcctcaaggaccaccatctcagatgggttcacctatggggagtagaacaggttctgaaacccctcaagcaccaatgagtggtgtaggtcctgtgagtggtggtcctggtggctttggtagaggaagtcaagggggcaactttgaaggccctaataagcgtcgtagatattaaacattcgttcattcctggctatctagaaaaaaaaaagtcagtggtatgcctttatacttttacctgttatctggaagaaatggttttattgttaatgtatgtagacttaaaagttttttttttttgtaaaacttgaggtttttgtatttttctttattcatgagctttgtagattagaatggtaatgatgctcatcattttgaatgttgaaatgtgtttgtgactttagctaaatataagtattccatagtactgtgaaatctatgtagttaatctcaataaagaaatcattttggataatttaaaa

SEQ ID NO: 364775 - DNA, 2299 bp, Homo sapiens
ggctttggcggaggggtgggacttgcaccggcgtctcttcttctaactgcagtttgtggcagcgccattttgaatgtgcagctgcagcgggcgtgagttgggggagcctgtatccggtgtccgaggcgaactcagtaagatgatgttaagaggaaacctgaagcaagtgcgcattgagaaaaacccggcccgccttcgcgccctggagtccgcggtgggcgagagcgagccggcggccgcggcagccatggcgctcgctcttgccggggagccggcaccgcccgcgcccgcgcctccagaggaccacccggacgaggagatggggttcactatcgacatcaagagtttcctcaagccgggcgagaagacgtacacgcagcgctgccgcctcttcgtgggaaatctgcccaccgacatcacggaggaggacttcaagaggctcttcgaacgctatggcgagcccagcgaagtcttcatcaaccgggaccgtggcttcggcttcatccgcttggaatccagaaccctggctgaaattgcaaaagcagagctggacggcaccattctcaagagcagacctctacggattcgcttcgctacacatggagcagccttgactgtcaagaacctttctccagttgtttccaatgagctgctagagcaagcattttctcagtttggtccagtagagaaagctgttgtggttgtggatgatcgcggtagagctacaggaaaaggttttgtagagtttgcagcaaaacctcctgcacgaaaggctctggaaagatgtggtgatggggcattcttgctaacaacgacccctcgtccagtcattgtggaacccatggagcagtttgatgatgaagatggcttgccagagaagctgatgcagaaaactcaacaatatcataaggaaagagaacaaccaccacgttttgctcaacctgggacatttgaatttgagtatgcatctcgatggaaggctcttgatgaaatggaaaagcagcagcgtgagcaggttgatagaaacatcagagaagccaaagagaaactggaggcagaaatggaagcagctaggcatgaacaccaattaatgctaatgaggcaagatctaatgaggcgtcaagaagaactcagacgcttggaagaactcagaaaccaagagttgcaaaaacggaagcaaatacaactaagacatgaagaggagcatcggcggcgtgaggaagaaatgatccgacacagagaacaggaggaactgaggcgacagcaagagggctttaagccaaactacatggaaaatggtgataaaagaaaatgtggctgaagttacccgaagttcagcttgcagtgtaattcagaagagttaagaccagaagtactggaatcatacttcctttcaggtcaaaacattttgtgggaaatatcctgttcgtgacctaggagaaacaagacagaaaacaaatctttcttcatttatgaatttcttactccatacaagcagtttatggatgtctgggcaatcatagcacttgccatttaaaaacatgctacaggggcacattttctgtggttaaaaatgatctccagaataagtgtaaactgcagttttcctttgcattgagggttttggctttttatttgtaaattaaatcaagatgttacccactccttggtgtggtggtcttgctggttcgtgttgggaagtagtatggcagcaatgcacaaattcagaatagccaagaaatccctccttttcaacgctctgtgcctgggaaccattagaggagttttaaaaaccatccctcatagcccacaattttgggtcaactctcaaaattgggaataagaaaactggcactgttgggagaaaaatcgttcttactgaaacatgaactggctcaggcaagcaaatagcgggagtcggcacaggaaggagtgtgtgctgcggggatgcgtggtggcgtcaccttcaaaactaaagtggtgccaggcggacagatgagtccttgatcttgtttcctgatcttgtttccatttgactgaattctgaaccttcattgtcttcacagtcttgccacttgcctagtgaggcttttccgaacctggaaggagacgtctagaaatcccaactttgctgtgtaaggaccattagctgcaagtcagtggaagtctatagaaagcagtgtgaattccatagtggtcttgacttcttagcaaggatttgggataagtctaaaacttcagacttaaagctttgaagcatgttaactgcatgaaatattaaacatttcgaacttcttta

SEQ ID NO: 364776 - DNA, 1879 bp, Homo sapiens
ggctttggcggaggggtgggacttgcaccggcgtctcttcttctaactgcagtttgtggcagcgccattttgaatgtgcagctgcagcgggcgtgagttgggggaggacgggttgccgactcgcctacctagcggtctcttgattgtcgatattttgttggcataggtttatgtagagacgtatacatatatatagacacactgtctttaaatctaggcctgtatccggtgtccgaggcgaactcagtaagatgatgttaagaggaaacctgaagcaagtgcgcattgagaaaaacccggcccgccttcgcgccctggagtccgcggtgggcgagagcgagccggcggccgcggcagccatggcgctcgctcttgccggggagccggcaccgcccgcgcccgcgcctccagaggaccacccggacgaggagatggggttcactatcgacatcaagagtttcctcaagccgggcgagaagacgtacacgcagcgctgccgcctcttcgtgggaaatctgcccaccgacatcacggaggaggacttcaagaggctcttcgaacgctatggcgagcccagcgaagtcttcatcaaccgggaccgtggcttcggcttcatccgcttggaatccagaaccctggctgaaattgcaaaagcagagctggacggcaccattctcaagagcagacctctacggattcgcttcgctacacatggagcagccttgactgtcaagaacctttctccagttgtttccaatgagctgctagagcaagcattttctcagtttggtccagtagagaaagctgttgtggttgtggatgatcgcggtagagctacaggaaaaggttttgtagagtttgcagcaaaacctcctgcacgaaaggctctggaaagatgtggtgatggggcattcttgctaacaacgacccctcgtccagtcattgtggaacccatggagcagtttgatgatgaagatggcttgccagagaagctgatgcagaaaactcaacaatatcataaggaaagagaacaaccaccacgttttgctcaacctgggacatttgaatttgagtatgcatctcgatggaaggctcttgatgaaatggaaaagcagcagcgtgagcaggttgatagaaacatcagagaagccaaagagaaactggaggcagaaatggaagcagctaggcatgaacaccaattaatgctaatgaggcaagatctaatgaggcgtcaagaagaactcagacgcttggaagaactcagaaaccaagagttgcaaaaacggaagcaaatacaactaagacatgaagaggagcatcggcggcgtgaggaagaaatgatccgacacagagaacaggaggaactgaggcgacagcaagagggctttaagccaaactacatggaaaatagagaacaggaaatgagaatgggtgatatgggtccccgtggagcaataaacatgggagatgcgtttagcccagcccctgctggtaaccaaggtcctcctccaatgatgggtatgaatatgaacaacagagcaactatacctggcccaccaatgggtcctggtcctgccatgggaccagaaggagccgcaaatatgggaactccaatgatgccagataatggagcagtgcacaatgacagatttcctcaaggaccaccatctcagatgggttcacctatggggagtagaacaggttctgaaacccctcaagcaccaatgagtggtgtaggtcctgtgagtggtggtcctggtggctttggtagaggaagtcaagggggcaactttgaaggccctaataagcgtcgtagatattaaacattcgttcattcctggctatctagaaaaaaaaaaaaaaaaaaaaagaaaaaaat

SEQ ID NO: 364777 - DNA, 1762 bp, Homo sapiens
ggctttggcggaggggtgggacttgcaccggcgtctcttcttctaactgcagtttgtggcagcgccattttgaatgtgcagctgcagcgggcgtgagttgggggaggacgggttgccgactcgcctacctagcggtctcttgattgtcgatattttgttggcataggtttatgtagagacgtatacatatatatagacacactgtctttaaatctaggcctgtatccggtgtccgaggcgaactcagtaagatgatgttaagaggaaacctgaagcaagtgcgcattgagaaaaacccggcccgccttcgcgccctggagtccgcggtgggcgagagcgagccggcggccgcggcagccatggcgctcgctcttgccggggagccggcaccgcccgcgcccgcgcctccagaggaccacccggacgaggagatggggttcactatcgacatcaagagtttcctcaagccgggcgagaagacgtacacgcagcgctgccgcctcttcgtgggaaatctgcccaccgacatcacggaggaggacttcaagaggctcttcgaacgctatggcgagcccagcgaagtcttcatcaaccgggaccgtggcttcggcttcatccgcttggaatccagaaccctggctgaaattgcaaaagcagagctggacggcaccattctcaagagcagacctctacggattcgcttcgctacacatggagcagccttgactgtcaagaacctttctccagttgtttccaatgagctgctagagcaagcattttctcagtttggtccagtagagaaagctgttgtggttgtggatgatcgcggtagagctacaggaaaaggttttgtagagtttgcagcaaaacctcctgcacgaaaggctctggaaagatgtggtgatggggcattcttgctaacaacgacccctcgtccagtcattgtggaacccatggagcagtttgatgatgaagatggcttgccagagaagctgatgcagaaaactcaacaatatcataaggaaagagaacaaccaccacgttttgctcaacctgggacatttgaatttgagtatgcatctcgatggaaggctcttgatgaaatggaaaagcagcagcgtgagcaggttgatagaaacatcagagaagccaaagagaaactggaggcagaaatggaagcagctaggcatgaacaccaattaatgctaatgaggcaagatctaatgaggcgtcaagaagaactcagacgcttggaagaactcagaaaccaagagttgcaaaaacggaagcaaatacaactaagacatgaagaggagcatcggcggcgtgaggaagaaatgatccgacacagagaacaggaggaactgaggcgacagcaagagggctttaagccaaactacatggaaaatggtgataaaagaaaatgtggctgaagttacccgaagttcagcttgcagtgtaattcagaagagttaagaccagaagtactggaatcatacttcctttcagtcttgccacttgcctagtgaggcttttccgaacctggaaggagacgtctagaaatcccaactttgctgtgtaaggaccattagctgcaagtcagtggaagtctatagaaagcagtgtgaattccatagtggtcttgacttcttagcaaggatttgggataagtctaaaacttcagacttaaagctttgaagcatgttaactgcatgaaatattaaacatttcgaacttctttaaaaaaaaaaaagaaaaaaat

SEQ ID NO: 364778 - DNA, 1368 bp, Homo sapiens
agatgctgaggtgggcagatcacttgaggtaagttcgacaccagcctggccaatatagtgaaaccccgtctctactaaaaatacaaaaatcagccaggtgtggtggtgcgcacctgtaatcccagctacttgggagactgaggcaggaatgattaagggaatgttggcagaggctagcagtgtagtgcttcttccaaggacaatgtaaaacattttttttcttttagagatggggtcttgatatgttgcccaggctgggctcaagcagtcctctttcctcatcctcctgagtggctgagacaacaagcacatgccactgtgcccagcagaacagtgtttttccaattgatttcattgtatttctagggtgataaaagaaaatgtggctgaagttacccgaagttcagcttgcagtgtaattcagaagagttaagaccagaagtactggaatcatacttcctttcaggtcaaaacattttgtgggaaatatcctgttcgtgacctaggagaaacaagacagaaaacaaatctttcttcatttatgaatttcttactccatacaagcagtttatggatgtctgggcaatcatagcacttgccatttaaaaacatgctacaggggcacattttctgtggttaaaaatgatctccagaataagtgtaaactgcagttttcctttgcattgagggttttggctttttatttgtaaattaaatcaagatgttacccactccttggtgtggtggtcttgctggttcgtgttgggaagtagtatggcagcaatgcacaaattcagaatagccaagaaatccctccttttcaacgctctgtgcctgggaaccattagaggagttttaaaaaccatccctcatagcccacaattttgggtcaactctcaaaattgggaataagaaaactggcactgttgggagaaaaatcgttcttactgaaacatgaactggctcaggcaagcaaatagcgggagtcggcacaggaaggagtgtgtgctgcggggatgcgtggtggcgtcaccttcaaaactaaagtggtgccaggcggacagatgagtccttgatcttgtttcctgatcttgtttccatttgactgaattctgaaccttcattgtcttcacagtcttgccacttgcctagtgaggcttttccgaacctggaaggagacgtctagaaatcccaactttgctgtgtaaggaccattagctgcaagtcagtggaagtctatagaaagcagtgtgaattccatagtggtcttgacttcttagcaaggatttgggataagtctaaaacttcagacttaaagctttgaagcatgttaactgcatgaaatattaaacatttcgaacttcttta

SEQ ID NO: 364779 - DNA, 983 bp, Homo sapiens
  misc_feature (41)..(41): n is a, c, g, or t
acacatcgaactaaacacacataacataaaaggagaagggnctttagctgcaacgactctcttatgtaccaccgctacacggtcaaaacattttgtgggaaatatcctgttcgtgacctaggagaaacaagacagaaaacaaatctttcttcatttatgaatttcttactccatacaagcagtttatggatgtctgggcaatcatagcacttgccatttaaaaacatgctacaggggcacattttctgtggttaaaaatgatctccagaataagtgtaaactgcagttttcctttgcattgagggttttggctttttatttgtaaattaaatcaagatgttacccactccttggtgtggtggtcttgctggttcgtgttgggaagtagtatggcagcaatgcacaaattcagaatagccaagaaatccctccttttcaacgctctgtgcctgggaaccattagaggagttttaaaaaccatccctcatagcccacaattttgggtcaactctcaaaattgggaataagaaaactggcactgttgggagaaaaatcgttcttactgaaacatgaactggctcaggcaagcaaatagcgggagtcggcacaggaaggagtgtgtgctgcggggatgcgtggtggcgtcaccttcaaaactaaagtggtgccaggcggacagatgagtccttgatcttgtttcctgatcttgtttccatttgactgaattctgaaccttcattgtcttcacagtcttgccacttgcctagtgaggcttttccgaacctggaaggagacgtctagaaatcccaactttgctgtgtaaggaccattagctgcaagtcagtggaagtctatagaaagcagtgtgaattccatagtggtcttgacttcttagcaaggatttgggataagtctaaaacttcagacttaaagctttgaagcatgttaactgcatgaaatattaaacatttcgaacttcttta

SEQ ID NO: 364780 - DNA, 1149 bp, Homo sapiens
  misc_feature (10)..(10): n is a, c, g, or t
  misc_feature (19)..(19): n is a, c, g, or t
  misc_feature (60)..(60): n is a, c, g, or t
cccgggtttnccattcccncttttaaaaacccggccaggcccaagttgaagcctcaagtnacttaaaaggacccctcttttgggccgggtaccataatagattttcctttgcttggaatctaggcatgtgtctttcatctgttggaataaaaacattaaaaataatttgtgatatattttatataatctgattcattagtaatctaatcttgcaatataaactgggtgcattaagcatttgtagtatattaagcctgggagactgaagtttcttttcagcattcttattaagtttatgatgatggaaacttttcaaaatttttaatgaaaaatgatgtcccaattcactcttttctttttgattttagatgggaaatgtaaagtcataagatcgataggttgactgtgacaactatgtttacttacagagagaacaggaaatgagaatgggtgatatgggtccccgtggagcaataaacatgggagatgcgtttagcccagcccctgctggtaaccaaggtcctcctccaatgatgggtatgaatatgaacaacagagcaactatacctggcccaccaatgggtcctggtcctgccatgggaccagaaggagccgcaaatatgggaactccaatgatgccagataatggagcagtgcacaatgacagatttcctcaaggaccaccatctcagatgggttcacctatggggagtagaacaggttctgaaacccctcaagcaccaatgagtggtgtaggtcctgtgagtggtggtcctggtggctttggtagaggaagtcaagggggcaactttgaaggccctaataagcgtcgtagatattaaacattcgttcattcctggctatctagaaaaaaaaaagtcagtggtatgcctttatacttttacctgttatctggaagaaatggttttattgttaatgtatgtagacttaaaagttttttttttttgtaaaacttgaggtttttgtatttttctttattcatgagctttgtagattagaatggtaatgatgctcatcattttgaatgttgaaatgtgtttgtgactttagctaaatataagtattccatagtactgtgaaatctatgtagttaatctcaataaagaaatcattttggataatttaaaa

SEQ ID NO: 364781 - DNA, 1200 bp, Homo sapiens
tgtaaccttatttttagcataattccctaaagctatttgtgttatatgttcaaatacatttcaacatgaacttggtaacagtcatttctattttaagacttcagtgacctgggaggagaaaataattggctctggtggttatcattactagattttcctttgcttggaatctaggcatgtgtctttcatctgttggaataaaaacattaaaaataatttgtgatatattttatataatctgattcattagtaatctaatcttgcaatataaactgggtgcattaagcatttgtagtatattaagcctgggagactgaagtttcttttcagcattcttattaagtttatgatgatggaaacttttcaaaatttttaatgaaaaatgatgtcccaattcactcttttctttttgattttagatgggaaatgtaaagtcataagatcgataggttgactgtgacaactatgtttacttacagagagaacaggaaatgagaatgggtgatatgggtccccgtggagcaataaacatgggagatgcgtttagcccagcccctgctggtaaccaaggtcctcctccaatgatgggtatgaatatgaacaacagagcaactatacctggcccaccaatgggtcctggtcctgccatgggaccagaaggagccgcaaatatgggaactccaatgatgccagataatggagcagtgcacaatgacagatttcctcaaggaccaccatctcagatgggttcacctatggggagtagaacaggttctgaaacccctcaagcaccaatgagtggtgtaggtcctgtgagtggtggtcctggtggctttggtagaggaagtcaagggggcaactttgaaggccctaataagcgtcgtagatattaaacattcgttcattcctggctatctagaaaaaaaaaagtcagtggtatgcctttatacttttacctgttatctggaagaaatggttttattgttaatgtatgtagacttaaaagttttttttttttgtaaaacttgaggtttttgtatttttctttattcatgagctttgtagattagaatggtaatgatgctcatcattttgaatgttgaaatgtgtttgtgactttagctaaatataagtattccatagtactgtgaaatctatgtagttaatctcaataaagaaatcattttggataatttaaaa

SEQ ID NO: 364782 - DNA, 699 bp, Homo sapiens
agatgctgaggtgggcagatcacttgaggtaagttcgacaccagcctggccaatatagtgaaaccccgtctctactaaaaatacaaaaatcagccaggtgtggtggtgcgcacctgtaatcccagctacttgggagactgaggcaggaatgattaagggaatgttggcagaggctagcagtgtagtgcttcttccaaggacaatgtaaaacattttttttcttttagagatggggtcttgatatgttgcccaggctgggctcaagcagtcctctttcctcatcctcctgagtggctgagacaacaagcacatgccactgtgcccagcagaacagtgtttttccaattgatttcattgtatttctagggtgataaaagaaaatgtggctgaagttacccgaagttcagcttgcagtgtaattcagaagagttaagaccagaagtactggaatcatacttcctttcagtcttgccacttgcctagtgaggcttttccgaacctggaaggagacgtctagaaatcccaactttgctgtgtaaggaccattagctgcaagtcagtggaagtctatagaaagcagtgtgaattccatagtggtcttgacttcttagcaaggatttgggataagtctaaaacttcagacttaaagctttgaagcatgttaactgcatgaaatattaaacatttcgaacttcttta

SEQ ID NO: 364783 - DNA, 425 bp, Homo sapiens
agatgctgaggtgggcagatcacttgaggtaagttcgacaccagcctggccaatatagtgaaaccccgtctctactaaaaatacaaaaatcagccaggtgtggtggtgcgcacctgtaatcccagctacttgggagactgaggcaggaatgattaagggaatgttggcagaggctagcagtgtagtgcttcttccaaggacaatgtaaaacattttttttcttttagagatggggtcttgatatgttgcccaggctgggctcaagcagtcctctttcctcatcctcctgagtggctgagacaacaagcacatgccactgtgcccagcagaacagtgtttttccaatgtacgtaataaacactcaaggagcttttaaaaaatgtgggttcttagatcatactactaataattgatttgttttgtga

SEQ ID NO: 364784 - DNA, 813 bp, Homo sapiens
ggggatgcgtggtggcgtcaccttcaaaactaaagtggtgccaggcggacagatgagtccttgatcttgtttcctgatcttgtttccatttgactgaattctgaaccttcattgtcttcacagtcttgccacttgcctagtgaggcttttccgaacctggaaggagacgtctagaaatcccaactttgctgtgtaaggaccattagctgcaagtcagtggaagtctatagaaagcagtgtgaattccatagtggtcttgacttcttagcaaggatttgggataagtctaaaacttcagacttaaagctttgaagcatgttaactgcatgaaatattaaacatttcgaacttctttagcctttgtcattttgtgacccaggtttttcatagtctgctctatgtctcctgcttttccttgttttgctaatcatcctccttgagctccactgttttcattctgggcatccaatccagcctttcatggtgtgtgcttcatcaggcccctggttcacatgctgagtgccttataagcctggccagcactagtatattctcattaacaaacaaacagtcagcttcgtttgggagggtgcttcactttcaaagctacccagtataatgcatacaatgcagtacaagcggaactcactcagaagtagcacctgagcttcaaatagactctcctgatcattctactgagtaagattctccacatttaagaatcaatacaggatttacttgcgaggatagtgtataaaaatggaatagtttttctatttctggactgaaaccaaactcctcatatctaattgt

SEQ ID NO: 364785 - DNA, 1742 bp, Homo sapiens
ggctttggcggaggggtgggacttgcaccggcgtctcttcttctaactgcagtttgtggcagcgccattttgaatgtgcagctgcagcgggcgtgagttgggggaggacgggttgccgactcgcctacctagcggtctcttgattgtcgatattttgttggcataggtttatgtagagacgtatacatatatatagacacactgtctttaaatctaggcctgtatccggtgtccgaggcgaactcagtaagatgatgttaagaggaaacctgaagcaagtgcgcattgagaaaaacccggcccgccttcgcgccctggagtccgcggtgggcgagagcgagccggcggccgcggcagccatggcgctcgctcttgccggggagccggcaccgcccgcgcccgcgcctccagaggaccacccggacgaggagatggggttcactatcgacatcaagagtttcctcaagccgggcgagaagacgtacacgcagcgctgccgcctcttcgtgggaaatctgcccaccgacatcacggaggaggacttcaagaggctcttcgaacgctatggcgagcccagcgaagtcttcatcaaccgggaccgtggcttcggcttcatccgcttggaatccagaaccctggctgaaattgcaaaagcagagctggacggcaccattctcaagagcagacctctacggattcgcttcgctacacatggagcagccttgactgtcaagaacctttctccagttgtttccaatgagctgctagagcaagcattttctcagtttggtccagtagagaaagctgttgtggttgtggatgatcgcggtagagctacaggaaaaggttttgtagagtttgcagcaaaacctcctgcacgaaaggctctggaaagatgtggtgatggggcattcttgctaacaacgacccctcgtccagtcattgtggaacccatggagcagtttgatgatgaagatggcttgccagagaagctgatgcagaaaactcaacaatatcataaggaaagagaacaaccaccacgttttgctcaacctgggacatttgaatttgagtatgcatctcgatggaaggctcttgatgaaatggaaaagcagcagcgtgagcaggttgatagaaacatcagagaagccaaagagaaactggaggcagaaatggaagcagctaggcatgaacaccaattaatgctaatgaggcaagatctaatgaggcgtcaagaagaactcagacgcttggaagaactcagaaaccaagagttgcaaaaacggaagcaaatacaactaagacatgaagaggagcatcggcggcgtgaggaagaaatgatccgacacagagaacaggaggaactgaggcgacagcaagagggctttaagccaaactacatggaaaatggtgataaaagaaaatgtggctgaagttacccgaagttcagcttgcagtgtaattcagaagagttaagaccagaagtactggaatcatacttcctttcagtcttgccacttgcctagtgaggcttttccgaacctggaaggagacgtctagaaatcccaactttgctgtgtaaggaccattagctgcaagtcagtggaagtctatagaaagcagtgtgaattccatagtggtcttgacttcttagcaaggatttgggataagtctaaaacttcagacttaaagctttgaagcatgttaactgcatgaaatattaaacatttcgaacttcttta

SEQ ID NO: 364786 - DNA, 2357 bp, Homo sapiens
  misc_feature (17)..(17): n is a, c, g, or t
  misc_feature (32)..(32): n is a, c, g, or t
gtgcccatggtttaacntccccccccgcgtantgtagcgaggctgggtgtcagacgggttgccgactcgcctacctagcggtctcttgattgtcgatattttgttggcataggtttatgtagagacgtatacatatatatagacacactgtctttaaatctaggcctgtatccggtgtccgaggcgaactcagtaagatgatgttaagaggaaacctgaagcaagtgcgcattgagaaaaacccggcccgccttcgcgccctggagtccgcggtgggcgagagcgagccggcggccgcggcagccatggcgctcgctcttgccggggagccggcaccgcccgcgcccgcgcctccagaggaccacccggacgaggagatggggttcactatcgacatcaagagtttcctcaagccgggcgagaagacgtacacgcagcgctgccgcctcttcgtgggaaatctgcccaccgacatcacggaggaggacttcaagaggctcttcgaacgctatggcgagcccagcgaagtcttcatcaaccgggaccgtggcttcggcttcatccgcttggaatccagaaccctggctgaaattgcaaaagcagagctggacggcaccattctcaagagcagacctctacggattcgcttcgctacacatggagcagccttgactgtcaagaacctttctccagttgtttccaatgagctgctagagcaagcattttctcagtttggtccagtagagaaagctgttgtggttgtggatgatcgcggtagagctacaggaaaaggttttgtagagtttgcagcaaaacctcctgcacgaaaggctctggaaagatgtggtgatggggcattcttgctaacaacgacccctcgtccagtcattgtggaacccatggagcagtttgatgatgaagatggcttgccagagaagctgatgcagaaaactcaacaatatcataaggaaagagaacaaccaccacgttttgctcaacctgggacatttgaatttgagtatgcatctcgatggaaggctcttgatgaaatggaaaagcagcagcgtgagcaggttgatagaaacatcagagaagccaaagagaaactggaggcagaaatggaagcagctaggcatgaacaccaattaatgctaatgaggcaagatctaatgaggcgtcaagaagaactcagacgcttggaagaactcagaaaccaagagttgcaaaaacggaagcaaatacaactaagacatgaagaggagcatcggcggcgtgaggaagaaatgatccgacacagagaacaggaggaactgaggcgacagcaagagggctttaagccaaactacatggaaaatggtgataaaagaaaatgtggctgaagttacccgaagttcagcttgcagtgtaattcagaagagttaagaccagaagtactggaatcatacttcctttcaggtcaaaacattttgtgggaaatatcctgttcgtgacctaggagaaacaagacagaaaacaaatctttcttcatttatgaatttcttactccatacaagcagtttatggatgtctgggcaatcatagcacttgccatttaaaaacatgctacaggggcacattttctgtggttaaaaatgatctccagaataagtgtaaactgcagttttcctttgcattgagggttttggctttttatttgtaaattaaatcaagatgttacccactccttggtgtggtggtcttgctggttcgtgttgggaagtagtatggcagcaatgcacaaattcagaatagccaagaaatccctccttttcaacgctctgtgcctgggaaccattagaggagttttaaaaaccatccctcatagcccacaattttgggtcaactctcaaaattgggaataagaaaactggcactgttgggagaaaaatcgttcttactgaaacatgaactggctcaggcaagcaaatagcgggagtcggcacaggaaggagtgtgtgctgcggggatgcgtggtggcgtcaccttcaaaactaaagtggtgccaggcggacagatgagtccttgatcttgtttcctgatcttgtttccatttgactgaattctgaaccttcattgtcttcacagtcttgccacttgcctagtgaggcttttccgaacctggaaggagacgtctagaaatcccaactttgctgtgtaaggaccattagctgcaagtcagtggaagtctatagaaagcagtgtgaattccatagtggtcttgacttcttagcaaggatttgggataagtctaaaacttcagacttaaagctttgaagcatgttaactgcatgaaatattaaacatttcgaacttcttta

SEQ ID NO: 364787 - DNA, 2458 bp, Homo sapiens
ggctttggcggaggggtgggacttgcaccggcgtctcttcttctaactgcagtttgtggcagcgccattttgaatgtgcagctgcagcgggcgtgagttgggggaggacgggttgccgactcgcctacctagcggtctcttgattgtcgatattttgttggcataggtttatgtagagacgtatacatatatatagacacactgtctttaaatctaggcctgtatccggtgtccgaggcgaactcagtaagatgatgttaagaggaaacctgaagcaagtgcgcattgagaaaaacccggcccgccttcgcgccctggagtccgcggtgggcgagagcgagccggcggccgcggcagccatggcgctcgctcttgccggggagccggcaccgcccgcgcccgcgcctccagaggaccacccggacgaggagatggggttcactatcgacatcaagagtttcctcaagccgggcgagaagacgtacacgcagcgctgccgcctcttcgtgggaaatctgcccaccgacatcacggaggaggacttcaagaggctcttcgaacgctatggcgagcccagcgaagtcttcatcaaccgggaccgtggcttcggcttcatccgcttggaatccagaaccctggctgaaattgcaaaagcagagctggacggcaccattctcaagagcagacctctacggattcgcttcgctacacatggagcagccttgactgtcaagaacctttctccagttgtttccaatgagctgctagagcaagcattttctcagtttggtccagtagagaaagctgttgtggttgtggatgatcgcggtagagctacaggaaaaggttttgtagagtttgcagcaaaacctcctgcacgaaaggctctggaaagatgtggtgatggggcattcttgctaacaacgacccctcgtccagtcattgtggaacccatggagcagtttgatgatgaagatggcttgccagagaagctgatgcagaaaactcaacaatatcataaggaaagagaacaaccaccacgttttgctcaacctgggacatttgaatttgagtatgcatctcgatggaaggctcttgatgaaatggaaaagcagcagcgtgagcaggttgatagaaacatcagagaagccaaagagaaactggaggcagaaatggaagcagctaggcatgaacaccaattaatgctaatgaggcaagatctaatgaggcgtcaagaagaactcagacgcttggaagaactcagaaaccaagagttgcaaaaacggaagcaaatacaactaagacatgaagaggagcatcggcggcgtgaggaagaaatgatccgacacagagaacaggaggaactgaggcgacagcaagagggctttaagccaaactacatggaaaatagagaacaggaaatgagaatgggtgatatgggtccccgtggagcaataaacatgggagatgcgtttagcccagcccctgctggtaaccaaggtcctcctccaatgatgggtatgaatatgaacaacagagcaactatacctggcccaccaatgggtcctggtcctgccatgggaccagaaggagccgcaaatatgggaactccaatgatgccagataatggagcagtgcacaatgacagatttcctcaaggaccaccatctcagatgggttcacctatggggagtagaacaggttctgaaacccctcaagcaccaatgagtggtgtaggtcctgtgagtggtggtcctggtggctttggtagaggaagtcaagggggcaactttgaaggccctaataagcgtcgtagatattaaacattcgttcattcctggctatctagaaaaaaaaaagtcagtggtatgcctttatacttttacctgttatctggaagaaatggttttattgttaatgtatgtagacttaaaagttttttttttttgtaaaacttgaggtttttgtatttttctttattcatgagctttgtagattagaatggtaatgatgctcatcattttgaatgttgaaatgtgtttgtgactttagctaaatataagtattccatagtactgtgaaatctatgtagttaatctcaataaagaaatcattttggataatttaaaaaaacaacacacaaaagaaaaaaaaacaacagcacaacaaacagaaaagagagcgggggcggcgcccccgaaagaagatccaccaccggaggggcaccccaacaacgacgaagccaacgccacagagatactttcgggcgaacaaaaggggaggggccccaacaaaaagaggacagcagaggcaattataaaaaacagacaagaacgcaggaggagccacgcgactatcaacaaaacaacaggaggcgaacaaggcgggagaacaacgcggccacacacacggcgaaaaactcaggcgagagaagagcacacaaaaccacgagagggga

SEQ ID NO: 364788 - DNA, 2186 bp, Homo sapiens
ggctttggcggaggggtgggacttgcaccggcgtctcttcttctaactgcagtttgtggcagcgccattttgaatgtgcagctgcagcgggcgtgagttgggggaggacgggttgccgactcgcctacctagcggtctcttgattgtcgatattttgttggcataggtttatgtagagacgtatacatatatatagacacactgtctttaaatctaggcctgtatccggtgtccgaggcgaactcagtaagatgatgttaagaggaaacctgaagcaagtgcgcattgagaaaaacccggcccgccttcgcgccctggagtccgcggtgggcgagagcgagccggcggccgcggcagccatggcgctcgctcttgccggggagccggcaccgcccgcgcccgcgcctccagaggaccacccggacgaggagatggggttcactatcgacatcaagagtttcctcaagccgggcgagaagacgtacacgcagcgctgccgcctcttcgtgggaaatctgcccaccgacatcacggaggaggacttcaagaggctcttcgaacgctatggcgagcccagcgaagtcttcatcaaccgggaccgtggcttcggcttcatccgcttggaatccagaaccctggctgaaattgcaaaagcagagctggacggcaccattctcaagagcagacctctacggattcgcttcgctacacatggagcagccttgactgtcaagaacctttctccagttgtttccaatgagctgctagagcaagcattttctcagtttggtccagtagagaaagctgttgtggttgtggatgatcgcggtagagctacaggaaaaggttttgtagagtttgcagcaaaacctcctgcacgaaaggctctggaaagatgtggtgatggggcattcttgctaacaacgacccctcgtccagtcattgtggaacccatggagcagtttgatgatgaagatggcttgccagagaagctgatgcagaaaactcaacaatatcataaggaaagagaacaaccaccacgttttgctcaacctgggacatttgaatttgagtatgcatctcgatggaaggctcttgatgaaatggaaaagcagcagcgtgagcaggttgatagaaacatcagagaagccaaagagaaactggaggcagaaatggaagcagctaggcatgaacaccaattaatgctaatgaggcaagatctaatgaggcgtcaagaagaactcagacgcttggaagaactcagaaaccaagagttgcaaaaacggaagcaaatacaactaagacatgaagaggagcatcggcggcgtgaggaagaaatgatccgacacagagaacaggaggaactgaggcgacagcaagagggctttaagccaaactacatggaaaatagagaacaggaaatgagaatgggtgatatgggtccccgtggagcaataaacatgggagatgcgtttagcccagcccctgctggtaaccaaggtcctcctccaatgatgggtatgaatatgaacaacagagcaactatacctggcccaccaatgggtcctggtcctgccatgggaccagaaggagccgcaaatatgggaactccaatgatgccagataatggagcagtgcacaatgacagatttcctcaaggaccaccatctcagatgggttcacctatggggagtagaacaggttctgaaacccctcaagcaccaatgagtggtgtaggtcctgtgagtggtggtcctggtggctttggtagaggaagtcaagggggcaactttgaaggccctaataagcgtcgttgttacacattctagaatgtgtaacaacgacaacatttttaaaacatatggtacagacatcacaaatatttcccaaatgatctattcccaaaaagcattacagggaagtaagttcttgtataaccatcccagaaagaccgtaccataattggaggtttctctttccaataagacactttaaatgtagtactgttttgttacatgacaatttcaaatcaagtcatctcaaaatcgtatctgacagccttggaactacccccgccttattacactattaataaatagaattacatgaaattaagctttaattctatcaaatctcctgacacacagtttcttgtccgccctgggtctaattaccttctctccgcg

SEQ ID NO: 364789 - DNA, 1672 bp, Homo sapiens
  misc_feature (1576)..(1576): n is a, c, g, or t
  misc_feature (1588)..(1588): n is a, c, g, or t
  misc_feature (1636)..(1636): n is a, c, g, or t
ggctttggcggaggggtgggacttgcaccggcgtctcttcttctaactgcagtttgtggcagcgccattttgaatgtgcagctgcagcgggcgtgagttgggggaggacgggttgccgactcgcctacctagcggtctcttgattgtcgatattttgttggcataggtttatgtagagacgtatacatatatatagacacactgtctttaaatctaggcctgtatccggtgtccgaggcgaactcagtaagatgatgttaagaggaaacctgaagcaagtgcgcattgagaaaaacccggcccgccttcgcgccctggagtccgcggtgggcgagagcgagccggcggccgcggcagccatggcgctcgctcttgccggggagccggcaccgcccgcgcccgcgcctccagaggaccacccggacgaggagatggggttcactatcgacatcaagagtttcctcaagccgggcgagaagacgtacacgcagcgctgccgcctcttcgtgggaaatctgcccaccgacatcacggaggaggacttcaagaggctcttcgaacgctatggcgagcccagcgaagtcttcatcaaccgggaccgtggcttcggcttcatccgcttggaatccagaaccctggctgaaattgcaaaagcagagctggacggcaccattctcaagagcagacctctacggattcgcttcgctacacatggagcagccttgactgtcaagaacctttctccagttgtttccaatgagctgctagagcaagcattttctcagtttggtccagtagagaaagctgttgtggttgtggatgatcgcggtagagctacaggaaaaggttttgtagagtttgcagcaaaacctcctgcacgaaaggctctggaaagatgtggtgatggggcattcttgctaacaacgacccctcgtccagtcattgtggaacccatggagcagtttgatgatgaagatggcttgccagagaagctgatgcagaaaactcaacaatatcataaggaaagagaacaaccaccacgttttgctcaacctgggacatttgaatttgagtatgcatctcgatggaaggctcttgatgaaatggaaaagcagcagcgtgagcaggttgatagaaacatcagagaagccaaagagaaactggaggcagaaatggaagcagctaggcatgaacaccaattaatgctaatgaggcaagatctaatgaggcgtcaagaagaactcagacgcttggaagaactcagaaaccaagagttgcaaaaacggaagcaaatacaactaagacatgaagaggagcatcggcggcgtgaggaagaaatgatccgacacagagaacaggaggaactgaggcgacagcaagagggctttaagccaaactacatggaaaatagagaacaggaaatgagaatgggtgatatgggtccccgtggagcaataaacatgggagatgcgtttagcccagcccctgctggtaaccaaggtcctcctccaatgatgggtatgaatatcctgaatatataaagaactcctacaggtcaacaacaacaacaacacanatcccacttcanaaatggctgaaggacttaaatagacatttatctgaagaagatacacanatgaccaaaaagtacatgaaaagatcctcaacatta

SEQ ID NO: 364790 - DNA, 412 bp, Homo sapiens
cggcacgaggattctgatgttttatttatagggtgcactcttcattgtttaaatgtctatttttagatgttgatagacctttgtaggtagtttcacccctgtctttggttctcttgcactgtttgccccatatcattctaaatttttacccaaatgggttttcaaggaccttgctcctcctgcctgtgggaagtggttacaggttagcaatagttgaaactcccctactgtttttcccagcttagcagggtggttggagaccagcccccctctttcccctttaaataccaaagtcctcaaaatcctctctggaaaaaagcacaggccacagaccctattgcagcttgagtctctttttcctggctgtgtcctccaccatggcaaaataaatctctaaatcgattgaaacctg

SEQ ID NO: 364791 - DNA, 453 bp, Homo sapiens
tgcgggcaggtggggtgtggcctggttgggcagtatagagctaccagctaccaatggtgttcagccctcagggtcgagcgtgggttgtctcagccccttgcaggcagggctggagttccttctggtgcgagttgggggacccagctcccccatccctctgcaaccccaggccccccaccaggtcccctctggttcagcctggtgccttccagcacccctggcccccagaaatccctggtccacagctcccttgacctgaggcctgaaattgacccactgccccctgaggcttggtccaagtccaagtatgccttcctctccagccagatgcctgcctgccactcagcatgtcagagcaggcagggcctctagattttaatggggaaactgaggcactgagggcagatgtgatgtccccagttgggaaaacattaaagacattctgggcttctc

SEQ ID NO: 364792 - DNA, 331 bp, Homo sapiens
atcagcctcctgagagctgggactacaggcgcctgccaccacatccggttaatttttgtatttttagtagagatggggttttgccatgttggccaggctggtcttgaactcctgagctcaggtgatccacctgccttggccttccaaagtgctgggattacaagcgtgagccactgtgcccagcccccctctttcccctttaaataccaaagtcctcaaaatcctctctggaaaaaagcacaggccacagaccctattgcagcttgagtctctttttcctggctgtgtcctccaccatggcaaaataaatctctaaatcgattgaaacctg

SEQ ID NO: 364793 - DNA, 3306 bp, Homo sapiens
  misc_feature (461)..(461): n is a, c, g, or t
  misc_feature (2879)..(2879): n is a, c, g, or t
  misc_feature (2884)..(2884): n is a, c, g, or t
  misc_feature (2954)..(2954): n is a, c, g, or t
  misc_feature (3058)..(3058): n is a, c, g, or t
  misc_feature (3060)..(3060): n is a, c, g, or t
  misc_feature (3109)..(3109): n is a, c, g, or t
  misc_feature (3113)..(3113): n is a, c, g, or t
  misc_feature (3119)..(3120): n is a, c, g, or t
  misc_feature (3124)..(3124): n is a, c, g, or t
  misc_feature (3128)..(3128): n is a, c, g, or t
  misc_feature (3132)..(3132): n is a, c, g, or t
  misc_feature (3146)..(3147): n is a, c, g, or t
  misc_feature (3157)..(3157): n is a, c, g, or t
  misc_feature (3169)..(3169): n is a, c, g, or t
  misc_feature (3185)..(3185): n is a, c, g, or t
  misc_feature (3193)..(3193): n is a, c, g, or t
  misc_feature (3198)..(3198): n is a, c, g, or t
  misc_feature (3203)..(3203): n is a, c, g, or t
  misc_feature (3212)..(3213): n is a, c, g, or t
  misc_feature (3224)..(3224): n is a, c, g, or t
  misc_feature (3226)..(3226): n is a, c, g, or t
  misc_feature (3244)..(3244): n is a, c, g, or t
  misc_feature (3247)..(3247): n is a, c, g, or t
  misc_feature (3250)..(3250): n is a, c, g, or t
  misc_feature (3253)..(3253): n is a, c, g, or t
  misc_feature (3262)..(3262): n is a, c, g, or t
  misc_feature (3265)..(3265): n is a, c, g, or t
  misc_feature (3277)..(3278): n is a, c, g, or t
  misc_feature (3284)..(3285): n is a, c, g, or t
  misc_feature (3293)..(3293): n is a, c, g, or t
  misc_feature (3302)..(3302): n is a, c, g, or t
atcagcctcctgagagctgggactacaggcgcctgccaccacatccggttaatttttgtatttttagtagagatggggttttgccatgttggccaggctggtcttgaactcctgagctcaggtgatctgcccacctcggcctcccaaagttctgggattacaggcgtgagccacggtgcccagcctggctcctgttttttgagacggggtttcaccctgtttcccaggttggagtatagtggtgccgtcatgacttactgcagccttgaactctttggctcaagcagtcctccccactcagcctctctagtagctggggctccaggcatgaatcaccgtgccagactaagtttttttaaaattttttgtagagagaatctctctctgttgcacaggctattcttgaactcctaggctcaagtgatcctcctgcttcagcctccgaaagtgctgggattacngttgtgagtcactgtgcctggctcttttaatcttgaaaactctgggaagagctcacttctgtttaggaggctgccttgggaactgcatctcctgggctggtgctctgtgctgcttggagtctgcagaccctatctgggtcgcttggcctcccgtgcacaagctgccagaatggaggccccattctcaatgtgggggctgcccaaagagcagggagcttcccacaggacagaggctgggcacctgcttggcctggttcttccttttcccagggctccaacacccaccccctcaggtcctcccaaaccctgcaggtccctggcctggtccgtccacacctacactcaggaatctctacacatctctgagttgctgcatctgtcttcaggcacagcccaccagcccccctgggtacccaaagacaccgcaaatatcagccattccagacaacgtcctcccgtgtccctatctcatggagtaatgcctctaattcagccacaccaagaccccacgctccacatcccctagaactctcatctcctgtggcccaacatggcccttcctttcagcagtgggatgtgggaaggatcaaggtcacccttgtccaaatcccatgcagacaacggtgttggagtcttgggcccaaagaccagctcctagaacctgcagggaagcaacggcacgttccatctctccccatgccactgaggaatcattggtggcaggattctcagcaggcatggccgtgggtgcacagaacagagaaaggatggcctggaccacacacatcactgtgtgcagatgctttcctagacactgcagccaaggacacagaggctcagagagaataacctccatctcctgggtcccagcgattctcctgcctcagcctcttcctatttcacaagtagggaaactgaagcccaggctgtttgctcagttgcaaaatgggaaggacaacagcacccgcctcacaggctaagaggctgtgtgtgaaaagcccgcagcacaggatctggcacgcgtggacgtgcgggatgggaggaggggatttcccagctcctcatctctgcagggactggccttggcctagggaacactagctgtccagggagggggagctttccctgagccccccgatgtgtggcaggcagaggagagcaagctacttctgggaggggagttgtggggaagggcaagttagtctttactgagggtggcagtgagctggcactttggtctcacctcggctgcagaaacccaccctgctcccgtcttatttcctggggatttcagctgtgtgcaggcacagatgcatctccgaagtgcctcatgcttgccttgatctcctctccttcctctggccagtcctgaacctcttggtgatccacggcggcacctctgtgtcctacatccttctctggccatctccttccctccttccagccctccctctaggaccctgaccccaaccatccttcatccccatggggacattcagtccactgactcatcaccctcccctgtccctctgtgagagaaggagcaggcagagaggatcttgcaagagccttcagcaactctcttccacccatcctgttgcttgctgctttttttttttttttttccaaaaaaatagagatggggtcttgctatgtggctggtctcaaactcctgggctcaagtgatcctcctgcctcggcctcccaaagtgctggattacaggcgtgagccaccacacccggctccgttccctttctaagcagggtgctccttttcttgccatttcccccatcctccttcctctcccacagctcacttccctctctactgaatctgctgaagatcatgcagctgctgttcctgcctctaaaaccctctcttggctgggtgtggtgggtgacatatgtaatcccagcactttgggaggctgaggcaggagaatcacttgaacccgggaggcggaggttgcagtgagccgagattgcgccactgcactccagcctaggtgatagagcaagactctgtcccctccctccaccaaaaaaataaagccctctctgcatccattccactctccactcttgctcattctctcctgccctctaaaaggtgatctgtctttggcagattcaatcacttgcctttctcattctctcctgagcccactattccactctggtccccaccacttcccccaaaactgctttgaaccatcgcactgcaacctgttgcttagcccctccatctagtctcaggcgttaggactgactgcccagcagaggctggtgcaaccaatcacctcctttagtaagtttctccctgggcttcacctcttcacctgtgggctttccacctgtctctctcttttttttttaagacagtctcctctgttgccaggctggaatgccgtggcgcantctcngctcactgcaacctctacctcctgggttcaagcgattctcctgcctcaggctcccaagtagctgggattncaggtgcccgccaccacaccgggctaatttttgtatttttagtagagtcggggtttcaccatgttgcccaggctggtctcgaactcctgaccttacgtgatccncncgcctgtaatcccagcactttgggaggttgaggcgggctgatcacctgnccancatggnnaaancccntctntactaaaaatacannaattagccgngtgtggtggcgngcacctgtaatcccanctactcangaggntgagncaggagaanngcttgaacccngnaggcagaggttgcagtgngcnganatngcgccattncantccagcctgggnnacgagnnaaactccntctccaaanaaac

SEQ ID NO: 364794 - DNA, 1541 bp, Homo sapiens
  misc_feature (461)..(461): n is a, c, g, or t
atcagcctcctgagagctgggactacaggcgcctgccaccacatccggttaatttttgtatttttagtagagatggggttttgccatgttggccaggctggtcttgaactcctgagctcaggtgatctgcccacctcggcctcccaaagttctgggattacaggcgtgagccacggtgcccagcctggctcctgttttttgagacggggtttcaccctgtttcccaggttggagtatagtggtgccgtcatgacttactgcagccttgaactctttggctcaagcagtcctccccactcagcctctctagtagctggggctccaggcatgaatcaccgtgccagactaagtttttttaaaattttttgtagagagaatctctctctgttgcacaggctattcttgaactcctaggctcaagtgatcctcctgcttcagcctccgaaagtgctgggattacngttgtgagtcactgtgcctggctcttttaatcttgaaaactctgggaagagctcacttctgtttaggaggctgccttgggaactgcatctcctgggctggtgctctgtgctgcttggagtctgcagaccctatctgggtcgcttggcctcccgtgcacaagctgccagaatggaggccccattctcaatgtgggggctgcccaaagagcagggagcttcccacaggacagaggctgggcacctgcttggcctggttcttccttttcccagggctccaacacccaccccctcaggtcctcccaaaccctgcaggtccctggcctggtccgtccacacctacactcaggaatctctacacatctctgagttgctgcatctgtcttcaggcacagcccaccagcccccctgggtacccaaagacaccgcaaatatcagccattccagacaacgtcctcccgtgtccctatctcatggagtaatgcctctaattcagccacaccaagaccccacgctccacatcccctagaactctcatctcctgtggcccaacatggcccttcctttcagcagtgggatgtgggaaggatcaaggtcacccttgtccaaatcccatgcagacaacggtgttggagtcttgggcccaaagaccagctcctagaacctgcagggaagcaacggcacgttccatctctccccatgccactgaggaatcattggtggcaggattctcagcaggcatggccgtgggtgcacagaacagagaaaggatggcctggaccacacacatcactgtgtgcagatgctttcctagacactgcagccaaggacacagaggctcagagaggtaaagaaacttacccaaggtcacacagccactaagcaccaagagtactctgtgtcgaccccaaagccctggtctttccactctaccatgagccctgggtttcctggtgtctcagattcccctacagtttttctttcttttctttccttccttctttctttctttctttctttctttctttctttctttctttctttctttctttctttctttcatctttctttctttttcttttc

SEQ ID NO: 364795 - DNA, 357 bp, Homo sapiens
ctccgcctactgagttcgagtgattcttgtgcctcagcctccagagtagccaggattacaggcacccgccaccacgcgtgttgaattttttgtatttttagtagagatggggtttcattatgctgcccattatgctcctgacctcaggtgatccacctgccttggccttccaaagtgctgggattacaagcgtgagccactgtgcccagcccccctctttcccctttaaataccaaagtcctcaaaatcctctctggaaaaaagcacaggccacagaccctattgcagcttgagtctctttttcctggctgtgtcctccaccatggcaaaataaatctctaaatcgattgaaacctg

SEQ ID NO: 364796 - DNA, 839 bp, Homo sapiens
  misc_feature (412)..(412): n is a, c, g, or t
  misc_feature (417)..(417): n is a, c, g, or t
  misc_feature (487)..(487): n is a, c, g, or t
  misc_feature (591)..(591): n is a, c, g, or t
  misc_feature (593)..(593): n is a, c, g, or t
  misc_feature (642)..(642): n is a, c, g, or t
  misc_feature (646)..(646): n is a, c, g, or t
  misc_feature (652)..(653): n is a, c, g, or t
  misc_feature (657)..(657): n is a, c, g, or t
  misc_feature (661)..(661): n is a, c, g, or t
  misc_feature (665)..(665): n is a, c, g, or t
  misc_feature (679)..(680): n is a, c, g, or t
  misc_feature (690)..(690): n is a, c, g, or t
  misc_feature (702)..(702): n is a, c, g, or t
  misc_feature (718)..(718): n is a, c, g, or t
  misc_feature (726)..(726): n is a, c, g, or t
  misc_feature (731)..(731): n is a, c, g, or t
  misc_feature (736)..(736): n is a, c, g, or t
  misc_feature (745)..(746): n is a, c, g, or t
  misc_feature (757)..(757): n is a, c, g, or t
  misc_feature (759)..(759): n is a, c, g, or t
  misc_feature (777)..(777): n is a, c, g, or t
  misc_feature (780)..(780): n is a, c, g, or t
  misc_feature (783)..(783): n is a, c, g, or t
  misc_feature (786)..(786): n is a, c, g, or t
  misc_feature (795)..(795): n is a, c, g, or t
  misc_feature (798)..(798): n is a, c, g, or t
  misc_feature (810)..(811): n is a, c, g, or t
  misc_feature (817)..(818): n is a, c, g, or t
  misc_feature (826)..(826): n is a, c, g, or t
  misc_feature (835)..(835): n is a, c, g, or t
tccttgtaatccaagcagtcgtccttaatccagcagtcgaccctccaacctcttcatcctcacccactctccactcttgctcattctctcctgccctctaaaaggtgatctgtctttggcagattcaatcacttgcctttctcattctctcctgagcccactattccactctggtccccaccacttcccccaaaactgctttgaaccatcgcactgcaacctgttgcttagcccctccatctagtctcaggcgttaggactgactgcccagcagaggctggtgcaaccaatcacctcctttagtaagtttctccctgggcttcacctcttcacctgtgggctttccacctgtctctctcttttttttttaagacagtctcctctgttgccaggctggaatgccgtggcgcantctcngctcactgcaacctctacctcctgggttcaagcgattctcctgcctcaggctcccaagtagctgggattncaggtgcccgccaccacaccgggctaatttttgtatttttagtagagtcggggtttcaccatgttgcccaggctggtctcgaactcctgaccttacgtgatccncncgcctgtaatcccagcactttgggaggttgaggcgggctgatcacctgnccancatggnnaaancccntctntactaaaaatacannaattagccgngtgtggtggcgngcacctgtaatcccanctactcangaggntgagncaggagaanngcttgaacccngnaggcagaggttgcagtgngcnganatngcgccattncantccagcctgggnnacgagnnaaactccntctccaaanaaac

SEQ ID NO: 364797 - DNA, 619 bp, Homo sapiens
ttaatggggaaactgaggcactgagggcagatgtgatgtccccagttgggaaaacattaaagacattctgggcttctctctcttttttttagagacaagatctcactctgtcatgcacgctggaatcatggctcattgcagcctccaactcctaggctcaagggatccttccacctcagcctcccgagtagctgggagtacaggtgttcgtccccaccatgtctggctaatttaaaaaaatgtctttgcaggatgggatcttgctatgtttcccaggctggtctcaaactcctgggctcaagtgattttcccatcttggcctcccaaaatactgggattatacgtataagccaccacgtctggcctgagtcatctcttttgacccagaacaaaaccagtccaggagtggctgtactccccaggagtgtacactggggaggcccacagctccggggtgcagtggggctcttgcaatttaatgactgattcatcttcaaaaaagcacaatctcagccaggcgtggtggctcatgcctgtaatcccagcactttgggaggttgaggcgggctgatcacctgaggtcagaagtttgagatcagcctggccaacagggtgaaac

SEQ ID NO: 364798 - DNA, 4960 bp, Homo sapiens
  misc_feature (461)..(461): n is a, c, g, or t
  misc_feature (2100)..(2100): n is a, c, g, or t
  misc_feature (2167)..(2167): n is a, c, g, or t
  misc_feature (3039)..(3039): n is a, c, g, or t
  misc_feature (4533)..(4533): n is a, c, g, or t
  misc_feature (4538)..(4538): n is a, c, g, or t
  misc_feature (4608)..(4608): n is a, c, g, or t
  misc_feature (4712)..(4712): n is a, c, g, or t
  misc_feature (4714)..(4714): n is a, c, g, or t
  misc_feature (4763)..(4763): n is a, c, g, or t
  misc_feature (4767)..(4767): n is a, c, g, or t
  misc_feature (4773)..(4774): n is a, c, g, or t
  misc_feature (4778)..(4778): n is a, c, g, or t
  misc_feature (4782)..(4782): n is a, c, g, or t
  misc_feature (4786)..(4786): n is a, c, g, or t
  misc_feature (4800)..(4801): n is a, c, g, or t
  misc_feature (4811)..(4811): n is a, c, g, or t
  misc_feature (4823)..(4823): n is a, c, g, or t
  misc_feature (4839)..(4839): n is a, c, g, or t
  misc_feature (4847)..(4847): n is a, c, g, or t
  misc_feature (4852)..(4852): n is a, c, g, or t
  misc_feature (4857)..(4857): n is a, c, g, or t
  misc_feature (4866)..(4867): n is a, c, g, or t
  misc_feature (4878)..(4878): n is a, c, g, or t
  misc_feature (4880)..(4880): n is a, c, g, or t
  misc_feature (4898)..(4898): n is a, c, g, or t
  misc_feature (4901)..(4901): n is a, c, g, or t
  misc_feature (4904)..(4904): n is a, c, g, or t
  misc_feature (4907)..(4907): n is a, c, g, or t
  misc_feature (4916)..(4916): n is a, c, g, or t
  misc_feature (4919)..(4919): n is a, c, g, or t
  misc_feature (4931)..(4932): n is a, c, g, or t
  misc_feature (4938)..(4939): n is a, c, g, or t
  misc_feature (4947)..(4947): n is a, c, g, or t
  misc_feature (4956)..(4956): n is a, c, g, or t
atcagcctcctgagagctgggactacaggcgcctgccaccacatccggttaatttttgtatttttagtagagatggggttttgccatgttggccaggctggtcttgaactcctgagctcaggtgatctgcccacctcggcctcccaaagttctgggattacaggcgtgagccacggtgcccagcctggctcctgttttttgagacggggtttcaccctgtttcccaggttggagtatagtggtgccgtcatgacttactgcagccttgaactctttggctcaagcagtcctccccactcagcctctctagtagctggggctccaggcatgaatcaccgtgccagactaagtttttttaaaattttttgtagagagaatctctctctgttgcacaggctattcttgaactcctaggctcaagtgatcctcctgcttcagcctccgaaagtgctgggattacngttgtgagtcactgtgcctggctcttttaatcttgaaaactctgggaagagctcacttctgtttaggaggctgccttgggaactgcatctcctgggctggtgctctgtgctgcttggagtctgcagaccctatctgggtcgcttggcctcccgtgcacaagctgccagaatggaggccccattctcaatgtgggggctgcccaaagagcagggagcttcccacaggacagaggctgggcacctgcttggcctggttcttccttttcccagggctccaacacccaccccctcaggtcctcccaaaccctgcaggtccctggcctggtccgtccacacctacactcaggaatctctacacatctctgagttgctgcatctgtcttcaggcacagcccaccagcccccctgggtacccaaagacaccgcaaatatcagccattccagacaacgtcctcccgtgtccctatctcatggagtaatgcctctaattcagccacaccaagaccccacgctccacatcccctagaactctcatctcctgtggcccaacatggcccttcctttcagcagtgggatgtgggaaggatcaaggtcacccttgtccaaatcccatgcagacaacggtgttggagtcttgggcccaaagaccagctcctagaacctgcagggaagcaacggcacgttccatctctccccatgccactgaggaatcattggtggcaggattctcagcaggcatggccgtgggtgcacagaacagagaaaggatggcctggaccacacacatcactgtgtgcagatgctttcctagacactgcagccaaggacacagaggctcagagagaataacctccatctcctgggtcccagcgattctcctgcctcagcctcttcctatttcacaagtagggaaactgaagcccaggtaggcaagcctgacttgctggagtcacacaggaagttggcagctctgctccatccctgggatctggagcccctgctctggggaaggagaggtggggcgctgccttcccagagtcccctcaagctggcagggacggctgtacccccagggtcagaggagaactaaaaggagcggaagctggcctgggtccagggagagacctcgtgtttgcccaaaagggagctggagaggggcagctgggcccatatgcagggaggagctgcagggagctggtggcggggcagcaaagagaagtggatttggtgggtagaggggcccctccttggttctagtcctccccgcagccccttgcaaacaggcggggctctcctgtccttcttctctcctgcagcaagccctacatgaagaggcctctttggtgagtggcagctcaacctctgctaaatgcctccagtgatggggagttcactaccttccaaagtttttaaaagatgttaaccactgctattcaagaacaattctagaattttttttttttttgaaagacaaggtctcattctgtctcgcaggccagagtgcagtggtgtgatcatagctcactgcagctttgacttcctgggctcaagcaatcctccctcctcagcctcctgagtacctgagactacagatgtgcaccaccacactggctcattgttttcattttttgtagagacnggatctcactatgttgcccaggctggtctcctggcttcaagcaatcctcctgccttggcctcccaangtgctgggattacaggcgtgagccactgcatctggccttttttttttggagatagagtctcgctctgtcgcccagggtggagtgcagtggcgtgatctcggctcattgcaacctccgccttccgggttcacaccattctcctgcctcagcctcccgagtagctgggattacaggcatctgccaaccatgcctggctaatttttgtattttttggtggagacagggtctcaccatgttggctaggctggtttcgaactcccgacctcaggtgatctacccgcctcagcctcccaaagtcctgggattacaggctgagccaccgcgaccggccctgctgttgcttctgaggtttgaaaaccgctgcctcaatgctcctgattcagctcttcttacccaaaggttcccccacctcatctactctgttcctgcacagtcgcccttttctctgatgccccgggcaggtttctctctgccagctccacgcttctggagtcccccatccgtcttggggcccagctgcccactgtctgggttcagaccttctcaacactccctggcttctctgccctagttttgccttctccaatccactcttggtgggtggaagtacggttaccatggtaacttgaagacaacgcaaatctgattgtatcattacaatgactgggaaaacctccagtgccacaaaataaagctcaagtcactagctttgcagtccaggccctttaccattccggcagcatttctgggggctattctccttccccccactgcacaaccccgcctggccaccccaggctcaggctgcagaacagcgtagaccagggagtggctttggggtcatgctaactacctggtttttgtctctttcnggctgtttgctcagttgcaaaatgggaaggacaacagcacccgcctcacaggctaagaggctgtgtgtgaaaagcccgcagcacaggatctggcacgcgtggacgtgcgggatgggaggaggggatttcccagctcctcatctctgcagggactggccttggcctagggaacactagctgtccagggagggggagctttccctgagccccccgatgtgtggcaggcagaggagagcaagctacttctgggaggggagttgtggggaagggcaagttagtctttactgagggtggcagtgagctggcactttggtctcacctcggctgcagaaacccaccctgctcccgtcttatttcctggggatttcagctgtgtgcaggcacagatgcatctccgaagtgcctcatgcttgccttgatctcctctccttcctctggccagtcctgaacctcttggtgatccacggcggcacctctgtgtcctacatccttctctggccatctccttccctccttccagccctccctctaggaccctgaccccaaccatccttcatccccatggggacattcagtccactgactcatcaccctcccctgtccctctgtgagagaaggagcaggcagagaggatcttgcaagagccttcagcaactctcttccacccatcctgttgcttgctgctttttttttttttttttccaaaaaaatagagatggggtcttgctatgtggctggtctcaaactcctgggctcaagtgatcctcctgcctcggcctcccaaagtgctggattacaggcgtgagccaccacacccggctccgttccctttctaagcagggtgctccttttcttgccatttcccccatcctccttcctctcccacagctcacttccctctctactgaatctgctgaagatcatgcagctgctgttcctgcctctaaaaccctctcttggctgggtgtggtgggtgacatatgtaatcccagcactttgggaggctgaggcaggagaatcacttgaacccgggaggcggaggttgcagtgagccgagattgcgccactgcactccagcctaggtgatagagcaagactctgtcccctccctccaccaaaaaaataaagccctctctgcatccattccactctccactcttgctcattctctcctgccctctaaaaggtgatctgtctttggcagattcaatcacttgcctttctcattctctcctgagcccactattccactctggtccccaccacttcccccaaaactgctttgaaccatcgcactgcaacctgttgcttagcccctccatctagtctcaggcgttaggactgactgcccagcagaggctggtgcaaccaatcacctcctttagtaagtttctccctgggcttcacctcttcacctgtgggctttccacctgtctctctcttttttttttaagacagtctcctctgttgccaggctggaatgccgtggcgcantctcngctcactgcaacctctacctcctgggttcaagcgattctcctgcctcaggctcccaagtagctgggattncaggtgcccgccaccacaccgggctaatttttgtatttttagtagagtcggggtttcaccatgttgcccaggctggtctcgaactcctgaccttacgtgatccncncgcctgtaatcccagcactttgggaggttgaggcgggctgatcacctgnccancatggnnaaancccntctntactaaaaatacannaattagccgngtgtggtggcgngcacctgtaatcccanctactcangaggntgagncaggagaanngcttgaacccngnaggcagaggttgcagtgngcnganatngcgccattncantccagcctgggnnacgagnnaaactccntctccaaanaaac

SEQ ID NO: 364799 - DNA, 390 bp, Homo sapiens
atatatagataacatgtaactggaaaacatggtttgtgatgtgtctccttttgtagttttatgtaatgagaaaaggcaggcaaggtaaagtcaattttggaagaagctttcatttcaggtatctgaacacttaagagtatttttattttagatcacctttcccattcttggggcatatcaccccaagggcatcataatgctttcttgatctgtggcatgattgccacttgtgtaggcatttactgtaaatgcataagaaacttccatttagattaggtattcacaaggaatgtttaacagtgagtgtgcccagggattgggattagactgttcagggaacttctttatcctttgagattttattatttaagaaaattaatggcaaaaaaa

SEQ ID NO: 364800 - DNA, 526 bp, Homo sapiens
tcgtcctctctgcatctagctcttcttcctctggctggccaccccaggttctttgctgtggactcataaaaagtgagctttccttagacctctctgtgcatcccccactttgtaggttcactttggtgtatatgagcctggcttctgagttccttgcatacaaactctgactggtccttctgctccagggcttcagaaggagtgattggtgtccccaccaggatcagtaccaccgccttcacttccccagcccctcacacactggcaaagtctaattgctgtaagcattcctcctgtcacgtcactggtaatggttctgcatccctgactggtacagcatccagcctcagttagaaaaaataaccacctaaaaacccctcagaaaatggaaggatataatgaaacaagaactggaattaagtggaaaaaacttttttacattagacaggatcaagaaagccaaaagtttgttctttgaaaagatgaatagagttgacaaacctctgccaagattgatcaaggaaaa

SEQ ID NO: 364801 - DNA, 365 bp, Homo sapiens
ctctgccattgtggtgaatactgacagggagtcaggcagtccagcacctactaggactctgccacagctgctactatgagactagatccactgtcactgcactatgaaacacttggctgacaccacccattggagtgcagtgaccagcagtctgggagcacctccttggccccttccccagtgaagtggattcctatcattaagaaaccagagaacaaagttgggacccagtacaaatcttccagaattaaaacatatagtctaggagttgggggctgtgcattggccccctaaaatcttccagaaataagtccagctggctgaatcaaccttatacgagaatcaaaccctcaaattcatctaat

SEQ ID NO: 364802 - DNA, 1410 bp, Homo sapiens
tgatgatgattgtcttaacatgtatttctaatcactttaaaacctcactgtgatagatttgcttgttctttgtacttttgtggtacaatctaatagatttttttctttgaggtttactctatttttagatattaaaagtattttaaactgaaatgatgactcatacgtggatataagaaaataaaaagcagctctgtttcctacattttttactgctttttactctcccaatttttatgtcttttcatcaattctgcaatagacagagattaatagtagcacttgcagttttcgctgagacatatccagttcactgaagacccactttagtgttttgggaggaaaaaacaagtcttttctgaaataatgagttcaagattgatttgaggtttaggaagacttttagcaaactcaatcgctcaggagctgattctcagcttatcagtaatcacatcctttcctattcccttctgcagacaatatctgactattttcaggcttgttagaagggagagtaagaggaagtttagttctagatcatctatttttttttccctgtaagtaagttgctttgatataagatttggtggtggtaatcagttgcttaaatgatatcctaaaataatctccagctcatttaataactgccttcactaaatttttattaatggttttgttttagttttaagctcttttaagtctttttcaggccttctttaactccgtcctgacaagtgtggttttgaatactgatttctgtctttgacttgacttttagtatatttaagtggtgtgagttttggataagtttccttttaaaatgatcccacaaaatatagagagaacaattctcctgcctcagcctcctaaggagctattttttgtattttagtagagacagggtttcaccgtgttggtcaggctggtctcgaactcctgacctcaagtgatccacccgccttggcctcccaaagtgctgggattacaggtgtgagccaccgtgcccagctagattctttactttttaataaagttcaaaatagcttttaataaggttgtcaaatttgaccaaaatttcatagaagtccaaaatattatgcctctttctgtagatcaaatgaaatatggcccaatttacaagggtatacaccttcatggtagatgaatatagattttaaactagttttaaaaggaatatgaatgatttaattgtagtttctgctgccaaaaagtctccataattattttttaataacttataactaccttgatctttacctgtacacacacacacacacacacacatgcacagagtaatttcacttagaatcctggtcaaaaattttcttccacttaaattttttttaagactctcacaaatatacatcatggttttctttagtcggcaaa

SEQ ID NO: 364803 - DNA, 810 bp, Homo sapiens
aaaagatttcaagctttcatacatttattccttcattaaattctttctcagtaccagttatgtgttaggtacaaattatgctgatattaatctcttgaatataaatatatgtgccaaaatatgctaatataaattctttacttgttgttgttgttgttgttgagacggagtcttgccctattgcccaggctggagtgcagtggcgcgatttcagctcactgcaacctctgcctcccaggttcaagcaattctcctgcctcagcctcctaaggagctattttttgtattttagtagagacagggtttcaccgtgttggtcaggctggtctcgaactcctgacctcaagtgatccacccgccttggcctcccaaagtgctgggattacaggtgtgagccaccgtgcccagctagattctttactttttaataaagttcaaaatagcttttaataaggttgtcaaatttgaccaaaatttcatagaagtccaaaatattatgcctctttctgtagatcaaatgaaatatggcccaatttacaagggtatacaccttcatggtagatgaatatagattttaaactagttttaaaaggaatatgaatgatttaattgtagtttctgctgccaaaaagtctccataattattttttaataacttataactaccttgatctttacctgtacacacacacacacacacacacatgcacagagtaatttcacttagaatcctggtcaaaaattttcttccacttaaattttttttaagactctcacaaatatacatcatggttttctttagtcggcaaa

SEQ ID NO: 364804 - DNA, 417 bp, Homo sapiens
aacagatgattggagagattgaagagtgaagtccctgctttaaagtgtactcctgtggacacagtaatacatatacttaaaatggttcatgttaagagtaggtatatttctatctaaatactctgtagcttttgtgattcaggaaaacgagtggagcctcacaggcacaagaatctagtaaattctaggtttcttgtgtggaaatcagtgtgcaaaatcttaacggagtgaattcttgattgttgatatcacatttgttagtctgtatgtatctgtgtcattgatctccttaagaagagactcgtagatattgactgggagacctaagctgaatgctaaaatctgctccatggatataagctgatgcagtcatcatttctcattaaaatgcatcacagctagatatgcagcaaaaaa

SEQ ID NO: 364805 - DNA, 139 bp, Homo sapiens
gttgccagtagtgccaaagacacgcatggaggtgtcaggggctccaccagccttttcttctctacatccttgcccctccccttccctcctttctttctgtttcccttttctttcccttacatcctcccctctccttgac

SEQ ID NO: 364806 - DNA, 3850 bp, Homo sapiens
  misc_feature (3846)..(3849): n is a, c, g, or t
gaccagagagaagcgtggggaagagtgggctgagggactccactagaggctgtccatctggattccctgcctccctaggagcccaacagagcaaagcaagtgggcacaaggagtatggttctaacgtgattggggtcatgaagacgttgctgttggacttggctttgtggtcactgctcttccagcccgggtggctgtcctttagttcccaggtgagtcagaactgccacaatggcagctatgaaatcagcgtcctgatgatgggcaactcagcctttgcagagcccctgaaaaacttggaagatgcggtgaatgaggggctggaaatagtgagaggacgtctgcaaaatgctggcctaaatgtgactgtgaacgctactttcatgtattcggatggtctgattcataactcaggcgactgccggagtagcacctgtgaaggcctcgacctactcaggaaaatttcaaatgcacaacggatgggctgtgtcctcatagggccctcatgtacatactccaccttccagatgtaccttgacacagaattgagctaccccatgatctcagctggaagttttggattgtcatgtgactataaagaaaccttaaccaggctgatgtctccagctagaaagttgatgtacttcttggttaacttttggaaaaccaacgatctgcccttcaaaacttattcctggagcacttcgtatgtttacaagaatggtacagaaactgaggactgtttctggtaccttaatgctctggaggctagcgtttcctatttctcccacgaactcggctttaaggtggtgttaagacaagataaggagtttcaggatatcttaatggaccacaacaggaaaagcaatgtgattattatgtgtggtggtccagagttcctctacaagctgaagggtgaccgagcagtggctgaagacattgtcattattctagtggatcttttcaatgaccagtacttggaggacaatgtcacagcccctgactatatgaaaaatgtccttgttctgacgctgtctcctgggaattcccttctaaatagctctttctccaggaatctatcaccaacaaaacgagactttgctcttgcctatttgaatggaatcctgctctttggacatatgctgaagatatttcttgaaaatggagaaaatattaccacccccaaatttgctcatgctttcaggaatctcacttttgaagggtatgacggtccagtgaccttggatgactggggggatgttgacagtaccatggtgcttctgtatacctctgtggacaccaagaaatacaaggttcttttgacctatgatacccacgtaaataagacctatcctgtggatatgagccccacattcacttggaagaactctaaacttcctaatgatattacaggccggggccctcagatcctgatgattgcagtcttcaccctcactggagctgtggtgctgctcctgctcgtcgctctcctgatgctcagaaaatatagaaaagattatgaacttcgtcagaaaaaatggtcccacattcctcctgaaaatatctttcctctggagaccaatgagaccaatcatgttagcctcaagatcgatgatgacaaaagacgagatacaatccagagactacgacagtgcaaatacgacaaaaagcgagtgattctcaaagatctcaagcacaatgatggtaatttcactgaaaaacagaagatagaattgaacaagttgcttcagattgactattacaacctgaccaagttctacggcacagtgaaacttgataccatgatcttcggggtgatagaatactgtgagagaggatccctccgggaagttttaaatgacacaatttcctaccctgatggcacattcatggattgggagtttaagatctctgtcttgtatgacattgctaagggaatgtcatatctgcactccagtaagacagaagtccatggtcgtctgaaatctaccaactgcgtagtggacagtagaatggtggtgaagatcactgattttggctgcaattccattttacctccaaaaaaggacctgtggacagctccagagcacctccgccaagccaacatctctcagaaaggagatgtgtacagctatgggatcatcgcacaggagatcattctgcggaaagaaaccttctacactttgagctgtcgggaccggaatgagaagattttcagagtggaaaattccaatggaatgaaacccttccgcccagatttattcttggaaacagcagaggaaaaagagctagaagtgtacctacttgtaaaaaactgttgggaggaagatccagaaaagagaccagatttcaaaaaaattgagactacacttgccaagatatttggactttttcatgaccaaaaaaatgaaagctatatggataccttgatccgacgtctacagctatattctcgaaacctggaacatctggtagaggaaaggacacagctgtacaaggcagagagggacagggctgacagacttaactttatgttgcttccaaggctagtggtaaagtctctgaaggagaaaggctttgtggagccggaactatatgaggaagttacaatctacttcagtgacattgtaggtttcactactatctgcaaatacagcacccccatggaagtggtggacatgcttaatgacatctataagagttttgaccacattgttgatcatcatgatgtctacaaggtggaaaccatcggtgatgcgtacatggtggctagtggtttgcctaagagaaatggcaatcggcatgcaatagacattgccaagatggccttggaaatcctcagcttcatggggacctttgagctggagcatcttcctggcctcccaatatggattcgcattggagttcactctggtccctgtgctgctggagttgtgggaatcaagatgcctcgttattgtctatttggagatacggtcaacacagcctctaggatggaatccactggcctccctttgagaattcacgtgagtggctccaccatagccatcctgaagagaactgagtgccagttcctttatgaagtgagaggagaaacatacttaaagggaagaggaaatgagactacctactggctgactgggatgaaggaccagaaattcaacctgccaacccctcctactgtggagaatcaacagcgtttgcaagcagaattttcagacatgattgccaactctttacagaaaagacaggcagcagggataagaagccaaaaacccagacgggtagccagctataaaaaaggcactctggaatacttgcagctgaataccacagacaaggagagcacctatttttaaacctaaatgaggtataaggactcacacaaattaaaatacagctgcactgaggcagcgacctcaagtgtcctgaaagcttacattttcctgagacctcaatgaagcagaaatgtacttaggcttggctgccctgtctggaacatggactttcttgcatgaatcagatgtgtgttctcagtgaaataactaccttccactctggaaccttattccagcagttgttccagggagcttctacctggaaaagaaaagaaatgaatagactatctagaacttgagaagattttattcttatttcatttattttttgtttgtttatttttatcgtttttgtttactggctttccttctgtattcataagattttttaaattgtcataattatattttaaatacccatcttcattaaagtatatttaactcataatttttgcagaaaatatgctatatattaggcaagaataaaagctaaaggtttcccaaaaannnna

SEQ ID NO: 364807 - DNA, 450 bp, Homo sapiens
aattaatttgaagtattaaatttagacaaaatggcatactcttaaatcacctccaaaaaatgggcagtgtttaggctgactgcaaatgaagcagagaagacactggggttataataaatagaaaatcatactacaagaatgtatacaattacatattacaaagtacaatattctgttaaatagtatgttgacatttgctaaaggattaattttcaggaaactaagggtgttcctcaaattacataaaaccattcagattatttatttgaacatttctagaactgtcaccacatctggacaatttatataattatgaagtacttttaaatggctaaattcctttatagctattttatcacccattaactggactataaaaaccctgaagaaatcagcatagaactgatccaactggccccagaaaaagtgtaaagggctatgctcatactg

SEQ ID NO: 364808 - DNA, 325 bp, Homo sapiens
aattatctgttcatcatatttgtccattgttttattggatgttcatgttttcttaataatatataagagctctttatctattactacctacagactttttcatgaccaaaaaaatgaaagctatatggataccttgatccgacgtctacagctatattctcgaaacctggaacatctggtagaggaaaggacacagctgtacaaggcagagagggacagggctgacagacttaactttatgttgcttccaaggtaaggcaagccttgctgatgtggaggctgaaatccctctagcattgcttttcattgtatctatataggattt

SEQ ID NO: 364809 - DNA, 185 bp, Homo sapiens
gaaacaaaacacattttattggcatattaatttttactttggcaccccattctgcctaatttgctttgtaaacaaacacgttcttctagttgcttcagattgactattacaacctgaccaagttctacggcacagtgaaacttgataccatgatcttcggggtgatagaatactgtgagagagga

SEQ ID NO: 364810 - DNA, 536 bp, Homo sapiens
tggtctcaaactcctgaactcaggtgctccgccctcctcagcctcccaaaatgctgggtttacagacatgatccacctcacccggcctccaaggaagagttttctaaaagtctcctttaataacatcccttcaattcccctgatatccctttaactttccagtaaccctgctgatcccaacaaccttttgttctaggctcaagacaagattcttttttgaaggacccgttttaatattttccttttttatttagacaaaacgagactttgctcttgcctatttgaatggaatcctgctctttggacatatgctgaagatatttcttgaaaatggagaaaatattaccacccccaaatttgctcatgctttcaggaatctcacttttgaaggtactggtctactaagagcaaataaccccaaggtgaagaaatgtaggctttctgagtggatttggggcaacaaagaaggtttagcaatagatgattccacagctaaatccctttgaactcaactggatgcaaacatcattacataa

SEQ ID NO: 364811 - DNA, 566 bp, Homo sapiens
ttacataaaaccattcagattatttatttgaacatttctagaactgtcaccacatctggacaatttatataattatgaagtacttttaaatggctaaattcctttatagctattttatcacccattaactggactataaaaaccctgaagaaatcagcatagaactgatccaactggccccagaaaaagtgtaaagggctatgctcatactgtgttcccaaatcactttttgtgtttgacatgtgattaactgcttctgtttactttctatacttttcaaaggggcagaggcactcatgagaaactgtttccacaggtggaaaccatcggtgatgcgtacatggtggctagtggtttgcctaagagaaatggcaatcggcatgcaatagacattgccaagatggccttggaaatcctcagcttcatggggacctttgagctggagcatcttcctggcctcccaatatggattcgcattggagttcactctggtatggagttgagcatcttagcaaattgggaaccatatgtactgctgtgcaccaactaaatcagaaaggataaaa

SEQ ID NO: 364812 - DNA, 3810 bp, Homo sapiens
  misc_feature (3806)..(3809): n is a, c, g, or t
gaccagagagaagcgtggggaagagtgggctgagggactccactagaggctgtccatctggattccctgcctccctaggagcccaacagagcaaagcaagtgggcacaaggagtatggttctaacgtgattggggtcatgaagacgttgctgttggacttggctttgtggtcactgctcttccagcccgggtggctgtcctttagttcccaggtgagtcagaactgccacaatggcagctatgaaatcagcgtcctgatgatgggcaactcagcctttgcagagcccctgaaaaacttggaagatgcggtgaatgaggggctggaaatagtgagaggacgtctgcaaaatgctggcctaaatgtgactgtgaacgctactttcatgtattcggatggtctgattcataactcaggcgactgccggagtagcacctgtgaaggcctcgacctactcaggaaaatttcaaatgcacaacggatgggctgtgtcctcatagggccctcatgtacatactccaccttccagatgtaccttgacacagaattgagctaccccatgatctcagctggaagttttggattgtcatgtgactataaagaaaccttaaccaggctgatgtctccagctagaaagttgatgtacttcttggttaacttttggaaaaccaacgatctgcccttcaaaacttattcctggagcacttcgtatgtttacaagaatggtacagaaactgaggactgtttctggtaccttaatgctctggaggctagcgtttcctatttctcccacgaactcggctttaaggtggtgttaagacaagataaggagtttcaggatatcttaatggaccacaacaggaaaagcaatgtgattattatgtgtggtggtccagagttcctctacaagctgaagggtgaccgagcagtggctgaagacattgtcattattctagtggatcttttcaatgaccagtacttggaggacaatgtcacagcccctgactatatgaaaaatgtccttgttctgacgctgtctcctgggaattcccttctaaatagctctttctccaggaatctatcaccaacaaaacgagactttgctcttgcctatttgaatggaatcctgctctttggacatatgctgaagatatttcttgaaaatggagaaaatattaccacccccaaatttgctcatgctttcaggaatctcacttttgaagggtatgacggtccagtgaccttggatgactggggggatgttgacagtaccatggtgcttctgtatacctctgtggacaccaagaaatacaaggttcttttgacctatgatacccacgtaaataagacctatcctgtggatatgagccccacattcacttggaagaactctaaacttcctaatgatattacaggccggggccctcagatcctgatgattgcagtcttcaccctcactggagctgtggtgctgctcctgctcgtcgctctcctgatgctcagaaaatatagaaaagattatgaacttcgtcagaaaaaatggtcccacattcctcctgaaaatatctttcctctggagaccaatgagaccaatcatgttagcctcaagatcgatgatgacaaaagacgagatacaatccagagactacgacagtgcaaatacgacaaaaagcgagtgattctcaaagatctcaagcacaatgatggtaatttcactgaaaaacagaagatagaattgaacaagttgcttcagattgactattacaacctgaccaagttctacggcacagtgaaacttgataccatgatcttcggggtgatagaatactgtgagagaggatccctccgggaagttttaaatgacacaatttcctaccctgatggcacattcatggattgggagtttaagatctctgtcttgtatgacattgctaagggaatgtcatatctgcactccagtaagacagaagtccatggtcgtctgaaatctaccaactgcgtagtggacagtagaatggtggtgaagatcactgattttggctgcaattccattttacctccaaaaaaggacctgtggacagctccagagcacctccgccaagccaacatctctcagaaaggagatgtgtacagctatgggatcatcgcacaggagatcattctgcggaaagaaaccttctacactttgagctgtcgggaccggaatgagaagattttcagagtggaaaattccaatggaatgaaacccttccgcccagatttattcttggaaacagcagaggaaaaagagctagaagtgtacctacttgtaaaaaactgttgggaggaagatccagaaaagagaccagatttcaaaaaaattgagactacacttgccaagatatttggactttttcatgaccaaaaaaatgaaagctatatggataccttgatccgacgtctacagctatattctcgaaacctggaacatctggtagaggaaaggacacagctgtacaaggcagagagggacagggctgacagacttaactttatgttgcttccaaggctagtggtaaagtctctgaaggagaaaggctttgtggagccggaactatatgaggaagttacaatctacttcagtgacattgtaggtttcactactatctgcaaatacagcacccccatggaagtggtggacatgcttaatgacatctataagagttttgaccacattgttgatcatcatgatgtctacaaggtggaaaccatcggtgatgcgtacatggtggctagtggtttgcctaagagaaatggcaatcggcatgcaatagacattgccaagatggccttggaaatcctcagcttcatggggacctttgagctggagcatcttcctggcctcccaatatggattcgcattggagttcactctggtccctgtgctgctggagttgtgggaatcaagatgcctcgttattgtctatttggagatacggtcaacacagcctctaggatggaatccactggcctccctttgagaattcacgtgagtggctccaccatagccatcctgaagagaactgagtgccagttcctttatgaagtgagaggagaaacatacttaaagggaagaggaaatgagactacctactggctgactgggatgaaggaccagaaattcaacctgccaacccctcctactgtggagaatcaacagcgtttgcaagcagaattttcagacatgattgccaactctttacagaaaagacaggcagcagggataagaagccaaaaacccagacgggtagccagctataaaaaaggcactctggaatacttgcagctgaataccacagacaaggagagcacctatttttaaacctaaatgaggtataaggactcacacaaattaaaatacagctgcactgaggcagcgacctcaagtgtcctgaaagcttacattttcctgagacctcaatgaagcagaaatgtacttaggcttggctgccctgtctggaacatggactttcttgcatgaatcagatgtgtgttctcagtgaaataactaccttccactctggaaccttattccagcagttgttccagggagcttctacctggaaaagaaaagaatttcatttattttttgtttgtttatttttatcgtttttgtttactggctttccttctgtattcataagattttttaaattgtcataattatattttaaatacccatcttcattaaagtatatttaactcataatttttgcagaaaatatgctatatattaggcaagaataaaagctaaaggtttcccaaaaannnna

SEQ ID NO: 364813 - DNA, 5102 bp, Homo sapiens
agcggagtgggggggaggcggcggcagcggcagcggctgcgggcagcgcgcggggcgcagggcgcggggcgatcaccgtcggggctcgggaggcgggcagtgggcacaggctccccggtgcccgcccctccgctgcggaggggggccgcgagcgggcggccggggaggggccggcaccgccgccacaaaatgagcctgctgtcggccatcgacacgagcgccgcctcggtgtaccagcccgcccagctgctcaactgggtctacctgtcgctgcaggacacgcaccaggctagcgccttcgatgccttccggcccgagccgaccgccggcgccgcacccccggagctggccttcggcaagggccgccccgagcagctgggctcgcccctgcactccagctatctcaacagcttcttccagctgcagcgcggagaggcgctgagcaacagtgtgtacaagggcgcctcaccctatggctccctcaacaacatcgccgatggcctcagctccctcaccgagcacttctcagacctgaccctcacctccgaggctcgcaagcccagcaagcggcccccacccaactacctgtgccacctgtgcttcaacaaaggacactacatcaaggactgcccccaggcacgccccaaaggcgagggcctgactccataccagggcaaaaagcgctgcttcggcgagtacaagtgtcccaagtgcaagagaaaatggatgagcgggaactcctgggccaacatggggcaggagtgcatcaagtgccacatcaacgtgtatccacacaagcagagacccctggagaagcccgacggcctggacgtgtccgaccagagcaaggagcacccgcagcacctctgcgagaagtgcaaggtcctgggctactactgccgtcgcgtgcagtgacgggctgcccgcccgcacccagagccaccccccgccagcccgaggagacgctgcttccctgtgctactccgaggggctgcgtgtcgccctgtgcatggggtgccctcgcaggcctgcggggctgggccgggggctcttagcgtccttgtcttgtgtgtgttgacaaacagtgttactgacattgctgccccccacaggccagggaaagcagggagtctggggctttttgcaggcgggcctggggtctcagtggaggggaacaaaggcaagcaaaagcccatgtccaggagccctgggtgtccccacaggctcgcctctgagagcctctttggggtgagcagccttgtattggccacaggtgcactaaattgactgtgaatcccaaacctccccagaccagccaggccgcctgcccccacccagaaccttccggtttgccctgtatggaaagccactctcggaaatccctctttcctgagtcagcaatcgtggcaaggggacatgtgttccaacagcggctggggagtggacctctctgtcccttgcccaccttaagccccaaatccggaccccctctgacatcactggcattgcacctgggtgtgcccccctccccacgctatggacccagataggaggggttaggcatgggggaggcacagaatgctggagagatgcgtcctggtgaacgtggggcagcccctcccacgacccccaccagactgccttaggttttgtcagccccactccctttccttcccctctgcctcccacccactctgggggtccacatcaagatagctgggcccagtgtggaagcccagcgtgtctgttctagcagaaaggacacaagcctggtgttctggagacctcggctcaagtctttgccctgctgccgacgcattgtgtcaccttgggcaaggacttcgcatctccaggcctcagtttccccattagttaaatgacagcataacactagagagcagagggcccatttcagctctgttgttctgggattcaggctggccggtgctgtgtcctggagctttatttggggagtttcacccagaatggtgggagaaacctcccaggtgccaggtaccccgcatcgtgacccttcacttggtgtcttaggaagtcaagctgagggatgctgagtcctcccctgctggcccctgcagccccagccctgcttttcatcccccacccctgcaaacatggaggagccccctccttctcacctcggtctcctagcccctgacatggagaaccctgagacaagccacagaacccctcttttctaaaatggagacaataatttcctacctcccaagggagcagagaggcctcgtggcacgtccgtggccagggagcccactgtcctggctggcggcgggatcgtgcgctcctctgtctcccggatgagaagccccgtttccatggtcttgacccttcctttctcccggctgtcagaactgggtctcttgattttgcccctacattatgcctctgtgggaaaaaaaaaaaatcagaccaagaaatgagcctgaaattcagtgtttaccatggctcaaggatgcccatctggtgtccagttgccttttgtattcaaatgaaaatgctttgtacaactgaggagttacagtgaagtgttaaccaggggtccagggagcgagttgaaaagatggagtgagtgtatttgcagccagggagctgcagggtggatttgaggggccataccctctgagcacttaaaaaaggtatttgctccaggccaggcagcaggctgtggacacccttgccaccactggggactgccactgaggactccccgagcacgttgttccccgtcttctccaaggtgttgaggtgagctggggttggccccggcccaggcttctgtcccaaggagaagctgccactgacagtcatcctaccgcactgctaaagagaatgttcgcagtggtgggcggcgtgcctgtgccaacccttccagggacccggccatgggggaccttggcccaaggatgcctggggcctgccagctgtgctgcaaaggtggggggcccacaccctaaaactaacccaggccccagaccactggaggccagggcttccctgcacgggctaaggggagttgggatatcaccccaaagtgaccttgccagtgagctgttcagcaggtagccactgccctgccatctgtgcagagccagccaccttgggggctggggttcccgctttgaggcccaccttccatactccccttgactcggctctggctgaactggggaactctcttgtggtcagcaaagcccctgccatgcaggccaggtgccattgagaattaagtgctcagagggccaggagcccaggggatgggaaagtgtgtggttttagtacgttcaaaagggacaatcgcttgcagttggtagatctagcgatctagttgggagataatggtgtttaccccatatgaagtattcaatagttctacttgtgaatttgtatttattttgagttatacttgacacagaattccttttttaaaaaaatatgtgtgtattttggaaaaaaaattcatagatgttaaaatttctgcatggttaccagtttttctcacaacactgaatttggtagcttttcccgaaaaaatcttcacagtaattttttgtctgtatatatttgagggcctttttttaaaaaaaaaaaagaaaagaaaaatataattgttggatttttgagattaaaacaaacaaaaagagaggcattttcaaaatttcagaactttcaggagggcaagagaatatcaaacaaagatttctggaagtattttgccaaccttctggttgagctgcaagaaaatatttatggtgagaacttttctgtttcccgttattgggtttttggttggtttttgtttgttttttactatgctttggtctgtaaaaatatgcaactgaactacattcagaaggaaatattgtctacatagaatattatatgaagttggtacataattctgatgaggaaaaaaaatctttgcaattctttaagccatattgttgtttttctgtgttgttttccctggatgaaaatatcagtattaagtagacagcatattattcaagtgtttagacttattaatatgttcttgtcctgtatttatacatatgtgtattttggaaagtattgccttttttaagggaagctataattcgatacatagtgaaaaagggaatggtgacccctttgtgcctcttccactgaggataacaaacagcattgtaatccattctcttgcaccttcttcttcttatcttgttattacggttttattaattttgtagagggacagggagtgggcaaggggaagaagcagcttatttgactaaccagcccctctgtggtccaccagcgtcttggcttggtgggagggctctcaatcagcagggccccaggagggaagaagaagtggggcaaagcctggcctcgccgctcgggagctttgccatctgagccacgcctcctccaggccatgctccttgaacttggaaatgtcaaccggagcccttacaccagccctccagcatctaatagacttgaatctactctaaacgaatatttaatccaacctcactacattgtagctcagtccaacgactaaccctgaaatgggggtgttccagccttcagcgagatggccaagcggtcccctgggggctgtggcagcgggcttatccttctctgttgccaaccttgccgtccgacctcctccgcccccatgcggtgaccccgtccgtgtctgtgtctgtccatacgtgtgagtccagctaaaaagacaaaacagaacccgtgggcccagctcggaaggtgcgtggagaaggctccgacgtctccgaagtgcagcccttgggatggcattccgttgtgtgccttattcctggagaatctgtatacggctcgcctatagaaatatagcctcttcatgctgtattaaaaggacttttaaagcaaaaaaaaaaaaaagaggggggggttaagattttcccgaggggccaagttaggtacccgggttttggaaaggggccaaagggaggggttaaagaggagggggggtaaaagtggggggaacggcgtggtttggggacctttgggggtatggaccaggggtagcgaaaatagga

SEQ ID NO: 364814 - DNA, 4934 bp, Homo sapiens
agcggagtgggggggaggcggcggcagcggcagcggctgcgggcagcgcgcggggcgcagggcgcggggcgatcaccgtcggggctcgggaggcgggcagtgggcacaggctccccggtgcccgcccctccgctgcggaggggggccgcgagcgggcggccggggaggggccggcaccgccgccacaaaatgagcctgctgtcggccatcgacacgagcgccgcctcggtgtaccagcccgcccagctgctcaactgggtctacctgtcgctgcaggacacgcaccaggctagcgccttcgatgccttccggcccgagccgaccgccggcgccgcacccccggagctggccttcggcaagggccgccccgagcagctgggctcgcccctgcactccagctatctcaacagcttcttccagctgcagcgcggagaggcgctgagcaacagtgtgtacaagggcgcctcaccctatggctccctcaacaacatcgccgatggcctcagctccctcaccgagcacttctcagacctgaccctcacctccgaggctcgcaagcccagcaagcggcccccacccaactacctgtgccacctgtgcttcaacaaaggacactacatcaaggactgcccccaggcacgccccaaaggcgagggcctgactccataccagggcaaaaagcgctgcttcggcgagtacaagtgtcccaagtgcaagagaaaatggatgagcgggaactcctgggccaacatggggcaggagtgcatcaagtgccacatcaacgtgtatccacacaagcagagacccctggagaagcccgacggcctggacgtgtccgaccagagcaaggagcacccgcagcacctctgcgagaagtgcaaggtcctgggctactactgccgtcgcgtgcagtgacgggctgcccgcccgcacccagagccaccccccgccagcccgaggagacgctgcttccctgtgctactccgaggggctgcgtgtcgccctgtgcatggggtgccctcgcaggcctgcggggctgggccgggggctcttagcgtccttgtcttgtgtgtgttgacaaacagtgttactgacattgctgccccccacaggccagggaaagcagggagtctggggctttttgcaggcgggcctggggtctcagtggaggggaacaaaggcaagcaaaagcccatgtccaggagccctgggtgtccccacaggctcgcctctgagagcctctttggggtgagcagccttgtattggccacaggtgcactaaattgactgtgaatcccaaacctccccagaccagccaggccgcctgcccccacccagaaccttccggtttgccctgtatggaaagccactctcggaaatccctctttcctgagtcagcaatcgtggcaaggggacatgtgttccaacagcggctggggagtggacctctctgtcccttgcccaccttaagccccaaatccggaccccctctgacatcactggcattgcacctgggtgtgcccccctccccacgctatggacccagataggaggggttaggcatgggggaggcacagaatgctggagagatgcgtcctggtgaacgtggggcagcccctcccacgacccccaccagactgccttaggttttgtcagccccactccctttccttcccctctgcctcccacccactctgggggtccacatcaagatagctgggcccagtgtggaagcccagcgtgtctgttctagcagaaaggacacaagcctggtgttctggagacctcggctcaagtctttgccctgctgccgacgcattgtgtcaccttgggcaaggacttcgcatctccaggcctcagtttccccattagttaaatgacagcataacactagagagcagagggcccatttcagctctgttgttctgggattcaggctggccggtgctgtgtcctggagctttatttggggagtttcacccagaatggtgggagaaacctcccaggtgccaggtaccccgcatcgtgacccttcacttggtgtcttaggaagtcaagctgagggatgctgagtcctcccctgctggcccctgcagccccagccctgcttttcatcccccacccctgcaaacatggaggagccccctccttctcacctcggtctcctagcccctgacatggagaaccctgagacaagccacagaacccctcttttctaaaatggagacaataatttcctacctcccaagggagcagagaggcctcgtggcacgtccgtggccagggagcccactgtcctggctggcggcgggatcgtgcgctcctctgtctcccggatgagaagccccgtttccatggtcttgacccttcctttctcccggctgtcagaactgggtctcttgattttgcccctacattatgcctctgtgggaaaaaaaaaaaatcagaccaagaaatgagcctgaaattcagtgtttaccatggctcaaggatgcccatctggtgtccagttgccttttgtattcaaatgaaaatgctttgtacaactgaggagttacagtgaagtgttaaccaggggtccagggagcgagttgaaaagatggagtgagtgtatttgcagccagggagctgcagggtggatttgaggggccataccctctgagcacttaaaaaaggtatttgctccaggccaggcagcaggctgtggacacccttgccaccactggggactgccactgaggactccccgagcacgttgttccccgtcttctccaaggtgttgaggtgagctggggttggccccggcccaggcttctgtcccaaggagaagctgccactgacagtcatcctaccgcactgctaaagagaatgttcgcagtggtgggcggcgtgcctgtgccaacccttccagggacccggccatgggggaccttggcccaaggatgcctggggcctgccagctgtgctgcaaaggtggggggcccacaccctaaaactaacccaggccccagaccactggaggccagggcttccctgcacgggctaaggggagttgggatatcaccccaaagtgaccttgccagtgagctgttcagcaggtagccactgccctgccatctgtgcagagccagccaccttgggggctggggttcccgctttgaggcccaccttccatactccccttgactcggctctggctgaactggggaactctcttgtggtcagcaaagcccctgccatgcaggccaggtgccattgagaattaagtgctcagagggccaggagcccaggggatgggaaagtgtgtggttttagtacgttcaaaagggacaatcgcttgcagttggtagatctagcgatctagttgggagataatggtgtttaccccatatgaagtattcaatagttctacttgtgaatttgtatttattttgagttatacttgacacagaattccttttttaaaaaaatatgtgtgtattttggaaaaaaaattcatagatgttaaaatttctgcatggttaccagtttttctcacaacactgaatttggtagcttttcccgaaaaaatcttcacagtaattttttgtctgtatatatttgagggcctttttttaaaaaaaaaaaagaaaagaaaaatataattgttggatttttgagattaaaacaaacaaaaagagaggcattttcaaaatttcagaactttcaggagggcaagagaatatcaaacaaagatttctggaagtattttgccaaccttctggttgagctgcaagaaaatatttatggtgagaacttttctgtttcccgttattgggtttttggttggtttttgtttgttttttactatgctttggtctgtaaaaatatgcaactgaactacattcagaaggaaatattgtctacatagaatattatatgaagttggtacataattctgatgaggaaaaaaaatctttgcaattctttaagccatattgttgtttttctgtgttgttttccctggatgaaaatatcagtattaagtagacagcatattattcaagtgtttagacttattaatatgttcttgtcctgtatttatacatatgtgtattttggaaagtattgccttttttaagggaagctataattcgatacatagtgaaaaagggaatggtgacccctttgtgcctcttccactgaggataacaaacagcattgtaatccattctcttgcaccttcttcttcttatcttgttattacggttttattaattttgtagagggacagggagtgggcaaggggaagaagcagcttatttgactaaccagcccctctgtggtccaccagcgtcttggcttggtgggagggctctcaatcagcagggccccaggagggaagaagaagtggggcaaagcctggcctcgccgctcgggagctttgccatctgagccacgcctcctccaggccatgctccttgaacttggaaatgtcaaccggagcccttacaccagccctccagcatctaatagacttgaatctactctaaacgaatatttaatccaacctcactacattgtagctcagtccaacgactaaccctgaaatgggggtgttccagccttcagcgagatggccaagcggtcccctgggggctgtggcagcgggcttatccttctctgttgccaaccttgccgtccgacctcctccgcccccatgcggtgaccccgtccgtgtctgtgtctgtccatacgtgtgagtccagctaaaaagacaaaacagaacccgtgggcccagctcggaaggtgcgtggagaaggctccgacgtctccgaagtgcagcccttgggatggcattccgttgtgtgccttattcctggagaatctgtatacggctcgcctatagaaatatagcctcttcatgctgtattaaaaggacttttaaagcaaaa

SEQ ID NO: 364815 - DNA, 414 bp, Homo sapiens
gtacaagtgtcccaagtgcaagagaaaatggatgagcgggaactcctgggccaacatggggcaggagtgcatcaagtgccacatcaacgtgtatccacacaagcaggtgagccgggcaggctggggccttctcagaaggaccgcgggagggcaacttttcccttaccggacctcagtttactccctcctacaagggagatctctctaagttgaccctttctttccttgtctcatctgaaatgggagggaagggaagggaaggaggatgatggggcaactgcaccaagatcttgagaccagagaaccccggggaattgtaaaactagtgaacagggtgtgctgttgtgagacagagatgtgcggacagcaggaagcagcagaaaactcaaatttccttccttgatccatccagtc

SEQ ID NO: 364816 - DNA, 330 bp, Homo sapiens
ggccttcgtcttacaaaaaaggttgtcaaccaataaatcagggcatggaatgttttccggagtcttgacctcgatttgtaacttggtgcagaagtctagattgtaatcttaattcagtttctaatttgctgtgtagccaggagcaagtcttttagcaccacccggttttctctgctatgacttgcttaccccacagaattactgagccttaaataaggtaatgaatgtaaactagctgaagaaacatgaagcaagtgcaaagcatcagtagaagtgttatgtgtacattttgaattctaaataacccaagaagtaacttagccatatata

SEQ ID NO: 364817 - DNA, 1427 bp, Homo sapiens
gcgcggagcgaggtggccgcagcgtctccgcgcgcggcccaagcccggcaggagtgcggaaccgccgcctcggccatgcggctcccggccggggggcctgggctggggcccgcgccgccccccgcgctccgcccccgctgagcctgagcccgacccggggcgcctcccgccaggcaccatggtgcagaagtcgcgcaacggcggcgtataccccggcccgagcggggagaagaagctgaaggtgggcttcgtggggctggaccccggcgcgcccgactccacccgggacggggcgctgctgatcgccggctccgaggcccccaagcgcggcagcatcctcagcaaacctcgcgcgggcggcgcgggcgccgggaagccccccaagcgcaacgccttctaccgcaagctgcagaatttcctctacaacgtgctggagcggccgcgcggctgggcgttcatctaccacgcctacgtgttcctcctggttttctcctgcctcgtgctgtctgtgttttccaccatcaaggagtatgagaagagctcggagggggccctctacatcctggaaatcgtgactatcgtggtgtttggcgtggagtacttcgtgcggatctgggccgcaggctgctgctgccggtaccgtggctggagggggcggctcaagtttgcccggaaaccgttctgtgtgattgacatcatggtgctcatcgcctccattgcggtgctggccgccggctcccagggcaacgtctttgccacatctgcgctccggagcctgcgcttcctgcagattctgcggatgatccgcatggaccggcggggaggcacctggaagctgctgggctctgtggtctatgcccacagcaaggagctggtcactgcctggtacatcggcttcctttgtctcatcctggcctcgttcctggtgtacttggcagagaagggggagaacgaccactttgacacctacgcggatgcactctggtggggcctgatcacgctgaccaccattggctacggggacaagtacccccagacctggaacggcaggctccttgcggcaaccttcaccctcatcggtgtctccttcttcgcgctgcctgcaggcatcttggggtctgggtttgccctgaaggttcaggagcagcacaggcagaagcactttgagaagaggcggaacccggcagcaggcctgatccagtcggcctggagattctacgccaccaacctctcgcgcacagacctgcactccacgtggcagtactacgagcgaacggtcaccgtgcccatgtacaggtaccgccgccgggcacctgccaccaagcaactgtttcattttttattttccatttgttcttaaaccccactttttgttgttcattattttgattgattttttttctttaaaatgtatttttcacaaagga

SEQ ID NO: 364818 - DNA, 606 bp, Homo sapiens
acgctcagtggagggagccagacggggaaggccgtgcagcttgcgatgcccttggcaggaaatgcccggggcggggaagtccgtggagccccgtacaccctggcggtggccagggcctgggggaccaggaaccaggagcgcctgctgaacgtcggggcaccgcaaaacaaaacaaaggcatagagaacggaaatccagccaggcgaggttcagtctgacgtacaggctcatgccccgagccgggctgagtccccgccctgggaggttggaggctgaggtccctggccctacccatactcccagcgcctcaggttgcccagggcccaaccaggagggcaggaaggtaacccccaggacaggtgatacccgccaggggccagtcggcctggagattctacgccaccaacctctcgcgcacagacctgcactccacgtggcagtactacgagcgaacggtcaccgtgcccatgtacaggtaccgccgccgggcacctgccaccaagcaactgtttcattttttattttccatttgttcttaaaccccactttttgttgttcattattttgattgattttttttctttaaaatgtatttttcacaaagga

SEQ ID NO: 364819 - DNA, 7634 bp, Homo sapiens
  misc_feature (2427)..(2427): n is a, c, g, or t
gcgcggagcgaggtggccgcagcgtctccgcgcgcggcccaagcccggcaggagtgcggaaccgccgcctcggccatgcggctcccggccggggggcctgggctggggcccgcgccgccccccgcgctccgcccccgctgagcctgagcccgacccggggcgcctcccgccaggcaccatggtgcagaagtcgcgcaacggcggcgtataccccggcccgagcggggagaagaagctgaaggtgggcttcgtggggctggaccccggcgcgcccgactccacccgggacggggcgctgctgatcgccggctccgaggcccccaagcgcggcagcatcctcagcaaacctcgcgcgggcggcgcgggcgccgggaagccccccaagcgcaacgccttctaccgcaagctgcagaatttcctctacaacgtgctggagcggccgcgcggctgggcgttcatctaccacgcctacgtgttcctcctggttttctcctgcctcgtgctgtctgtgttttccaccatcaaggagtatgagaagagctcggagggggccctctacatcctggaaatcgtgactatcgtggtgtttggcgtggagtacttcgtgcggatctgggccgcaggctgctgctgccggtaccgtggctggagggggcggctcaagtttgcccggaaaccgttctgtgtgattgacatcatggtgctcatcgcctccattgcggtgctggccgccggctcccagggcaacgtctttgccacatctgcgctccggagcctgcgcttcctgcagattctgcggatgatccgcatggaccggcggggaggcacctggaagctgctgggctctgtggtctatgcccacagcaaggagctggtcactgcctggtacatcggcttcctttgtctcatcctggcctcgttcctggtgtacttggcagagaagggggagaacgaccactttgacacctacgcggatgcactctggtggggcctgatcacgctgaccaccattggctacggggacaagtacccccagacctggaacggcaggctccttgcggcaaccttcaccctcatcggtgtctccttcttcgcgctgcctgcaggcatcttggggtctgggtttgccctgaaggttcaggagcagcacaggcagaagcactttgagaagaggcggaacccggcagcaggcctgatccagtcggcctggagattctacgccaccaacctctcgcgcacagacctgcactccacgtggcagtactacgagcgaacggtcaccgtgcccatgtacagttcgcaaactcaaacctacggggcctccagacttatccccccgctgaaccagctggagctgctgaggaacctcaagagtaaatctggactcgctttcaggaaggaccccccgccggagccgtctccaagcccccgaggcgtggctgccaaggggaaggggtccccgcaggcccagactgtgaggcggtcacccagcgccgaccagagcctcgaggacagccccagcaaggtgcccaagagctggagcttcggggaccgcagccgggcacgccaggctttccgcatcaagggtgccgcgtcacggcagaactcagaagaagcaagcctccccggagaggacattgtggatgacaagagctgcccctgcgagtttgtgaccgaggacctgaccccgggcctcaaagtcagcatcagagccgtgtgtgtcatgcggttcctggtgtccaagcggaagttcaaggagagcctgcggccctacgacgtgatggacgtcatcgagcagtactcagccggccacctggacatgctgtcccgaattaagagcctgcagtccagagtggaccagatcgtggggcggggcccagcgatcacggacaaggaccgcaccaagggcccggccgaggcggagctgcccgaggaccccagcatgatgggacggctcgggaaggtggagaagcaggtcttgtccatggagaagaagctggacttcctggtgaatatctacatgcagcggatgggcatccccccgacagagaccgaggcctactttggggccaaagagccggagccggcgccgccgtaccacagcccggaagacagccgggagcatgtcgacaggcacggctgcattgtcaagatcgtgcgctccagcagctccacgggccagaagaacttctcggcgcccccggccgcgccccctgtccagtgtccgccctccacctcctggcagccacagagccacccgcgccagggccacggcacctcccccgtgggggaccacggctccctggtgcgcatcccgccgccgcctgcccacgagcggtcgctgtccgcctacggcgggggcaaccgcgccagcatggagttcctgcggcaggaggacaccccgggctgcaggccccccgaggggancctgcgggacagcgacacgtccatctccatcccgtccgtggaccacgaggagctggagcgttccttcagcggcttcagcatctcccagtccaaggagaacctggatgctctcaacagctgctacgcggccgtggcgccttgtgccaaagtcaggccctacattgcggagggagagtcagacaccgactccgacctctgtaccccgtgcgggcccccgccacgctcggccaccggcgagggtccctttggtgacgtgggctgggccgggcccaggaagtgaggcggcgctgggccagtggacccgcccgcggccctcctcagcacggtgcctccgaggttttgaggcgggaaccctctggggcccttttcttacagtaactgagtgtggcgggaagggtgggccctggaggggcccatgtgggctgaaggatgggggctcctggcagtgaccttttacaaaagttattttccaacagggcactcccaggccctgtcgccattgaggtgcctccgctgggctgtctcctcacccctccctgtgctggagcctgtcccaaaaaggtgccaactgggaggcctcggaagccactgtccaggctcccactgcctgtctgctctgttcccaaaggcagcgtgtgtggcctcgggccctgcggtggcatgaagcatcccttctggtgtgggcatcgctacgtgttttgggggcagcgtttcacggcggtgcccttgctgtctcccttgggctggctcgagcctggggtccatgtccctttgccgtcccgtcatggggcagggaatccatagcggggcccacaggcaggggtatgagtgcgtcccacccaacgcagcaccagccccggccaccgctccccgtgtccccagttccgtctcagctacctggactccaggaccctggagaagggagacctggcagtggagggaggctgtgctgtgtgtccccctgcaggtgtgaccccgcctgctctttcctcccccgccaggtgtggccccgcctgctctttcctcccccaccagtatggccccacctgctctttcctccccccccaaggtgtggccccacctgttctttcctcccctgccgaggtgtgaccccacctgctctttcctccctcccagtatggccccacctgctctttcctcccccgaggtgaggccccgcctgctctttcctcccatgggagccgctgaggcgtgcgcacctgggcacaggttggggctctgcaggatgaggaagacaggccaatcccttccctcccagaagctggccgcccagcaggagggactgaggccagactcatgtccagcaaggaacgtgtggtgtgtcccctgggaagtctctgggccctgggaagagggaaggtgcacgtcctgggatggttgcggggccctgttttgggagacaaaggggtagagggtctgtcttgggcccccccagactctagcccgagcagtgcagccacctactgccccacctcagagaagtgcagcgggaaggaggctggaggtggtgcggcgctgcctcgggtgtctgcgtgaatgagcgtggccaaggaccagtgccacctcatggcaaagagctcccgcagtgtttgttagagtgcacatccctacgtgcccactggcacacacacgtgctcacatacatgtccgcgtacaggcgtacacatgcacgcttgcacacatgcacacagaccacatagcacacatgtgcactgaccacacctgtatagaccatgcacagtacacatacgtgcatacacatgcctgcatacaggcatacacatgcacgcttacatgtacacgtgcacagatcacacacatgcacacacgtgtagctcacacacagtatacacatacacaagtgcacagaccacacacagcactaacacatgcacacacaaagtgcataggccacacagcacatgcacacaggtgcacagaccacacagcacacacaagtgcacagagcacactgcacacatgcacacacacacgcgtgcatgcacactcctcgcacttccagccttggagcccttctgtctctggtctttctctttgaccctgctgagtgtaagctgcctggggaggggctacaaggagtaattgtggctttaggggtcgtggtgatgctggaatgtcaagcgccgtcgtggggtatccgactgtccgggctcctggtccgcagtggcagagcgccaggcagagcccaatcagggtctcgtgctgcccttcccccccacagcctggcagccatccagaggaggggctctaccagatgccaaggtgccccggtgtctgtatgggtgtccggttgggtcctgtgtttggtctgccctggaggtggctgggccctcctgggatgggtggctcagcctcgaatcccaggccccagcccaggcaggtgctgctgcctgttgtggtttcctggcccagcttctccttctccctctgcataaaatcacagtccgtgagtcttccagctgccaccacggctgggacacgctgggggagggctcctcccatgcctcctgcacacagccgtctgagcagggcaggtgccaacaccccccaccggagacacgctgcccctcagcgatgcccctaccttttggggggcctcgtctcaagcccccccttggaggctgaaatcaccccaggcactgtgagggcttctccagggggacaccctttgagctgtgggtctgatcaccccaagtcccgcacacggaggagaggcacagccagggcgtgtggtttaatgtttgccccttcggggctggaggtctcagtgtttctagattccagaccctgctgccagagagacctgctgccggagagaaggggaggaggactccagctgggctcggtcccccacagtcagggacccccataaaggacacccccttctctctagaaagagctgggctctcagctatttctagttgcttcccagaagccgaggagcagaaggagctgtgagagctttgcagaaacgcccttgtccccgccctcctgagctatgaatgccgtacagagcagaggctggggcattggcaagatcacaggttgatgctgcacagccccattgacacaaaccctcaaagcagacgtgagagggacggttcacaaagctcggacctgccgtggagggtgcccggcagacgtggcgtgagagggacggctcacgaggcttggacctgctgtggagggtgcccagcagacgtggtgtgagaggaacggctcacgagacttggacctggtggagggtgcccagcagacgtggtgtgagagggacggctcacagggcttggacctgccatggagggtgcccggcagacgtggtgtgagagggatggttcacagggcttggacctgccatggagggtgcccggcagatgtggtcggagagagatggctcatgagacttggacctgccgtggagggtgcccagcagacgtggtatgagagggatggctcacgaggcttggacctggtggagggtgcccggcagacgtgtgagagggacggttcacaaggcttggacctgccatggagggtgcccagcagacgtggtgtgagagggacagctcacgaggcttggacctgccgtggagggtgcccagcagggggctgagctctgaggggtgggtgctcagtgcacgggtgcccccagtgtcctctgatcctgtccggtgcctcccccaacccccacacccatgcagaactcccaggtcacatgcacgtatgtccagggcatgggggtggcgtgaagaggcctggtcagggcctttaggggctgcaggacggaatggccacctggggagcctgtgtggctgtgccgggcagccatcctgcattcccacccagcgcgcagtctccacctcggccccagcaaagcgctaagcagccggagagacagccagggcggcttcctgaaggatgtgggatggtggactccggggtcgagggaatacgcaggttcctgtccctccgggagacctagagaagctgcacacccaggagctttccatgacccgggagcatgagtgaatgggggttccagtttgctgaactttgctgtcttgtaagggtgggggctgacggccgaccctgggaggaggtgacatcgcagggggaggttgtgggcaacggtggaggaggagagacgggaggggaccatttgggatggaggggcctcttcagagttttaaaaggcgtttgtggggtggagttgagtgtgctctgggcttggacacttgccgtggtgcccctggctggccgaggagactggctctggccagggccccgtcctgagaggtcctcagcgtctgactctcggccaggcgccagcaaggaggggccggtccccggggctaccaggcaggcacgtgcacatcgccatcgccacacgccaactccgcctgggttttacaaagtcgttgccttaatgcatgtggacaggaactccctgaggtcgccccatgccccctggctgtgccaggtacggacgccctggaccctgcgaacaggtggggcgggcgaggggcccaagggacgggctccagagacacgcgcagggcaggaggggtctcacggaggggtctcgcactgaggcgcccagagctggtggtcccgctggacgccatccctctgcccgggatccacacggcccacgtgtgcccgccatgcccgcgccccacgccattgcagtctgccatcctctggccgtgacggtggctgcagcttccccatttgcgccgttgcctctggctgtctgcacttttgttcatgctccaaagaacatttcataatgccttcagtaccgacgtacacttctgaccattttgtatgtgtccttgtgccgtagtgaccaggcctttttttggtggatgtgttaccccgcacacttcaatctcaactttgtgcaccgtccattttctagggatagacgcccagggaatgaactctagttttctaacagattagctgagatattaacttactcacacggacaggttgatgccagagccgtaagaatgcgccagtgcgggtttgcgggggacttcgggtgtggggtcctgcggccgcgatggccgtggaaggttctggggatccctgctgccacggggacgagttcggacgccaggtggacctgtgcactcagtaaaacgcagtgattcaacctg

SEQ ID NO: 364820 - DNA, 3561 bp, Homo sapiens
  misc_feature (2463)..(2463): n is a, c, g, or t
gcgcggagcgaggtggccgcagcgtctccgcgcgcggcccaagcccggcaggagtgcggaaccgccgcctcggccatgcggctcccggccggggggcctgggctggggcccgcgccgccccccgcgctccgcccccgctgagcctgagcccgacccggggcgcctcccgccaggcaccatggtgcagaagtcgcgcaacggcggcgtataccccggcccgagcggggagaagaagctgaaggtgggcttcgtggggctggaccccggcgcgcccgactccacccgggacggggcgctgctgatcgccggctccgaggcccccaagcgcggcagcatcctcagcaaacctcgcgcgggcggcgcgggcgccgggaagccccccaagcgcaacgccttctaccgcaagctgcagaatttcctctacaacgtgctggagcggccgcgcggctgggcgttcatctaccacgcctacgtgttcctcctggttttctcctgcctcgtgctgtctgtgttttccaccatcaaggagtatgagaagagctcggagggggccctctacatcctggaaatcgtgactatcgtggtgtttggcgtggagtacttcgtgcggatctgggccgcaggctgctgctgccggtaccgtggctggagggggcggctcaagtttgcccggaaaccgttctgtgtgattgacatcatggtgctcatcgcctccattgcggtgctggccgccggctcccagggcaacgtctttgccacatctgcgctccggagcctgcgcttcctgcagattctgcggatgatccgcatggaccggcggggaggcacctggaagctgctgggctctgtggtctatgcccacagcaaggagctggtcactgcctggtacatcggcttcctttgtctcatcctggcctcgttcctggtgtacttggcagagaagggggagaacgaccactttgacacctacgcggatgcactctggtggggcctgatcacgctgaccaccattggctacggggacaagtacccccagacctggaacggcaggctccttgcggcaaccttcaccctcatcggtgtctccttcttcgcgctgcctgcaggcatcttggggtctgggtttgccctgaaggttcaggagcagcacaggcagaagcactttgagaagaggcggaacccggcagcaggcctgatccagtcggcctggagattctacgccaccaacctctcgcgcacagacctgcactccacgtggcagtactacgagcgaacggtcaccgtgcccatgtacagttcgcaaactcaaacctacggggcctccagacttatccccccgctgaaccagctggagctgctgaggaacctcaagagtaaatctggactcgctttcaggaaggaccccccgccggagccgtctccaagccagaaggtcagtttgaaagatcgtgtcttctccagcccccgaggcgtggctgccaaggggaaggggtccccgcaggcccagactgtgaggcggtcacccagcgccgaccagagcctcgaggacagccccagcaaggtgcccaagagctggagcttcggggaccgcagccgggcacgccaggctttccgcatcaagggtgccgcgtcacggcagaactcagaagaagcaagcctccccggagaggacattgtggatgacaagagctgcccctgcgagtttgtgaccgaggacctgaccccgggcctcaaagtcagcatcagagccgtgtgtgtcatgcggttcctggtgtccaagcggaagttcaaggagagcctgcggccctacgacgtgatggacgtcatcgagcagtactcagccggccacctggacatgctgtcccgaattaagagcctgcagtccagagtggaccagatcgtggggcggggcccagcgatcacggacaaggaccgcaccaagggcccggccgaggcggagctgcccgaggaccccagcatgatgggacggctcgggaaggtggagaagcaggtcttgtccatggagaagaagctggacttcctggtgaatatctacatgcagcggatgggcatccccccgacagagaccgaggcctactttggggccaaagagccggagccggcgccgccgtaccacagcccggaagacagccgggagcatgtcgacaggcacggctgcattgtcaagatcgtgcgctccagcagctccacgggccagaagaacttctcggcgcccccggccgcgccccctgtccagtgtccgccctccacctcctggcagccacagagccacccgcgccagggccacggcacctcccccgtgggggaccacggctccctggtgcgcatcccgccgccgcctgcccacgagcggtcgctgtccgcctacggcgggggcaaccgcgccagcatggagttcctgcggcaggaggacaccccgggctgcaggccccccgaggggancctgcgggacagcgacacgtccatctccatcccgtccgtggaccacgaggagctggagcgttccttcagcggcttcagcatctcccagtccaaggagaacctggatgctctcaacagctgctacgcggccgtggcgccttgtgccaaagtcaggccctacattgcggagggagagtcagacaccgactccgacctctgtaccccgtgcgggcccccgccacgctcggccaccggcgagggtccctttggtgacgtgggctgggccgggcccaggaagtgaggcggcgctgggccagtggacccgcccgcggccctcctcagcacggtgcctccgaggttttgaggcgggaaccctctggggcccttttcttacagtaactgagtgtggcgggaagggtgggccctggaggggcccatgtgggctgaaggatgggggctcctggcagtgaccttttacaaaagttattttccaacaggggctggagggctgggcagggccctgtggctccaggagcagcgtgcaggagcaaggctgccctgtccactctgctcagggccgcggccgacatcagcccggtgtgaggaggggcgggagtgatgacggggtgttgccagcgtggcaacaggcggggggttgtctcagccgagcccaggggaggcacaaagggcaggcctgttccctgaggacctgcgcaaagggcgggcctgtttggtgaggacctgcggccttgggtcccggtggggtttccgggcagctacaggcgggtgtggccggccgctgtgcgtggcctctgccttcacacctgacctgcccggcgggctttcctgttccccacctcaggggcgcccaaatacagagctattggttggcgtcttctccctgtaaaacacaaaaaaaaaaaaaaaaaaaaaccccgcggggcttcttatggagcgcgggcggcggggaaacaagagaggtgtcacgagaattggcgccattggggcaataggctggttccctgagcccacagctcttctgggtccacagggggcgaaatcgggcgggcccccctaaagggggggccggatactcccgaaaacgccgggtacccgagg

SEQ ID NO: 364821 - DNA, 6578 bp, Homo sapiens
  misc_feature (1371)..(1371): n is a, c, g, or t
tggcctgctggcccagagtcctgagtgcctggcctacagcatgggggtcccctctgccccgttccctccacgcccggccctcctgggcgcgcccctcgccgcctgcccctcgccaactgccttgtctttccctccgcagtcggcctggagattctacgccaccaacctctcgcgcacagacctgcactccacgtggcagtactacgagcgaacggtcaccgtgcccatgtacagacttatccccccgctgaaccagctggagctgctgaggaacctcaagagtaaatctggactcgctttcaggaaggaccccccgccggagccgtctccaagccagaaggtcagtttgaaagatcgtgtcttctccagcccccgaggcgtggctgccaaggggaaggggtccccgcaggcccagactgtgaggcggtcacccagcgccgaccagagcctcgaggacagccccagcaaggtgcccaagagctggagcttcggggaccgcagccgggcacgccaggctttccgcatcaagggtgccgcgtcacggcagaactcagaagaagcaagcctccccggagaggacattgtggatgacaagagctgcccctgcgagtttgtgaccgaggacctgaccccgggcctcaaagtcagcatcagagccgtgtgtgtcatgcggttcctggtgtccaagcggaagttcaaggagagcctgcggccctacgacgtgatggacgtcatcgagcagtactcagccggccacctggacatgctgtcccgaattaagagcctgcagtccagagtggaccagatcgtggggcggggcccagcgatcacggacaaggaccgcaccaagggcccggccgaggcggagctgcccgaggaccccagcatgatgggacggctcgggaaggtggagaagcaggtcttgtccatggagaagaagctggacttcctggtgaatatctacatgcagcggatgggcatccccccgacagagaccgaggcctactttggggccaaagagccggagccggcgccgccgtaccacagcccggaagacagccgggagcatgtcgacaggcacggctgcattgtcaagatcgtgcgctccagcagctccacgggccagaagaacttctcggcgcccccggccgcgccccctgtccagtgtccgccctccacctcctggcagccacagagccacccgcgccagggccacggcacctcccccgtgggggaccacggctccctggtgcgcatcccgccgccgcctgcccacgagcggtcgctgtccgcctacggcgggggcaaccgcgccagcatggagttcctgcggcaggaggacaccccgggctgcaggccccccgaggggancctgcgggacagcgacacgtccatctccatcccgtccgtggaccacgaggagctggagcgttccttcagcggcttcagcatctcccagtccaaggagaacctggatgctctcaacagctgctacgcggccgtggcgccttgtgccaaagtcaggccctacattgcggagggagagtcagacaccgactccgacctctgtaccccgtgcgggcccccgccacgctcggccaccggcgagggtccctttggtgacgtgggctgggccgggcccaggaagtgaggcggcgctgggccagtggacccgcccgcggccctcctcagcacggtgcctccgaggttttgaggcgggaaccctctggggcccttttcttacagtaactgagtgtggcgggaagggtgggccctggaggggcccatgtgggctgaaggatgggggctcctggcagtgaccttttacaaaagttattttccaacagggcactcccaggccctgtcgccattgaggtgcctccgctgggctgtctcctcacccctccctgtgctggagcctgtcccaaaaaggtgccaactgggaggcctcggaagccactgtccaggctcccactgcctgtctgctctgttcccaaaggcagcgtgtgtggcctcgggccctgcggtggcatgaagcatcccttctggtgtgggcatcgctacgtgttttgggggcagcgtttcacggcggtgcccttgctgtctcccttgggctggctcgagcctggggtccatgtccctttgccgtcccgtcatggggcagggaatccatagcggggcccacaggcaggggtatgagtgcgtcccacccaacgcagcaccagccccggccaccgctccccgtgtccccagttccgtctcagctacctggactccaggaccctggagaagggagacctggcagtggagggaggctgtgctgtgtgtccccctgcaggtgtgaccccgcctgctctttcctcccccgccaggtgtggccccgcctgctctttcctcccccaccagtatggccccacctgctctttcctccccccccaaggtgtggccccacctgttctttcctcccctgccgaggtgtgaccccacctgctctttcctccctcccagtatggccccacctgctctttcctcccccgaggtgaggccccgcctgctctttcctcccatgggagccgctgaggcgtgcgcacctgggcacaggttggggctctgcaggatgaggaagacaggccaatcccttccctcccagaagctggccgcccagcaggagggactgaggccagactcatgtccagcaaggaacgtgtggtgtgtcccctgggaagtctctgggccctgggaagagggaaggtgcacgtcctgggatggttgcggggccctgttttgggagacaaaggggtagagggtctgtcttgggcccccccagactctagcccgagcagtgcagccacctactgccccacctcagagaagtgcagcgggaaggaggctggaggtggtgcggcgctgcctcgggtgtctgcgtgaatgagcgtggccaaggaccagtgccacctcatggcaaagagctcccgcagtgtttgttagagtgcacatccctacgtgcccactggcacacacacgtgctcacatacatgtccgcgtacaggcgtacacatgcacgcttgcacacatgcacacagaccacatagcacacatgtgcactgaccacacctgtatagaccatgcacagtacacatacgtgcatacacatgcctgcatacaggcatacacatgcacgcttacatgtacacgtgcacagatcacacacatgcacacacgtgtagctcacacacagtatacacatacacaagtgcacagaccacacacagcactaacacatgcacacacaaagtgcataggccacacagcacatgcacacaggtgcacagaccacacagcacacacaagtgcacagagcacactgcacacatgcacacacacacgcgtgcatgcacactcctcgcacttccagccttggagcccttctgtctctggtctttctctttgaccctgctgagtgtaagctgcctggggaggggctacaaggagtaattgtggctttaggggtcgtggtgatgctggaatgtcaagcgccgtcgtggggtatccgactgtccgggctcctggtccgcagtggcagagcgccaggcagagcccaatcagggtctcgtgctgcccttcccccccacagcctggcagccatccagaggaggggctctaccagatgccaaggtgccccggtgtctgtatgggtgtccggttgggtcctgtgtttggtctgccctggaggtggctgggccctcctgggatgggtggctcagcctcgaatcccaggccccagcccaggcaggtgctgctgcctgttgtggtttcctggcccagcttctccttctccctctgcataaaatcacagtccgtgagtcttccagctgccaccacggctgggacacgctgggggagggctcctcccatgcctcctgcacacagccgtctgagcagggcaggtgccaacaccccccaccggagacacgctgcccctcagcgatgcccctaccttttggggggcctcgtctcaagcccccccttggaggctgaaatcaccccaggcactgtgagggcttctccagggggacaccctttgagctgtgggtctgatcaccccaagtcccgcacacggaggagaggcacagccagggcgtgtggtttaatgtttgccccttcggggctggaggtctcagtgtttctagattccagaccctgctgccagagagacctgctgccggagagaaggggaggaggactccagctgggctcggtcccccacagtcagggacccccataaaggacacccccttctctctagaaagagctgggctctcagctatttctagttgcttcccagaagccgaggagcagaaggagctgtgagagctttgcagaaacgcccttgtccccgccctcctgagctatgaatgccgtacagagcagaggctggggcattggcaagatcacaggttgatgctgcacagccccattgacacaaaccctcaaagcagacgtgagagggacggttcacaaagctcggacctgccgtggagggtgcccggcagacgtggcgtgagagggacggctcacgaggcttggacctgctgtggagggtgcccagcagacgtggtgtgagaggaacggctcacgagacttggacctggtggagggtgcccagcagacgtggtgtgagagggacggctcacagggcttggacctgccatggagggtgcccggcagacgtggtgtgagagggatggttcacagggcttggacctgccatggagggtgcccggcagatgtggtcggagagagatggctcatgagacttggacctgccgtggagggtgcccagcagacgtggtatgagagggatggctcacgaggcttggacctggtggagggtgcccggcagacgtgtgagagggacggttcacaaggcttggacctgccatggagggtgcccagcagacgtggtgtgagagggacagctcacgaggcttggacctgccgtggagggtgcccagcagggggctgagctctgaggggtgggtgctcagtgcacgggtgcccccagtgtcctctgatcctgtccggtgcctcccccaacccccacacccatgcagaactcccaggtcacatgcacgtatgtccagggcatgggggtggcgtgaagaggcctggtcagggcctttaggggctgcaggacggaatggccacctggggagcctgtgtggctgtgccgggcagccatcctgcattcccacccagcgcgcagtctccacctcggccccagcaaagcgctaagcagccggagagacagccagggcggcttcctgaaggatgtgggatggtggactccggggtcgagggaatacgcaggttcctgtccctccgggagacctagagaagctgcacacccaggagctttccatgacccgggagcatgagtgaatgggggttccagtttgctgaactttgctgtcttgtaagggtgggggctgacggccgaccctgggaggaggtgacatcgcagggggaggttgtgggcaacggtggaggaggagagacgggaggggaccatttgggatggaggggcctcttcagagttttaaaaggcgtttgtggggtggagttgagtgtgctctgggcttggacacttgccgtggtgcccctggctggccgaggagactggctctggccagggccccgtcctgagaggtcctcagcgtctgactctcggccaggcgccagcaaggaggggccggtccccggggctaccaggcaggcacgtgcacatcgccatcgccacacgccaactccgcctgggttttacaaagtcgttgccttaatgcatgtggacaggaactccctgaggtcgccccatgccccctggctgtgccaggtacggacgccctggaccctgcgaacaggtggggcgggcgaggggcccaagggacgggctccagagacacgcgcagggcaggaggggtctcacggaggggtctcgcactgaggcgcccagagctggtggtcccgctggacgccatccctctgcccgggatccacacggcccacgtgtgcccgccatgcccgcgccccacgccattgcagtctgccatcctctggccgtgacggtggctgcagcttccccatttgcgccgttgcctctggctgtctgcacttttgttcatgctccaaagaacatttcataatgccttcagtaccgacgtacacttctgaccattttgtatgtgtccttgtgccgtagtgaccaggcctttttttggtggatgtgttaccccgcacacttcaatctcaactttgtgcaccgtccattttctagggatagacgcccagggaatgaactctagttttctaacagattagctgagatattaacttactcacacggacaggttgatgccagagccgtaagaatgcgccagtgcgggtttgcgggggacttcgggtgtggggtcctgcggccgcgatggccgtggaaggttctggggatccctgctgccacggggacgagttcggacgccaggtggacctgtgcactcagtaaaacgcagtgattcaacctg

SEQ ID NO: 364822 - DNA, 535 bp, Homo sapiens
acgctcagtggagggagccagacggggaaggccgtgcagcttgcgatgcccttggcaggaaatgcccggggcggggaagtccgtggagccccgtacaccctggcggtggccagggcctgggggaccaggaaccaggagcgcctgctgaacgtcggggcaccgcaaaacaaaacaaaggcatagagaacggaaatccagccaggcgaggttcagtctgacgtacaggctcatgccccgagccgggctgagtccccgccctgggaggttggaggctgaggtccctggccctacccatactcccagcgcctcaggttgcccagggcccaaccaggagggcaggaaggtaacccccaggacaggtgatacccgccaggggccaggtaagagtcatgaaaaggaaagaacacagcctccctgcgagctcgctcagggccccgagtcaagccccaaccgctcccctccttcaggccccaccgtctgacaagcgggcttgcctgtctgtcctacagagggtaaactgaggctgtggggctga

SEQ ID NO: 364823 - DNA, 811 bp, Homo sapiens
agacggggaaggccgtgcagcttgcgatgcccttggcaggaaatgcccggggcggggaagtccgtggagccccgtacaccctggcggtggccagggcctgggggaccaggaaccaggagcgcctgctgaacgtcgggggtaggagggggtttatttgggggcgacgaagaggtgtggagttagataggggcagtggtcgcacagcactgtgtgtgcaggcgctactgaagtgcacgctttaacatggctaacatggtgaacttcaggatatgtctatttcagcaccgcaaaacaaaacaaaggcatagagaacggaaatccagccaggcgaggttcagtctgacgtacaggctcatgccccgagccgggctgagtccccgccctgggaggttggaggctgaggtccctggccctacccatactcccagcgcctcaggttgcccagggcccaaccaggagggcaggaaggtaacccccaggacaggtgatacccgccaggggccaggtaagagtcatgaaaaggaaagaacacagcctccctgcgagctcgctcagggccccgagtcaagccccaaccgctcccctccttcaggccccaccgtctgacaagcgggcttgcctgtctgtcctacagagggtaaactgaggctgtggggctgatgcagcactggggcctggcctgctggcccagagtcctgagtgcctggcctacagcatgggggtcccctctgccccgttccctccacgcccggccctcctgggcgcgcccctcgccgcctgcccctcgccaactgccttgtctttccctccg

SEQ ID NO: 364824 - DNA, 858 bp, Homo sapiens
  misc_feature (758)..(758): n is a, c, g, or t
ccccatctcctaggaccagcctgggtcccccccatttcctgggactagcctgggtcccccatttcctgggactagcctgggtctctcctgtttcctggaaccagcctgggcccccccatttcctgggagcagcccgggtccccacatctcctgggactagcctgggtcccccgtttcctgggactagcctgggtctctcctgtttcctggaaccagcctgggcccccccatttcctgggagcagcctgggtccccacatctcctgggacgggccctcgcaccccagcccagcagccccttttgcaggtcttgtccatggagaagaagctggacttcctggtgaatatctacatgcagcggatgggcatccccccgacagagaccgaggcctactttggggccaaagagccggagccggcgccgccgtaccacagcccggaagacagccgggagcatgtcgacaggcacggctgcattgtcaagatcgtgcgctccagcagctccacgggccagaagaacttctcggcgcccccggccgcgccccctgtccagtgtccgccctccacctcctggcagccacagagccacccgcgccagggccacggcacctcccccgtgggggaccacggctccctggtgcgcatcccgccgccgcctgcccacgagcggtcgctgtccgcctacggcgggggcaaccgcgccagcatggagttcctgcggcaggaggacaccccgggctgcaggccccccgaggggancctgcgggacagcgacacgtccatctccatcccgtccgtggaccacgaggagctggagcgttccttcagcggcttcagcatctcccagtccaaggagaac

SEQ ID NO: 364825 - DNA, 7551 bp, Homo sapiens
  misc_feature (2433)..(2433): n is a, c, g, or t
gcgcggagcgaggtggccgcagcgtctccgcgcgcggcccaagcccggcaggagtgcggaaccgccgcctcggccatgcggctcccggccggggggcctgggctggggcccgcgccgccccccgcgctccgcccccgctgagcctgagcccgacccggggcgcctcccgccaggcaccatggtgcagaagtcgcgcaacggcggcgtataccccggcccgagcggggagaagaagctgaaggtgggcttcgtggggctggaccccggcgcgcccgactccacccgggacggggcgctgctgatcgccggctccgaggcccccaagcgcggcagcatcctcagcaaacctcgcgcgggcggcgcgggcgccgggaagccccccaagcgcaacgccttctaccgcaagctgcagaatttcctctacaacgtgctggagcggccgcgcggctgggcgttcatctaccacgcctacgtgttcctcctggttttctcctgcctcgtgctgtctgtgttttccaccatcaaggagtatgagaagagctcggagggggccctctacatcctggaaatcgtgactatcgtggtgtttggcgtggagtacttcgtgcggatctgggccgcaggctgctgctgccggtaccgtggctggagggggcggctcaagtttgcccggaaaccgttctgtgtgattgacatcatggtgctcatcgcctccattgcggtgctggccgccggctcccagggcaacgtctttgccacatctgcgctccggagcctgcgcttcctgcagattctgcggatgatccgcatggaccggcggggaggcacctggaagctgctgggctctgtggtctatgcccacagcaaggagctggtcactgcctggtacatcggcttcctttgtctcatcctggcctcgttcctggtgtacttggcagagaagggggagaacgaccactttgacacctacgcggatgcactctggtggggcctgatcacgctgaccaccattggctacggggacaagtacccccagacctggaacggcaggctccttgcggcaaccttcaccctcatcggtgtctccttcttcgcgctgcctgcaggcatcttggggtctgggtttgccctgaaggttcaggagcagcacaggcagaagcactttgagaagaggcggaacccggcagcaggcctgatccagtcggcctggagattctacgccaccaacctctcgcgcacagacctgcactccacgtggcagtactacgagcgaacggtcaccgtgcccatgtacagacttatccccccgctgaaccagctggagctgctgaggaacctcaagagtaaatctggactcgctttcaggaaggaccccccgccggagccgtctccaagccagaaggtcagtttgaaagatcgtgtcttctccagcccccgaggcgtggctgccaaggggaaggggtccccgcaggcccagactgtgaggcggtcacccagcgccgaccagagcctcgaggacagccccagcaaggtgcccaagagctggagcttcggggaccgcagccgggcacgccaggctttccgcatcaagggtgccgcgtcacggcagaactcagaagaagcaagcctccccggagaggacattgtggatgacaagagctgcccctgcgagtttgtgaccgaggacctgaccccgggcctcaaagtcagcatcagagccgtgtgtgtcatgcggttcctggtgtccaagcggaagttcaaggagagcctgcggccctacgacgtgatggacgtcatcgagcagtactcagccggccacctggacatgctgtcccgaattaagagcctgcagtccagagtggaccagatcgtggggcggggcccagcgatcacggacaaggaccgcaccaagggcccggccgaggcggagctgcccgaggaccccagcatgatgggacggctcgggaaggtggagaagcaggtcttgtccatggagaagaagctggacttcctggtgaatatctacatgcagcggatgggcatccccccgacagagaccgaggcctactttggggccaaagagccggagccggcgccgccgtaccacagcccggaagacagccgggagcatgtcgacaggcacggctgcattgtcaagatcgtgcgctccagcagctccacgggccagaagaacttctcggcgcccccggccgcgccccctgtccagtgtccgccctccacctcctggcagccacagagccacccgcgccagggccacggcacctcccccgtgggggaccacggctccctggtgcgcatcccgccgccgcctgcccacgagcggtcgctgtccgcctacggcgggggcaaccgcgccagcatggagttcctgcggcaggaggacaccccgggctgcaggccccccgaggggancctgcgggacagcgacacgtccatctccatcccgtccgtggaccacgaggagctggagcgttccttcagcggcttcagcatctcccagtccaaggagaacctggatgctctcaacagctgctacgcggccgtggcgccttgtgccaaagtcaggccctacattgcggagggagagtcagacaccgactccgacctctgtaccccgtgcgggcccccgccacgctcggccaccggcgagggtccctttggtgacgtgggctgggccgggcccaggaagtgaggcggcgctgggccagtggacccgcccgcggccctcctcagcacggtgcctccgaggttttgaggcgggaaccctctggggcccttttcttacagtaactgagtgtggcgggaagggtgggccctggaggggcccatgtgggctgaaggatgggggctcctggcagtgaccttttacaaaagttattttccaacagggcactcccaggccctgtcgccattgaggtgcctccgctgggctgtctcctcacccctccctgtgctggagcctgtcccaaaaaggtgccaactgggaggcctcggaagccactgtccaggctcccactgcctgtctgctctgttcccaaaggcagcgtgtgtggcctcgggccctgcggtggcatgaagcatcccttctggtgtgggcatcgctacgtgttttgggggcagcgtttcacggcggtgcccttgctgtctcccttgggctggctcgagcctggggtccatgtccctttgccgtcccgtcatggggcagggaatccatagcggggcccacaggcaggggtatgagtgcgtcccacccaacgcagcaccagccccggccaccgctccccgtgtccccagttccgtctcagctacctggactccaggaccctggagaagggagacctggcagtggagggaggctgtgctgtgtgtccccctgcaggtgtgaccccgcctgctctttcctcccccgccaggtgtggccccgcctgctctttcctcccccaccagtatggccccacctgctctttcctccccccccaaggtgtggccccacctgttctttcctcccctgccgaggtgtgaccccacctgctctttcctccctcccagtatggccccacctgctctttcctcccccgaggtgaggccccgcctgctctttcctcccatgggagccgctgaggcgtgcgcacctgggcacaggttggggctctgcaggatgaggaagacaggccaatcccttccctcccagaagctggccgcccagcaggagggactgaggccagactcatgtccagcaaggaacgtgtggtgtgtcccctgggaagtctctgggccctgggaagagggaaggtgcacgtcctgggatggttgcggggccctgttttgggagacaaaggggtagagggtctgtcttgggcccccccagactctagcccgagcagtgcagccacctactgccccacctcagagaagtgcagcgggaaggaggctggaggtggtgcggcgctgcctcgggtgtctgcgtgaatgagcgtggccaaggaccagtgccacctcatggcaaagagctcccgcagtgtttgttagagtgcacatccctacgtgcccactggcacacacacgtgctcacatacatgtccgcgtacaggcgtacacatgcacgcttgcacacatgcacacagaccacatagcacacatgtgcactgaccacacctgtatagaccatgcacagtacacatacgtgcatacacatgcctgcatacaggcatacacatgcacgcttacatgtacacgtgcacagatcacacacatgcacacacgtgtagctcacacacagtatacacatacacaagtgcacagaccacacacagcactaacacatgcacacacaaagtgcataggccacacagcacatgcacacaggtgcacagaccacacagcacacacaagtgcacagagcacactgcacacatgcacacacacacgcgtgcatgcacactcctcgcacttccagccttggagcccttctgtctctggtctttctctttgaccctgctgagtgtaagctgcctggggaggggctacaaggagtaattgtggctttaggggtcgtggtgatgctggaatgtcaagcgccgtcgtggggtatccgactgtccgggctcctggtccgcagtggcagagcgccaggcagagcccaatcagggtctcgtgctgcccttcccccccacagcctggcagccatccagaggaggggctctaccagatgccaaggtgccccggtgtctgtatgggtgtccggttgggtcctgtgtttggtctgccctggaggtggctgggccctcctgggatgggtggctcagcctcgaatcccaggccccagcccaggcaggtgctgctgcctgttgtggtttcctggcccagcttctccttctccctctgcataaaatcacagtccgtgagtcttccagctgccaccacggctgggacacgctgggggagggctcctcccatgcctcctgcacacagccgtctgagcagggcaggtgccaacaccccccaccggagacacgctgcccctcagcgatgcccctaccttttggggggcctcgtctcaagcccccccttggaggctgaaatcaccccaggcactgtgagggcttctccagggggacaccctttgagctgtgggtctgatcaccccaagtcccgcacacggaggagaggcacagccagggcgtgtggtttaatgtttgccccttcggggctggaggtctcagtgtttctagattccagaccctgctgccagagagacctgctgccggagagaaggggaggaggactccagctgggctcggtcccccacagtcagggacccccataaaggacacccccttctctctagaaagagctgggctctcagctatttctagttgcttcccagaagccgaggagcagaaggagctgtgagagctttgcagaaacgcccttgtccccgccctcctgagctatgaatgccgtacagagcagaggctggggcattggcaagatcacaggttgatgctgcacagccccattgacacaaaccctcaaagcagacgtgagagggacggttcacaaagctcggacctgccgtggagggtgcccggcagacgtggcgtgagagggacggctcacgaggcttggacctgctgtggagggtgcccagcagacgtggtgtgagaggaacggctcacgagacttggacctggtggagggtgcccagcagacgtggtgtgagagggacggctcacagggcttggaccggagagagatggctcatgagacttggacctgccgtggagggtgcccagcagacgtggtatgagagggatggctcacgaggcttggacctggtggagggtgcccggcagacgtgtgagagggacggttcacaaggcttggacctgccatggagggtgcccagcagacgtggtgtgagagggacagctcacgaggcttggacctgccgtggagggtgcccagcagggggctgagctctgaggggtgggtgctcagtgcacgggtgcccccagtgtcctctgatcctgtccggtgcctcccccaacccccacacccatgcagaactcccaggtcacatgcacgtatgtccagggcatgggggtggcgtgaagaggcctggtcagggcctttaggggctgcaggacggaatggccacctggggagcctgtgtggctgtgccgggcagccatcctgcattcccacccagcgcgcagtctccacctcggccccagcaaagcgctaagcagccggagagacagccagggcggcttcctgaaggatgtgggatggtggactccggggtcgagggaatacgcaggttcctgtccctccgggagacctagagaagctgcacacccaggagctttccatgacccgggagcatgagtgaatgggggttccagtttgctgaactttgctgtcttgtaagggtgggggctgacggccgaccctgggaggaggtgacatcgcagggggaggttgtgggcaacggtggaggaggagagacgggaggggaccatttgggatggaggggcctcttcagagttttaaaaggcgtttgtggggtggagttgagtgtgctctgggcttggacacttgccgtggtgcccctggctggccgaggagactggctctggccagggccccgtcctgagaggtcctcagcgtctgactctcggccaggcgccagcaaggaggggccggtccccggggctaccaggcaggcacgtgcacatcgccatcgccacacgccaactccgcctgggttttacaaagtcgttgccttaatgcatgtggacaggaactccctgaggtcgccccatgccccctggctgtgccaggtacggacgccctggaccctgcgaacaggtggggcgggcgaggggcccaagggacgggctccagagacacgcgcagggcaggaggggtctcacggaggggtctcgcactgaggcgcccagagctggtggtcccgctggacgccatccctctgcccgggatccacacggcccacgtgtgcccgccatgcccgcgccccacgccattgcagtctgccatcctctggccgtgacggtggctgcagcttccccatttgcgccgttgcctctggctgtctgcacttttgttcatgctccaaagaacatttcataatgccttcagtaccgacgtacacttctgaccattttgtatgtgtccttgtgccgtagtgaccaggcctttttttggtggatgtgttaccccgcacacttcaatctcaactttgtgcaccgtccattttctagggatagacgcccagggaatgaactctagttttctaacagattagctgagatattaacttactcacacggacaggttgatgccagagccgtaagaatgcgccagtgcgggtttgcgggggacttcgggtgtggggtcctgcggccgcgatggccgtggaaggttctggggatccctgctgccacggggacgagttcggacgccaggtggacctgtgcactcagtaaaacgcagtgattcaacctg

SEQ ID NO: 364826 - DNA, 651 bp, Homo sapiens
  misc_feature (241)..(241): n is a, c, g, or t
caggtttacaatgttagaattttaaccgcccccaataggatttggccctgagccaaaaaattggggcgagggggttttcccccacccccgaggtgctccaaaggaaaagggtcccccgcagcccagtttgtgggggtccccccggccccacaaaattctgagcacccccccaagagggacagagtggagttggggccccaaaacgcggccccccctttctctcataggggccgctcgggcnaaaatcttaaaaaagacacctccccggggaacttggggaacaaaccggccttggagtttgccaggggcctttcccccggccataaagcagatcaaacgtgtgtgtcatgcggttcctggtgtccaagcggaagttcaaggagagcctgcggccctacgacgtgatggacgtcatcgagcagtactcagccggccacctggacatgctgtcccgaattaagagcctgcagtccaggcaagagccccgcctgcctgtccagcaggggacaagaacggggtgggcttctgggacaaagcccactgtggcccatggtgggagtgcagggggtgtgtgggcggggcctcctccccacccacgtcggcctctgtcagcttctgttgtgtcttcacaaagtctgttttaatatttct

SEQ ID NO: 364827 - DNA, 6987 bp, Homo sapiens
  misc_feature (2427)..(2427): n is a, c, g, or t
gcgcggagcgaggtggccgcagcgtctccgcgcgcggcccaagcccggcaggagtgcggaaccgccgcctcggccatgcggctcccggccggggggcctgggctggggcccgcgccgccccccgcgctccgcccccgctgagcctgagcccgacccggggcgcctcccgccaggcaccatggtgcagaagtcgcgcaacggcggcgtataccccggcccgagcggggagaagaagctgaaggtgggcttcgtggggctggaccccggcgcgcccgactccacccgggacggggcgctgctgatcgccggctccgaggcccccaagcgcggcagcatcctcagcaaacctcgcgcgggcggcgcgggcgccgggaagccccccaagcgcaacgccttctaccgcaagctgcagaatttcctctacaacgtgctggagcggccgcgcggctgggcgttcatctaccacgcctacgtgttcctcctggttttctcctgcctcgtgctgtctgtgttttccaccatcaaggagtatgagaagagctcggagggggccctctacatcctggaaatcgtgactatcgtggtgtttggcgtggagtacttcgtgcggatctgggccgcaggctgctgctgccggtaccgtggctggagggggcggctcaagtttgcccggaaaccgttctgtgtgattgacatcatggtgctcatcgcctccattgcggtgctggccgccggctcccagggcaacgtctttgccacatctgcgctccggagcctgcgcttcctgcagattctgcggatgatccgcatggaccggcggggaggcacctggaagctgctgggctctgtggtctatgcccacagcaaggagctggtcactgcctggtacatcggcttcctttgtctcatcctggcctcgttcctggtgtacttggcagagaagggggagaacgaccactttgacacctacgcggatgcactctggtggggcctgatcacgctgaccaccattggctacggggacaagtacccccagacctggaacggcaggctccttgcggcaaccttcaccctcatcggtgtctccttcttcgcgctgcctgcaggcatcttggggtctgggtttgccctgaaggttcaggagcagcacaggcagaagcactttgagaagaggcggaacccggcagcaggcctgatccagtcggcctggagattctacgccaccaacctctcgcgcacagacctgcactccacgtggcagtactacgagcgaacggtcaccgtgcccatgtacagttcgcaaactcaaacctacggggcctccagacttatccccccgctgaaccagctggagctgctgaggaacctcaagagtaaatctggactcgctttcaggaaggaccccccgccggagccgtctccaagcccccgaggcgtggctgccaaggggaaggggtccccgcaggcccagactgtgaggcggtcacccagcgccgaccagagcctcgaggacagccccagcaaggtgcccaagagctggagcttcggggaccgcagccgggcacgccaggctttccgcatcaagggtgccgcgtcacggcagaactcagaagaagcaagcctccccggagaggacattgtggatgacaagagctgcccctgcgagtttgtgaccgaggacctgaccccgggcctcaaagtcagcatcagagccgtgtgtgtcatgcggttcctggtgtccaagcggaagttcaaggagagcctgcggccctacgacgtgatggacgtcatcgagcagtactcagccggccacctggacatgctgtcccgaattaagagcctgcagtccagagtggaccagatcgtggggcggggcccagcgatcacggacaaggaccgcaccaagggcccggccgaggcggagctgcccgaggaccccagcatgatgggacggctcgggaaggtggagaagcaggtcttgtccatggagaagaagctggacttcctggtgaatatctacatgcagcggatgggcatccccccgacagagaccgaggcctactttggggccaaagagccggagccggcgccgccgtaccacagcccggaagacagccgggagcatgtcgacaggcacggctgcattgtcaagatcgtgcgctccagcagctccacgggccagaagaacttctcggcgcccccggccgcgccccctgtccagtgtccgccctccacctcctggcagccacagagccacccgcgccagggccacggcacctcccccgtgggggaccacggctccctggtgcgcatcccgccgccgcctgcccacgagcggtcgctgtccgcctacggcgggggcaaccgcgccagcatggagttcctgcggcaggaggacaccccgggctgcaggccccccgaggggancctgcgggacagcgacacgtccatctccatcccgtccgtggaccacgaggagctggagcgttccttcagcggcttcagcatctcccagtccaaggagaacctggatgctctcaacagctgctacgcggccgtggcgccttgtgccaaagtcaggccctacattgcggagggagagtcagacaccgactccgacctctgtaccccgtgcgggcccccgccacgctcggccaccggcgagggtccctttggtgacgtgggctgggccgggcccaggaagtgaggcggcgctgggccagtggacccgcccgcggccctcctcagcacggtgcctccgaggttttgaggcgggaaccctctggggcccttttcttacagtaactgagtgtggcgggaagggtgggccctggaggggcccatgtgggctgaaggatgggggctcctggcagtgaccttttacaaaagttattttccaacagggcactcccaggccctgtcgccattgaggtgcctccgctgggctgtctcctcacccctccctgtgctggagcctgtcccaaaaaggtgccaactgggaggcctcggaagccactgtccaggctcccactgcctgtctgctctgttcccaaaggcagcgtgtgtggcctcgggccctgcggtggcatgaagcatcccttctggtgtgggcatcgctacgtgttttgggggcagcgtttcacggcggtgcccttgctgtctcccttgggctggctcgagcctggggtccatgtccctttgccgtcccgtcatggggcagggaatccatagcggggcccacaggcaggggtatgagtgcgtcccacccaacgcagcaccagccccggccaccgctccccgtgtccccagttccgtctcagctacctggactccaggaccctggagaagggagacctggcagtggagggaggctgtgctgtgtgtccccctgcaggtgtgaccccgcctgctctttcctcccccgccaggtgtggccccgcctgctctttcctcccccaccagtatggccccacctgctctttcctccccccccaaggtgtggccccacctgttctttcctcccctgccgaggtgtgaccccacctgctctttcctccctcccagtatggccccacctgctctttcctcccccgaggtgaggccccgcctgctctttcctcccatgggagccgctgaggcgtgcgcacctgggcacaggttggggctctgcaggatgaggaagacaggccaatcccttccctcccagaagctggccgcccagcaggagggactgaggccagactcatgtccagcaaggaacgtgtggtgtgtcccctgggaagtctctgggccctgggaagagggaaggtgcacgtcctgggatggttgcggggccctgttttgggagacaaaggggtagagggtctgtcttgggcccccccagactctagcccgagcagtgcagccacctactgccccacctcagagaagtgcagcgggaaggaggctggaggtggtgcggcgctgcctcgggtgtctgcgtgaatgagcgtggccaaggaccagtgccacctcatggcaaagagctcccgcagtgtttgttagagtgcacatccctacgtgcccactggcacacacacgtgctcacatacatgtccgcgtacaggcgtacacatgcacgcttgcacacatgcacacagaccacatagcacacatgtgcactgaccacacctgtatagaccatgcacagtacacatacgtgcatacacatgcctgcatacaggcatacacatgcacgcttacatgtacacgtgcacagatcacacacatgcacacacgtgtagctcacacacagtatacacatacacaagtgcacagaccacacacagcactaacacatgcacacacaaagtgcataggccacacagcacatgcacacaggtgcacagaccacacagcacacacaagtgcacagagcacactgcacacatgcacacacacacgcgtgcatgcacactcctcgcacttccagccttggagcccttctgtctctggtctttctctttgaccctgctgagtgtaagctgcctggggaggggctacaaggagtaattgtggctttaggggtcgtggtgatgctggaatgtcaagcgccgtcgtggggtatccgactgtccgggctcctggtccgcagtggcagagcgccaggcagagcccaatcagggtctcgtgctgcccttcccccccacagcctggcagccatccagaggaggggctctaccagatgccaaggtgccccggtgtctgtatgggtgtccggttgggtcctgtgtttggtctgccctggaggtggctgggccctcctgggatgggtggctcagcctcgaatcccaggccccagcccaggcaggtgctgctgcctgttgtggtttcctggcccagcttctccttctccctctgcataaaatcacagtccgtgagtcttccagctgccaccacggctgggacacgctgggggagggctcctcccatgcctcctgcacacagccgtctgagcagggcaggtgccaacaccccccaccggagacacgctgcccctcagcgatgcccctaccttttggggggcctcgtctcaagcccccccttggaggctgaaatcaccccaggcactgtgagggcttctccagggggacaccctttgagctgtgggtctgatcaccccaagtcccgcacacggaggagaggcacagccagggcgtgtggtttaatgtttgccccttcggggctggaggtctcagtgtttctagattccagaccctgctgccagagagacctgctgccggagagaaggggaggaggactccagctgggctcggtcccccacagtcagggacccccataaaggacacccccttctctctagaaagagctgggctctcagctatttctagttgcttcccagaagccgaggagcagaaggagctgtgagagctttgcagaaacgcccttgtccccgccctcctgagctatgaatgccgtacagagcagaggctggggcattggcaagatcacaggttgatgctgcacagccccattgacacaaaccctcaaagcagacgtgagagggacggttcacaaagctcggacctgccgtggagggtgcccggcagacgtggcgtgagagggacggctcacgaggcttggacctgctgtggagggtgcccagcagacgtggtgtgagaggaacggctcacgagacttggacctggtggagggtgcccagcagacgtggtgtgagagggacggctcacagggcttggacctgccatggagggtgcccggcagacgtggtgtgagagggatggttcacagggcttggacctgccatggagggtgcccggcagatgtggtcggagagagatggctcatgagacttggacctgccgtggagggtgcccagcagacgtggtatgagagggatggctcacgaggcttggacctggtggagggtgcccggcagacgtgtgagagggacggttcacaaggcttggacctgccatggagggtgcccagcagacgtggtgtgagagggacagctcacgaggcttggacctgccgtggagggtgcccagcagggggctgagctctgaggggtgggtgctcagtgcacgggtgcccccagtgtcctctgatcctgtccggtgcctcccccaacccccacacccatgcagaactcccaggtcacatgcacgtatgtccagggcatgggggtggcgtgaagaggcctggtcagggcctttaggggctgcaggacggaatggccacctggggagcctgtgtggctgtgccgggcagccatcctgcattcccacccagcgcgcagtctccacctcggccccagcaaagcgctaagcagccggagagacagccagggcggcttcctgaaggatgtgggatggtggactccggggtcgagggaatacgcaggttcctgtccctccgggagacctagagaagctgcacacccaggagctttccatgacccgggagcatgagtgaatgggggttccagtttgctgaactttgctgtcttgtaagggtgggggctgttggtgtggcttgactgtgccgaaccctgtgtgagtgacggttgaccatctgcctgtgtgtgtgatgtgtttgttgtggcaactgtgtggatgtgatgtgcagatgactgtgcgatgggtggacccatttggggattggatgtgtggccctcattcagaaagtttctaaaaatgggcggttttgttgcggtgttgggagattgagttgtggctcttggtgctatgtgagcactatgtcctgttgtgtgtcgccctgtgtctgtgcgctgatgtgatgacttgtgctcttggcgcaggggtgcccccctggtccttgatggagtggtcctcaagctgtctaggagtcctctggggcatgtgctgtccagcaatggatggggcctgtgtcccccgggggcgtacacagggcatggcgacgtgcacattcgccatctgcaca

SEQ ID NO: 364828 - DNA, 3615 bp, Homo sapiens
  misc_feature (2517)..(2517): n is a, c, g, or t
gcgcggagcgaggtggccgcagcgtctccgcgcgcggcccaagcccggcaggagtgcggaaccgccgcctcggccatgcggctcccggccggggggcctgggctggggcccgcgccgccccccgcgctccgcccccgctgagcctgagcccgacccggggcgcctcccgccaggcaccatggtgcagaagtcgcgcaacggcggcgtataccccggcccgagcggggagaagaagctgaaggtgggcttcgtggggctggaccccggcgcgcccgactccacccgggacggggcgctgctgatcgccggctccgaggcccccaagcgcggcagcatcctcagcaaacctcgcgcgggcggcgcgggcgccgggaagccccccaagcgcaacgccttctaccgcaagctgcagaatttcctctacaacgtgctggagcggccgcgcggctgggcgttcatctaccacgcctacgtgttcctcctggttttctcctgcctcgtgctgtctgtgttttccaccatcaaggagtatgagaagagctcggagggggccctctacatcctggaaatcgtgactatcgtggtgtttggcgtggagtacttcgtgcggatctgggccgcaggctgctgctgccggtaccgtggctggagggggcggctcaagtttgcccggaaaccgttctgtgtgattgacatcatggtgctcatcgcctccattgcggtgctggccgccggctcccagggcaacgtctttgccacatctgcgctccggagcctgcgcttcctgcagattctgcggatgatccgcatggaccggcggggaggcacctggaagctgctgggctctgtggtctatgcccacagcaaggagctggtcactgcctggtacatcggcttcctttgtctcatcctggcctcgttcctggtgtacttggcagagaagggggagaacgaccactttgacacctacgcggatgcactctggtggggcctgatcacgctgaccaccattggctacggggacaagtacccccagacctggaacggcaggctccttgcggcaaccttcaccctcatcggtgtctccttcttcgcgctgcctgcaggcatcttggggtctgggtttgccctgaaggttcaggagcagcacaggcagaagcactttgagaagaggcggaacccggcagcaggcctgatccagtcggcctggagattctacgccaccaacctctcgcgcacagacctgcactccacgtggcagtactacgagcgaacggtcaccgtgcccatgtacagttcgcaaactcaaacctacggggcctccagacttatccccccgctgaaccagctggagctgctgaggaacctcaagagtaaatctggactcgctttcaggaaggaccccccgccggagccgtctccaagtaaaggcagcccgtgcagagggcccctgtgtggatgctgccccggacgctctagccagaaggtcagtttgaaagatcgtgtcttctccagcccccgaggcgtggctgccaaggggaaggggtccccgcaggcccagactgtgaggcggtcacccagcgccgaccagagcctcgaggacagccccagcaaggtgcccaagagctggagcttcggggaccgcagccgggcacgccaggctttccgcatcaagggtgccgcgtcacggcagaactcagaagaagcaagcctccccggagaggacattgtggatgacaagagctgcccctgcgagtttgtgaccgaggacctgaccccgggcctcaaagtcagcatcagagccgtgtgtgtcatgcggttcctggtgtccaagcggaagttcaaggagagcctgcggccctacgacgtgatggacgtcatcgagcagtactcagccggccacctggacatgctgtcccgaattaagagcctgcagtccagagtggaccagatcgtggggcggggcccagcgatcacggacaaggaccgcaccaagggcccggccgaggcggagctgcccgaggaccccagcatgatgggacggctcgggaaggtggagaagcaggtcttgtccatggagaagaagctggacttcctggtgaatatctacatgcagcggatgggcatccccccgacagagaccgaggcctactttggggccaaagagccggagccggcgccgccgtaccacagcccggaagacagccgggagcatgtcgacaggcacggctgcattgtcaagatcgtgcgctccagcagctccacgggccagaagaacttctcggcgcccccggccgcgccccctgtccagtgtccgccctccacctcctggcagccacagagccacccgcgccagggccacggcacctcccccgtgggggaccacggctccctggtgcgcatcccgccgccgcctgcccacgagcggtcgctgtccgcctacggcgggggcaaccgcgccagcatggagttcctgcggcaggaggacaccccgggctgcaggccccccgaggggancctgcgggacagcgacacgtccatctccatcccgtccgtggaccacgaggagctggagcgttccttcagcggcttcagcatctcccagtccaaggagaacctggatgctctcaacagctgctacgcggccgtggcgccttgtgccaaagtcaggccctacattgcggagggagagtcagacaccgactccgacctctgtaccccgtgcgggcccccgccacgctcggccaccggcgagggtccctttggtgacgtgggctgggccgggcccaggaagtgaggcggcgctgggccagtggacccgcccgcggccctcctcagcacggtgcctccgaggttttgaggcgggaaccctctggggcccttttcttacagtaactgagtgtggcgggaagggtgggccctggaggggcccatgtgggctgaaggatgggggctcctggcagtgaccttttacaaaagttattttccaacaggggctggagggctgggcagggccctgtggctccaggagcagcgtgcaggagcaaggctgccctgtccactctgctcagggccgcggccgacatcagcccggtgtgaggaggggcgggagtgatgacggggtgttgccagcgtggcaacaggcggggggttgtctcagccgagcccaggggaggcacaaagggcaggcctgttccctgaggacctgcgcaaagggcgggcctgtttggtgaggacctgcggccttgggtcccggtggggtttccgggcagctacaggcgggtgtggccggccgctgtgcgtggcctctgccttcacacctgacctgcccggcgggctttcctgttccccacctcaggggcgcccaaatacagagctattggttggcgtcttctccctgtaaaacacaaaaaaaaaaaaaaaaaaaaaccccgcggggcttcttatggagcgcgggcggcggggaaacaagagaggtgtcacgagaattggcgccattggggcaataggctggttccctgagcccacagctcttctgggtccacagggggcgaaatcgggcgggcccccctaaagggggggccggatactcccgaaaacgccgggtacccgagg

SEQ ID NO: 364829 - DNA, 1342 bp, Homo sapiens
gcgcggagcgaggtggccgcagcgtctccgcgcgcggcccaagcccggcaggagtgcggaaccgccgcctcggccatgcggctcccggccggggggcctgggctggggcccgcgccgccccccgcgctccgcccccgctgagcctgagcccgacccggggcgcctcccgccaggcaccatggtgcagaagtcgcgcaacggcggcgtataccccggcccgagcggggagaagaagctgaaggtgggcttcgtggggctggaccccggcgcgcccgactccacccgggacggggcgctgctgatcgccggctccgaggcccccaagcgcggcagcatcctcagcaaacctcgcgcgggcggcgcgggcgccgggaagccccccaagcgcaacgccttctaccgcaagctgcagaatttcctctacaacgtgctggagcggccgcgcggctgggcgttcatctaccacgcctacgtgttcctcctggttttctcctgcctcgtgctgtctgtgttttccaccatcaaggagtatgagaagagctcggagggggccctctacatcctggaaatcgtgactatcgtggtgtttggcgtggagtacttcgtgcggatctgggccgcaggctgctgctgccggtaccgtggctggagggggcggctcaagtttgcccggaaaccgttctgtgtgattgacatcatggtgctcatcgcctccattgcggtgctggccgccggctcccagggcaacgtctttgccacatctgcgctccggagcctgcgcttcctgcagattctgcggatgatccgcatggaccggcggggaggcacctggaagctgctgggctctgtggtctatgcccacagcaaggagctggtcactgcctggtacatcggcttcctttgtctcatcctggcctcgttcctggtgtacttggcagagaagggggagaacgaccactttgacacctacgcggatgcactctggtggggcctgatcacgctgaccaccattggctacggggacaagtacccccagacctggaacggcaggctccttgcggcaaccttcaccctcatcggtgtctccttcttcgcgctgcctgcaggcatcttggggtctgggtttgccctgaaggttcaggagcagcacaggcagaagcactttgagaagaggcggaacccggcagcaggcctgatccaggtgagtccaggtgtcccccggggaccagcacagcccttgtcctggtcccaccttgttgaggagtggaggccgctggggctttggcattgccctgtctgtggatgggccacagcgctcaccctctgcaggaatctgtggaag

SEQ ID NO: 364830 - DNA, 914 bp, Homo sapiens
cctgagcaacatggagaaaccctgtctctactaaaaattcaaaattagtcaggcgtggtggcacatgcctgtaatctcagctattccggaggctgaggcaggagagaacacttgaacccgggaggcggaggttgtggtgagccaagattgtgccattgccctccagcctgggcaacaagagcaaaactctgtctcaaaaataaaaaaaataaacaattgaatacaaggatttttaatatctgcctaatacttatgccttcatcgcattaatgtgctacgcttgatttaattgttcccttttgatattcagtttatttccagtttgatgctgcaataccactgtgctgaacgtctctggcacattcatcttggttgcaattgtactttaggctatatttctaagagtgaaatgaccacagccaaaggtatgaacattgttcaggctttcaataaagactgccagatatttacaaagattgtgccaatctctattctcaccaccgcttttgattattgtccttatctctgcttgccactgagccccgggccatgtctctgtaactcactaacggccacatcccatttacttccccatgagtaggatttcagtttcccaaacctgagatgatctgtcagctggagaactgggacgagcagtggatcctggatctaccgagaactgggaataggaaggcttccggtagtgcttgcccaggtgggtgaggaagagacccaggcgagtggaatcaggaagaggaagggaaggcatgttagtgaagccccttctgtgtgccagacgctgagccaggtgctgggcatatattatcccacttcttcatccctactgccctgtgaagtgggaggaagatcggcgtccccatttcccagatgaagaaactaagattaagaaatct

SEQ ID NO: 364831 - DNA, 965 bp, Homo sapiens
agccagcgagaggctctgaggctgccagagtggttgtgtctgttcctccggtaaggggtgattcgccgaggggcgcggaccagacagacctcgggtcaggcccgggaaccccgagaggagagcccagcccctggtggaggcggcttggcggagattcggagccgtcagcagctcagccagacgtccaggatcccaccccttgcaaaagaccaggccgtggaagccatgttcccaccagccagggggaaggagctgctctcgtttgaggatgtggcgatgtacttcaccagagaggagtggggccacctcaactggggtcagaaggacctctaccgagatgtgatgttggagaactacaggaacatggtcttgctgggatttcagtttcccaaacctgagatgatctgtcagctggagaactgggacgagcagtggatcctggatctaccgagaactgggaataggaaggcttccggtagtgcttgcccaggttctgaagccagacacaagatgaaaaagctaactccaaaacagaaattttctgaagatttagagtcatataagatatcagtggtaatgcaggaatcagctgagaaactttcagaaaagttacataagtgtaaagaatttgtggacagttgcaggcttactttccctactagtggtgatgaatacagcaggggcttccttcaaaaccttaaccttattcaagatcagaatgcgcaaacaaggtggaagcagggcagatatgatgaggatggcaaacccttcaatcaaagatctttgcttttggggcatgagcgaattctcacaagagcaaagtcttatgaatgcagtgaatgtggaaaagtcattaggcgtaaggcatggtttgatcaacatcaaagaattcactttttagagaatccttttgagtgtaaggtctgtgggcaagccttcagacagcggtcagctcttacggtcca

SEQ ID NO: 364832 - DNA, 887 bp, Homo sapiens
agccagcgagaggctctgaggctgccagagtggttgtgtctgttcctccggtaaggggtgattcgccgaggggcgcggaccagacagacctcgggtcaggcccgggaaccccgagaggagagcccagcccctggtggaggcggcttggcggagattcggagccgtcagcaggagctgctctcgtttgaggatgtggcgatgtacttcaccagagaggagtggggccacctcaactggggtcagaaggacctctaccgagatgtgatgttggagaactacaggaacatggtcttgctgggatttcagtttcccaaacctgagatgatctgtcagctggagaactgggacgagcagtggatcctggatctaccgagaactgggaataggaaggcttccggtagtgcttgcccaggttctgaagccagacacaagatgaaaaagctaactccaaaacagaaattttctgaagatttagagtcatataagatatcagtggtaatgcaggaatcagctgagaaactttcagaaaagttacataagtgtaaagaatttgtggacagttgcaggcttactttccctactagtggtgatgaatacagcaggggcttccttcaaaaccttaaccttattcaagatcagaatgcgcaaacaaggtggaagcagggcagatatgatgaggatggcaaacccttcaatcaaagatctttgcttttggggcatgagcgaattctcacaagagcaaagtcttatgaatgcagtgaatgtggaaaagtcattaggcgtaaggcatggtttgatcaacatcaaagaattcactttttagagaatccttttgagtgtaaggtctgtgggcaagccttcagacagcggtcagctcttacggtcca

SEQ ID NO: 364833 - DNA, 743 bp, Homo sapiens
agccagcgagaggctctgaggctgccagagtggttgtgtctgttcctccggtaaggggtgattcgccgaggggcgcggaccagacagacctcgggtcaggcccgggaaccccgagaggagagcccagcccctggtggaggcggcttggcggagattcggagccgtcagcagctcagccagacgtccaggatcccaccccttgcaaaagaccaggccgtggaagccatgttcccaccagccagggggaaggggaatgcagatggctgagtaggtcagattgaggacatggcagcgcagctctggtaaaagagtgacactctggataatggagctgctctcgtttgaggatgtggcgatgtacttcaccagagaggagtggggccacctcaactggggtcagaaggacctctaccgagatgtgatgttggagaactacaggaacatggtcttgctgggtaggacacggcttgaagattgggctttgtctgtgttctgagtgtctgtgcaagcccttagtcccttatctgcaattccagaatcagaaaaagcggtgaaaaccgaaaggtttttttataactcgtgtggctacaagccctgaccagacatcaccacagtgaaacctgacttcatcctataggaaaccatttattgtctttatttttccaacttggtgtgcatatctgtatacccaacttcagaaataacagtgtaggccaggtgcggtggctcacacctgtaatccc

SEQ ID NO: 364834 - DNA, 528 bp, Homo sapiens
gtccgagccggtggccgagctccggcaagggcgggaaccttcaggattaaatagacagggtctggctctgtcgcccaggctggactgcagtggcgcgatttcggctcactgcaacttctgtctcccgggttcaagcaattctccagcttcagcctcccaagtatctaggactacaggcggactctcgctctgtcgccaggctgtcttagcctcctgagtagcttggactacaggcgcgcgccaccatgcccggctactttctgtattttagtagagatggggtttcaccatgttggtcaggctggtctggaactcctgacctcgtgatccgcctgccccggcctcccaaagtgctgggattacaggcgtgagccgctgcgcccagttggaaaaagttttgttttttttttaaaactaagtgcttccatgtacatcagatgttaacgactttgatcctaacaaacaaacaaaaaagatgaggaaattgaggctcaaagatgtgtcctggcctggctcagtggcgtatgc

SEQ ID NO: 364835 - DNA, 472 bp, Homo sapiens
tcattgagcgtaagttattttaagaattgcagttacctttatcagctacttttccaggagctgctctcgtttgaggatgtggcgatgtacttcaccagagaggagtggggccacctcaactggggtcagaaggacctctaccgagatgtgatgttggagaactacaggaacatggtcttgctgggtaggacacggcttgaagattgggctttgtctgtgttctgagtgtctgtgcaagcccttagtcccttatctgcaattccagaatcagaaaaagcggtgaaaaccgaaaggtttttttataactcgtgtggctacaagccctgaccagacatcaccacagtgaaacctgacttcatcctataggaaaccatttattgtctttatttttccaacttggtgtgcatatctgtatacccaacttcagaaataacagtgtaggccaggtgcggtggctcacacctgtaatccc

SEQ ID NO: 364836 - DNA, 439 bp, Homo sapiens
gaggatctcggttgagatggagaccaggcttgagatggagaccgggaatgcagatggctgagtaggtcagattgaggacatggcagcgcagctctggtaaaagagtgacactctggataatggtgagaaagggcctgcaaccgtagcagtggaactcaggtttgataggcaggaaagaaagtccgtataatttgggaggttctggtgcctgcctgcagaggggagctacgtgaagcttctcaggatggtctcaggatgggggtgggcatttcctgttactgaccacttataggacagcgaacgtttgccctttccctgcacacatcccctctgaacccatgcagtgtcttgtgagagcaaggagtgtgtagacagccgctgggcccctttgcccagagggctgcagtggtgtgggagggagagtgtggcagcttcagtg

SEQ ID NO: 364837 - DNA, 1133 bp, Homo sapiens
agccagcgagaggctctgaggctgccagagtggttgtgtctgttcctccggtaaggggtgattcgccgaggggcgcggaccagacagacctcgggtcaggcccgggaaccccgagaggagagcccagcccctggtggaggcggcttggcggagattcggagccgtcagcagctcagccagacgtccaggatcccaccccttgcaaaagaccaggccgtggaagccatgttcccaccagccagggggaaggagctgctctcgtttgaggatgtggcgatgtacttcaccagagaggagtggggccacctcaactggggtcagaaggacctctaccgagatgtgatgttggagaactacaggaacatggtcttgctggtttatttccagtttgatgctgcaataccactgtgctgaacgtctctggcacattcatcttggttgcaattgtactttaggctatatttctaagagtgaaatgaccacagccaaaggtatgaacattgttcaggctttcaataaagactgccagatatttacaaagattgtgccaatctctattctcaccaccgcttttgattattgtccttatctctgcttgccactgagccccgggccatgtctctgtaactcactaacggccacatcccatttacttccccatgagtaggatttcagtttcccaaacctgagatgatctgtcagctggagaactgggacgagcagtggatcctggatctaccgagaactgggaataggaaggcttccggtagtgcttgcccaggcggactctcgctctgtcgccaggctgtcttagcctcctgagtagcttggactacaggcgcgcgccaccatgcccggctactttctgtattttagtagagatggggtttcaccatgttggtcaggctggtctggaactcctgacctcgtgatccgcctgccccggcctcccaaagtgctgggattacaggcgtgagccgctgcgcccagttggaaaaagttttgttttttttttaaaactaagtgcttccatgtacatcagatgttaacgactttgatcctaacaaacaaacaaaaaagatgaggaaattgaggctcaaagatgtgtcctggcctggctcagtggcgtatgc

SEQ ID NO: 364838 - DNA, 1664 bp, Homo sapiens
gaggtgcagagtatgacatgttctagggagaaggggagggcagggctgcaggttctcttggatggagcttgggaaattgaaattactagacttattgtagcggtcatgcctggaatcccagcactttgggaggctgaggggggtggattgcctgaggtcaggagtttgagaccagcctggccaacatatagtgaaactccatctctactaaaaatacaaaaattagctgggtatagtggcgcatgcctataatcccatctacttgggaagctgaggcaggagaattgcttgaaccgaggaggtggaggttgcagtgagccgagatcgcgccattgcactctagcctgggcaacaagagcgaaactgtctcaaaaaacaaaaacgaaaacaaaaacccaaacaaacaaaaaatggaacttttaagcaacatttggtgcccatctgtcaatgtacaagtcctagctgttgatgggttcttggaaactgcaactttaagggaaactatgtatatcaaaaccgttttttttccatcagtgttacagtgaaacaaagttattcaaggacctgctgctgtacatacttttgctaaaaatcagtttccaagaacctattgtggatgttaggagaggagttaccatgccacaatgactctgggagatgaagccattttattcccatgcttgttaaccttgtgcaggtgcgggaatgcagatggctgagtaggtcagattgaggacatggcagcgcagctctggtaaaagagtgacactctggataatggagctgctctcgtttgaggatgtggcgatgtacttcaccagagaggagtggggccacctcaactggggtcagaaggacctctaccgagatgtgatgttggagaactacaggaacatggtcttgctggtttatttccagtttgatgctgcaataccactgtgctgaacgtctctggcacattcatcttggttgcaattgtactttaggctatatttctaagagtgaaatgaccacagccaaaggtatgaacattgttcaggctttcaataaagactgccagatatttacaaagattgtgccaatctctattctcaccaccgcttttgattattgtccttatctctgcttgccactgagccccgggccatgtctctgtaactcactaacggccacatcccatttacttccccatgagtaggatttcagtttcccaaacctgagatgatctgtcagctggagaactgggacgagcagtggatcctggatctaccgagaactgggaataggaaggcttccggtagtgcttgcccaggcggactctcgctctgtcgccaggctgtcttagcctcctgagtagcttggactacaggcgcgcgccaccatgcccggctactttctgtattttagtagagatggggtttcaccatgttggtcaggctggtctggaactcctgacctcgtgatccgcctgccccggcctcccaaagtgctgggattacaggcgtgagccgctgcgcccagttggaaaaagttttgttttttttttaaaactaagtgcttccatgtacatcagatgttaacgactttgatcctaacaaacaaacaaaaaagatgaggaaattgaggctcaaagatgtgtcctggcctggctcagtggcgtatgc

SEQ ID NO: 364839 - DNA, 1212 bp, Homo sapiens
agccagcgagaggctctgaggctgccagagtggttgtgtctgttcctccggtaaggggtgattcgccgaggggcgcggaccagacagacctcgggtcaggcccgggaaccccgagaggagagcccagcccctggtggaggcggcttggcggagattcggagccgtcagcagctcagccagacgtccaggatcccaccccttgcaaaagaccaggccgtggaagccatgttcccaccagccagggggaaggggaatgcagatggctgagtaggtcagattgaggacatggcagcgcagctctggtaaaagagtgacactctggataatggagctgctctcgtttgaggatgtggcgatgtacttcaccagagaggagtggggccacctcaactggggtcagaaggacctctaccgagatgtgatgttggagaactacaggaacatggtcttgctggtttatttccagtttgatgctgcaataccactgtgctgaacgtctctggcacattcatcttggttgcaattgtactttaggctatatttctaagagtgaaatgaccacagccaaaggtatgaacattgttcaggctttcaataaagactgccagatatttacaaagattgtgccaatctctattctcaccaccgcttttgattattgtccttatctctgcttgccactgagccccgggccatgtctctgtaactcactaacggccacatcccatttacttccccatgagtaggatttcagtttcccaaacctgagatgatctgtcagctggagaactgggacgagcagtggatcctggatctaccgagaactgggaataggaaggcttccggtagtgcttgcccaggcggactctcgctctgtcgccaggctgtcttagcctcctgagtagcttggactacaggcgcgcgccaccatgcccggctactttctgtattttagtagagatggggtttcaccatgttggtcaggctggtctggaactcctgacctcgtgatccgcctgccccggcctcccaaagtgctgggattacaggcgtgagccgctgcgcccagttggaaaaagttttgttttttttttaaaactaagtgcttccatgtacatcagatgttaacgactttgatcctaacaaacaaacaaaaaagatgaggaaattgaggctcaaagatgtgtcctggcctggctcagtggcgtatgc

SEQ ID NO: 364840 - DNA, 1097 bp, Homo sapiens
gaggtgcagagtatgacatgttctagggagaaggggagggcagggctgcaggttctcttggatggagcttgggaaattgaaattactagacttattgtagcggtcatgcctggaatcccagcactttgggaggctgaggggggtggattgcctgaggtcaggagtttgagaccagcctggccaacatatagtgaaactccatctctactaaaaatacaaaaattagctgggtatagtggcgcatgcctataatcccatctacttgggaagctgaggcaggagaattgcttgaaccgaggaggtggaggttgcagtgagccgagatcgcgccattgcactctagcctgggcaacaagagcgaaactgtctcaaaaaacaaaaacgaaaacaaaaacccaaacaaacaaaaaatggaacttttaagcaacatttggtgcccatctgtcaatgtacaagtcctagctgttgatgggttcttggaaactgcaactttaagggaaactatgtatatcaaaaccgttttttttccatcagtgttacagtgaaacaaagttattcaaggacctgctgctgtacatacttttgctaaaaatcagtttccaagaacctattgtggatgttaggagaggagttaccatgccacaatgactctgggagatgaagccattttattcccatgcttgttaaccttgtgcaggtgcgggaatgcagatggctgagtaggtcagattgaggacatggcagcgcagctctggtaaaagagtgacactctggataatggtgagaaagggcctgcaaccgtagcagtggaactcaggtttgataggcaggaaagaaagtccgtataatttgggaggttctggtgcctgcctgcagaggggagctacgtgaagcttctcaggatggtctcaggatgggggtgggcatttcctgttactgaccacttataggacagcgaacgtttgccctttccctgcacacatcccctctgaacccatgcagtgtcttgtgagagcaaggagtgtgtagacagccgctgggcccctttgcccagagggctgcagtggtgtgggagggagagtgtggcagcttcagtg

SEQ ID NO: 364841 - DNA, 309 bp, Homo sapiens
tctaggcgcctgatggggtgaggtgcatctcgctggtttatcgtcctagccccgcccgacgcagagggtcttgacggtttcccgcatcccgaggaaatacgggcgtccgagccggtggccgagctccggcaagggcgggaaccttcaggattaaatagacagggtctggctctgtcgcccaggctggactgcagtggcgcgatttcggctcactgcaacttctgtctcccgggttcaagcaattctccagcttcagcctcccaagtatctaggactacaggtgcgcgcgaccacgcccggtttattaat

SEQ ID NO: 364842 - DNA, 342 bp, Homo sapiens
acatgttccaacaccaaacacagggactttgtattaagctttgtctgtgtgccccgttggaattccgggtcccagatctgccaaccaagagagcttcaaattagggctggccttactgactttttttcttctccagctcagccagacgtccaggatcccaccccttgcaaaagaccaggccgtggaagccatgttcccaccagccagggggaaggtgagctgtgcctccccctctgcttcatcagcatagtcactgccaccagcagctccttcctcagactgagccctcttgatcaatgtggggagttttccttcttagacagtgcaatgtagagagcttag

SEQ ID NO: 364843 - DNA, 522 bp, Homo sapiens
ggtcgggagttcgagaccagcctgagcaacatggagaaaccctgtctctactaaaaattcaaaattagtcaggcgtggtggcacatgcctgtaatctcagctattccggaggctgaggcaggagagaacacttgaacccgggaggcggaggttgtggtgagccaagattgtgccattgccctccagcctgggcaacaagagcaaactctgtctcaaaaataaaaaaaatttggatcatgctatatatgagttttgtattctgctttaaaatacataggcagtgttttcctattttaataaatagttgggctgggcacggtggctcacgcctgtaatcccagcactttgggaggccgagacaggtggatcacctgaggtcaggagttcgagaccagttggccaacatggtgaaacctcgtctctattaaaaatgtaaaaattagctgggcgtggtggccacatgcctgtaattccagctacttgggaggccgaggcaagagaatcacttgaacccgggaggcg

SEQ ID NO: 364844 - DNA, 1159 bp, Homo sapiens
agccagcgagaggctctgaggctgccagagtggttgtgtctgttcctccggtaaggggtgattcgccgaggggcgcggaccagacagacctcgggtcaggcccgggaaccccgagaggagagcccagcccctggtggaggcggcttggcggagattcggagccgtcagcagctcagccagacgtccaggatcccaccccttgcaaaagaccaggccgtggaagccatgttcccaccagccagggggaaggggaatgcagatggctgagtaggtcagattgaggacatggcagcgcagctctggtaaaagagtgacactctggataatggagctgctctcgtttgaggatgtggcgatgtacttcaccagagaggagtggggccacctcaactggggtcagaaggacctctaccgagatgtgatgttggagaactacaggaacatggtcttgctggtttatttccagtttgatgctgcaataccactgtgctgaacgtctctggcacattcatcttggttgcaattgtactttaggctatatttctaagagtgaaatgaccacagccaaaggatttcagtttcccaaacctgagatgatctgtcagctggagaactgggacgagcagtggatcctggatctaccgagaactgggaataggaaggcttccggtagtgcttgcccaggttctgaagccagacacaagatgaaaaagctaactccaaaacagaaattttctgaagatttagagtcatataagatatcagtggtaatgcaggaatcagctgagaaactttcagaaaagttacataagtgtaaagaatttgtggacagttgcaggcttactttccctactagtggtgatgaatacagcaggggcttccttcaaaaccttaaccttattcaagatcagaatgcgcaaacaaggtggaagcagggcagatatgatgaggatggcaaacccttcaatcaaagatctttgcttttggggcatgagcgaattctcacaagagcaaagtcttatgaatgcagtgaatgtggaaaagtcattaggcgtaaggcatggtttgatcaacatcaaagaattcactttttagagaatccttttgagtgtaaggtctgtgggcaagccttcagacagcggtcagctcttacggtcca

SEQ ID NO: 364845 - DNA, 526 bp, Homo sapiens
tttcttctgcagtggataggtcatttacatcttttcttgttatttggctaggttctgaagccagacacaagatgaaaaagctaactccaaaacagaaattttctgaagatttagagtcatataagatatcagtggtaatgcaggaatcagctgagaaactttcagaaaagttacataagtgtaaagaatttgtggacagttgcaggcttactttccctactagtggtgatgaatacagcaggggcttccttcaaaaccttaaccttattcaagatcagaatgcgcaaacaaggtggaagcagggcagatatgatgaggatggcaaacccttcaatcaaagatctttgcttttggggcatgagcgaattctcacaagagcaaagtcttatgaatgcagtgaatgtggaaaagtcattaggcgtaaggcatggtttgatcaacatcaaagaattcactttttagagaatccttttgagtgtaaggtctgtgggcaagccttcagacagcggtcagctcttacggtcca

SEQ ID NO: 364846 - DNA, 842 bp, Homo sapiens
agccagcgagaggctctgaggctgccagagtggttgtgtctgttcctccggtaaggggtgattcgccgaggggcgcggaccagacagacctcgggtcaggcccgggaaccccgagaggagagcccagcccctggtggaggcggcttggcggagattcggagccgtcagcagctcagccagacgtccaggatcccaccccttgcaaaagaccaggccgtggaagccatgttcccaccagccagggggaaggagctgctctcgtttgaggatgtggcgatgtacttcaccagagaggagtggggccacctcaactggggtcagaaggacctctaccgagatgtgatgttggagaactacaggaacatggtcttgctgggatttcagtttcccaaacctgagatgatctgtcagctggagaactgggacgagcagtggatcctggatctaccgagaactgggaataggaaggcttccggtagtgcttgcccaggcggactctcgctctgtcgccaggctgtcttagcctcctgagtagcttggactacaggcgcgcgccaccatgcccggctactttctgtattttagtagagatggggtttcaccatgttggtcaggctggtctggaactcctgacctcgtgatccgcctgccccggcctcccaaagtgctgggattacaggcgtgagccgctgcgcccagttggaaaaagttttgttttttttttaaaactaagtgcttccatgtacatcagatgttaacgactttgatcctaacaaacaaacaaaaaagatgaggaaattgaggctcaaagatgtgtcctggcctggctcagtggcgtatgc

SEQ ID NO: 364847 - DNA, 4556 bp, Homo sapiens
gcgaggacttcttggagtgctttctgcacctgaaactcagttcagggattggggctggctttgagttcaggccaggagagacggaagaactggcaagccgggagcctgcgtccagggaagttgcttggaattccaggcccctcctgtcctcctgctctgagccccacgtggagggagtggctctgtgctttctacccaagggtttcggcttatccagtgggaaaaacgggtggagtgcgcttacaccgccctcggaaccagagcctggagtagcccttctgttgccgctcgtttttgtcaggaggtagcagtctgggactcaagggtgggtctttggagctgattagagatgcctttgtgagtgctatgttgtgtggatgtggagatgactccatccctgtgccctgccttgcttcctccaggacttgggaccctggaggactgacgctgctggcctgggcgtccccttccgctgagccatggcgactcccgacgtgagtgtgcacatggaggaggtggtggttgtgacaactccggacactgcagtggacggcagtggtgtggagggggtgaagaccgtgttggtgacgaccaacttggcccctcacgggggcgacctgacggaagataacatggagacagaaaatgcagcggcggcagctgccgcggccttcacagcctcctcccagctcaaggaagccgtgttagtgaagatggctgaagagggggagaacctggaagctgagattgtgtaccccatcacctgtggagacagcagagccaacctcatctggaggaagtttgtgtgtcccggcatcaatgtgaaatgtgttcagtacgacgagcatgtaatcagcccaaaggaatttgtgcacctggccgggaagtccaccctgaaggactggaagagagccatccgcatgaacggcatcatgctcaggaagatcatggactccggggaactggacttctaccagcacgacaaggtctgctccaacacctgccgcagcacaaagattgacctctcaggagcccgtgtgtccctgagcagccccacgtcggccgagtacattcccctcacgcccgccgcagccgacgtgaatgggtctcctgcgaccatcaccatagagacctgtgaagaccctggcgactggaccgcggccattggagatgacacatttaccttctggcgggggctgaaggacgccggcctgctggacgaggtcatccaggagttccaccaggagctggtggagaccatgagaggcctgcagcagcgggtccaggaccctcccctgcagcttcgagatgctgtacttctcaacaacatcgtgcagaacttcggcatgctggacctggtgaagaaggtgctggccagccacaagtgccagatggaccgctcgcgggagcagtacgcccgggacctggcagccctggagcagcagtgtgatgagcatcgtcgccgagccaaggagctgaagcacaagtcccagcacctcagcaacgtgctcatgacgctgacgccggtctccctgccaccgcctgtgaagcggccccggcttgcacgtgccacatcaggaccggccgccatggcctcgcaggtgctcacccagtctgcccagctggcgcttggcccgggcgtgcccgtcccccagctgaccagcgtgccccttggtaaagtggtgtccaccctgccgtccaccgtcctgggcaagggttcccttcaggcgccccccgccagctccccggcctccccgctgctcgggggatacacagtcttggcctcttccggctccacctaccccagcacagtggagatccacccggacgcgtccagcctcacggtcctgagcacggccgccgtgcaggacggtagcacggtgttcaaggtggtcagcccgctgcagctgctcacgttgcctggcctgggccccaccctgcagaacgtggcccaggcctcgcctggctccagcacaattgtgacagtgcccgcaggggctgcccccgggcctgaggagcacacggccaccattgaggtggctgccatggcagaggaccacgagcggaagtagccgacaggagggcgaggcccctgggacggacagggctggctgtctctcagccgcggcagcagggagcgggcagaggccgcagggctggctcgggcaggtgggtcacgtggtctgcagaaccaaagagaggaatcgccaaaacaaatcacgagaagagagaaggggacagaacagcgagagcaacctggaaaaccggtcttcaggtcccacgtttcctcccccttttttcttgggaaatatatttttccatctgttgcttattaatactgtttacacattgggccttgatcaggagccaggtgggcgggggctagggggagcctgggtgcagcagagacagaggaagcagagccaggtgccgagcgcgaccctgcaggtgctggacgcggtgcagcaggtcacgaggcccccatgtctgcacccagccaggtccctggggacgttactaactcatgacttgggagctaagcccaagtgtgaaacctctggatcctatggatttggtttcttcccacagttttctgtaggtttagtgtggctggcgccccgttctcctccagttgggaacatgcacccggagcttggggtgcagatcctgatgggtgcctgcctcccccgcccccagccggtgctcaggtggcccaggggccgcacagacgaggcgtggtccaggcattgttgcacatgtactgagggtgtttttaagtgaattgcttagtaggcttctaggaagagtcagatttatagcattttcaaccaaaataatggtgagtgcctaggcttcccgagttagctctttgggtggcccctgagcccctgtgagtgcacttgaccgggtgcggaggtcctgggcagcctgtccctgagccggcccctcccaggggtctgagatccatgaggtgtgtccctagggcttcagtcctggggcagaggcataaacagaaccagtcactatggaggtcgaggattcccatgtgggcccttcagcttgggctgcttggccacggaacagcccttggctccctggcccccggcccccatgcagcccctgggctggcccttggtggtctctgtccaagggagagcccctgggtgttcaggaggctgccccgggtgggctgctcagggcagctgccgaaggtggagcccagagcctgtctggaagggctgtctgtggctgtcctgagacctggccttggactcacaaggaagaccaggctgaggcccctccaggccagggtcctggggcaggcatctcagggagcagccagcccaggcctcctgccgtctccaacagggcatgtcccgggaggaccctgagtgccagattcccctggacgctcctgctgattctgtcggcagttgaaggcccgtctgaggccccgcaatgcgagggtcctgtgtcccacttcactgctccgaagggaactggctggctgtccgtccagtgagcggcccagaccccacctctgcgccattgtcaccagggccctgtcctggctgccctcacccatgtcaagctactgaggctgtgtcttgtttgttttctctgttacatttttgtttgctgttgtcacagtcagctggtttcggcgtgatgttgaccttttgatgtacatactccgttttaaactcatttccactctagttgagttctgcagcatgcagcggtatgaccctacgggggtcaggagagccctgcggcccccacccaccagctcagaacctgtcactaatacagctgcctgtgaccctgggacccgcaaccttccagctgcttccctttgtcaaagtcacgagtgcgtctgccttgacagccctcgtcaacagaacttccagtgggttgtgggttcatttcctttctttttaagaacagggttgggaccttttctgcccctgccccttagctactgaggcatagggagaggaagttaatttcagagccatacaaaaataagccacaaccagcttcagaattaattcccaatcccccattccaccagggctgggagcccattcccagtgcttcccaaggccctcggggacatctaccgccaacccagctgcttctggcaggggctccaagccccagcgtggggaagggccctggagaagccctcatcctcatgggaaccacactgcagtgggtggggaaggttgttgtcagcaccgcccccggctcctccaggtcctgctggctcctcgggggcagggttccctggacctcccagttctgcgccttggggccagccagtactcagagaggaggaccttctcaaccacgtacagaacacgggttttcatggctgcctttggtttggttttctgagaagataggattggattggattttgcagagggtgagaacttctctgtgcctgctcagaggcgccctagggaagggccatgtttgagttttgctttgtatgttgttttgcaagtatctgcctggtactttgatttaaaataaaaacaattttcata

SEQ ID NO: 364848 - DNA, 664 bp, Homo sapiens
cggacgcgtgggtcgacccacgcgtccgggttcatttcctttctttttaagaacagggttgggaccttttctgcccctgccccttagctactgaggcatagggagaggaagttaatttcagagccatacaaaaataagccacaaccagcttcagaattaattcccaatcccccattccaccagggctgggagcccattcccagtgcttcccaaggccctcggggacatctaccgccaacccagctgcttctggcaggggctccaagccccagcgtggggaagggccctggagaagccctcatcctcatgggaaccacactgcagtgggtggggaaggttgttgtcagcaccgcccccggctcctccaggtcctgctggctcctcgggggcagggttccctggacctcccagttctgcgccttggggccagccagtactcagagaggaggaccttctcaaccacgtacagaacacgggttttcatggctgcctttggtttggttttctgagaagataggattggattggattttgcagagggtgagaacttctctgtgcctgctcagaggcgccctagggaagggccatgtttgagttttgctttgtatgttgttttgcaagtatctgcctggtactttgatttaaaataaaaacaattttcata

SEQ ID NO: 364849 - DNA, 2332 bp, Homo sapiens
gcgaggacttcttggagtgctttctgcacctgaaactcagttcagggattggggctggctttgagttcaggccaggagagacggaagaactggcaagccgggagcctgcgtccagggaagttgcttggaattccaggcccctcctgtcctcctgctctgagccccacgtggagggagtggctctgtgctttctacccaagggtttcggcttatccagtgggaaaaacgggtggagtgcgcttacaccgccctcggaaccagagcctggagtagcccttctgttgccgctcgtttttgtcaggaggtagcagtctgggactcaagggtgggtctttggagctgattagagatgcctttgtgagtgctatgttgtgtggatgtggagatgactccatccctgtgccctgccttgcttcctccaggacttgggaccctggaggactgacgctgctggcctgggcgtccccttccgctgagccatggcgactcccgacgtgagtgtgcacatggaggaggtggtggttgtgacaactccggacactgcagtggacggcagtggtgtggagggggtgaagaccgtgttggtgacgaccaacttggcccctcacgggggcgacctgacggaagataacatggagacagaaaatgcagcggcggcagctgccgcggccttcacagcctcctcccagctcaaggaagccgtgttagtgaagatggctgaagagggggagaacctggaagctgagattgtgtaccccatcacctgtggagacagcagagccaacctcatctggaggaagtttgtgtgtcccggcatcaatgtgaaatgtgttcagtacgacgagcatgtaatcagcccaaaggaatttgtgcacctggccgggaagtccaccctgaaggactggaagagagccatccgcatgaacggcatcatgctcaggaagatcatggactccggggaactggacttctaccagcacgacaaggtctgctccaacacctgccgcagcacaaagattgacctctcaggagcccgtgtgtccctgagcagccccacgtcggccgagtacattcccctcacgcccgccgcagccgacgtgaatgggtctcctgcgaccatcaccatagagacctgtgaagaccctggcgactggaccgcggccattggagatgacacatttaccttctggcgggggctgaaggacgccggcctgctggacgaggtcatccaggagttccaccaggagctggtggagaccatgagaggcctgcagcagcgggtccaggaccctcccctgcagcttcgagatgctgtacttctcaacaacatcgtgcagaacttcggcatgctggacctggtgaagaaggtgctggccagccacaagtgccagatggaccgctcgcgggagcagtacgcccgggacctggcagccctggagcagcagtgtgatgagcatcgtcgccgagccaaggagctgaagcacaagtcccagcacctcagcaacgtgctcatgacgctgacgccggtctccctgccaccgcctgtgaagcggccccggcttgcacgtgccacatcaggaccggccgccatggcctcgcaggtgctcacccagtctgcccagctggcgcttggcccgggcgtgcccgtcccccagctgaccagcgtgccccttggtaaagtggtgtccaccctgccgtccaccgtcctgggcaagggttcccttcaggcgccccccgccagctccccggcctccccgctgctcgggggatacacagtcttggcctcttccggctccacctaccccagcacagtggagatccacccggacgcgtccagcctcacggtcctgagcacggccgccgtgcaggacggtagcacggtgttcaaggtggtcagcccgctgcagctgctcacgttgcctggcctgggccccaccctgcagaacgtggcccaggcctcgcctggctccagcacaattgtgacagtgcccgcaggggctgcccccgggcctgaggagcacacggccaccattgaggtggctgccatggcagaggaccacgagcggaagtagccgacaggagggcgaggcccctgggacggacagggctggctgtctctcagccgcggcagcagggagcgggcagaggccgcagggctggctcgggcaggtgggtcacgtggtctgcagaaccaaagagaggaatcgccaaaacaaatcacgagaagagagaaggggacagaacagcgagagcaacctggaaaaccggtcttcaggtcccacgtttcctcccccttttttcttgggaaatatatttttccatctgttgctta

SEQ ID NO: 364850 - DNA, 4203 bp, Homo sapiens
ccgccgccgccgcagctcccgacgccgccgcccccgccgggtgcctaagcaggcccggcgcggccccaggacttgggaccctggaggactgacgctgctggcctgggcgtccccttccgctgagccatggcgactcccgacgtgagtgtgcacatggaggaggtggtggttgtgacaactccggacactgcagtggacggcagtggtgtggagggggtgaagaccgtgttggtgacgaccaacttggcccctcacgggggcgacctgacggaagataacatggagacagaaaatgcagcggcggcagctgccgcggccttcacagcctcctcccagctcaaggaagccgtgttagtgaagatggctgaagagggggagaacctggaagctgagattgtgtaccccatcacctgtggagacagcagagccaacctcatctggaggaagtttgtgtgtcccggcatcaatgtgaaatgtgttcagtacgacgagcatgtaatcagcccaaaggaatttgtgcacctggccgggaagtccaccctgaaggactggaagagagccatccgcatgaacggcatcatgctcaggaagatcatggactccggggaactggacttctaccagcacgacaaggtctgctccaacacctgccgcagcacaaagattgacctctcaggagcccgtgtgtccctgagcagccccacgtcggccgagtacattcccctcacgcccgccgcagccgacgtgaatgggtctcctgcgaccatcaccatagagacctgtgaagaccctggcgactggaccgcggccattggagatgacacatttaccttctggcgggggctgaaggacgccggcctgctggacgaggtcatccaggagttccaccaggagctggtggagaccatgagaggcctgcagcagcgggtccaggaccctcccctgcagcttcgagatgctgtacttctcaacaacatcgtgcagaacttcggcatgctggacctggtgaagaaggtgctggccagccacaagtgccagatggaccgctcgcgggagcagtacgcccgggacctggcagccctggagcagcagtgtgatgagcatcgtcgccgagccaaggagctgaagcacaagtcccagcacctcagcaacgtgctcatgacgctgacgccggtctccctgccaccgcctgtgaagcggccccggcttgcacgtgccacatcaggaccggccgccatggcctcgcaggtgctcacccagtctgcccagctggcgcttggcccgggcgtgcccgtcccccagctgaccagcgtgccccttggtaaagtggtgtccaccctgccgtccaccgtcctgggcaagggttcccttcaggcgccccccgccagctccccggcctccccgctgctcgggggatacacagtcttggcctcttccggctccacctaccccagcacagtggagatccacccggacgcgtccagcctcacggtcctgagcacggccgccgtgcaggacggtagcacggtgttcaaggtggtcagcccgctgcagctgctcacgttgcctggcctgggccccaccctgcagaacgtggcccaggcctcgcctggctccagcacaattgtgacagtgcccgcaggggctgcccccgggcctgaggagcacacggccaccattgaggtggctgccatggcagaggaccacgagcggaagtagccgacaggagggcgaggcccctgggacggacagggctggctgtctctcagccgcggcagcagggagcgggcagaggccgcagggctggctcgggcaggtgggtcacgtggtctgcagaaccaaagagaggaatcgccaaaacaaatcacgagaagagagaaggggacagaacagcgagagcaacctggaaaaccggtcttcaggtcccacgtttcctcccccttttttcttgggaaatatatttttccatctgttgcttattaatactgtttacacattgggccttgatcaggagccaggtgggcgggggctagggggagcctgggtgcagcagagacagaggaagcagagccaggtgccgagcgcgaccctgcaggtgctggacgcggtgcagcaggtcacgaggcccccatgtctgcacccagccaggtccctggggacgttactaactcatgacttgggagctaagcccaagtgtgaaacctctggatcctatggatttggtttcttcccacagttttctgtaggtttagtgtggctggcgccccgttctcctccagttgggaacatgcacccggagcttggggtgcagatcctgatgggtgcctgcctcccccgcccccagccggtgctcaggtggcccaggggccgcacagacgaggcgtggtccaggcattgttgcacatgtactgagggtgtttttaagtgaattgcttagtaggcttctaggaagagtcagatttatagcattttcaaccaaaataatggtgagtgcctaggcttcccgagttagctctttgggtggcccctgagcccctgtgagtgcacttgaccgggtgcggaggtcctgggcagcctgtccctgagccggcccctcccaggggtctgagatccatgaggtgtgtccctagggcttcagtcctggggcagaggcataaacagaaccagtcactatggaggtcgaggattcccatgtgggcccttcagcttgggctgcttggccacggaacagcccttggctccctggcccccggcccccatgcagcccctgggctggcccttggtggtctctgtccaagggagagcccctgggtgttcaggaggctgccccgggtgggctgctcagggcagctgccgaaggtggagcccagagcctgtctggaagggctgtctgtggctgtcctgagacctggccttggactcacaaggaagaccaggctgaggcccctccaggccagggtcctggggcaggcatctcagggagcagccagcccaggcctcctgccgtctccaacagggcatgtcccgggaggaccctgagtgccagattcccctggacgctcctgctgattctgtcggcagttgaaggcccgtctgaggccccgcaatgcgagggtcctgtgtcccacttcactgctccgaagggaactggctggctgtccgtccagtgagcggcccagaccccacctctgcgccattgtcaccagggccctgtcctggctgccctcacccatgtcaagctactgaggctgtgtcttgtttgttttctctgttacatttttgtttgctgttgtcacagtcagctggtttcggcgtgatgttgaccttttgatgtacatactccgttttaaactcatttccactctagttgagttctgcagcatgcagcggtatgaccctacgggggtcaggagagccctgcggcccccacccaccagctcagaacctgtcactaatacagctgcctgtgaccctgggacccgcaaccttccagctgcttccctttgtcaaagtcacgagtgcgtctgccttgacagccctcgtcaacagaacttccagtgggttgtgggttcatttcctttctttttaagaacagggttgggaccttttctgcccctgccccttagctactgaggcatagggagaggaagttaatttcagagccatacaaaaataagccacaaccagcttcagaattaattcccaatcccccattccaccagggctgggagcccattcccagtgcttcccaaggccctcggggacatctaccgccaacccagctgcttctggcaggggctccaagccccagcgtggggaagggccctggagaagccctcatcctcatgggaaccacactgcagtgggtggggaaggttgttgtcagcaccgcccccggctcctccaggtcctgctggctcctcgggggcagggttccctggacctcccagttctgcgccttggggccagccagtactcagagaggaggaccttctcaaccacgtacagaacacgggttttcatggctgcctttggtttggttttctgagaagataggattggattggattttgcagagggtgagaacttctctgtgcctgctcagaggcgccctagggaagggccatgtttgagttttgctttgtatgttgttttgcaagtatctgcctggtactttgatttaaaataaaaacaattttcata

SEQ ID NO: 364851 - DNA, 1346 bp, Homo sapiens
cggacgcgtgggtcgacccacgcgtccggctgtctgtggctgtcctgagacctggccttggactcacaaggaagaccaggctgaggcccctccaggccagggtcctggggcaggcatctcagggagcagccagcccaggcctcctgccgtctccaacagggcatgtcccgggaggaccctgagtgccagattcccctggacgctcctgctgattctgtcggcagttgaaggcccgtctgaggccccgcaatgcgagggtcctgtgtcccacttcactgctccgaagggaactggctggctgtccgtccagtgagcggcccagaccccacctctgcgccattgtcaccagggccctgtcctggctgccctcacccatgtcaagctactgaggctgtgtcttgtttgttttctctgttacatttttgtttgctgttgtcacagtcagctggtttcggcgtgatgttgaccttttgatgtacatactccgttttaaactcatttccactctagttgagttctgcagcatgcagcggtatgaccctacgggggtcaggagagccctgcggcccccacccaccagctcagaacctgtcactaatacagctgcctgtgaccctgggacccgcaaccttccagctgcttccctttgtcaaagtcacgagtgcgtctgccttgacagccctcgtcaacagaacttccagtgggttgtgggttcatttcctttctttttaagaacagggttgggaccttttctgcccctgccccttagctactgaggcatagggagaggaagttaatttcagagccatacaaaaataagccacaaccagcttcagaattaattcccaatcccccattccaccagggctgggagcccattcccagtgcttcccaaggccctcggggacatctaccgccaacccagctgcttctggcaggggctccaagccccagcgtggggaagggccctggagaagccctcatcctcatgggaaccacactgcagtgggtggggaaggttgttgtcagcaccgcccccggctcctccaggtcctgctggctcctcgggggcagggttccctggacctcccagttctgcgccttggggccagccagtactcagagaggaggaccttctcaaccacgtacagaacacgggttttcatggctgcctttggtttggttttctgagaagataggattggattggattttgcagagggtgagaacttctctgtgcctgctcagaggcgccctagggaagggccatgtttgagttttgctttgtatgttgttttgcaagtatctgcctggtactttgatttaaaataaaaacaattttcata

SEQ ID NO: 364852 - DNA, 4305 bp, Homo sapiens
ccgccgccgccgcagctcccgacgccgccgcccccgccgggtgcctaagcaggcccggcgcggccccaggacttgggaccctggaggactgacgctgctggcctgggcgtccccttccgctgagccatggcgactcccgacgtgagtgtgcacatggaggaggtggtggttgtgacaactccggacactgcagtggacggcagtggtgtggagggggtgaagaccgtgttggtgacgaccaacttggcccctcacgggggcgacctgacggaagataacatggagacagaaaatgcagcggcggcagctgccgcggccttcacagcctcctcccagctcaaggaagccgtgttagtgaagatggctgaagagggggagaacctggaagctgagattgtgtaccccatcacctgtggagacagcagagccaacctcatctggaggaagtttgtgtgtcccggcatcaatgtgaaatgtgttcagtacgacgagcatgtaatcagcccaaaggaatttgtgcacctggccgggaagtccaccctgaaggactggaagagagccatccgcatgaacggcatcatgctcaggaagatcatggactccggggaactggacttctaccagcacgacaaggtctgctccaacacctgccgcagcacaaagattgacctctcaggagcccgtgtgtccctgagcagccccacgtcggccgagtacattcccctcacgcccgccgcagccgacgtgaatgggtctcctgcgaccatcaccatagagacctgtgaagaccctggcgactggaccgcggccattggagatgacacatttaccttctggcgggggctgaaggacgccggcctgctggacgaggtcatccaggagttccaccaggagctggtggagaccatgagaggcctgcagcagcgggtccaggaccctcccctgcagcttcgagatgctgtacttctcaacaacatcgtgcagaacttcggcatgctggacctggtgaagaaggtgctggccagccacaagtgccagatggaccgctcgcgggagcagtacgcccgggacctggcagccctggagcagcagtgtgatgagcatcgtcgccgagccaaggagctgaagcacaagtcccagcacctcagcaacgtgctcatgacgctgacgccggtctccctgccaccgcctgtgaagcggccccggcttgcacgtgccacatcaggaccggccgccatggcctcgcaggtgctcacccagtctgcccagctggcgcttggcccgggcgtgcccgtcccccagctgaccagcgtgccccttggtaaagtggtgtccaccctgccgtccaccgtcctgggcaagggttcccttcaggcgccccccgccagctccccggcctccccgctgctcgggggatacacagtcttggcctcttccggctccacctaccccagcacagtggagatccacccggacgcgtccagcctcacggtcctgagcacggccgccgtgcaggacggtagcacggtgttcaaggtggtcagcccgctgcagctgctcacgttgcctggcctgggccccaccctgcagaacgtggcccaggcctcgcctggctccagcacaattgtgacagtgcccgcaggggctgcccccgggcctgaggagcacacggccaccattgaggtggctgccatggcagaggaccacgagcggaagtagccgacaggagggcgaggcccctgggacggacagggctggctgtctctcagccgcggcagcagggagcgggcagaggccgcagggctggctcgggcaggtgggtcacgtggtctgcagaaccaaagagaggaatcgccaaaacaaatcacgagaagagagaaggggacagaacagcgagagcaacctggaaaaccggtcttcaggtcccacgtttcctcccccttttttcttgggaaatatatttttccatctgttgcttattaatactgtttacacattgggccttgatcaggagccaggtgggcgggggctagggggagcctgggtgcagcagagacagaggaagcagagccaggtgccgagcgcgaccctgcaggtgctggacgcggtgcagcaggtcacgaggcccccatgtctgcacccagccaggtccctggggacgttactaactcatgacttgggagctaagcccaagtgtgaaacctctggatcctatggatttggtttcttcccacagttttctgtaggtttagtgtggctggcgccccgttctcctccagttgggaacatgcacccggagcttggggtgcagatcctgatgggtgcctgcctcccccgcccccagccggtgctcaggtggcccaggggccgcacagacgaggcgtggtccaggcattgttgcacatgtactgagggtgtttttaagtgaattgcttagtaggcttctaggaagagtcagatttatagcattttcaaccaaaataatggtgagtgcctaggcttcccgagttagctctttgggtggcccctgagcccctgtgagtgcacttgaccgggtgcggaggtcctgggcagcctgtccctgagccggcccctcccaggggtctgagatccatgaggtgtgtccctagggcttcagtcctggggcagaggcataaacagaaccagtcactatggaggtcgaggattcccatgtgggcccttcagcttgggctgcttggccacggaacagcccttggctccctggcccccggcccccatgcagcccctgggctggcccttggtggtctctgtccaagggagagcccctgggtgttcaggaggctgccccgggtgggctgctcagggcagctgccgaaggtggagcccagagcctgtctggaagggctgtctgtggctgtcctgagacctggccttggactcacaaggaagaccaggctgaggcccctccaggccagggtcctggggcaggcatctcagggagcagccagcccaggcctcctgccgtctccaacagggcatgtcccgggaggaccctgagtgccagattcccctggacgctcctgctgattctgtcggcagttgaaggcccgtctgaggccccgcaatgcgagggtcctgtgtcccacttcactgctccgaagggaactggctggctgtccgtccagtgagcggcccagaccccacctctgcgccattgtcaccagggccctgtcctggctgccctcacccatgtcaagctactgaggctgtgtcttgtttgttttctctgttacatttttgtttgctgttgtcacagtcagctggtttcggcgtgatgttgaccttttgatgtacatactccgttttaaactcatttccactctagttgagttctgcagcatgcagcggtatgaccctacgggggtcaggagagccctgcggcccccacccaccagctcagaacctgtcactaatacagctgcctgtgaccctgggacccgcaaccttccagctgcttccctttgtcaaagtcacgagtgcgtctgccttgacagccctcgtcaacagaacttccagtgggttgtgggttcatttcctttctttttaagaacagggttgggaccttttctgcccctgccccttagctactgaggcatagggagaggaagttaatttcagagccatacaaaaataagccacaaccagcttcagaattaattcccaatcccccattccaccagggctgggagcccattcccagtgcttcccaaggccctcggggacatctaccgccaacccagctgcttctggcaggggctccaagccccagcgtggggaagggccctggagaagccctcatcctcatgggaaccacactgcagtgggtggggaaggttgttgtcagcaccgcccccggctcctccaggtcctgctggctcctcgggggcagggttccctggacctcccagttctgcgccttggggccagccagtactcagagaggaggaccttctcaaccacgtacagaacacgggttttcatggctgcctttggtttggttttctgagaagataggattggattggattttgcagagggtgagaacttctctgtgcctgctcagaggcgccctagggaagggccatgtttgagttttgctttgtatgttgttttgcaagtatctgcctggtactttgatttaaaataaaaacaattttcataaaaaaaagacagaaggaaaaacagaaaaacaaaagaaaacaacagagaaaagaaaaaaaagacacacaagaaaaaaaaagggggggcgtcaaaaaaaaacag

SEQ ID NO: 364853 - DNA, 4009 bp, Homo sapiens
gtgccctgcaggttgtgccctccgggatcctgattctattctctcctcccttcacttcaccaggggcgacctgacggaagataacatggagacagaaaatgcagcggcggcagctgccgcggccttcacagcctcctcccagctcaaggaagccgtgttagtgaagatggctgaagagggggagaacctggaagctgagattgtgtaccccatcacctgtggagacagcagagccaacctcatctggaggaagtttgtgtgtcccggcatcaatgtgaaatgtgttcagtacgacgagcatgtaatcagcccaaaggaatttgtgcacctggccgggaagtccaccctgaaggactggaagagagccatccgcatgaacggcatcatgctcaggaagatcatggactccggggaactggacttctaccagcacgacaaggtctgctccaacacctgccgcagcacaaagattgacctctcaggagcccgtgtgtccctgagcagccccacgtcggccgagtacattcccctcacgcccgccgcagccgacgtgaatgggtctcctgcgaccatcaccatagagacctgtgaagaccctggcgactggaccgcggccattggagatgacacatttaccttctggcgggggctgaaggacgccggcctgctggacgaggtcatccaggagttccaccaggagctggtggagaccatgagaggcctgcagcagcgggtccaggaccctcccctgcagcttcgagatgctgtacttctcaacaacatcgtgcagaacttcggcatgctggacctggtgaagaaggtgctggccagccacaagtgccagatggaccgctcgcgggagcagtacgcccgggacctggcagccctggagcagcagtgtgatgagcatcgtcgccgagccaaggagctgaagcacaagtcccagcacctcagcaacgtgctcatgacgctgacgccggtctccctgccaccgcctgtgaagcggccccggcttgcacgtgccacatcaggaccggccgccatggcctcgcaggtgctcacccagtctgcccagctggcgcttggcccgggcgtgcccgtcccccagctgaccagcgtgccccttggtaaagtggtgtccaccctgccgtccaccgtcctgggcaagggttcccttcaggcgccccccgccagctccccggcctccccgctgctcgggggatacacagtcttggcctcttccggctccacctaccccagcacagtggagatccacccggacgcgtccagcctcacggtcctgagcacggccgccgtgcaggacggtagcacggtgttcaaggtggtcagcccgctgcagctgctcacgttgcctggcctgggccccaccctgcagaacgtggcccaggcctcgcctggctccagcacaattgtgacagtgcccgcaggggctgcccccgggcctgaggagcacacggccaccattgaggtggctgccatggcagaggaccacgagcggaagtagccgacaggagggcgaggcccctgggacggacagggctggctgtctctcagccgcggcagcagggagcgggcagaggccgcagggctggctcgggcaggtgggtcacgtggtctgcagaaccaaagagaggaatcgccaaaacaaatcacgagaagagagaaggggacagaacagcgagagcaacctggaaaaccggtcttcaggtcccacgtttcctcccccttttttcttgggaaatatatttttccatctgttgcttattaatactgtttacacattgggccttgatcaggagccaggtgggcgggggctagggggagcctgggtgcagcagagacagaggaagcagagccaggtgccgagcgcgaccctgcaggtgctggacgcggtgcagcaggtcacgaggcccccatgtctgcacccagccaggtccctggggacgttactaactcatgacttgggagctaagcccaagtgtgaaacctctggatcctatggatttggtttcttcccacagttttctgtaggtttagtgtggctggcgccccgttctcctccagttgggaacatgcacccggagcttggggtgcagatcctgatgggtgcctgcctcccccgcccccagccggtgctcaggtggcccaggggccgcacagacgaggcgtggtccaggcattgttgcacatgtactgagggtgtttttaagtgaattgcttagtaggcttctaggaagagtcagatttatagcattttcaaccaaaataatggtgagtgcctaggcttcccgagttagctctttgggtggcccctgagcccctgtgagtgcacttgaccgggtgcggaggtcctgggcagcctgtccctgagccggcccctcccaggggtctgagatccatgaggtgtgtccctagggcttcagtcctggggcagaggcataaacagaaccagtcactatggaggtcgaggattcccatgtgggcccttcagcttgggctgcttggccacggaacagcccttggctccctggcccccggcccccatgcagcccctgggctggcccttggtggtctctgtccaagggagagcccctgggtgttcaggaggctgccccgggtgggctgctcagggcagctgccgaaggtggagcccagagcctgtctggaagggctgtctgtggctgtcctgagacctggccttggactcacaaggaagaccaggctgaggcccctccaggccagggtcctggggcaggcatctcagggagcagccagcccaggcctcctgccgtctccaacagggcatgtcccgggaggaccctgagtgccagattcccctggacgctcctgctgattctgtcggcagttgaaggcccgtctgaggccccgcaatgcgagggtcctgtgtcccacttcactgctccgaagggaactggctggctgtccgtccagtgagcggcccagaccccacctctgcgccattgtcaccagggccctgtcctggctgccctcacccatgtcaagctactgaggctgtgtcttgtttgttttctctgttacatttttgtttgctgttgtcacagtcagctggtttcggcgtgatgttgaccttttgatgtacatactccgttttaaactcatttccactctagttgagttctgcagcatgcagcggtatgaccctacgggggtcaggagagccctgcggcccccacccaccagctcagaacctgtcactaatacagctgcctgtgaccctgggacccgcaaccttccagctgcttccctttgtcaaagtcacgagtgcgtctgccttgacagccctcgtcaacagaacttccagtgggttgtgggttcatttcctttctttttaagaacagggttgggaccttttctgcccctgccccttagctactgaggcatagggagaggaagttaatttcagagccatacaaaaataagccacaaccagcttcagaattaattcccaatcccccattccaccagggctgggagcccattcccagtgcttcccaaggccctcggggacatctaccgccaacccagctgcttctggcaggggctccaagccccagcgtggggaagggccctggagaagccctcatcctcatgggaaccacactgcagtgggtggggaaggttgttgtcagcaccgcccccggctcctccaggtcctgctggctcctcgggggcagggttccctggacctcccagttctgcgccttggggccagccagtactcagagaggaggaccttctcaaccacgtacagaacacgggttttcatggctgcctttggtttggttttctgagaagataggattggattggattttgcagagggtgagaacttctctgtgcctgctcagaggcgccctagggaagggccatgtttgagttttgctttgtatgttgttttgcaagtatctgcctggtactttgatttaaaataaaaacaattttcata

SEQ ID NO: 364854 - DNA, 2024 bp, Homo sapiens
attagccaggcatggtggcgggcgcctgtagtcccagctactcgggagcctgggtgcagcagagacagaggaagcagagccaggtgccgagcgcgaccctgcaggtgctggacgcggtgcagcaggtcacgaggcccccatgtctgcacccagccaggtccctggggacgttactaactcatgacttgggagctaagcccaagtgtgaaacctctggatcctatggatttggtttcttcccacagttttctgtaggtttagtgtggctggcgccccgttctcctccagttgggaacatgcacccggagcttggggtgcagatcctgatgggtgcctgcctccccccccctgagcccctgtgagtgcacttgaccgggtgcggaggtcctgggcagcctgtccctgagccggcccctcccaggggtctgagatccatgaggtgtgtccctagggcttcagtcctggggcagaggcataaacagaaccagtcactatggaggtcgaggattcccatgtgggcccttcagcttgggctgcttggccacggaacagcccttggctccctggcccccggcccccatgcagcccctgggctggcccttggtggtctctgtccaagggagagcccctgggtgttcaggaggctgccccgggtgggctgctcagggcagctgccgaaggtggagcccagagcctgtctggaagggctgtctgtggctgtcctgagacctggccttggactcacaaggaagaccaggctgaggcccctccaggccagggtcctggggcaggcatctcagggagcagccagcccaggcctcctgccgtctccaacagggcatgtcccgggaggaccctgagtgccagattcccctggacgctcctgctgattctgtcggcagttgaaggcccgtctgaggccccgcaatgcgagggtcctgtgtcccacttcactgctccgaagggaactggctggctgtccgtccagtgagcggcccagaccccacctctgcgccattgtcaccagggccctgtcctggctgccctcacccatgtcaagctactgaggctgtgtcttgtttgttttctctgttacatttttgtttgctgttgtcacagtcagctggtttcggcgtgatgttgaccttttgatgtacatactccgttttaaactcatttccactctagttgagttctgcagcatgcagcggtatgaccctacgggggtcaggagagccctgcggcccccacccaccagctcagaacctgtcactaatacagctgcctgtgaccctgggacccgcaaccttccagctgcttccctttgtcaaagtcacgagtgcgtctgccttgacagccctcgtcaacagaacttccagtgggttgtgggttcatttcctttctttttaagaacagggttgggaccttttctgcccctgccccttagctactgaggcatagggagaggaagttaatttcagagccatacaaaaataagccacaaccagcttcagaattaattcccaatcccccattccaccagggctgggagcccattcccagtgcttcccaaggccctcggggacatctaccgccaacccagctgcttctggcaggggctccaagccccagcgtggggaagggccctggagaagccctcatcctcatgggaaccacactgcagtgggtggggaaggttgttgtcagcaccgcccccggctcctccaggtcctgctggctcctcgggggcagggttccctggacctcccagttctgcgccttggggccagccagtactcagagaggaggaccttctcaaccacgtacagaacacgggttttcatggctgcctttggtttggttttctgagaagataggattggattggattttgcagagggtgagaacttctctgtgcctgctcagaggcgccctagggaagggccatgtttgagttttgctttgtatgttgttttgcaagtatctgcctggtactttgatttaaaataaaaacaattttcata

SEQ ID NO: 364855 - DNA, 4650 bp, Homo sapiens
ccgccgccgccgcagctcccgacgccgccgcccccgccgggtgcctaagcaggcccggcgcggccccaggacttgggaccctggaggactgacgctgctggcctgggcgtccccttccgctgagccatggcgactcccgacgtgagtgtgcacatggaggaggtggtggttgtgacaactccggacactgcagtggacggcagtggtgtggagggggtgaagaccgtgttggtgacgaccaacttggcccctcacgggggcgacctgacggaagataacatggagacagaaaatgcagcggcggcagctgccgcggccttcacagcctcctcccagctcaaggaagccgtgttagtgaagatggctgaagagggggagaacctggaagctgagattgtgtaccccatcacctgtggagacagcagagccaacctcatctggaggaagtttgtgtgtcccggcatcaatgtgaaatgtgttcagtacgacgagcatgtaatcagcccaaaggaatttgtgcacctggccgggaagtccaccctgaaggactggaagagagccatccgcatgaacggcatcatgctcaggaagatcatggactccggggaactggacttctaccagcacgacaaggtctgctccaacacctgccgcagcacaaagattgacctctcaggagcccgtgtgtccctgagcagccccacgtcggccgagtacattcccctcacgcccgccgcagccgacgtgaatgggtctcctgcgaccatcaccatagagacctgtgaagaccctggcgactggaccgcggccattggagatgacacatttaccttctggcgggggctgaaggacgccggcctgctggacgaggtcatccaggagttccaccaggagctggtggagaccatgagaggcctgcagcagcgggtccaggaccctcccctgcagcttcgagatgctgtacttctcaacaacatcgtgcagaacttcggcatgctggacctggtgaagaaggtgctggccagccacaagtgccagatggaccgctcgcgggagcagtacgcccgggacctggcagccctggagcagcagtgtgatgagcatcgtcgccgagccaaggagctgaagcacaagtcccagcacctcagcaacgtgctcatgacgctgacgccggtctccctgccaccgcctgtgaagcggccccggcttgcacgtgccacatcaggaccggccgccatggcctcgcaggtgctcacccagtctgcccagctggcgcttggcccgggcgtgcccgtcccccagctgaccagcgtgccccttggtaaagtggtgtccaccctgccgtccaccgtcctgggcaagggttcccttcaggcgccccccgccagctccccggcctccccgctgctcgggggatacacagtcttggcctcttccggctccacctaccccagcacagtggagatccacccggacgcgtccagcctcacggtcctgagcacggccgccgtgcaggacggtagcacggtgttcaaggtggtcagcccgctgcagctgctcacgttgcctggcctgggccccaccctgcagaacgtggcccaggcctcgcctggctccagcacaattgtgacagtgcccgcaggggctgcccccgggcctgaggagcacacggccaccattgaggtggctgccatggcagaggaccacgagcggaagtagccgacaggagggcgaggcccctgggacggacagggctggctgtctctcagccgcggcagcagggagcgggcagaggccgcagggctggctcgggcaggtgggtcacgtggtctgcagaaccaaagagaggaatcgccaaaacaaatcacgagaagagagaaggggacagaacagcgagagcaacctggaaaaccggtcttcaggtcccacgtttcctcccccttttttcttgggaaatatatttttccatctgttgcttattaatactgtttacacattgggccttgatcaggagccaggtgggcgggggctagggggagcctgggtgcagcagagacagaggaagcagagccaggtgccgagcgcgaccctgcaggtgctggacgcggtgcagcaggtcacgaggcccccatgtctgcacccagccaggtccctggggacgttactaactcatgacttgggagctaagcccaagtgtgaaacctctggatcctatggatttggtttcttcccacagttttctgtaggtttagtgtggctggcgccccgttctcctccagttgggaacatgcacccggagcttggggtgcagatcctgatgggtgcctgcctcccccgcccccagccggtgctcaggtggcccaggggccgcacagacgaggcgtggtccaggcattgttgcacatgtactgagggtgtttttaagtgaattgcttagtaggcttctaggaagagtcagatttatagcattttcaaccaaaataatggtgagtgcctaggcttcccgagttagctctttgggtggcccctgagcccctgtgagtgcacttgaccgggtgcggaggtcctgggcagcctgtccctgagccggcccctcccaggggtctgagatccatgaggtgtgtccctagggcttcagtcctggggcagaggcataaacagaaccagtcactatggaggtcgaggattcccatgtgggcccttcagcttgggctgcttggccacggaacagcccttggctccctggcccccggcccccatgcagcccctgggctggcccttggtggtctctgtccaagggagagcccctgggtgttcaggaggctgccccgggtgggctgctcagggcagctgccgaaggtggagcccagagcctgtctggaagggctgtctgtggctgtcctgagacctggccttggactcacaaggaagaccaggctgaggcccctccaggccagggtcctggggcaggcatctcagggagcagccagcccaggcctcctgccgtctccaacagggcatgtcccgggaggaccctgagtgccagattcccctggacgctcctgctgattctgtcggcagttgaaggcccgtctgaggccccgcaatgcgagggtcctgtgtcccacttcactgctccgaagggaactggctggctgtccgtccagtgagcggcccagaccccacctctgcgccattgtcaccagggccctgtcctggctgccctcacccatgtcaagctactgaggctgtgtcttgtttgttttctctgttacatttttgtttgctgttgtcacagtcagctggtttcggcgtgatgttgaccttttgatgtacatactccgttttaaactcatttccactctagttgagttctgcagcatgcagcggtatgaccctacgggggtcaggagagccctgcggcccccacccaccagctcagaacctgtcactaatacagctgcctgtgaccctgggacccgcaaccttccagctgcttccctttgtcaaagtcacgagtgcgtctgccttgacagccctcgtcaacagaacttccagtgggttgtgggttcatttcctttctttttaagaacagggttgggaccttttctgcccctgccccttagctactgaggcatagggagaggaagttaatttcagagccatacaaaaataagccacaaccagcttcagaattaattcccaatcccccattccaccagggctgggagcccattcccagtgcttcccaaggccctcggggacatctaccgccaacccagctgcttctggcaggggctccaagccccagcgtggggaagggccctggagaagccctcatcctcatgggaaccacactgcagtgggtggggaaggttgttgtcagcaccgcccccggctcctccaggtcctgctggctcctcgggggcagggttccctggacctcccagttctgcgccttggggccagccagtactcagagaggaggaccttctcaaccacgtacagaacacgggttttcatggctgcctttggtttggttttctgagaagataggattggattggattttgcagagggtgagaacttctctgtgcctgctcagaggcgccctagggaagggccatgtttgagttttgctttgtatgttgttttgcaagtatctgcctggtactttgatttaaaataaaaacaattttcataaaaaaaaaaggaaaaagaaaaaagaaaaaaaaagaagaaaaaaataagaagaaaagaaaagcagacgaaaaaaagaaaaagaaaacgaaaaggaaaaaaagaggggggggggggaaaaaaaaaatacggaggggggaggacaagtgggagcaccacgtttatgagaaaggggggaccccccaacaaggacgagacgaactaaaaaaaaacagagacagcagggccagtcaaaaaacagaacgcgtgcgcgcgaaaacaaccccatgcaagtgcgacaccatggagggagaagacaccccacatgggagggagagacaaaacagagagaaccaccaccacacaagagaagcaaagaccgcgcgaacaacaaaaacggtcgagagtagaggggcaccccgaagcatacgagggccgcaacaaatgtgcacgcgataagaagaaaatacg

SEQ ID NO: 364856 - DNA, 4137 bp, Homo sapiens
ccgccgccgccgcagctcccgacgccgccgcccccgccgggtgcctaagcaggcccggcgcggccccaggacttgggaccctggaggactgacgctgctggcctgggcgtccccttccgctgagccatggcgactcccgacgtgagtgtgcacatggaggaggtggtggttgtgacaactccggacactgcagtggacggcagtggtgtggagggggtgaagaccgtgttggtgacgaccaacttggcccctcacgggggcgacctgacggaagataacatggagacagaaaatgcagcggcggcagctgccgcggccttcacagcctcctcccagctcaaggaagccgtgttagtgaagatggctgaagagggggagaacctggaagctgagattgtgtaccccatcacctgtggagacagcagagccaacctcatctggaggaagtttgtgtgtcccggcatcaatgtgaaatgtgttcagtacgacgagcatgtaatcagcccaaaggaatttgtgcacctggccgggaagtccaccctgaaggactggaagagagccatccgcatgaacggcatcatgctcaggaagatcatggactccggggaactggacttctaccagcacgacaaggtctgctccaacacctgccgcagcacaaagattgacctctcaggagcccgtgtgtccctgagcagccccacgtcggccgagtacattcccctcacgcccgccgcagccgacgtgaatgggtctcctgcgaccatcaccatagagacctgtgaagaccctggcgactggaccgcggccattggagatgacacatttaccttctggcgggggctgaaggacgccggcctgctggacgaggtcatccaggagttccaccaggagctggtggagaccatgagaggcctgcagcagcgggtccaggaccctcccctgcagcttcgagatgctgtacttctcaacaacatcgtgcagaacttcggcatgctggacctggtgaagaaggtgctggccagccacaagtgccagatggaccgctcgcgggagcagtacgcccgggacctggcagccctggagcagcagtgtgatgagcatcgtcgccgagccaaggagctgaagcacaagtcccagcacctcagcaacgtgctcatgacgctgacgccggtctccctgccaccgcctgtgaagcggccccggcttgcacgtgccacatcaggaccggccgccatggcctcgcaggtgctcacccagtctgcccagctggcgcttggcccgggcgtgcccgtcccccagctgaccagcgtgccccttggtaaagtggtgtccaccctgccgtccaccgtcctgggcaagggttcccttcaggcgccccccgccagctccccggcctccccgctgctcgggggatacacagtcttggcctcttccggctccacctaccccagcacagtggagatccacccggacgcgtccagcctcacggtcctgagcacggccgccgtgcaggacggtagcacggtgttcaaggtggtcagcccgctgcagctgctcacgttgcctggcctgggccccaccctgcagaacgtggcccaggcctcgcctggctccagcacaattgtgacagtgcccgcaggggctgcccccgggcctgaggagcacacggccaccattgaggtggctgccatggcagaggaccacgagcggaagtagccgacaggagggcgaggcccctgggacggacagggctggctgtctctcagccgcggcagcagggagcgggcagaggccgcagggctggctcgggcaggtgggtcacgtggtctgcagaaccaaagagaggaatcgccaaaacaaatcacgagaagagagaaggggacagaacagcgagagcaacctggaaaaccggtcttcaggtcccacgtttcctcccccttttttcttgggaaatatatttttccatctgttgcttattaatactgtttacacattgggccttgatcaggagccaggtgggcgggggctagggggagcctgggtgcagcagagacagaggaagcagagccaggtgccgagcgcgaccctgcaggtgctggacgcggtgcagcaggtcacgaggcccccatgtctgcacccagccaggtccctggggacgttactaactcatgacttgggagctaagcccaagtgtgaaacctctggatcctatggatttggtttcttcccacagttttctgtaggtttagtgtggctggcgccccgttctcctccagttgggaacatgcacccggagcttggggtgcagatcctgatgggtgcctgcctcccccgcccccagccggtgctcaggtggcccaggggccgcacagacgaggcgtggtccaggcattgttgcacatgtactgagggtgtttttaagtgaattgcttagtaggcttctaggaagagtcagatttatagcattttcaaccaaaataatggtgagtgcctaggcttcccgagttagctctttgggtggcccctgagcccctgtgagtgcacttgaccgggtgcggaggtcctgggcagcctgtccctgagccggcccctcccaggggtctgagatccatgaggtgtgtccctagggcttcagtcctggggcagaggcataaacagaaccagtcactatggaggtcgaggattcccatgtgggcccttcagcttgggctgcttggccacggaacagcccttggctccctggcccccggcccccatgcagcccctgggctggcccttggtggtctctgtccaagggagagcccctgggtgttcaggaggctgccccgggtgggctgctcagggcagctgccgaaggtggagcccagagcctgtctggaagggctgtctgtggctgtcctgagacctggccttggactcacaaggaagaccaggctgaggcccctccaggccagggtcctggggcaggcatctcagggagcagccagcccaggcctcctgccgtctccaacagggcatgtcccgggaggaccctgagtgccagattcccctggacgctcctgctgattctgtcggcagttgaaggcccgtctgaggccccgcaatgcgagggtcctgtgtcccacttcactgctccgaagggaactggctggctgtccgtccagtgagcggcccagaccccacctctgcgccattgtcaccagggccctgtcctggctgccctcacccatgtcaagctactgaggctgtgtcttgtttgttttctctgttacatttttgtttgctgttgtcacagtcagctggtttcggcgtgatgttgaccttttgatgtacatactccgttttaaactcatttccactctagttgagttctgcagcatgcagcggtatgaccctacgggggtcaggagagccctgcggcccccacccaccagctcagaacctgtcactaatacagctgcctgtgaccctgggacccgcaaccttccagctgcttccctttgtcaaagtcacgagtgcgtctgccttgacagccctcgtcaacagaacttccagtgggttgtgggttcatttcctttctttttaagaacagggttgggaccttttctgcccctgccccttagctactgaggcatagggagaggaagttaatttcagagccatacaaaaataagccacaaccagcttcagaattaattcccaatcccccattccaccagggctgggagcccattcccagtgcttcccaaggccctcggggacatctaccgccaacccagctgcttctggcaggggctccaagccccagcgtggggaagggccctggagaagccctcatcctcatgggaaccacactgcagtgggtggggaaggttgttgtcagcaccgcccccggctcctccagtactcagagaggaggaccttctcaaccacgtacagaacacgggttttcatggctgcctttggtttggttttctgagaagataggattggattggattttgcagagggtgagaacttctctgtgcctgctcagaggcgccctagggaagggccatgtttgagttttgctttgtatgttgttttgcaagtatctgcctggtactttgatttaaaataaaaacaattttcata

SEQ ID NO: 364857 - DNA, 147 bp, Homo sapiens
aaaccaaataacttgcctctaagattagtaatacagtgtgatgtcctctttcatcttctgttggaggtcctagctagtgcagtaaggaaagaaaaaagaaataaaagtacacagattggaaaagaagtataacaatttgcatttgac

SEQ ID NO: 364858 - DNA, 343 bp, Homo sapiens
gagccaaggtcatgccattgtactccagcctgggcaacagagtgagaccctgtctcaaaaaaaaaaaaaaaaaaaaaagcagaattgctttctagctctaaaaatgatctttacagtcaggcccaaatctccagttggtttgtattctagaacttgcctcagcaccagagcttgggatggctgggggagttattctccggaaccttatttaggacagcctgtcaccaaagaagccaaccctaacccgaatgaaaattgatgataaatatttagttaaactgcatggatcaccttgaacacctaacaaacatttgcttttactgtaatataggcagtctacaaa

SEQ ID NO: 364859 - DNA, 2378 bp, Homo sapiens
tccccagaagtgggatggctaggttggaactgatgcacgtacagtctgggtagatttgccaagcttcccacctcaggccatgccagcctgggctggcactacattcccaagaaggtccatttccccacagtctcaccaggctgcaggattcttcctgtcaggtaagaagcctgtcttggggcaattgttaagtttgcttttctgttacagagtgagtttgagcgtgttttcaaaagctgaagatcatttacacagcctttcctgcaaacactgtgtttttcctttgcctgtttttcttatcagtttataggttccttgtatatgtgaaggaggttggttccttgtctgtgatgatttgcaaatgtttttccatgcatcttttatttttgtttatgggcttttgccacatggaggctttgtgtttttctgtagttgagtagtctttttgtggcttctggtttggaaagcacatagagacaccaggacttgatgattgtaacagtcaggggcagctacattccttggcctttcactgcggctcacggtctggtatgggccccctgtacgtcctctccccattgtacagaggagaaaactgaggctcagtcacttgcccagagcacaccgccaaagtcacagatagtctctgccactcccctgcctccaccaccgtgggggaatttggcacctgctccctagtgggctctcctccccaggatatgcagtcagatgaaatgtggccaagtcaggattcgtgctgggcccactcccacctgctgcctgcacacctacaggctcagcattcagcaccccattaaagcccagtgggggctctgttcaaacactgcctgagtcctgcagtatggcgtcgtggcagagcatggacagatggccttgcctggtcccggctccaccgcttccaagtccatcacacaggggtccctggaggtttggggtaaggattgagtgtcccagtgcatgtggagcacagagatcagagcttgcacaagagaagcacacacaggtgtctgtgttcttggctgcagcccgcatgggccaaggagttcagatccagtgccccccacctcccctttcctgccgccatgctctgtaggcttggcccctcctgctgtgatcctgatcacagccttccaccctagagaattaatcacagatccaggccaaggttctcccacaaaaacaagcatcatgtcggttacaagagcaagaaactggcctcaacttggcgagcttcaacgggggtccagcagcggcccagagcagcttccaggagtacgtggggggagtgcgtggtgctctgccttgttctgcggctgtctgaacagtctcctgcctctgcactcagttcagcctccaaacactgagtgcccactctgcacaagatactttgttgaggcagtgagataacacaggacccacttcctgcctctaagtctaatgggggagcaggaggagggcaaggacctggcaggatgaggcagagagatgaatggaatggagccgcatctcaggcagttgcaattcctgcaggccaggggagagaccaggaggaaagggcaggttatgccagaatcagggccaggtgtggaggtgtgccccaagtgatcctcccacctctcaagcctcaggagacaggaggatggcttgagccctagaggttgaggctgcagtgagctatgttcatgacactgcactccagccttggcaacagagtgagaccctgtcttcaaaaaacaaaaacaagccccagaatcagtgggtagaagactcggggcaggggagaagaccacccacctgctgctccttcagctggaaaagctggactgccccaggctgggaggaactctgtaaggactcactagaagcttctgaagtgatcaggccactggaggacaagttgagggctgggtcacaaaagtgagttcaggagggcagtgagagtcactcaaggtcacaggtcacgctggcacgcctggcaggcagcctgggagagataggagtcccggctctgcaggtggagacatcgcagagggccttgggcatccaggaggatggcagtaccataggcgacgctgctgcggcctggccgtgtggagcactgcactcctaggaagcaggaaatggctgttcacaggaacccacaggccaccggctccagctttgacctgggaagctgtttcaggcaggtggagaggatgaggtttgaggagcagagggaagagctgctgagggggtgggcgctgggcagtcgggaggcgaaggcaggagatggcttgagccctagaggtcgaggctgcagtgagctatgttcatgacactgcactccagccttggcaacaaagcaagaccctgtctcc

SEQ ID NO: 364860 - DNA, 173 bp, Homo sapiens
gtagggagaaaggagtagatggaaagtgtagctggaatgcaaactagatataatctgggttttattactctcttcatacttacgaataagaaagactattaaaaaagaatgcctaggccaaaaagattgtcactaatacaaacaataagctaaatgactcttactgcaagaaa

SEQ ID NO: 364861 - DNA, 752 bp, Homo sapiens
caaacgcagatcaaagaccccaagacccctccccaacctggacatcagccggccccgcgccaaggcgcgtctagggggcgctcgctgcgcgccagatgtgcgggccgctctcagacacccgctctctgctccctccaacaaggggaggagctagggacagagggaggagagaaaggcgggggtgtaggggggaagcgaaccaggccccgcccagcccgccaggccccggcgggggaagaaggaggcggagagccgagctggcgtaacgagactttactgaaaacagaaaaccgggcgaaccaaggattacaaacaggaatgtggactcgtagcaaaacaaaacaaaacagaacaaaaaagggaggggggaccggtcgaaagaaccgaaggggggagcgagatcgaggaaaggggcggagaatttttttttcttcttcccatttctttaaaaaaccaacacaagaaaacacacacacacacaaccaacgtttgttcccgagtagaaacataaatagggcagaatcgaacactctgttcttctctcttccaaagaaaaaaaaaaaaaagtaaaagtaaaggaaaggcagggtttgaggctgcgccccctcggagcccccttccgcggcgcggtgtaacaaaggggcagccgagacgcgcgggtttgtgcaacacggggcggccgcgcgggggaaagaggcagcgcgaggacgggggggtcatgcgctcgcccccccgggagcagggggtccagc

SEQ ID NO: 364862 - DNA, 578 bp, Homo sapiens
ggccgcgtcgccttgtaatacgactccctatagggcaaaacctttgcacccaatattctgggtctttgtttcttcctcatgctttggcgtaacgagactttactgaaaacagaaaaccgggcgaaccaaggattacaaacaggaatgtggactcgtagcaaaacaaaacaaaacagaacaaaaaagggaggggggaccggtcgaaagaaccgaaggggggagcgagatcgaggaaaggggcggagaatttttttttcttcttcccatttctttaaaaaaccaacacaagaaaacacacacacacacaaccaacgtttgttcccgagtagaaacataaatagggcagaatcgaacactctgttcttctctcttccaaagaaaaaaaaaaaaaagtaaaagtaaaggaaaggcagggtttgaggctgcgccccctcggagcccccttccgcggcgcggtgtaacaaaggggcagccgagacgcgcgggtttgtgcaacacggggcggccgcgcgggggaaagaggcagcgcgaggacgggggggtcatgcgctcgcccccccgggagcagggggtccagc

SEQ ID NO: 364863 - DNA, 661 bp, Homo sapiens
caaacgcagatcaaagaccccaagacccctccccaacctggacatcagccggccccgcgccaaggcgcgtctagggggcgctcgctgcgcgccagatgtgcgggccgctctcagacacccgctctctgctccctccaacaaggggaggagctagggacagagggaggagagaaaggcgggggtgtaggggggaagcgaaccaggccccgcccagcccgccaggccccggcgggggaagaaggaggcggagagccgagctggcgtaacgagactttactgaaaacagaaaaccgggcgaaccaaggattacaaacaggaatgtggactcgtagcaaaacaaaacaaaacagaacaaaaaagggaggggggaccggtcgaaagaaccgaaggggggagcgagatcgaggaaaggggcggagaatttttttttcttcttcccatttctttaaaaaaccaacacaagaaaacacacacacacacaaccaacgtttgttcccgagtagaaacataaatagggcagaatcgaacactctgttcttctctcttccaaagaaaaaaaaaaaaaagtaaaagtaaaggaaaggcagggtttgaggctgcgccccctttttgagcccaaatcggaaggtccggagctcgatttcgataaatcagtggccaa

SEQ ID NO: 364864 - DNA, 411 bp, Homo sapiens
aaaatgacctggggcataactttctattagcagacatcccaagattaagaggggcaaatgaagacatgtgatatctcttaaggtgtcatcctggaactggagtgtgtcacttctgctcacattccactggccaaagccagatatgaccaagcccattatcagtgggatgaggaagagtactccactcagggaaattgttgaattgcgtcccctaaacttcacatgttgaagtccttacccctagtacctcatgatatgaccttgtttggagatagaatctttacagagataatcaacttaaaaagaggttatcaaagtaggcccaatccaacatgactggtgtccttataaaatgaagaaatttggacatagagacacaaagcaagaaaatgtgaagacttaagggggaga

SEQ ID NO: 364865 - DNA, 1431 bp, Homo sapiens
ataagagatttggagggaggaaaggaattggaagaggaagaggagaaggcaggagatcccacacagtttagtcaaatggtggtacacaaccgagctggatggtattttcttctgcgtgtgagttgtgaagactttttatgagatcttaggagaagaggtgggtgtagtactgggagtaagtgtcacaaattagagtaaacaggaatgagtctggtcaaagaacatatttctgacttccgggttcaaattttaattatgccagaatccctgagctgcaaaaagttgccttcttggggagtcaaagcttttaaacaaatgaactggaacctcagcgcccactgagctatgcagaagagtcctagaagccagcgctccatgcttgccactcattgtcctgtgaaacttgggccacaggatattttccacaccagtggaaaagacatgtatcataccgaattgtgccctttgatatcctgccgaaaaggccaagatgcaatagtccgtgtgacagcttatccctgagtcctgtacataaatcgggcataatcagcaaagacgttccttagtgtttatgaatgccgcgagctgttcagggctgggtatttgtgaagccttgttcaattggctggagcatgactgaggttgaaacttcacaggtcagctgtggcctgagcgctagccttcatgtcttgtgggggaggggaagaaaaggtactggtaagagtctccaaagcactgatagtggactgaatctgcttgatgacccaccttgatccagggcccctttactccagtgggagaccttatacatttttagtgtctagagatttaagttgccactcttcttagtgtttgaaaactacctttttaattgcaagagggaatataaacatacaccaacaaaagacagcacaatggaaggcagcccagaggcagtcctgctcattgctgacttcagttcaaaatattttgcatgcctggaattttcaccatctcagaggtttcctctatgagcaattaaagaacagcctatggatcccagagtttccataaaatagttcttatttaacttgcaacatttggtcaggcactctcctgttaaattctttaaatacatctttgttatttaaagaacaaaacaaaacaccgggcactgtggctcatgcctgtaatcccaacactttgggaagcccacgtgggaggatcgcttgaggccaggagtttgagaccagcctaggcagcatagtaagactactgctctctacaaaaaatttaaaaaagaaaaagaatatgtaagtggggctgggcacagtagcttatccctgtcaccgcagcactttgggaggctcaggtgggaggatcacttgaggtcagcagttcagaatcagcctgggcaatacagcctgtacaacagagtgagaccctattttt

SEQ ID NO: 364866 - DNA, 6065 bp, Homo sapiens
cgggcggggaccgggggcgggggcggcggcggcggccgggagagcggaggaggcggagcagggagccgggagcgggctggcccgcgctcctcctgctggctggggattttccagcctgggcgctgacgccgcggacctccctgcgaccgtcgcggaccatgggcgacaaagggacccgagtgttcaagaaggccagtccaaatggaaagctcaccgtctacctgggaaagcgggactttgtggaccacatcgacctcgtggaccctgtggatggtgtggtcctggtggatcctgagtatctcaaagagcggagagtctatgtgacgctgacctgcgccttccgctatggccgggaggacctggatgtcctgggcctgacctttcgcaaggacctgtttgtggccaacgtacagtcgttcccaccggcccccgaggacaagaagcccctgacgcggctgcaggaacgcctcatcaagaagctgggcgagcacgcttaccctttcacctttgagatccctccaaaccttccatgttctgtgacactgcagccggggcccgaagacacggggaaggcttgcggtgtggactatgaagtcaaagccttctgcgcggagaatttggaggagaagatccacaagcggaattctgtgcgtctggtcatccggaaggttcagtatgccccagagaggcctggcccccagcccacagccgagaccaccaggcagttcctcatgtcggacaagcccttgcacctagaagcctctctggataaggagatctattaccatggagaacccatcagcgtcaacgtccacgtcaccaacaacaccaacaagacggtgaagaagatcaagatctcagtgcgccagtatgcagacatctgccttttcaacacagctcagtacaagtgccctgttgccatggaagaggctgatgacactgtggcacccagctcgacgttctgcaaggtctacacactgacccccttcctagccaataaccgagagaagcggggcctcgccttggacgggaagctcaagcacgaagacacgaacttggcctctagcaccctgttgagggaaggtgccaaccgtgagatcctggggatcattgtttcctacaaagtgaaagtgaagctggtggtgtctcggggcggcctgttgggagatcttgcatccagcgacgtggccgtggaactgcccttcaccctaatgcaccccaagcccaaagaggaacccccgcatcgggaagttccagagaacgagacgccagtagataccaatctcatagaacttgacacaaatgatgacgacattgtatttgaggactttgctcgccagagactgaaaggcatgaaggatgacaaggaggaagaggaggatggtaccggctctccacagctcaacaacagatagacgggccggccctgcctccacgtggctccggctccactctcgtgcactcggatgcttactcgtcttcttcctgttctggtttcttttcccctttgttcttccagtttctaccagggggccccgtgggcttccagatcacggtgatgaacctctggcctcaggattggccccacatcaccacgccaacaggaccacagcgcactggctccaccccatctctgccatctccactcccctccttttcatgctgtctcccagaaaagctgccagggctctggccttggaattggacttgagatggggagcagacaggggaggatggggaatgtgggacacggtgtggtgggcatgagggcttggaggggtggggatgagggctcaagacacgagagaagatgtccacggtcccaggtggttaacaaagttctggcagctaaaagatgaccgcgttgaaggccacctccttctggctgggaggggcagaactgtggacagattctcaatgcctttttgaagttctgacccaccaaagaccttctgccttcaccctcctccccacctgatgtccctctgtgtctgatagtgatgttggtgaaagttcgtagaccccaggagtagagaaaagcaactggactgactttcttaccagcagttacctagactgaggcaagctgtgtggactcacccaagtatatttcagtactgtcaggctgtgacatcttagctaccttgtatttcaagtgcatggccctgtctagagatatgcacagagagaaaagcagagggagggagggagggggtcttcagcaagcaccagcccccagcagagtgagctgaagctcctgaggagggttcccgaaggggggcgctcagagatgggggcagggggcggggagaggagagtctgccttatgtcccttccttgtggacttcacatggtcatgcaggaagtgaggatgggtgtccagcgggggccgaggccactagtatcctcctgcttccccctgccattctccagggctggactgaccctatggactgggagagagtgcctgaggccaccatgccacagtcaaagggggtcctatctcagaaggtggcagcatccactgagatatcctcacccgaagggaaggaggctgctgggtagcaaataagccccttcttttcttggtgagttgatgacctccaatagctcccagtgtcatgggtacccagtacgcattagctggtgttgggttgattgagacctggggcagttcctggggcaagaagccagatgggagatgagatagaaagtgttaggagttatcctctttgcctggcctttgagaataacttactgtgtgactttgggcaagttccttccccactctgggcctcagtttctcacttgggaaagcaaggagtttgaccagatgatcacaatgggccttcctagctctggccaccaagaatttgtgaacattagagctcctggtctggtgggtagagccagagctgctgactggtctctctgcctccagaggggatttattggacctcagaggtggcagggccctatggagcaccaactgccctcaaccccaccctgtgcccaagactgggaagggattgatgtcaggctgtggccataggtagcatgagttgcccaaggagggacagagcatatctttgctgaggcttggctgaggggcttatgatagggcttgcagtacctcacagccccctgtgggcacagacaccctgaggtttacccaggcaaatatattgattagcaggacaagggctctctcctcagtttctgctcccttccatctctctcccatacttgtctgaaaagggagacaaaaaatcttatacaagtggcatctcaatcctttccagtccagcacctcctggggcaggcagtgtgacttatttcctgtggtgaaatcacctgtttcacaagcctggcagcgcgacttctgagtctcatgaccactcaacccaagggacccctccccagaccagaaccaagtcagctgggggctgtcgtactaccctgtccagtcttgagggcctagttgcaggtcccccaggcatccagcccctcctagagcttgctgggcaggctgcacctcatctgggcaggcgcagagctgatgaaatgctggagcaatgcatggcaaacatatgccctccagtgtcttctgaaacctttggggctgacacaagatcctttagtgtttgggatgacctctttcctgcagacttcttccccaccagtcttcatcgcttgccctgcttctcacttaggcagatgtcaaccagaatgagatacagccaatttggctttgatgacccagctgagagggaaatttagatacaattcaggaatatcatgcccaaaaatagtggtcccagcaaccaggacacagagggaagacctggatattgtcagtgattggtggagggggacatcttggaccctcctaggcctggtgtcacatctcccatctctcagaccccacagaggccaaggggccttggctctgacccaggttaaagagagccaccagcccccaggctcagggagctgaaaccacccatccgcagaaatctaagggcaaggagaaatagaaattgtctgttccttcccttcaaagtgtaaggcctcttccaggagcaactggagccaccacagcttctcagtgacattgggagggcttcgggcccaggaaaaacccaagccttttgtcctgagagccgagccacagcggatgcagtggcgtcagcatcccagagcggcagcttctctcctgcctgtcactggggactggttgctctccacccatccaggaggaaggggttaggtcccagtcttacactcttatagggtctcatggacataggcctatgcctgttctgatatctataattttttaaactcaaaaggaccaaaacactcctgaaccctcatctatacggcctgcactgggcttggtgtttcctcctggcccaggcagctccatctcttctgccattcctcctggacgaaagtggcaggaccccacctctaccacttccccacagggtcactgcacagcggcttcaaagacacgccctgttgaaggggaaacatcctccccccatcacactccaactcgtcaccccaaaagggaagtcaaagcacaggtccgtggggcctatggtttgtagacactgacacagtggttttcaaaccaggtgctgcggaacccctgatattccacagagctttgtcaggggatgctaaagtgggaagatgggagtggaggcaaaggataggtttccagccctcctcccatttccgccgccaccagaataactctgcttttatctgtcttgcctactgagatttcattttcaagctttctttgaagaagaacttcaaaccaccatctcgaggtttgatcttagaccagccagcacaggttctattcttgctgttcatgttggaatggctccagcgttccagtacaaagtgtctttgtgttggaacttgggtcacagacccaggcacaagcatttatacacacacacacacacacacacacacacacacacacacgtacatagttgatggtttttctagccaacccaccctgaagctctggccaaggtttgatttggacagggacctggtgctcagtggggatgggtcgtgaccctgatattggcccatgaagcatggggagctctggagcaaggaaacaggctcaatcccccactgaggacttgtgtctgcacccctatctggcaccccactttcctggcctaggcccaagggacacagcaggagaagcagtgtgataggagagaggctagggttaaattcatctttacacagcgccggatggatggaaatcttggctcacataaaagacagactcagggaggattttatgacaaaagtccctcctttgagggcaggattcccccaggaatcctggacactttagtgagaactggaccagcccttggcacaaaaccctgcctgccctgtcccccactcccaccccccagggaattctaggtgaaaatgtgaagctcagggcacagcaagcgcatgacacgggtgtattacattcggtccgagtgtgtccttagtttccctgtgtgcaaaatggggctagtccaggctcttcccacctcactgggacaattgcaagggtcataggagaggtgggtatgataggtggtcatatgaggtggtgagtatgagaggtgggtgcctcacaaactcggggtatggtcctgacctgcatggcagatgagcagagcacttgggaacgagcataggaagtgccatcttcccgggcatctctgctcagtgttaaggtctagccacagacactgtgggacctgcctcttcctatggaatgggggcctgcatgggttgtgtcctggggcaggagtgagggatggctgggaagaatctccaggtctgtggcccttgtgttgagtgattattttgtgacactctcattcctggaccacctgccaggtttatctgttatacctgtggcattcttattatgtcagacaagttattatagttcattcaactctaacaaatgaacaaaagaacaataaataggaggccattaaaggtcttttgtggcagag

SEQ ID NO: 364867 - DNA, 5398 bp, Homo sapiens
cgggcggggaccgggggcgggggcggcggcggcggccgggagagcggaggaggcggagcagggagccgggagcgggctggcccgcgctcctcctgctggctggggattttccagcctgggcgctgacgccgcggacctccctgcgaccgtcgcggaccatgggcgacaaagggacccgagtgttcaagaaggccagtccaaatggaaagctcaccgtctacctgggaaagcgggactttgtggaccacatcgacctcgtggaccctgtggatggtgtggtcctggtggatcctgagtatctcaaagagcggagagtctatgtgacgctgacctgcgccttccgctatggccgggaggacctggatgtcctgggcctgacctttcgcaaggacctgtttgtggccaacgtacagtcgttcccaccggcccccgaggacaagaagcccctgacgcggctgcaggaacgcctcatcaagaagctgggcgagcacgcttaccctttcacctttgagatccctccaaaccttccatgttctgtgacactgcagccggggcccgaagacacggggaaggcttgcggtgtggactatgaagtcaaagccttctgcgcggagaatttggaggagaagatccacaagcggaattctgtgcgtctggtcatccggaaggttcagtatgccccagagaggcctggcccccagcccacagccgagaccaccaggcagttcctcatgtcggacaagcccttgcacctagaagcctctctggataaggagatctattaccatggagaacccatcagcgtcaacgtccacgtcaccaacaacaccaacaagacggtgaagaagatcaagatctcagtgcgccagtatgcagacatctgccttttcaacacagctcagtacaagtgccctgttgccatggaagaggctgatgacactgtggcacccagctcgacgttctgcaaggtctacacactgacccccttcctagccaataaccgagagaagcggggcctcgccttggacgggaagctcaagcacgaagacacgaacttggcctctagcaccctgttgagggaaggtgccaaccgtgagatcctggggatcattgtttcctacaaagtgaaagtgaagctggtggtgtctcggggcggcctgttgggagatcttgcatccagcgacgtggccgtggaactgcccttcaccctaatgcaccccaagcccaaagaggaacccccgcatcgggaagttccagagaacgagacgccagtagataccaatctcatagaacttgacacaaatgatgacgacattgtatttgaggactttgctcgccagagactgaaaggcatgaaggatgacaaggaggaagaggaggatggtaccggctctccacagctcaacaacagatagacgggccggccctgcctccacgtggctccggctccactctcgtgcactcggatgcttactcgtcttcttcctgttctggtttcttttcccctttgttcttccagtttctaccagggggccccgtgggcttccagatcacggtgatgaacctctggcctcaggattggccccacatcaccacgccaacaggaccacagcgcactggctccaccccatctctgccatctccactcccctccttttcatgctgtctcccagaaaagctgccagggctctggccttggaattggacttgagatggggagcagacaggggaggatggggaatgtgggacacggtgtggtgggcatgagggcttggaggggtggggatgagggctcaagacacgagagaagatgtccacggtcccaggtggttaacaaagttctggcagctaaaagatgaccgcgttgaaggccacctccttctggctgggaggggcagaactgtggacagattctcaatgcctttttgaagttctgacccaccaaagaccttctgccttcaccctcctccccacctgatgtccctctgtgtctgatagtgatgttggtgaaagttcgtagaccccaggagtagagaaaagcaactggactgactttcttaccagcagttacctagactgaggcaagctgtgtggactcacccaagtatatttcagtactgtcaggctgtgacatcttagctaccttgtatttcaagtgcatggccctgtctagagatatgcacagagagaaaagcagagggagggagggagggggtcttcagcaagcaccagcccccagcagagtgagctgaagctcctgaggagggttcccgaaggggggcgctcagagatgggggcagggggcggggagaggagagtctgccttatgtcccttccttgtggacttcacatggtcatgcaggaagtgaggatgggtgtccagcgggggccgaggccactagtatcctcctgcttccccctgccattctccagggctggactgaccctatggactgggagagatacctcacagccccctgtgggcacagacaccctgaggtttacccaggcaaatatattgattagcaggacaagggctctctcctcagtttctgctcccttccatctctctcccatacttgtctgaaaagggagacaaaaaatcttatacaagtggcatctcaatcctttccagtccagcacctcctggggcaggcagtgtgacttatttcctgtggtgaaatcacctgtttcacaagcctggcagcgcgacttctgagtctcatgaccactcaacccaagggacccctccccagaccagaaccaagtcagctgggggctgtcgtactaccctgtccagtcttgagggcctagttgcaggtcccccaggcatccagcccctcctagagcttgctgggcaggctgcacctcatctgggcaggcgcagagctgatgaaatgctggagcaatgcatggcaaacatatgccctccagtgtcttctgaaacctttggggctgacacaagatcctttagtgtttgggatgacctctttcctgcagacttcttccccaccagtcttcatcgcttgccctgcttctcacttaggcagatgtcaaccagaatgagatacagccaatttggctttgatgacccagctgagagggaaatttagatacaattcaggaatatcatgcccaaaaatagtggtcccagcaaccaggacacagagggaagacctggatattgtcagtgattggtggagggggacatcttggaccctcctaggcctggtgtcacatctcccatctctcagaccccacagaggccaaggggccttggctctgacccaggttaaagagagccaccagcccccaggctcagggagctgaaaccacccatccgcagaaatctaagggcaaggagaaatagaaattgtctgttccttcccttcaaagtgtaaggcctcttccaggagcaactggagccaccacagcttctcagtgacattgggagggcttcgggcccaggaaaaacccaagccttttgtcctgagagccgagccacagcggatgcagtggcgtcagcatcccagagcggcagcttctctcctgcctgtcactggggactggttgctctccacccatccaggaggaaggggttaggtcccagtcttacactcttatagggtctcatggacataggcctatgcctgttctgatatctataattttttaaactcaaaaggaccaaaacactcctgaaccctcatctatacggcctgcactgggcttggtgtttcctcctggcccaggcagctccatctcttctgccattcctcctggacgaaagtggcaggaccccacctctaccacttccccacagggtcactgcacagcggcttcaaagacacgccctgttgaaggggaaacatcctccccccatcacactccaactcgtcaccccaaaagggaagtcaaagcacaggtccgtggggcctatggtttgtagacactgacacagtggttttcaaaccaggtgctgcggaacccctgatattccacagagctttgtcaggggatgctaaagtgggaagatgggagtggaggcaaaggataggtttccagccctcctcccatttccgccgccaccagaataactctgcttttatctgtcttgcctactgagatttcattttcaagctttctttgaagaagaacttcaaaccaccatctcgaggtttgatcttagaccagccagcacaggttctattcttgctgttcatgttggaatggctccagcgttccagtacaaagtgtctttgtgttggaacttgggtcacagacccaggcacaagcatttatacacacacacacacacacacacacacacacacacacacgtacatagttgatggtttttctagccaacccaccctgaagctctggccaaggtttgatttggacagggacctggtgctcagtggggatgggtcgtgaccctgatattggcccatgaagcatggggagctctggagcaaggaaacaggctcaatcccccactgaggacttgtgtctgcacccctatctggcaccccactttcctggcctaggcccaagggacacagcaggagaagcagtgtgataggagagaggctagggttaaattcatctttacacagcgccggatggatggaaatcttggctcacataaaagacagactcagggaggattttatgacaaaagtccctcctttgagggcaggattcccccaggaatcctggacactttagtgagaactggaccagcccttggcacaaaaccctgcctgccctgtcccccactcccaccccccagggaattctaggtgaaaatgtgaagctcagggcacagcaagcgcatgacacgggtgtattacattcggtccgagtgtgtccttagtttccctgtgtgcaaaatggggctagtccaggctcttcccacctcactgggacaattgcaagggtcataggagaggtgggtatgataggtggtcatatgaggtggtgagtatgagaggtgggtgcctcacaaactcggggtatggtcctgacctgcatggcagatgagcagagcacttgggaacgagcataggaagtgccatcttcccgggcatctctgctcagtgttaaggtctagccacagacactgtgggacctgcctcttcctatggaatgggggcctgcatgggttgtgtcctggggcaggagtgagggatggctgggaagaatctccaggtctgtggcccttgtgttgagtgattattttgtgacactctcattcctggaccacctgccaggtttatctgttatacctgtggcattcttattatgtcagacaagttattatagttcattcaactctaacaaatgaacaaaagaacaataaataggaggccattaaaggtcttttgtggcagag

SEQ ID NO: 364868 - DNA, 4773 bp, Homo sapiens
cgggcggggaccgggggcgggggcggcggcggcggccgggagagcggaggaggcggagcagggagccgggagcgggctggcccgcgctcctcctgctggctggggattttccagcctgggcgctgacgccgcggacctccctgcgaccgtcgcggaccatgggcgacaaagggacccgagtgttcaagaaggccagtccaaatggaaagctcaccgtctacctgggaaagcgggactttgtggaccacatcgacctcgtggaccctgtggatggtgtggtcctggtggatcctgagtatctcaaagagcggagagtctatgtgacgctgacctgcgccttccgctatggccgggaggacctggatgtcctgggcctgacctttcgcaaggacctgtttgtggccaacgtacagtcgttcccaccggcccccgaggacaagaagcccctgacgcggctgcaggaacgcctcatcaagaagctgggcgagcacgcttaccctttcacctttgagatccctccaaaccttccatgttctgtgacactgcagccggggcccgaagacacggggaaggcttgcggtgtggactatgaagtcaaagccttctgcgcggagaatttggaggagaagatccacaagcggaattctgtgcgtctggtcatccggaaggttcagtatgccccagagaggcctggcccccagcccacagccgagaccaccaggcagttcctcatgtcggacaagcccttgcacctagaagcctctctggataaggagatctattaccatggagaacccatcagcgtcaacgtccacgtcaccaacaacaccaacaagacggtgaagaagatcaagatctcagtgcgccagtatgcagacatctgccttttcaacacagctcagtacaagtgccctgttgccatggaagaggctgatgacactgtggcacccagctcgacgttctgcaaggtctacacactgacccccttcctagccaataaccgagagaagcggggcctcgccttggacgggaagctcaagcacgaagacacgaacttggcctctagcaccctgttgagggaaggtgccaaccgtgagatcctggggatcattgtttcctacaaagtgaaagtgaagctggtggtgtctcggggcggcctgttgggagatcttgcatccagcgacgtggccgtggaactgcccttcaccctaatgcaccccaagcccaaagaggaacccccgcatcgggaagttccagagaacgagacgccagtagataccaatctcatagaacttgacacaaatgatgacgacattgtatttgaggactttgctcgccagagactgaaaggcatgaaggatgacaaggaggaagaggaggatggtaccggctctccacagctcaacaacagatagacgggccggccctgcctccacgtggctccggctccactctcgtgcactcggatgcttactcgtcttcttcctgttctggtttcttttcccctttgttcttccagtttctaccagggggccccgtgggcttccagatcacggtgatgaacctctggcctcaggattggccccacatcaccacgccaacaggaccacagcgcactggctccaccccatctctgccatctccactcccctccttttcatgctgtctcccagaaaagctgccagggctctggccttggaattggacttgagatggggagcagacaggggaggatggggaatgtgggacacggtgtggtgggcatgagggcttggaggggtggggatgagggctcaagacacgagagaagatgtccacggtcccaggtggttaacaaagttctggcagctaaaagatgaccgcgttgaaggccacctccttctggctgggaggggcagaactgtggacagattctcaatgcctttttgaagttctgacccaccaaagaccttctgccttcaccctcctccccacctgatgtccctctgtgtctgatagtgatgttggtgaaagttcgtagaccccaggagtagagaaaagcaactggactgactttcttaccagcagttacctagactgaggcaagctgtgtggactcacccaagtatatttcagtactgtcaggctgtgacatcttagctaccttgtatttcaagtgcatggccctgtctagagatatgcacagagagaaaagcagagggagggagggagggggtcttcagcaagcaccagcccccagcagagtgagctgaagctcctgaggagggttcccgaaggggggcgctcagagatgggggcagggggcggggagaggagagtctgccttatgtcccttccttgtggacttcacatggtcatgcaggaagtgaggatgggtgtccagcgggggccgaggccactagtatcctcctgcttccccctgccattctccagggctggactgaccctatggactgggagagagtgcctgaggccaccatgccacagtcaaagggggtcctatctcagaaggtggcagcatccactgagatatcctcacccgaagggaaggaggctgctgggtagcaaataagccccttcttttcttggtgagttgatgacctccaatagctcccagtgtcatgggtacccagtacgcattagctggtgttgggttgattgagacctggggcagttcctggggcaagaagccagatgggagatgagatagaaagtgttaggagttatcctctttgcctggcctttgagaataacttactgtgtgactttgggcaagttccttccccactctgggcctcagtttctcacttgggaaagcaaggagtttgaccagatgatcacaatgggccttcctagctctggccaccaagaatttgtgaacattagagctcctggtctggtgggtagagccagagctgctgactggtctctctgcctccagaggggatttattggacctcagaggtggcagggccctatggagcaccaactgccctcaaccccaccctgtgcccaagactgggaagggattgatgtcaggctgtggccataggtagcatgagttgcccaaggagggacagagcatatctttgctgaggcttggctgaggggcttatgatagggcttgcagtacctcacagccccctgtgggcacagacaccctgaggtttacccaggcaaatatattgattagcaggacaagggctctctcctcagtttctgctcccttccatctctctcccatacttgtctgaaaagggagacaaaaaatcttatacaagtggcatctcaatcctttccagtccagcacctcctggggcaggcagtgtgacttatttcctgtggtgaaatcacctgtttcacaagcctggcagcgcgacttctgagtctcatgaccactcaacccaagggacccctccccagaccagaaccaagtcagctgggggctgtcgtactaccctgtccagtcttgagggcctagttgcaggtcccccaggcatccagcccctcctagagcttgctgggcaggctgcacctcatctgggcaggcgcagagctgatgaaatgctggagcaatgcatggcaaacatatgccctccagtgtcttctgaaacctttggggctgacacaagatcctttagtgtttgggatgacctctttcctgcagacttcttccccaccagtcttcatcgcttgccctgcttctcacttaggcagatgtcaaccagaatgagatacagccaatttggctttgatgacccagctgagagggaaatttagatacaattcaggaatatcatgcccaaaaatagtggtcccagcaaccaggacacagagggaagacctggatattgtcagtgattggtggagggggacatcttggaccctcctaggcctggtgtcacatctcccatctctcagaccccacagaggccaaggggccttggctctgacccaggttaaagagagccaccagcccccaggctcagggagctgaaaccacccatccgcagaaatctaagggcaaggagaaatagaaattgtctgttccttcccttcaaagtgtaaggcctcttccaggagcaactggagccaccacagcttctcagtgacattgggagggcttcgggcccaggaaaaacccaagccttttgtcctgagagccgagccacagcggatgcagtggcgtcagcatcccagagcggcagcttctctcctgcctgtcactggggactggttgctctccacccatccaggaggaaggggttaggtcccagtcttacactcttatagggtctcatggacataggcctatgcctgttctgatatctataattttttaaactcaaaaggaccaaaacactcctgaaccctcatctatacggcctgcactgggcttggtgtttcctcctggcccaggcagctccatctcttctgccattcctcctggacgaaagtggcaggaccccacctctaccacttccccacagggtcactgcacagcggcttcaaagacacgccctgttgaaggggaaacatcctccccccatcacactccaactcgtcaccccaaaagggaagtcaaagcacaggtccgtggggcctatggtttgtagacactgacacagtggttttcaaaccaggtgctgcggaacccctttttttcccacattttttggaggggaatcttaaaagggaaaattggcaagggaaggttatggattctttcccatccttcgctccaaaaaaacctcgctcctaaaatacctttgt

SEQ ID NO: 364869 - DNA, 3931 bp, Homo sapiens
cgggcggggaccgggggcgggggcggcggcggcggccgggagagcggaggaggcggagcagggagccgggagcgggctggcccgcgctcctcctgctggctggggattttccagcctgggcgctgacgccgcggacctccctgcgaccgtcgcggaccatgggcgacaaagggacccgagtgttcaagaaggccagtccaaatggaaagctcaccgtctacctgggaaagcgggactttgtggaccacatcgacctcgtggaccctgtggatggtgtggtcctggtggatcctgagtatctcaaagagcggagagtctatgtgacgctgacctgcgccttccgctatggccgggaggacctggatgtcctgggcctgacctttcgcaaggacctgtttgtggccaacgtacagtcgttcccaccggcccccgaggacaagaagcccctgacgcggctgcaggaacgcctcatcaagaagctgggcgagcacgcttaccctttcacctttgagatccctccaaaccttccatgttctgtgacactgcagccggggcccgaagacacggggaaggcttgcggtgtggactatgaagtcaaagccttctgcgcggagaatttggaggagaagatccacaagcggaattctgtgcgtctggtcatccggaaggttcagtatgccccagagaggcctggcccccagcccacagccgagaccaccaggcagttcctcatgtcggacaagcccttgcacctagaagcctctctggataaggagatctattaccatggagaacccatcagcgtcaacgtccacgtcaccaacaacaccaacaagacggtgaagaagatcaagatctcagtgcgccagtatgcagacatctgccttttcaacacagctcagtacaagtgccctgttgccatggaagaggctgatgacactgtggcacccagctcgacgttctgcaaggtctacacactgacccccttcctagccaataaccgagagaagcggggcctcgccttggacgggaagctcaagcacgaagacacgaacttggcctctagcaccctgttgagggaaggtgccaaccgtgagatcctggggatcattgtttcctacaaagtgaaagtgaagctggtggtgtctcggggcggcctgttgggagatcttgcatccagcgacgtggccgtggaactgcccttcaccctaatgcaccccaagcccaaagaggaacccccgcatcgggaagttccagagaacgagacgccagtagataccaatctcatagaacttgacacaaatgatgacgacattgtatttgaggactttgctcgccagagactgaaaggcatgaaggatgacaaggaggaagaggaggatggtaccggctctccacagctcaacaacagatagacgggccggccctgcctccacgtggctccggctccactctcgtgcactcggatgcttactcgtcttcttcctgttctggtttcttttcccctttgttcttccagtttctaccagggggccccgtgggcttccagatcacggtgatgaacctctggcctcaggattggccccacatcaccacgccaacaggaccacagcgcactggctccaccccatctctgccatctccactcccctccttttcatgctgtctcccagaaaagctgccagggctctggccttggaattggacttgagatggggagcagacaggggaggatggggaatgtgggacacggtgtggtgggcatgagggcttggaggggtggggatgagggctcaagacacgagagaagatgtccacggtcccaggtggttaacaaagttctggcagctaaaagatgaccgcgttgaaggccacctccttctggctgggaggggcagaactgtggacagattctcaatgcctttttgaagttctgacccaccaaagaccttctgccttcaccctcctccccacctgatgtccctctgtgtctgatagtgatgttggtgaaagttcgtagaccccaggagtagagaaaagcaactggactgactttcttaccagcagttacctagactgaggcaagctgtgtggactcacccaagtatatttcagtactgtcaggctgtgacatcttagctaccttgtatttcaagtgcatggccctgtctagagatatgcacagagagaaaagcagagggagggagggagggggtcttcagcaagcaccagcccccagcagagtgagctgaagctcctgaggagggttcccgaaggggggcgctcagagatgggggcagggggcggggagaggagagtctgccttatgtcccttccttgtggacttcacatggtcatgcaggaagtgaggatgggtgtccagcgggggccgaggccactagtatcctcctgcttccccctgccattctccagggctggactgaccctatggactgggagagagtgcctgaggccaccatgccacagtcaaagggggtcctatctcagaaggtggcagcatccactgagatatcctcacccgaagggaaggaggctgctgggtagcaaataagccccttcttttcttggtgagttgatgacctccaatagctcccagtgtcatgggtacccagtacgcattagctggtgttgggttgattgagacctggggcagttcctggggcaagaagccagatgggagatgagatagaaagtgttaggagttatcctctttgcctggcctttgagaataacttactgtgtgactttgggcaagttccttccccactctgggcctcagtttctcacttgggaaagcaaggagtttgaccagatgatcacaatgggccttcctagctctggccaccaagaatttgtgaacattagagctcctggtctggtgggtagagccagagctgctgactggtctctctgcctccagaggggatttattggacctcagaggtggcagggccctatggagcaccaactgccctcaaccccaccctgtgcccaagactgggaagggattgatgtcaggctgtggccataggtagcatgagttgcccaaggagggacagagcatatctttgctgaggcttggctgaggggcttatgatagggcttgcagtacctcacagccccctgtgggcacagacaccctgaggtttacccaggcaaatatattgattagcaggacaagggctctctcctcagtttctgctcccttccatctctctcccatacttgtctgaaaagggagacaaaaaatcttatacaagtggcatctcaatcctttccagtccagcacctcctggggcaggcagtgtgacttatttcctgtggtgaaatcacctgtttcacaagcctggcagcgcgacttctgagtctcatgaccactcaacccaagggacccctccccagaccagaaccaagtcagctgggggctgtcgtactaccctgtccagtcttgagggcctagttgcaggtcccccaggcatccagcccctcctagagcttgctgggcaggctgcacctcatctgggcaggcgcagagctgatgaaatgctggagcaatgcatggcaaacatatgccctccagtgtcttctgaaacctttggggctgacacaagatcctttagtgtttgggatgacctctttcctgcagacttcttccccaccagtcttcatcgcttgccctgcttctcacttaggcaggagtgagggatggctgggaagaatctccaggtctgtggcccttgtgttgagtgattattttgtgacactctcattcctggaccacctgccaggtttatctgttatacctgtggcattcttattatgtcagacaagttattatagttcattcaactctaacaaatgaacaaaagaacaataaataggaggccattaaaggtcttttgtggcagag
